United States Patent Application Publication US 2015/0240253 A1 - sequence listing, part 12

SEQ ID NO: 54778 - DNA, 518 bp, Zea Mays
attggatccacacctacaagcctctggaatcaaaccaaatcagatctttttacgttctagcgaaccacttggatccacttcatcgggcgcaggaatgaaaacatgcctgttttcgagttggaagaaacgaatgagcccttatgtggtcttttcggtcctagtctcggtcacggtctcagccaccgcgacacatggctgggctagtttggtgacaagaatagtggaagaaattcaaggaaaaaggaatagcaaaggatttccttctttgtagcttccttccaattttcttgttactaaatcagacataagggcatgtttgggatagcaattttaaatagcaaggggatttagtacgctcggttcaatgccatggcattgttgacagttgatgtggcccgtggactgttctggcaatccattcagtcagctggtcggtggatctatcaaacgatcggtccgtcgatgttgactgcgttaaaattgaatcgatcggtatcgacccgcacgctgaaaaatcg

SEQ ID NO: 54779 - DNA, 686 bp, Zea Mays
cagacatcatggataagaatcctcagaagttcagactgttaatagataacatgtctgcaattgagctgagcaaaaaccctgtgtatcatgacagaagcaaacacattgatacacgatatcactatattcgtgactgcattgacaaaggcatagtggatgtggagcatgtgggaactgaacaccaacttgcagacatcctgacaaagcctttgagccgaatcagacatgtggaactgagatcaagactagggatggttcaagtccaacaagattaagggggtgatagttagtctgaataagagttgtcacatgtaatctagttggaacatttgtgtttacgttttctagtcttagtggcgtagctttgtgggtggtcagtgctgtgcctggcaccacaaactgccttggtgtgtgttgaccccgtcgcactcgcgctgcgcatgcacatgatctgcgtgatctgaaaatggtggagatcatggggcacgatggcgacggggtggagggcttcaagcccgtgtaagcaccgttcattaattcagtgaaaaaacccagaaaagctgcggcacattgcgcatgcaaaatcatctgttctaacctgtgtgtgtccgcgtgctcagccttcttcgctctcgccgctgtcaccgcgcctgtctgcgttcgtcgtcgcgactgtactcgtcgct

SEQ ID NO: 54780 - DNA, 977 bp, Zea Mays
ggagaagaacgaaggaactcccaattcgtgggaaatcaattgatggctcgatgaaggatcaacacccaaagcaacccgcaatgcatcggtggtgaccaagtcagtgtcaacaccagaaatcaaaactctgtcatcaggagcgtcggcctctaaggcgacttcctgacccaaagcttgaactgcggccatgcaaccagaatgcggaggagaagaccctacgtgaacatccatggaagtgtgagagggagaaccaactcggacaccctcgggggctgggtcatagctcgcgctacccatccgagtcggatcatccccggcaacaccctcgggggctgggtaagcgctagcgccacccttgagggccaaactctctataacagccacctctaaggctgaaggagcttcacccacttccatgggagcagaacaatccagaccagcttcctgacccttaagaccgcgctctaaggtcgacgaggcacgggacgctgctcgagataactccagcccggcatcaggcacatcagcacaaatatccatcattccaccatctaccggctctgacaacagatcttctgggaccatatcttcaagagtctgatcaaagtttgctagagacaattcttgcagaccaatgagggcagacaaagctggagaaggaacaccgctgctttctccgctggctatgtagtgtcggctgttcttccgaactagagggatttcatcctcctcttcctcatcttcatcaacaatgcggacggtacacccatgggggtcagctttggccggatcacacccattgggatcagcatcatcaaggtcacacccattggggtcagcttcatctaggtcacacccattggggtcagcttcatctacgtcacacccattggggtcagcttcagcaaaaactggtactggcacttcctcagcagcaggagcagcatcctgatccaagcatgacactcggcgaagaa

SEQ ID NO: 54781 - DNA, 846 bp, Zea Mays
gttttgagggactttaggcttgattcatgctcaaaggagtaagcaactgggcaagatttctgtagcagaattgtagtttgtatgtagggctacaagtttgttatagatggattggcatgttcttgcacagaaatccaaaccctaggcgttgcaactctggctgtcaggcactctgaattgggttttcaatggtatagtacactgaaatatcccaatccactgaacctcgccgccgacgagccatgcgctcggattcgtgccagccgcggtaattcgtgccctgcgcagttggataacgcggagaggtaagaaatattaccccgtggatgaactccggccgctattttactccggccgccgtatccgcttgtgtcacgaccactctggataggctcactggaattatccccccacaaccttacgtcgcgtgcctcagtgctttaaccacgccgccgtgagtcatcttggcccatccggtgatcgcaggtgagcttgccacggtaaatgccaccaatcgcttgcgccagtgcacctctttcttttcgactgccattgcacgagctcaaattcacgagcctccgctcaagggccctataaattgagcacaccctcggctccgttaggtattcaagcatccaatccacccgctcgtgcctccaattactcaccagagagccccaatttgggatttcccccaaatcggtccgaaacaccgcgcatagtgacctcaccgtggctagctcgttctaggtccgttcatgctctctgctctcccgtttcagtgtccttagattctcctgatgctcctcgacccattcaattaagctaaaccacgctagatcatcg

SEQ ID NO: 54782 - DNA, 478 bp, Zea Mays
ttgagggatggtggccccacgtggtggtctcgtgctcagggtgtgatgtgtgtgattagtggcgcgtgtaaagggtagggggctggaacacataaaaatcggcacgttgattaggagacacatgtaggcccgttttcctatcctgccgtgcctaggttattgatgatccatgatcacggtgctctccacggccaggggggacgatgatgtgcatgccgccccaacgggtcacgatgaatttcttgaccctaagggctaaggcatgcagggaccagtcgaacgaaatcaaatgcaaattgtcctaggctggccttagatctgtggttgtattacggtgtacgatctattgatggaacagaaactctgaccgtgtcatacttcacttgactcgctcagagtgtatgtcatgcccctaaacttcagtactcacatgattatctctaaacatgtgttcaggaactgagcaactcgacacaag

SEQ ID NO: 54783 - DNA, 802 bp, Zea Mays
tcattttacactatagagtggttcgagccgtaaagtacgcatcctatattctcttgatactcatcgattgacgaacataaagatgacgaaaattataagcaatgaatctaactgagcatcacaacctcttagaccctctttttcacttggttatgatagttctagcatgttggtacctatcggtgtttatgttccgattgcgcactacagggtaacccatgtagtgcttttgggaggacgacgtcgttgatcgtaactcgatggaagaagcacgtcggaacacaaggggattatacaggtttgggccacctgaatgcttaacaccctacgtcatgtttggtgatgagtattgagtttgcttggggtgcacagattacagatgattcatggttggcgatggataagatctatcggtctaatggtgggcgtgattcgaaagagagggatatcgagagagttttgtaggggtacctccacaaccttatatagacggatgggaaggtatctctttacagatcgtgaaagcttatctaatcacatctgagtctatcttctgtcgttgcgagcgctcctgatcttctggagtccgatcgcttccttctgagtatcttgccattcggttgtgcgcaaaacatgctttcagaacatcacccatccttctgcgacaggtgcgtacagatagcagccttgcgccaatccttcaggattgcttccaactccgagcgtcattctctttgatgaaacctattttgcctgggtgcggcccaatagtatgcttgctggacaacttattgggggccca

SEQ ID NO: 54784 - DNA, 358 bp, Zea Mays
aagacaccggtggtcagctatcgcactaaatggccgaccagttggaaatctgaatggttttatgttaaaattgatgagaaaaaggagaagctagttcagagcccgctgaagctaatcttcgggctgactaggccgcagtgcaacatgacaccgggggacccatgccaagatgttgtatatgagtttagaattgtgtctgaacatattggaactagggatctagtccaggaatacttagccaacagagtatttccaacgctgaggaagtggagtatgccgaagcttgaagaagagaagaaagagagtgaactcgttcggctgccttatcactttaagttcaaaaaacacttcaaggaac

SEQ ID NO: 54785 - DNA, 517 bp, Zea Mays
gaccgagttagtcccgcctgagccacggaaagggagttgtcatcagatggctattgatagtagtgaggcagatccactcaagattatcaaagtggtgtcagaatttccggacgtgttcccgaaggacttaccaggtatgccacctgagcgaaaagttgagtttgccatagagcttcttcctggaaccgcccccatctttaagagagcctacagagtatctggacccgacttggttgaactcaagaagcagatcgatgagctgtcagagaaagattacatcagaccaagcacctcaccttgggccgcccctgtcctattcgtggagaagaaagatggcactaggaggatgtgcatcgattatcgagctctgaatgaggtcacgatcaagaacaagtaccctttacccagaatagaagatctgttcgaccagctgagagaagccagcgtgttctcaaagatagatctgaggtcaggttatcatcagctcaggattcgaccttcagacattccgaagacg

SEQ ID NO: 54786 - DNA, 304 bp, Zea Mays
ccccgcagtcctcgtggtgcctttgggatcggccaagaaataactgcttccaccttgctgctgtccatagccactcctttagctgagatgatgtgccctaaataagcaacggatgtcgcgccgaattcgcatttggactgtttgacaaacaaattgttggtcagcagggtctgtaggacagccttgacatgtatgaggtggtctgaccatgtggcactatagatgaagatgtcatcaaagaatactaggacgaaccggcgaaggaactgacccagtacttcattcatcaacgcctgaaatgtcg

SEQ ID NO: 54787 - DNA, 460 bp, Zea Mays
cggggacgagacgctcgtctattacccgctcgagaagcggagcgtcttctcgcagatcaagggggagatcgggctcaagatctggttcgtcgatgacccgccgccgccccctgcaccggctgcggcggaagagaaggaagctgcggcagcggcggcgggcgaagggaaggatgtcaaggacaaggctccagacgctgccgccgcaccggctgctgaggagaagaagccggagacggcgccctccgaggagaagaaaccagcggaggccaaagcagaggagaagaaacccgagtccgcggagaagaaggacgacaagaagaagtcgccggagaaggggaagaaagacggcgacaagcccaaggaggaaggcaaggctgagaaagacaagaaggacgcggccgcgccgccgccctctccatccaagctggcgccgccgcgctcgccgtccaagaaggacctg

SEQ ID NO: 54788 - DNA, 686 bp, Zea Mays
ccggaaactacccaactttatcacaacgcgcgactattggaccgaccttggtgaggacactttggagcgacacgcttgccatgatccatggtcaactgggagaatcatgaaaggttttagacaacgttaccgtcccgatagaataccgtttttgggaagcaaggaagtgacagctgtagtcagttgagggtaagtgcggagggaccctctacttatgtgcccgactggatctcaaaagctaatagcgagcctcaccaactcatttgttgcgcacgaaaaaaaggacaagacaatgtccgacccgggagaagcccccagggctcaggggctactattgggatatgatccctggtttcaggggaccatcggtaagtgagcacacctagaaaaagccactagcaactggggcccatcaatcagctagaggagacatgtagcgtctaccctagaggaacccaccagcgcacgagcaccgcggcaccaagcctggggttgggcatggtggagtcaaacaatgtgcaagcgtaccaaaggtaaaccagtcgagtggatccctcgcctagcccgagacagagccgtcataagtgtcgtccgcattaatagagcctggcaccgagccatagcggaggtgttggtctccctcccattcataccccgagcccctcgaaccacagagcactcgtgac

SEQ ID NO: 54789 - DNA, 506 bp, Zea Mays
ttatattaattgggttgaagcccaatacttcattgttttgatttttcttccacaccatttgatgatactagtgtttgggccgatgcatgtctagacgctagtatcgacaggccccagcataattactaataatatctaacagtgttgtgtctaatagtatcatgcctaataatgctagtgccagtgtcgtgtcgggtggcctgtttgacattctataacctaggattacaaatagcgccacctcagatagacacaggttcggtggcttcacaaggcacaagcgagcaggtggacagatgtgaccgtgcgagggcgagactcgttgttcggtgcgacggcgaggcttaagaagctacttgtcatattcatatatccttagagcaagtaacagcttccatgagcaaaatcaatccatgagcaaagaacatttgatgaaacgtttttatacaaacaagtccctgctgctcccatgctcacaaggccctgctgctcccatgagcaaaatc

SEQ ID NO: 54790 - DNA, 475 bp, Zea Mays
ggaatgctctcaaagacagccaaaatgaatcgaggaagaagagcccaatttagacttaactccaataggtctacggtgcaccagaccagtccggtggcgcattggaactgctacacaatgaaagcatttttggctttttgtggctaggtgcatcagaccagtctggtggtgcatcggaccacttgcgtagagatgacttctacagggcttcggtggcttggtacacccgacctgttcgatggtgcaccagaccacttatgtagaactgttgtctattgaagagctgaaacgcatggtgcaccggaccagtctggtgttcaccagacctatcaggttcaacaactagttcctactccaatggttactccaatggctagctgacgtggcagtgcacatggcagagtcaggtggttcaccagacctatcaggtacaacaactagttcctactccaatgacctacatatcttggtacaa

SEQ ID NO: 54791 - DNA, 730 bp, Zea Mays
gtaataagcaagtaggaaaatataagtttactacatatgaattagatagtatgtgaggtcttcaaatttatgagtttgtacctgtccatgtccataaccttagaacacaggtagtttcggagagagtaagcacattccatttttgatagcaagaggcctgacgcactaacatttccactaggagtcttgtcaaaaactgggccagagtcaggttgaactatgccacctggcacgatgtgacctagctgcataaaacaagtgaagtatgtgttcatcataatatgtaaatgtcaaatgcacaatatcaagtcacaaatgatatagaagtcaaacttagagactaacaatattaggtgtaaccgattcattagggcaactatcgaaggctcgtcgcacttcctgttgtctgtgaactaagttttccacctgactatgagtcatctacgactccatctaggtgggtgtcatcagtggtttagatacaaattggtcactagagtgtgtggctggttctacacattgaaaaatatgaattagtctatcatatgtttgcatgaagtatacatatatgatgaaaaggacaactgacatagtacagatgcattgcaaggttgtgtcatgtgatcttcaatgtctgaactatatatctcagcccggagtacctcgttaatcaactctccaattgtatcagctagatgatactgcttcctaccaatcttattcagacatt

SEQ ID NO: 54792 - DNA, 470 bp, Zea Mays
ctttagtgcaaactgttcgagataacgtagattatcccggactagagctcttttgaaaataccacttggcttcggaccgtccggccccttctagcagacagtctgtggcactgcaaagacttcgtacatgaactatgtcaaatgcacatttctactacggatcgtccggctataaatcatggaccgttcggttattgtatactggttcaacccaaaggttgagcaaaataatttttagaactaggcgaaccattcaggaccaaaggcagatgttgttcacttgttcttaaatgttgtgaatcaagaacaaggcaacacagttgctaaagattagggaccttcgtcctccgaagcgtcatctcctttcggatataacgatcttcaaacgaaggatgtgaaggacacaccttcatcattcgcaagaataacaattcatagagatgataaatattattcattcacatatcgat

SEQ ID NO: 54793 - DNA, 710 bp, Zea Mays
attacattggattctaccccttgccatgcttactattatctacgtctaatccaccagaagtaagaagagtaaaaaatagccatgaaatcccaggtcacacagaacttgaagctaatttgggcattaatctatccttggtccttggcgccggaagagccttaagtcttgaccactagattattagtgatggaaatttgtgacagaaatatgaagatcttatggagacctgttgtattctccctagtcccgacgacttcttcgtatgagagcaatactatatattgttcaatactagttcaagatggatataagttttgtttcgttctcgccaagcagttatcaccatttgcttagcaaaaacttagcaatccgatgatttttttcccaaaaaatatgaattcttggccttgtttgttctatcccaaagcttctcgttttcttgaacaatgaagagatccaaataatgctttatagaacaaattggtattcaatttgtggagacaactttggcctgttggcaatatacaccagaaataattggttgttgttataagttctctcacaaaattattatacctaaaatgttacataaatcgatacccaattttagagcagtatgaataattgggtaaaccatgggcaatgataaaactagctggactatacatctctgcatataaaaacctctacctggcaacattggcctgatg

SEQ ID NO: 54794 - DNA, 443 bp, Zea Mays
ggcctataaaaggaggaggctaacccccgcacaaagggtttcttcctctcggacacacgacggatgcaaggacgaacctagacgagaagagacccagaaggaccgacgaacgggaggagggccaagaagccggagcagcgccgctatgccaagacttagctaagaccttgtaaccacctccaccacaaataagagacttaggagcctctcctccctctctctcgcccgaactagtataaatcttgcacccaccgcgcacagcgttcgaagcccgtaacacgcataataaatagacttgtcggagtaaggttcgaaacgccgacaaacatgttccaaacctttacaatgagcgtcagaaagtcctaaaagactttgcgaggatggctggcagcgaggtcctggtcgcgcctctcccctcacacaatcgaacaactacaatctcg

SEQ ID NO: 54795 - DNA, 827 bp, Zea Mays
ctcaaagattgacaagcaggctggcatcattgaataggtttatttcttcggggttctttgtgatggttttgcataaacatggatggcaggttaatattaataaaacagaggggctcttctacaagttttccaggccgaaagggtatcgatagttttgagccgtccgatcacagccggtcggctcagattagattctgggtgaagtgaaccggtacgcagtcgcggccattggatcaacgatcaacggtccacgtttaatgaaatgtgatctactctacatcgttcattacccgatcgacgccaggattccccggcagcgaaggggtattccttgccagatcaggaccgttcctccgcggattaacgactgatctactgtcttccccagcccaaagccaaacccgatggcacagcgtcccacgatggcgaacctcgctggagaccggtggttcagccaaaaacgcgaccacgtcggatcttgacagatcccaaacatagctcggtgtatggcaaatcgagtggaccttttaacacgcgagcggacaactacagattccagtttacagagataagcgaaaatcgacggcggcacaactccgtcaagcaattccagtctattagctggatgaacaggcctgattcgacggtgcacggtcggaggaaggagattgtaataccccaacttgtggaatataaaagagagggataaatcattatgtgtactaccttctattcatgagaattattaaggaacagatttaaagtgaataattctctaacaaaacataaataacccctacatcatgctggagtttatttgtttgtgc

SEQ ID NO: 54796 - DNA, 281 bp, Zea Mays
gatagaaaaagcacctccggttgttgtcaattcttggtagatctcttgttttatggtcttctaaaaaacaaaattcggttgctctctctaccgccgaggcggaatatatatcggccggaaattgttgtgctcaattattatggatgaaacaaactttattggattatgggattattttcaagaatgtgcctctcatgtgtgataatgagagtgcggtaaaattggctaccaatctggtccaacactcaaggactaagcatattgatatacggcatcacttc

SEQ ID NO: 54797 - DNA, 521 bp, Zea Mays
gaggagatggcttgagctaattaaggactatgaattggaaattcactatcacctaggcaaggccaatgtagtggcagatgcactacgtcgcaaggcttcctgttattgtcttatgatgaagacttctgacattactttatgccaagaaatgaaaaagttgaacctgtgaatgattcaacatggaactttaaatcacttgaagcttgagtcggttcttctgcaaagaataattgatgcacaaagaagcgatgagggtatgaaacacattcatgagaaaatagaggccggtaaggcaaactgtttcagaaaagatgatcaaggcattgtattgtttaacaaccgcatagttgtgcccaagaatgatgaagttcgccagcaaattttagaagtagcgcatcttagtcgctattctattcatcccggaagcactaagatgtatcatgatctaaagcaacattattggtggaccaagatgaaaatcgaaattgcacgctatgtggcaagatgcgacacttgcaaac

SEQ ID NO: 54798 - DNA, 370 bp, Zea Mays
cacactcaagggcatcagcagagctcccagacttcaaggatgcaacaaagttcttacaggccaccagctccaagaggtagaggaggcagaagcttcggaggaaggttcagctcctagcccaagaggttgttctgtttattctgtagggaggataaaggacatacaacaaggatgtgccaagtcataatccagaagcaaaaagagataactgaagctgaagtaaagtagaatcagccgaagtaggtcctccataccgcttcgtgttattctccatacattcccgagtatgtgggcaaccaatagccgacaacatcagtcgcttcggcaagccactctcaagctgcatgggtcccattaccgccaccaccac

SEQ ID NO: 54799 - DNA, 570 bp, Zea Mays
ccaatctctagggcggttgtcctagggtggggtagctcaaaggaatggccatggacatcgatgttttgctaggggtagaattgtcatagttgctcgatattccatgcgttggcaagcgtcctgccttcctcgtcctttagattgtaggtgcctggtaggagtacctctctgatcataaatgacccctcccattgtcgggacatcttgtgcttgtccttattggtttggactcgtcaaagcacaaggtcccctacttctagagtcctcctccatatgtggcggttgtagttccttcgcaatgtctattggtaacttgccaaccgtaggagcaccacatcatgggccttgtcaagttggtccaacgcctctttgaggcttgactcgttgtcttcattcgcatacaaccttaccctcggggcgtcgtactcgaagtcggtggggaggactacctcggctctataagccatgaagtatggtgtgtacccaattgaatggtttggggtcgtccacaggctccagagaaccgcgatcaattcctgggaccactaccagccgagtcgcttgaggtgg

SEQ ID NO: 54800 - DNA, 521 bp, Zea Mays
gtttccgacttaagccgattgctccgttagtagggcatagtgatcaccctaagtcatgtaagcgtgagcatgtcgcaccgacttaaggcgtttccgacttaagccgattgctccgttagtagggcatagtgatcaccctaagtcatgtaagtgtgagcatgtcgcaccgacttaaggcgtttccgacttaagctgattgctcctttagtagggcatagtgatcaccctaagttgtgttatgctgatttcgagttgagctcactctaagtcagttgttaatcgagaacttgattatcttagaagatgaaagctttattgatgaagaaatcttctgattacagagtacaactcatcctcaagacttttgaggtatcgctaagggtagaattttcttaagtgctcgatgttccatgagttccccactttggtgccgtccatctgagtaagccggtaggatcctggccgtgtgacttctgccacgatgaacggtccttcccaaggtggtgacattttgtgtcatc

SEQ ID NO: 54801 - DNA, 293 bp, Zea Mays
gttttccacgaatgactcgtttataaatgaatgagatgctctagaatcaaacaaaatcgaagcaggtatggagttgatgagatacataccaagtgctacattggtgcatcttgaactaattctgcagtggtgtggtttactctttccttgttctggttctgataacttagaccgttagtgttattacgagcaggtgtactatggtcaaaacgttgattgttgtttttctgaggtgtctaggggttgtgctttgggcaattattgccatagtgcccaattcctccacatttgaa

SEQ ID NO: 54802 - DNA, 656 bp, Zea Mays
ccttaaaataggtacttgttttctatttgaaagggggcgctctcgcaataactcctggcgtcgtctgtagagccatgcatagccgtactctcggtatggcatattgtcctgccagcatgccatacaggtccctgtagcaagtccttcgctgatgtcttcgtagaagtgcatggtggttctcatgggtcagccccatgactcatttgtgtgtggtgcagctctgtctgtcatcacaagtcctacgtcaccagcctacatacgttggcatacgcttggcatggcacatcgtcttatcttccctgatatgtgggccactgttcggactctggggctaaggtccccttgcgaatgaggttggctgactccatggggtagcaagggcacatatgtggctgtatgtggaggtgtccggtcgtgtttgatagcaacctcctgacgctccttcagtatgcggcatgtacgtccggaagtgggttggtgatgacgcatcttatcgtagttgtcgcgggtcaacagcatcgggtcaggtcctctgcctcgtagggttggctggtttggagttggttgtctgcccagcctcatagggttgctcgacggggagttggtcgaccgctccgcctcgtagggttgctcgacggggagtttgtcggctgctc

SEQ ID NO: 54803 - DNA, 334 bp, Zea Mays
gatttctgagactcagactactggtgcagggacggcgggttgatttcttttaacctcagggtctctttagcaagaatccagaaccgaaggggtatcaggtacttcctgccgttggatctaggtttagcgcgtgggattagatctccacccctatgaaacaggataccatggtagccgcgagatcctgcatcaatggtttggaccctatacaatcgctggaatcgtacacacaggttcatagatgaacggtcagggttcccagttaatcctagcccttcaaaaccgatcctgcggcgacagcgtcatctccttcccccaggcgggcatgcccggc

SEQ ID NO: 54804 - DNA, 849 bp, Zea Mays
aattgcttctgaccagattgctttctgggtctgtcgcctctcgtctcggactcgctccactcctgctcggtttaacccctcagccccagtcaccactaccactccaccttcctcaactacgtcatctttcgacaatcctgagcctaccaccacaacacctgctacgcttatagcctccaccacacctgcttccaccgctcccactccttctaccactccaccagctccaacaccacatttctgagagtgggacaagaatgaggtgcgaccacttgttgaggaccctcgcctgtttgaccttcaaagggccactgttgccagagttcgtcggtttcatcatgtaccagtggtgtcttggctaccagctcagcaagatcctgccgcagctcctctcttcagtacctagacccaggagtctttctaccaagcttagctaatagcgcggattgctttgagagctcatcgtcgccttgatctgacgcctttcgccagcagtcggttcagagattgagggccacataacctatttgccaggtctatactctctgttgacctttggtggccggtacattaaggagtgggtcagagtgttctatgccacagtttggattgaccctaataactagtggatgtggttccttcagcacacaggtgttccagtgcctcaagtacattcagctccaccactaactctatagactttcgtagtgccagcgatccagtctgaacctcagctccactcctttggtccgaccttctctctgctctgggtggtcaccctggacttgtcgacttaggtcgtcggagctatcagtgcctagcctccagtgccaccagtttcagtagttg

SEQ ID NO: 54805 - DNA, 804 bp, Zea Mays
cggagattgtgccagagggagagcctagcgtcgggcgaggcgaagatttgcactgagggcgggtctgcttctcctatcttattagatgtcacgtcgggggtatggcaggcggcgtgcatgcacagtggcgagggcgtaatcatgttgttgcacctagatatgaccgttgtcttgtagacactatgctattgtgcctttgcgtggagtggttgtgtgcattaaatgcgagtgtcccccgctggactttgggcgtccctgtcctttctgcctaagaccagctcgggcgagacgaacagagcggtggtaggacgaggtgacttcgggcgaggcgaagatttgccgaagatcagagaccctcgaggaggggtttcagtgtgtggatggtagatatctgtggtgggccttaggtaaggaggtggcttagcctcttaccttcggggttatgccttaacctctcctgagtgcgtttttatagggataatctgggtacccctaattatcacacccgacacaagctaacccatgcattatggtaataggcaataccactttcacaccacaatggtgcatggatggccctcaagagcctccgatggcctcatatgtcccccacatcttgatggccttgattcccctaagggcctagggcattccgatggctctgagacatctaatatgttcctatagtttattaggttttttatttaataaaatataggtcatgtacatattatcctcaccaaaacctaggacacatataaaatactttcacttgttagtcgtttgatatactggtgcttttat

SEQ ID NO: 54806 - DNA, 625 bp, Zea Mays
gctctgggtgaaattgggagctgggatcggggctatagggccgtaagaggttgtgttttcattgtgcgcaatcaatttgggcgaagatggagagggcagtgcgaatttgacttcgactgagcttcactggtggagatgaaagcacctcgccgtggtccatggtgccatttatagccacggcgagtcggctaatgatcggcggccgcgtatagcatggtaagcgcatgactaccacgtagaggaaatgcacagtaagggagatcgaagtatggcgacagcgcggcggacaacgctgagtcacggcgaccgccgatgaggtaactccggccacatgcggctgggttcgcagagtcgtgccacgtacgagttacccttttcccggcgttatccatccgatcttgcacacgaatcgggacgacgatcaacgacggtgagcttagctggcgttctgattcacccagaacactgtaccatggcacaccttcatcagtcacctgaaccgaccacctccctcccatattatctccggatttttgttaataacaaggctgtcttccttaacataatatgttcactatacatcaatctacaatcttactataggattcttggatcaacaccgaac

SEQ ID NO: 54807 - DNA, 464 bp, Zea Mays
cgtaacgttagatggtgatctgatggccaggataggataccggttcataaaaggttataacctaatccgaaccatcgaaccagatcggacggctcaaacacaatcttacccctttgctgctgaattctttttaaagaaaccctgtgtttctttcaaattagcctaccgaccgagatagtttaagagttattcaaaatagatcctaacatttacacaaaagaccctgatctcctacaaaattgtacctgcggtccagaaggaaaacatgatagttataaagtaattctgaaattgatttttgagtataaaaggaattcaaaaatcttagaaaatccatatcttctttgttttagctccgaattaattcattccagttgcattcgacccatattaatattttttatcatctagtaactttattttgttatgaaacttagattaaaaattatttacttagtttttta

SEQ ID NO: 54808 - DNA, 471 bp, Zea Mays
ctcttcctcagggtcgttgttgcagtagttgatagcttcggtaactctgccacaactggagggctcagcagctttggctgttcttctgttgttttccttgtttccgactcttctaccgcattagcactagctttggctggcatggcaggaactattttcgtagctttggctggcatggcagggacaacttcggcactctcaataaacttcacctcctctatcgtgggcactatagatgtctgttctaaagattgtagcttcggcctacgggtcagaaccttggctctctttggcttcggtgcactagaagaggtcgaagtggcaatttttcttttccctccttgctttcgagcaggaaaacaataattaggataaacaaacccgatcacatcaaaaaccctatttagtctccttttttctcgagcaccgaaggcaacagtcatggcctcgtcctctgccttcgtgtaggct

SEQ ID NO: 54809 - DNA, 545 bp, Zea Mays
ggattctatagtattttgtctctatggattgcagttgtaatagtccgaacaactacaacaattgcagctgcaggactcatttctctcttgtccacatcatcataaatctgatgtgatatttcttccaacatcactttattatacttactctcacatacctctcctcacataccgttgtgccattgcccattggtggaaggaccagtcttgttatactagtagctaattcatacttggataggtgaaaccttcaataaaatggcttgacaaaaaaagacaacctcacttacaaatcgccatggatagagcatgaacagagctcctctctgtccatatccatatcgcgagacaaaaactaatactaataaataacagactaaaatactgacactgatactaacgggtactaataaattaaccttatacgatctcgagcacctctcatatcctatccctaacaaactttagtcaataaacagtagtacaaaacatggatttgcacaaccatatgcactcgacaaagccttgatttcgtcccaaaatat

SEQ ID NO: 54810 - DNA, 360 bp, Zea Mays
cccttcgggagtactacaaaaaattcctcctcctaaagtcacaactaccctcagtcgatgataacatagctatccactatgcaatcagtggtcttcgtgtcgacgtcctatacagtcacttcataagagacccacccaaaaacttgcaaaaattatatcagttattcaaaaagtacattcagtctgaagagctccacaaaaaaattgagtcacaacaaaagcccatggacactccgtagtccagcaggacatgggtcaggcctacgcaatcaaactcaggatgacaaaaccgcaaccagtcccaagtgcacaacattgccaatcagcaacgtacagactggtgacaccgctcgtcgtcac

SEQ ID NO: 54811 - DNA, 392 bp, Zea Mays
ggattatgacctagaggtacattatcacccaggaaaagccaatgtggtagcagatgccctaagtcggaaattgcaatgcaactgtgttatgatggattctcgcattaacaccttgtgtgatgagttgagcaaaatgaacattgaagtgattccttctggtgctttgtctcacatttccgttgagccagctttgcaagaccagatcatcatggcccagctcagtgacaagggagtgcaaattattaaggagaacctccatcagaagatcgagaagtataaatgtttccgccaagatggaaagggtatattgtggtttgaaagcagattggtggttcctaagaataaggatctcaagaagaaaatcttggatgaggcccatctctccaaattct

SEQ ID NO: 54812 - DNA, 863 bp, Zea Mays
atgattaatttggtaggcaacgatatgaccaatgtaacttcataatattaatttagcgagtcatcttaaaataaatctcactctctttgattgtcttctaataccatatagcttgtactaacgctacgatcctgaagattagaggggagaggtcgacggcgacaacacgagtgagggggagagggcggggtagggacgccacagaggatggaggtggagactggggtagtagggtcacggggagggagagggagagagatgatccaaagaatattgtccattgcatttgaatgagtaaggaaggtgtggttatccaatgatattaactgttgattttgatgatgtgttaagtcttgctgtaatttgtttaatagatttagtggaggtgaattggttaggtgggttttgtaaagtttaatctgatggattatataatggtataaatttgagagagagaatccttgaatgtcatgcctccatctctatggtatatatcaacatatcatagatgtgtgcatcaatacattctagtgttgctttatcctctcttaaatcagcatctctcctctccttgcatacttccagcaaacaaattatcaattagatttaatatgagcataacatatattttatgtaattaaatcaaattaacttttggggcctcttgtggcctatgtgatggtggtagccctcccagccctttgggacgtctcgagagctcatggctctagggacgtctcgaggctgtgatatttgggacaccagggtccttagacatcctctatgtgttcattgagacatcgggggccctcagggctctagagatgtcggaaaccctttgagtcgttacggttctcggggca

SEQ ID NO: 54813 - DNA, 332 bp, Zea Mays
tgagattattttcaacaatatcctaatttgatactccctatgtcccaaaatagtagtcatcttagagtgttaataaattcatacaatatttgatgcatgtgtatatatatgtctaaattcattgttttccatttgaacatggatcggagtcatggacacaagaacaaactatatattgggatagagggagtattattttcaacaatatcctatatgaccttgtttgggagccaggtgaaccgaggggtttgagaacttttttggtcgcatagggattgaaggggactattcaattttgactagaaagatatttaatctttccaatccctctc

SEQ ID NO: 54814 - DNA, 386 bp, Zea Mays
gcacattagatggtatgacgccatttcgtctactgtgcattgtgcttctgcatagtggtagcgcaatgcatagagaataatgcatagagaataatgctaccatttcgtctactgtgcattgtgcttttgcatagtggtagtgcaccatccaacaatccacattagacctctccagcggtatgcagatgctctcaggagctctttatgcacttgttggatcctgtgttatggtccgatgttgcctcattggaccttctgatgatcggtctacacgactatattatttcttttcactctatgtgtgggcccctcgtttaagttctatttgtctttgcaattctttgccaaaggtgatctcactctctctcataatgccaccacacttc

SEQ ID NO: 54815 - DNA, 366 bp, Zea Mays
caaacatccgataggacacgggttaaacattagtcccagtaaccaaacacccctttaggcttattgagccatcaaacgtcttcaagtttgaccaattttatatagataaatgggacattgcgtcattgcccacaagtatatttgcgggtcgaaaggctcgattattattgtatggtgtggcgccatgcagtgtaagtatctgtgcatctggcgattgacactccatactgccagtaatctgatgaacggacaatttaagagcatgtttaatagaactgttataggctccggtttctctaacgcaactactattcatatattgttcacgtattctttatagaatctcttttctctatttctctctct

SEQ ID NO: 54816 - DNA, 326 bp, Zea Mays
ggcagaccttcaataaaatccagagacagcacttgccaggcatgagcagggacggcgaggggttgtagaaggcctgggtatcttgagcgatctggcttggcacgggcacagatatcacacgcagccacaaactgacggatagcagttttcatagttggccaagcgaacaactgcttaatccggcgatatgtcacaggaaacccagaatgtccaccgatggcactgttgtgtaatgacgccattactttgttatgaagatcaatattgtgtcccaaccatatgcggcccttatatttgattaaaccatccgtcaactgataatgtcc

SEQ ID NO: 54817 - DNA, 669 bp, Zea Mays
tacgaagacctatcgtgagaagctagaagaggatacatgggctggcgtggaccgagcgcattccttgtttgttgaggcttatcatgacatgggcgctgtaacggtgcccttcgataggtctagggggagctaggcacccgcttcctctattggttgcaggaggaactggcgagtctcctggacattatgactaggttgatggcctactcctcccatgttacctgtgggggcgctatgaacgctttatcccctaaaggctgcggacactttgagagttttgaagagagcaatgtggacttcgaccgagaggttttttaagtcgaagacctatctatgaagcaacctgccgacaccttgtttgactggatgtggggttcgcatgggcgtgccgtggtcagggagaggactagtcgggctatggaacaggaaatgttgttattattagtgaatcaggctcagtccgactgcgtccttgggtgactgtctaacgtgttgatttttgaattaggccctgagggatgaggaggtcaaagacgttaactcactttgtacgttggggactggcactgccgatgtcaaatctgatgatgcggaaacttcacaccagtcagttggtgaagaacaacgcgatgtgcaggtgtaaaaaaggaggtgataatacacttcctg

SEQ ID NO: 54818 - DNA, 341 bp, Zea Mays
cgttctacgagaggggacgagtctcgcctacctactgttgtacgtcgacgacatcatcctcaccgcctcatcgtcggccctcctacaacgcattatgactcggttgagctctgagtttgccatgacggatcttggcgccctccaccacttcctcggcatcgctgtcacgcgctcctccgatggtctcttcctctcccagcgacagtacgcggtcgagcttcttcagcgtgcaggcatggctgagtgtcatccgacatcgacacctgttgacactcacgccaagctatccgcgaccgacggggatctactgtcagagaaggatgcatcagagtacaggagct

SEQ ID NO: 54819 - DNA, 848 bp, Zea Mays
ggtcaatatatcacagaaattatcgtagagcaataccttttctttacctttttatgctcccttatgggagaagccattgttagaggcccctccttgttctataaaaggagaggtcggcctcatgaagacagacaaggcaatgaacacatagaaacttgggaacttctccctctctcactcatttttaaccccatactacaaacaatcaggtgtcgatagcgcaagccaccgaagactagagtagggacattcaacctgaaccagtataacccttgtgtccaccgagcacaccatccgagcctaaaacacacatacacaaattcactcgtcagtgcttgttcgaaacactaacacaacccataacggctagttggtcactccctttaatatattggagtgtgaccacttatggaggctctcttgttatcttggggcatcaaatacatgttgggagccatgtttatccctctattataggattgtaagtgagagagtggttgagtgaccctagtgcaacacatcgagagagtaatcgagtgtcactagatggtcgagttgcaaatggttgtacttgttacacttggaggttgccacttcataaatgtcttggtggttatggatcctttgaatctcacataaaggttgtccagtactcccaatgggacatgttcagggctcttgtgctcgtccccactgaaggaaggcgaaaagaaactctagctgatccgaggcttggagagtgccttgtcgattgactaactcaagtctagttctcacattagagcctaccttatgggctaattcaatattgggatctagcaagagcaacaataattcttggactcaac

SEQ ID NO: 54820 - DNA, 350 bp, Zea Mays
aaaagagatgatgagcgacaagactcgagaatcaaagagatatgagcgtgtttggatgttggcgctagcttgtccaacctatttgcgtctggtagcgtgttcttttggatcaacactaaataatagcatgcccacgcaagatgagaaaaacactggcacacagctacacttagccaaccaaatccttcaccaatgcttggctagccagtacattggctgggtaagtggatgatagcttccaaacacacataaagccatatatcatattgtgacaaggttattgatatgggctacctcataagcaagaagacggtgaacatgctaatgcaaagtgcagtactagaaaaaag

SEQ ID NO: 54821 - DNA, 688 bp, Zea Mays
gtggttcttaatgatttaggggcgggtaagttcgcacagtctggttctctgattccgaactcttcacgttactaggtattcacaacttccttgcatctgcagagttggaactcgaggctttgagtgtttatctatgtgtggatcaggccagagggttcattcacgcctgtggtaggaactgtgacttgtgtctccttgacattccagaccgcgtccatgaggccatggagtttgggttcgctggagcgtggttgtgcctttcgccatcacgcagctacacttcggtggtgacctctgtagcactattggtttgccgagggttcaatggaggaagatctagatcgcctgatagatgactttgatgccatcacgaatgttgtgcttggggacgtgtccgtggaagagaattcatagcctctcgtagctttgcttacgatcccttcggtctcgacacttcgttatcatggcatttttgcattgttgacgtgtgtggattttgggtcccctagatgcaggcttgtgccaggttgctttaagagggcgcttttcgtgcggctttcacccatgcaccacactcgtgcgaggcgagccctcgagtctccactcgatgcagagatctgtctggtgggtcgtctcatctttttagtttactctcccccgtatatccccttcatagagatgaggggca

SEQ ID NO: 54822 - DNA, 429 bp, Zea Mays
aggctcgcaacatgtcttcgaggatttgattcactctttctatttgaccatctgtctgaggatggtatgctgagcttcttattacctgggttccaagtgacctttgtagctgctcccaaaagcgtgccacaaacagtgctcctctgtcagacacaatggtcttcggaattccatgcaaacgcactatttgatcaacatagatttctgcatatttctctgtcttgtgggtggtatgcactggcaagaaatgagcggtcttggtcaacctatccacaatgacccaaattgaatcgtggtgtcgggaggtattgggcaatcctaggataaaatccatgcaaatatcctcccatttccaagatggtatgggaaggggctgtaaggtgcctgctaccttcaaatgactggccttgactctctagcaagtgtcac

SEQ ID NO: 54823 - DNA, 978 bp, Zea Mays
tggaaacagaaaagcacggtgaccgggtcactgatccctcctatctctttggcctcgccccatgtatgcgaagcaaggacgctgccccagggtcatccagcaattgcgcctgcgcgcgtgttggggaagcctagcatgcagcgagagaggagatccaccgttggcaggcacacagtcatggccgccatggatgttaacccggaaatctcggagggaggttactaggggagataaaatctgttccgtgacgaccttaaagcggagcgccgagtcttcacatgttctccctctcgtcatatgataccgccacggctaaaaccacgaaagatcggaccactcgcactgacgacggcgatcgccttctgtgacgatgttctggtctctgcgcgttgttgtgggagtgcgtcgggaccttgggtggccgcccgtgtcctcaggacggaccaagcgcctctggtgctcgcgtgatttctcgtcggtcgatggggagggggccgtgccgcgcatcgtcgtagaccgcaccgcgtccatcggcattgttggtgagaactcttcgccccagttcgtttttgcctgcgcatagagtagagtttggccgatgggagcttcgggcgcgggcagatgggatttgggtgcgcggcaatggccgccgccgtagttcggcgatcggaggaaaagtgaggcaatcctggccgtcgatccattgttgggcgctcgtgatcagtttttagtttggtcgggcgtggtgtggcgttgatcggggatccaacggttagatatggatcgggcagaagttaaatcacggccggtcgatctcgatcagacggctcggggttatagggaaattgtgtcgtcgactgatgtaatctggatcgtgcgttttagacctgacggcccatccacgtcaatacccatttggccatgccttaatgcaaaagagacctcccttttgtccataatcaacctcagtaccccttt

SEQ ID NO: 54824 - DNA, 749 bp, Zea Mays
aaaatctatgcgaagctcttcttctctctcccaagtagcttcatcttctccgtggtgactccattgtactttgcacatctttatcaccttatttcttgtaactcgagtcaaagtgtccagaatcttgatagggtactcaacataagtcaggttatcttgaacactaaggtcttccattggtagctgctcctcaggtaccctaaggcacttctttagttgtgacacgtggaatacattatgcacatcagatagattatcaggtagctcgagttgataggccatctcttcaactcgcctaaaaactctgaacagtccaataaagcgaggggacaatttgcccttgcctttaaatctcctcattccacgaagtggtgacaccttgaggtacacatgatcaccttcctcaaacttcagtggtcttcttctattatcagcgtagctcttttgcctggtctgggctaccctcaagttctctgttattatacaaacttgttcttctgcctcttgaataagtttaggtccaaagaactggcttcctctagtctgatcccaatatagaggagccctgcacttcctgccatatagagtctcaaacggtaacatcttcagactggcttagtaattattattatatgagaactcagcataaggttgactcttgtcccaactactaccatgctgaagggtacaagctctcaacatgtcttccaatacttgattagtcctttcagtctgtccatcagtctgag

SEQ ID NO: 54825 - DNA, 424 bp, Zea Mays
gaaattcttttggcaaaacattgtttgccgcttcggagtaccgtccgaactaacagtcgacaacggcaagcagtttgacagccaagacttcaaggatttttgcttctccattggcaccaaacttgccttcgcctcagtatatcacccacagtccaacggagttgtggaatgcgccaatggaaaaaattttcacagctgtcaaaaagatgctcctcgacgaaaaaagggcaagtgggccgatttgctacctgaggcaatttgggcgctaaacacgactgagtgcagggcaactgggttcacccctttccgccttctatacggatcggaggccatgactccacaagaaataaaacatgggtccccgcgaacagtttcgtcagccgtccccgacgtcgacgaacccacttcgaaggatctcatcgat

SEQ ID NO: 54826 - DNA, 424 bp, Zea Mays
cttgggtattatagtattgctttgaggcatgttacaactggtgttcttgtatttgtacgaggggactcccttttatacttcaagagatggtccttacttaagagagagagttcttcaactaacgccctatgttgtagtgcgcggtgggcccctcttggtcagtcttggggcatgcttgtgtgcggcatagctccttctaatgggtcgtgtgctgccgtgctcttggcatagcgttctgtctcgtccgtccggcgtgcgagtccctgtagctcgctctaagcctgtgctagcatacctgatgggtcccgcagaacgtgttctcggtaaggttaaggttaaggttcgtgttcagtacaacttcatcttccatcaacgtccttacgtcaccctccaacatgtgcgagcatgcactaggtatgtcgtc

SEQ ID NO: 54827 - DNA, 657 bp, Zea Mays
gtaggtcgttagtaccgccatgctaataaggttcgacagaagtcgagtgatttcttgtcactcgcgagaagttatgttttatgaaagatttttgagaaggaaagaaaagaaaaatggtgaccgggcggagattgaggagtagctccgcctgagtcgtttaaggcccggtcgttgttggccgtgtcgatcgagtttgaacagtagtaatcacatgccggtagtaggaggtagtcgaacccagtaaacctattcagtgggagtaatgagcagacatatggaggcaccacaagagaaacactggctaggagtgaaaaggatcttgaggtacctagctggaaccatcggctatggttgcagatacatcaaaggttcaggtctgaacctgaacttgacaggctacagtgacagcgaccatgcagatgatcaaggtgacagaaagagtactacaggtgtagtatatttccttgggcaaaacctgatcacttgggtgtcacagaagcaaaaggttgtggctctgtcatcctgtgaagctgaatacatagcagcagcaacagcttgtcaaggggtctggttgagtagactgattggtgatctcacaggaactcaagtgtgcaagttcagactcatgatagataacaagtcagctattgatctaat

SEQ ID NO: 54828 - DNA, 1000 bp, Zea Mays
atagtcattgcactcgtgaccctccaacgtccctccaggagttgtatcaaatcttcgagaaatatgcaaggttagaagacctgcactatagaaaggttgaggcacaacgcaagctacgtgagccctcacatgcaacaagatccatatcatggccctaaagtcagtgtcctctgccccaaatcactaggagcaaatccacaacattaactattagcagcagctcgaggactccctcatgcctataatcagaaccaacaaccaacaaaaggcggtagaggtcctagaggtaggggcacgtccacggtcccatgcgcgagtgcaagccatactacgttttcacgtcaaagactctgaccactccacaaaagattgtcgcaccaccaaggaggccaaagaaagaatggaagccaaaaggccagcgagggcacatcttaagcaagtagcgaagataacaacccatacctttccaacaacactatcttgaaatgtaccagctctaccaacagtaccaacaaaattatcaatcccctagcaatccaccaagaaagaatgcaactcccatcaccatcctagctaatccctccccaaagacaactatccccaccacccaaggaagaagatgcctaccctcagcctcaggttcatggtataatcaacataatcaggggaggctccaacatagactttaacaacaaaagcaacaaaaaatactaccgaagtctaaaattggctcatcatcaaacaaagtggacgcacgtctctctggcatttgatgcaagcaacgtcaacctttgtaacgccatgcacatagacacaatggtcatcaactgtaacatagcaggatggaagatacacaaggccctcatagacaacggcagccaggcagacataatattttgcatcctttcgacaggatgggcatcaaccccaacctactacagctagttggcaatccccttgttcagattcagaggcaaggctatgctccccttggcaaaat

SEQ ID NO: 54829 - DNA, 624 bp, Zea Mays
tttcgaagaccaaccttggtgccccaaacctgagatcagcaggtagcactgcctctgaaccatagaccatgaagaaaggagtatttccatgcagagcccgactagattgagttcttaagctccaaaccacatacggcaactctctgatccattttcccgcaaacttttcattcttgtcaaagactttcttccttagtgcttccagtatcattccattagccatttctacctgatcgttagcccttggatgtgctactgatgcatatttaatctggatgcttcgttgttcgcagaaatcaaagaattcagagctagtgaagttgaatgctaggtcggttatgatgctattcggtatcccaaacctgaatattatatcttgtatgaactccactgccttggctgaagtcagagaagtgatggttttgtattctattcatttggtgaatttgtcaatggcgaccaacacgtgagtgtatcctccctgagctttcatgaagggtccaatcatgtccaatccccagcatgcaaatggccatgttacgggtatggtctatagttgttgtgctggtaaatgttgctgctttgataagaattggcaagcttcacacctctggactaactcgg

SEQ ID NO: 54830 - DNA, 881 bp, Zea Mays
gtttgaagttcgaaatctttcttttcaagagcagctgcatgatcttttattttgctctctaaaccttcaattataacctcatgttttttgtcttcaaggtcctgttgcatcttcaaagccttacttaatagcatactctgtgcaaaaacaaccttcgtcagaaaactccttcgtcgttaaaataatgaaaagccgaagaaaagtttttaccttgaaattagaatagaacaaactaccgacgatatgatgtcgtcggtagcggccccaggtgttacttagggttttcactcaagactacactattgaacccatcatcacttgtggtttagtttgagcaaaagacaccaaacttggggatcaagatcctaagtaggtgtaacccatcttagaagtcatgccttggccttatcatgcacaaaagagaagggaatgacccaaaccctaattcacatcccttataggcaaatggagccctagaggggattgtggaaaaaagtctatgtaaatcacattttcatgactaggactaattataaaagttgtagtacacttaataccctacaaaacatagaaagagtgtgaccccaaaaaggattcagaagaaccccaaaaaggtcaccaaagagaaaggcataaaagaaaattcatgtttttctcaagttcaaaaccgaccctctttcaacgatcaaacacgttcactttgatcccaacctcaaaaccttatggaccaatttaaaaaatggcgcccaaagacccctagaacaccctagaaaagtttgaacccaaccctaagccatttgacatgacttggcatggcttttgtctcggtgtggacagctctgctagagccgacttctcacccccatatctctctactccga

SEQ ID NO: 54831 - DNA, 743 bp, Zea Mays
atcaacttttacataaaaccattcatttgtccaaccggtaggccacttgatgaaataaccaatcactggagccttcgtatatttttggtatgcgaagttgtagcatccgaagtttttatgtagaccatctgccattgccttggtctgataaagaaactcgtggaccctgtagaatccttcggcattagcgctttttccttgacttcgcaaagcccagataaacacgctaagccttactatagtgttcggagtcagttgatgaagataaattttaaatttcttcaaaacttcaccgatcttttcatacagagggaaccaaagccctgctctgaagaagctcttaaaaacaacaacttcattatctcttggctctaaaactatttcatctccagcgaaccttatcgactcatcaacctttttctcaaaatacccaagctttttcattaaaactaagtcttctgctttcacagtggattttccaaattcaatatggctaggcttgctcggactcaagatgtcatcatcctcttcatcatcactggcagcttcggcaataatatgtttagcttcgacaataacatcatccttcttaggaatagcatcttctccctcttgaacaaccaacccagaacgtctcaatacttctgagattggggccgtctcagttgaaacagtctcttcaccttcgtttgttagcctagtagtagacataatcctagccatttcagatcttaagacgaagc

SEQ ID NO: 54832 - DNA, 586 bp, Zea Mays
cgacgaaatatccacttttcgctaaccacattggttcctggggacacgacaccatgtcccaagtgtggttggccagcagggtggcacactagcatggcactaatggggatcagcgagagcaacacgaatggaggagggtatatgcgagggagttagagctacatcaaccttgaacaccagcagatcggtggggcagagaacaccaaccaatcgacgcttcaccattgagtggatgtggcaaaggtcatggtggagggcgatcagatggttcactggcgactcatcccgacaacaggctgaggcatgggctggcatagcggaaggggccaggggatcggtctgtccacgtcgctagtagacgcaggtggggtcagcaaagtgttccacatggggcgcaggcgacggggctgcatgtggcacatgcggacttgatggggagagcttgtgagtagcagtggcagaggtgctgggatagcaagcacaaccaaatatctgaaggtgtgcataggagggggttgtgccaaagagagtgaagtggggagtagggtgattgaccaccttgaaggggagttggttgaggatatgt

SEQ ID NO: 54833 - DNA, 469 bp, Zea Mays
aagaggaaaactgctgcttcggccactctagacgagcctgcaccgaagggcaaaaagttgaaggtccttacccaccggccacgctatattgaaccggccgtggtgcctgagtttggcggggaggcttcttcagctgctgaatcaagaaaaactgctccccctacgcaaaggactgaagaaccaactacaatgccgaagctaccctcagctgagctagctgagacgaaaactgataagggtaaggctgaagaatcaaatattggagaaacaaaagtgttagaaattttaagcccttcgtcagaagtaacagtgccgaagaaacaaaaaggttctgccgcaattcccaagaggagaaggatggcaaatgtactagatgtgctagaaacagtaaatactttgaactcgactccttcaacgaaaactgccgaagcttcgaaagcgcaaactgaagttgaaacagagcaggccg

SEQ ID NO: 54834 - DNA, 1102 bp, Zea Mays
aattgaaccctgcccgcgcatttcccccaacccaatttcatgaatggtggtctaccctgttctgtccacggtgaccgcgcaaagaacagatgaacagaagtgttcccggtaatctagggtagtctagctcaattaggtggatcgacgagcatcatggggttatgaaagcactcagacgagagagcagagaggatgaactgaccggaattgtggtggccgcgatgaggtcatttcacggtggcggaaaactaaattgggaaaatccggaattggagctcctcagtgaacgattgctggtgattcttggtggctggatgcttaactatcctacggagctcaccatggcttcaatttatagcgatcagccgtgagcgcagcgaatttgagcggtggattatgatctgtaaaacggggtgagtcactggtggccgcgcaacgtggcttttaccgtggcggcacctccggtgatcaccagacatgcgaagcacggttagtcgcgacgtggtaaagcgtctggactcgcggcagacgatggtgatggttcaacgatggtgagaatcttatccgagggatcggtgagcaagggggaaggtacggctgctagccggagtggtgtccagctcaacggcggtgctgatctttctacccgagatgttatccacttgccacgagcatgaatctagacgccggcgacacgatttgcggcagagatatcgtcgatggtgagatctttgcactggcagcctgatacaattcaggttactgtaccatcgcgagctcctttcagtgcacctgacagtcaatgtttagggtagattttttgtaaagttttcatggcaactcacccaaatctctgcagcaaagttgtagagttacaaaccagctacatttcgactataggaactgaactccgttgagcactagatcatacataatttcaatcccaaagcttgaccaataacactagtggtctttttcagtcagtaacccgactgacaacccaactttgggtttaattatctcccaattcttcataacaacaatgcttaacctcttaaacaaagttgttcacctttaatagatctacatagttgatgtggtg

SEQ ID NO: 54835 - DNA, 492 bp, Zea Mays
catagcacttcgaagagcacctgtgagaagttcagcgccgaggacagtgtgccagggttccgtgtagagcctcgggcactgccaacctcagcgcaggttcctgagtgtggatccacgtggaataacacaggggatcaccatcgttcggtcctcggccgcgtttgcagctctgttcgcgttgcgaggaagaaagggccatcgaattcgaatacgccacagtacgacgctgcagacttgaggaacggcggtgaccgcaaccagcgagcagacaggcctgccgtctcctctcagaagaaagaccagcaggaggttagtagtactcggatcagatcagactacgctaggcgttcttttctttctttttcatttcgcgccagttttttagtatcatatgcatgtgaattgctgtgaccagcaggaccgtggaaggaagtacaaaaggatccactattctgggccgttgatgccaccgggtggcaacatcgaagacat

SEQ ID NO: 54836 - DNA, 542 bp, Zea Mays
gatgaataggcgacacttgttgtgtcatcttatgggtcattttcattggtcatgttacttttgtgggtgatcgaggttgctttgttggctgaccacggggaacaacattcttcgtaacatatttggagagtaattgaccaaaagtagggtcggctttaaccagtcgaccagatgctttaaaagtattttgcttcgacgtacatacttctagttgttgaggcttaaaggtgcatagatgttgcggtctctggtcgcctaccagaccgtccagccgatccagtcgaactgtctgcatgggcaccgaaccattcggttgagccagttgggtcgtctgctatgcacgaaacagtaagcttcaattggcttgccgatcacgcttgcccccctcggtaccttcggtcctgatggtgatcttcaaggtatccccccattatgggtcgtttgtgcaacaacctacctagaagtgactcgcttatccttatcggggacacgagggttgctgatgacaatacttttgcctttgcctttattggccacatccg

SEQ ID NO: 54837 - DNA, 1159 bp, Zea Mays
ccgcaactgatgcaccatgtgagcactgatgaaatttgatgaacttcctgagtcaatcagtatcactaaagtctgtttgctcatagtttcacttaccaccatgctattctcattatccctaccaaccatatcttgcaaggacactttgcaacacatttcttccttctcatcctcctgctccaattgttgcagaacttcatcaattaacactgtggaatcttcttcagtaactatgccatttagctgtgcttgttccctcttggtacagttagcaagatgaccaagttcaaacttatctccacaagcatagcacaacccatctagttttctaaactccctcacttgtctttctttggataaatcatcatctcctgtttgagcccttccttcatctctaaatccagtattcaacattttgtctcccacatatggccttgttaccttcatcttacccctctctagcacctcttgttcggtttgggccaacaaaatggctctatccaccgttgaaggcagttgtacctctaccacactttggatttcaaatttgaggcctctaacaaattgggtcacaaaatatgttccatcatattgtgggttgtgaactgtgacaccatatctggcctgctcaaactctaaaatataggcagcaagactttcaatttgtttgagtgacatcaatctccttaaagcctttggatatgcagtagctccgaacttagctattactgccccctcagactcctgccaacctccaattccgtttctcattttgtaactcttccaccactgtgatgctatgccttccaaatttagagaggccacagaaacccagatagacttaggcactcggtagattgttaaatactctctgcactagtctaaccataccacagaatcgccctccgagaactttggaattggtagtttgggtattgcttgattacctaaatcagcagactgacgaggatcacctctcatgcctcactgttggttcccacggtcctgaccaccacgagactgctgctgattccttagaacatctccaccatgttcctgagtagaggtcaatgtttcacccagctctcttcccatctgctccaacctcaattgagacacttctcatcctgtttcctccaatttctggtacagatcattc

SEQ ID NO: 54838 - DNA, 626 bp, Zea Mays
ggatggttgaagtcaatcgtcagtgatggtatagttttcacaggcggctcacttacaccaaccgcaaatggaaataaatgatttctgctggtggtttagttaagagaagcaccagtgaaaatgtgtttccactggcgtttctttaattgggcacatcgattttctttcgctggcgcgcgataactgaaaccacctataaaaattagacctcatcgcatgcttagagttgttttctactagtgggatagagttttggtgtccggtgaggaaggtccgatatggttcactgccgccatggttgaactttttcagtcactcgagcactaatattcctttatttatgtcttttgtgaatttgaattcctagcacatatgatgcttcttccatgtccttcatatcaaaatgcaaggaaaaaacttctttgtctctagcaacaggttcttatcaccgctaattagtagtatgccatctacatacataactagaaagatacacttttcattcttcaactttaaatgcaattatctttcttgttttcaatacaacaatattttcttatagtctcatcaaaattggtgtaccactagctagaagcttgcaggttagggcccctgacgcgaaagta

SEQ ID NO: 54839 - DNA, 1591 bp, Zea Mays
gtcgtggcaagcgctgggattggtcggcgccagctcggccactagcagggggcaacgtggtggtggttcccgtccttctccttcccttccctcccccaccgggccccagtccccttcgcgctgcctgcccccttcgatctcctgctctctttccccttctctctctatctactgttcttgcttgagctgcgatcctcttcctgaggcgcgggcgttggatgtgatacgtggttggctccgcgccatctcctccggtggcgatgagctccaagtccacctgctgctgcttatgaggtatggtgcttgcgagacttgtccatggttgcttgcttcgttttgcttagagatgctctcgccggggcagccagttgggctggtatccaagcaacctaggattggtagaattcgagcagtttctaccagtttccaagctatgtgattaaatcattaaagtgccttttcaaaattatcttctccatgtagagatagagatgtattttcagttcatgagttgtacagttcctactgaagggagacctacaacgtgctgaaattctgtgttcaagaccatgttttttttattttattatatcaactataataaatttgaaattactttcatggaagtgatttagtggagtaatctagcatgagggttagttccagtggaaattcatcaggagtgtatcttgttgggatcaagtctgtatttcctttcggtgagcgtttttttccggtccatcatctataacaacctacgatcttgtttcagatcttgctgaatgaattttgtggtttttgagccatcctggtaaaccttggcatggccagtggagagacaaacgcagggaacacccagaggtgtgcttatctcatctttaccttgaaacacactgtttgttttttctagttctagttactactggaaggctcttcagtgtttttttaaaaaactacccactgatgtgctaactgcgagacttcaagatttttgtttacagaaatcttttgctatttaagtagctgtcagaaatcttgggagcactactatatagacattttaatataaattgtgagtgctggtagccttatcttgtctttctgtttagggggaatacccttccaaatggtgacatctatgttggcaactttgctggtttagttcctcatggatttggaaagtatatgtggacagatggaactctttattatggcgagtgggatacaagcaagatgagtggtagaggagcaattcagtggccttcaggtgcttcatatgatggagatctttgtggaggtttcattgacggaacaggcagtttcaaaggagttgatggatctgtatataaaggttcttggaggatgaatagaaagcatggaatgggcacaatggtttacgccaacgatgatacttacgaaggtttatggaatgagggcttgccagatggatttggtaaatatacatgggttgatggcaacatctacattggactttggaaatctggtaaaatgaatggcagaggagtgatgcaatggacaaatggcgatactcttgactgtaattggcttaatggactggctcatggaaagt

SEQ ID NO: 54840 - DNA, 329 bp, Zea Mays
ctttcttgtagagttggccttcaatcagtgcgaagtcccggcttcgatgtctgaggcgcttggcctcactaacgtcggttggatgatagtacccctgtaggaacagggttattggtgcccgccagtcttcggtcatgattaggttgactattgcggtggccctcgctgtcattagttatttggagcccttcggggctccggacggctggtgtgccgatgatatgaaagaacacgtcggagggcaaggactcgcccctcgcggcggccttggccaatgcgtcggcctcctcattcttggccctgtccacatgctgcaaggtgaatccctt

SEQ ID NO: 54841 - DNA, 435 bp, Zea Mays
ggtgtgtccgagggtctccgatagagtctgtcctatgataatcctgagttcgaactcccccttggcgggtgtgtgctcttcccttttataacccaagggtggttacagagacctgtcacaagcctgactatgccctgcgcttggtcggagcacgtcttagttgtcttgcatttaatgcagactgaggccttgcttccatgcgaaggtttgcaccatgcgcccagcggccacgtgacgtcaccgggcccttgcatgggtccggagtagggcatgggggcatgttcttccctagagcaccgggagcccttgttggtgacccggatcccatacgggggggtccggatccctactctaagggtccggtttgtatacttggaggtcctagacctactagggggactggattgcatacatgggggtctggaacccacccat

SEQ ID NO: 54842 - DNA, 357 bp, Zea Mays
ccgaaggagactgtcaccaagtctggcgaaggtgagctggttcgactgaaatacaccttcagatatggagataaatttgatgaaccgaatgatgactggctgaaatgtatcgatgctacaagtgatgaactgcttgggccgtattccaaagcagaagataatgcattgtccacatcctttggtggccgggaaaaaagagattgaacagagtttttgatgccatttgttttgtttacctcgactactgctacccgctgcggggacggggaaagaagaggaagactgctgcttcagccaggactgctgcttcggccactccagatgagcctacaccaaagagcaaaaagttgaaagtcc

SEQ ID NO: 54843 - DNA, 574 bp, Zea Mays
gcaatgatccctagaaggaaaaggatggtaaatgttttagacattttggaaacaacagactccaaacgcccctctcccataaagaaggttgccgaaattgcagaggcgcaggctgaagctgatactaggcagataaagggcaaaactgcagcaattgaggctgggaccgaagccgaacccgtagtgcctgctgagacgaagcttgccacagccgagcaaagggccaaagaaatacctccaaatactgatatagcttttgagaggaatatgggcaaagaagtcgaaacccctgctcccgaagcaccttctggagatcctgattatatcattcgacatgcttcgggaaaaagattatctgaagaagaaatttttgaagccaaacactatgctcaagaactgaagtatccgaaagggaccctagtgtttaatggtacagacgaagatgacctcttgtattgcctgccagacaataaagaattatctgtctgccgggagatggccaaaagtatgggctttccgaagctcgaagctggcctctatgccatgacgaaggacgatcttgcgaatagccttg

SEQ ID NO: 54844 - DNA, 329 bp, Zea Mays
ttaaaagttgccttaacaagaaaacacctcttacccccaagaaacactctccccctttccccgatattaacagacccttcttttcttctaccagatggaaggcccctgggttattaggacattctattgctcagaggaggaaggctttcctcaccttctacgaagttgcgcgctacgcatggggatccgcaagaagcccgaatatgtctggaaggagtaccgcgaaaatggaatagaaaagtgctctatggcagtctacctgggagaaagccgaaactacccaaaccaccctcccttccaaatcaccttcatcaggcaccgcttcccag

SEQ ID NO: 54845 - DNA, 493 bp, Zea Mays
ttgttctcgattcgtgtggcttgctgggtttagctcaggtgttttaatttacctcttgttgcttgttggtgccatattgtttaaatgagttggagatttttgaatatttccaagaattatgaagatcttagagttaaaaggacccattcccttctctcacctatgacttctgtaaaaatgtttgctgcgtagtagagcttagagttttattagtattgtagcttgtgggtgaacatatttgtgctaatcaaaacagatggccctgaacgctgtgtcaaaggcaaatgtgactgaatacgtttttgcatatcatggttttcaattgattagcatcaatgcttaaatttttttggttgtggaaaggcaagtgtgacatgactcagattgctattggctatcatggtttgtagtagtattggcgcttaaacatttctatagagaagttttggacacctggtttgaaatgttgacgtctttgaggtcaaacacatag

SEQ ID NO: 54846 - DNA, 779 bp, Zea Mays
attccctcccgccttgtagttcacctacaaaaggaaatcaatctcttttaggtacccaaactcgcttgggtccttgaatgttagtgaccaaggtctttggcacccaaatagctttcttcttgttgccaacaattgaagtaccaacaaatttagcatgaacaccttttgcattatgagaaagaacataacaatgctcaaaacaagtggaggatacattcttgagcttaggacaattcttcctcatatgtcccttcttgtgacactcgtgacacactttgtcacattctctcacaaacaatgtcttttgctttacaaaagcattctttcctttcttgggaacatatccaagaccctcatgattaagtgagcaccgttgacttcccaatatgaaatccaatttagcctttccaccatatgccttctctagatcatgggttagagcattcactctatctactaatacttcattctcaacaatgatttgtgattcatcaaaagcaatattatcattcataagaaaaaatttgcatttatcacaaatagagttagtacgctgtggttcacttgtaggactatcaagtaagtcacaagtgactccaacatcctcggtgaccaccacaacttcatgcacaatagatgagttttgagcttccgcaagcttctcacaattctcttttagatcgttgtgagaggtcttgagctcctcaaaagacacttggaggtttttatacaattccttcaagatcttaaacttttctttttctttatgcatatagtca

SEQ ID NO: 54847 - DNA, 374 bp, Zea Mays
aattgtacaagacctatgatagtccaaggtttggagaggcatttgagcttaaacatttatgaggggatcgtcctacttatatcatcgcacacaagaacatatatgcaacatgaacaaacattaataatggcattcacacaatagttgtgatttggtatggcttgctgtcacatggtgatctccatctccaataatatgtccatcatgatgatctccacctccatgatatagttatgtcgtccttcaagtgatgagtccttcaagacttatctaatgtatgctagtaaccaagttacatatacgctttggatcatcacatgttaacatgcaggtcattacattaaatttgggacaatacatatggctccagtcgt

SEQ ID NO: 54848 - DNA, 409 bp, Zea Mays
aacatcttaaaaggcttgcctcagttaatggggtgaaggacaatgagtgaggtatagggttgcacttgcgatgtcattgatgaggggtggggcagaagtcacgagaagtgggaaggagagaattgtgtggtggtggtatggagggagaaaagtgagtagggtttctcaccttctcttatatactgaaatcggtaatgggccaagacaattagcgggctaggtcttattttataaagacggtccatgtaagagttctatccctaaaataacctttaattccaaagattgatatcttaaaaggcatgtcttaattaatgcattttcaggggcaataatttattggatgcctccgtaaatatgctgatctttaaaaatcgttagataatgttggtgacatggatgacttttg

SEQ ID NO: 54849 - DNA, 305 bp, Zea Mays
atacaccaggggcaactctacgccaacatgaggtatgggataatgtacgtcttcctggagctctatgacctcgcttcgccttcctcgagatcatcccttatgtggcctgccacccgaacgtgtatgtggattcttggtggagtccccctacgacaagctaatgcaaatggagctgctttgcccatgataactacgagagaagggtttgtcggtggcgccgccatgctcgtggaaacaacgggttccatggctgcgctcattagggtgtgtctcgggctggggcccaagaccatctactatgtttc

SEQ ID NO: 54850 - DNA, 914 bp, Zea Mays
gcgaggcagcgccgcagcggccacaggtgttcatagaggcgttctgtttgtcatccgtcagctcacttgctgcactttggagatactgaaaggatatatctactgtatctcttggatatttttgcattagttttataatatttcactctgttacacgtattgcatgtttacaggcaaactattgaaagaaattttgctaacatgattcagcggactgtccacgtatagcgcccagagtaattaaactccttccatcctaacatcataagtggtattttgtcagttatcgaaaaatcaataccatatcagtcattttgaatacactagtacagtcctcgtgggttgcgacgacacataaattattcgataaaattttagtacataataattagattgctgatgttcatccatcgtctgtggcggtccccataccaaaactctgcaccaccacaacaccacaaaagggagatgttgttgtctttataagggaagcgaggcagcgcccgagcggccacaggtgctcatagaggagttccgtttgttatgtgtcggctcacttgctgcacattggagataatattgaaaggatatatctaatgtatctctggatccttttgcattagttttataatatttcactttgttataggtattgcatgtttacagggaaactatagaaaaaaattcgctaacatgattcaacagactatccacgtatagtgcccacagtaactgaactccttccatcctaaaatcataagcggtattttgtcagttatcgaaaaatcaataacgtatgagtcattttgaatatactagtacagtccccttgggttgcgacgacatataaattattcgataaaatattagtacataataattaggttgctgatgttcctccatcgtctccggcg

SEQ ID NO: 54851 - DNA, 642 bp, Zea Mays
gcttgggccatactcaaaggcataagatactgcgttatctgcggccttcggaggccgaaagaagaaaaggttcaaccgagtttttgatgctattgggttcgtgtacccttactaccgctaccctctacgggggcgaaagagaaaagatgcaacttccgagaaagatgatgcttcagctgctccaagcgagcctgtgccgaagaggaaaagggtgaaagtccttactcaccgaccgcactttattgaaccggccatagtgcccgagtttgtcgacgaggcctcttcggctactgaagccaaaaaacctatacctgcgcaaaaatctgaagagctgactgcaacaccgaaggctgaaagaattgaagagccgaaagctaaaggaataaaaatatcagagattttaagcccttcggcagaagttggagtgccacaaactcagaaaggtccagtggtgaccccaaaagaaaaaggatggttaatgttctagatgtactggagacaataaagtcttcaagctctactctgagaaaaattgccgaagctcaaaaagcacagattgaaacaacagcctctggagccgaagctacaaagcaccaggctgagatcgaaactggaccttcagagtctgccaaggagaaatcc

SEQ ID NO: 54852 - DNA, 494 bp, Zea Mays
gtagttcttggctgagatctagtatttatgcataaaaatagctcttggctgagatccgttcttcgtctgatctggtatagtttgctaatttctctcctctcagatctggtatagtttgctaatttctctcctctcagatctggtagttgttggctgagatctgttcttcgtctgatttgagctctccctctcgcatgcacccatttcactcctcccagatctggtatagtttgctaatttgttatataaaaatagcttatggtgtaggattttgctgcaaagtaccatgttgtcagtgttcgcactgctaaaaatagatctgtgcatgtgtaggactaagatttatgtgcatagagacagacctaacttatggtgtagatctggtataaaaatagtttctggtgtaggactaagatttatgttgtcagtgttttgagcatttcatgtccgggatcagatgatttgtaggatcatcagtaaaaattagggtttta

SEQ ID NO: 54853 - DNA, 843 bp, Zea Mays
atttgtgccttgaatcgttccctagagctcgagaatctcttgttttccccaaaacagttctccgccgctgtgaaagcacccttgccgtggccagccctccacaggtctgatcatgccctctctgttctcgttttagcatccttatatactggtgatgctcaccaacccgctcaattgaactggaccaccacccatcaccgggaacgcgtgccattgtcctcatcgttcgcggttcacgtggatagaggttgatagcttaccaatcgtaaaattaagttgggggaattgatcggggaaggtccaatttcgtgtccgccgctcgggagcgccggtcattgccccgttcggccagtttgcaagctcgccggagcttccccgcgcttaccatcatcggggacttcgacgtggaaggaaatagaaaccgaaggaccttagcgcaaactgtcagcgactctgagtaacagtgaaggaacccgttcccagttagcaaaaaccccgagggcctttctgcgaagtttccaccgcggcgcgggcgcgtcccgctttccctgtgttactgggccgcctgggctgaaaccggcccagtactgtttagtcttttcctttttctttttcaatgaagctttaggaaattgtagaaaattatagaaaaatgataaaaatgtcaaaccaattttcctagacttcttattttccatagtatttaataaaaatagtaccataatttttaggttaaatagggaattttagagtatttaaaatggtcgaaaacattagttctggatttttagaaaatagataatcattccaaaaatgcccaaactttttatatgaactcaaaac

SEQ ID NO: 54854 - DNA, 650 bp, Zea Mays
gtcaggcagtacaacccctagtgtttggccctaaatccaagccaacacacttttttggtgactctgctagggaacaagaggtgtgacctagcatagatcggtcccatgtggtcgattcaaagggtcactccggcatctccctgagcaacatcattgagttgactatgaagaatctgtcggcggaagatcagcaggaattcaaggagcataagaagcagctgatcaaggaggccatggtaaagtacctggccaattgcaaggtggacaggcatcagaaattcgttcggcaatgggagactgacctggcattgctgccacctactacaaccgcccccaatgtaagtaacacaaacgatgtccaatctcttagatcttacaaagatgaataacgggagcaaatgcaacaagtattagggggtatgcaagaggattataggagactagtgtatgtgtttgaaaaatccatcattcccaattttccatcatatgatgttgatactcagaacggtacacacaatttgtcagatgcaaatgggtgttcacaaccccaaccattgtatggtgtgccaatgaactcatgtgttggacaaccacaaccttttccaccaatctgggataaacccacaaacctgcacacggtcaaaccatct

SEQ ID NO: 54855 - DNA, 668 bp, Zea Mays
ttcagaacgaccacaaccaacaactccacgtccatggaccgtgacgacaaaggctccccggatactgagaacaccagcatcggcggaggggccagtgattcgcgctgtttcagccgtcgctcacaggcaagcagctaagctaagctagttatatacctataagtaattcaccagctcatcatatttatacacacacctctatagtttctactttctagctggctagctaggttcacgcacttcacatctgaaatgctccatgctaagctacacgctacatatgcatgcatgcagggatatttcattacaaaatatgcttatttttctacgtgtccgtgcgtgcatgttctggcaaaaataactaaagagagacggcttatgcgacgacgacgaggagaacgtggtgatcaacggggacgacggggcgatgaggtcgtcgatttccaccaagaggagccgggctgctgcgacccataacgaatctgagcgtgtaagctactagctagatccccattcctgcactcgtcatacgcgtacatgtagataggtgaaataaaacgcatgggctagcattatggtacgccatatatgtcaaacagtcatatattacccatcgcttttagtaatagtaggtggtgttgtattgtaaaccacttaaaattgggcga

SEQ ID NO: 54856 - DNA, 563 bp, Zea Mays
ttgcacatctttatcaccttatttcttgtaactcgagtcagagtgtccagaattttgatagggtactcaacataagtcaggtcatcttgaacactaaggtcctccattggtagttgctcctcaggtaccctgaggcacttctttagctgggacacatggaatacatcatgtacatctgacagatgatcgggtaactccagttgatatgcaacttctcccactcgctttaagatcaagaaaggtccaatgaagcgaggggacaactttcctttaactttaaatctcctcataccccggagtggtgacaccttcaaataaacatgatcaccctccctaaactccagtagtcttctcctgttatcggcatagctcttttgcctggattgtgcaatcctcaaattttcccttatcattcgaacttgttcttctgcctcttgtataaattcaggcccaaagaactgtctttctccagtttgatcccaatacagtggagtcctgcactttctgccatatagagcctcaaatggtgacatcttcaaactagcctggtagctattattata

SEQ ID NO: 54857 - DNA, 649 bp, Zea Mays
tgaaaaggttcgggaaatttgtcagaatattttggccgctcagagccgttagaagagttatgctgatgtgaggaggcgggatttggaatttacagtgggtgaccaagtccttctcagggtatcacctactaaaggagttgttcggttcgatgtctccggaaagcttagcccaagatatattggaccgttaactatcttggcccgggtgggcagcttggcttatcgcttgcaattgccagattccatggcaggggtacactcagttttgtcatgtctctatgctgaggaagttcttgcgggatctggaccatcagattgagatggaaccaattgcggtgcagcaggatctgaccttggagtgtcgtccggtgcgtatcttggaatcctcggaccgtgttttgaggaagagatcaattaagtatgtcaaggtcttatggactaatcagtctgagcgcgaggctacgtgggaacttgaggagctgatgcggcagaaatatccggaactttttgttgtgggtaagtgttgttgattcattaaatttttcccttttgtcgttccgatagaagcatcaaaattcgaggtcgaattctttttgagggaggtagagtgtgatacccggtttgcaaagaggagaagtggaggttattg

SEQ ID NO: 54858 - DNA, 514 bp, Zea Mays
cggcgccattaggttcttgtggtgtatcgtggagagcaaggccaccttgtttgagaattactttttccctggtacaaattgttgctaggcaccttaaccgcaatctcttttccatcactcagcttcctgtagtacactatcccgaacccccctgaaccgatcctactcgcaaacttgttggtcgccgaccacagctacaccacacgattgtgaggtcacgaaggtgagctccaatttcccgccataattcccaagattttaattttgtagcagtcaattaagagttctcgagttcggtttgattggaagggggaaaatagtgataaggaggacaacctcgagcccgaggccaaccccggacaggagacgcaatcatgactcgcctgaggccaaccccggacaggagacgcagtcatgactcgcatgaggccaacctcggacgggagacacagtcacgactcacccgaggccaaccccggacaggagacgcagtcacggctcattcgagaccaaa

SEQ ID NO: 54859 - DNA, 394 bp, Zea Mays
cattgatgtacttgaggaagaacggcttaacgcagtaatccaatcagcacggtaccagtagactctaaggcgctatcacgacaaggctgtgcgacaacgattcttctcagtaggggatctcgtcctccgccgaattctaacgggagagggacggcacaagttatcacccttatgggaaggacccttcatggtagcagaagtcactcggcccggatcgtatcgcctcactcagatggatggcacagaagttgggaactcctggaacatagaacacctcagaaagttttacccctagatgtatttcaaaactgctggggcaacgatgtattctgtaaagtggaaatatgtcatcaataaaaaagaggtttcaaagatactcagttcgtttacgatt

SEQ ID NO: 54860 - DNA, 568 bp, Zea Mays
ctcatcttatcataactgatgaagatcagagtatgaaggctgctattagactggttgtaccagaaactaagcatagacattgcatgtggcatatcatggacaaggtacctgagaagatcggtccatttataagggaggaccaacaattttggaatagactaaacttatgtgtttggggtactgaaactgcagaggaatttgagactgaatggaattacctcattgttgattttcagctgactagaaatgaatggttcatcaacaggttcctgatccgtgaatcatggattccggcatactttatggacataccactagctggcgttcttagaactacatcgcgttcgaagagtgcaaattccttttttaaccgtttcatccatcgaaagctatcatttgttgagttttggctaaggtttgatacttctttggggtgccagcgtcaagaagagctaaaagctgacaatatgagcatccatacttgtcctaaattggtaacaccatgggccatagagaagcagtgttgtatgccgtatacacatgaagtatttaaaatttttcaaaaaca

SEQ ID NO: 54861 - DNA, 276 bp, Zea Mays
ctaacgactcttaaagagcacatgagaatcttaatcatgtaggtaatgaacccttggggtaggccatgaagaacatgtagttggagcaatcaagtctaaagaggatggagattaagtgcaactaattgactcccaatcttcataaaatgcaccacaagacaagagtgagagacatccaaacgaagatacatatgtccctcaagatcatatggtggcacaagcacaagatgttgatgctccacaatcttgcccaagtggtcgaaataagaacttcac

SEQ ID NO: 54862 - DNA, 719 bp, Zea Mays
gattgttcggcaacaaacaaatgagtagtcgggagatgcggtgctactacaatcatccctcatgattatgactccgggtgttgggttataggcgcgccgcctgacttaacatgtagctagggagggtgtgcagatgtcagtgaatcgctctacaaaaagcacaataataaaatagatgttaaattttggccagatcatgtggatcggtctgtgttgattgcactaatcggcttccttgagccgattgtcatctttttgggtcagtaatgatcaaataaattaaagtaatcattaaaagtgacaaagaagaggaataaacttgcataaagcatgtttgagtcgattgtttactctagagcgatgtggtctgtgtgcatggccaaaggcacagaaatgggacaaaaaccaccattattacccacgttattaaccaaatctaggtcatgataaatggtaaaccatatataagaacatcccatatctaatctacaatatgtctcatgccaacgatcctaggatcatccactttgtaagccgatgattatgcatgtgaacatggatcaatgtctcaaaaaagtccatccagagtaaataatgagagtaaacatgtaagacatagtgttagatatgtatcgatctcccgatttgccgtatgcacatgttgcagcttgcataccatagagtgtagcaaccaatcaaggaataggcatctagcgatg

SEQ ID NO: 54863 - DNA, 402 bp, Zea Mays
ggtaccctgaatcaggggtaccctcttctacagtatgaagacgctgtacacgtacgacgtcttcaggccacacggagaacgacacctgaccccaccacatgggcaggtctaagggcaccacgtggcaaggaaagataatacaccccaggatgcatcattgggtccggacctccacagagggacaccggacccctgtacgtacaagtccggagctctcaagaaggcatgacgggtccctcgggtgggccccaggtccctccaagtaaggtctgggccacaacaaggtcccggggcggggaggaccccggcatgagtaagggtccggtgctggcatgtggccaggccttgccctacgctccccgctcaggcggagacccgctactgccgcgtggcttgtggccc

SEQ ID NO: 54864 - DNA, 852 bp, Zea Mays
ccagccgacgcaatagtccatttgagtaggggagccactaggctaggtgccacaccaccaacagctgcctgatgacagagggaggtagacgcacccaccgccacttgatacagagggagggaggggtgccaccaccacatgtgagagagggctagaggggagcttgctgcaccacgtcctgcatgtagccgcctggtgaaaaagcgagagggtgacgccgctggttaatccagtcgttcctccagccagatccacccttgtctaggtcagatccaccctcccccaacctagatcaaggtatatagctcaagcttgcccctccattggaccgttcaagctcgccactgaaaaaggaaatccaaactcgccaccccaccacctgtccgcagtcagcccgaggaaggagagcaaggcgctagtgtggaaggagagcaattgctcgatctcaagccccccgtttgattggctacgactcgttcccaagtacctgtccccatcctacttcatgtagggcccctctcttccttagatcgtctgctgctcattcgcgagtgcttgtccccatcttacttcatgtagggccgctctcttccttggattggctgtctccaccgttcttagtgccaatagagaccccatctctcgcagtcgcatctaggctgcttgtcaccaccacatcatcgtcaagggtcctccctcttcagaccatgtttctaatatcgccgaatgtcgttgcaaggagcaagtgagagaggagcttcgccttcaatagatgggctcggggcaggtgttatcattgccttgctcatgactaccaagttagctcattcaagaactccatctgctttcgcc

SEQ ID NO: 54865 - DNA, 283 bp, Zea Mays
atctaaccctccatagcttgctggttttgaggcccaatcagtgaaactgtcatgtgtagtgtactgcatacgcgtcccccacatcctagacacgtgtcccgccggtccccgaccgcgccggtgacacaatccgctctgccacgtctttgcgctggtgcatgtcccaagtgtcagtcactgtggctggtcacctagcttctctaatccctcgatcaaggcctaacactcattcttcgtcgctccaggcccatcgacacgagcccgcacgatcttcacctttgcc

SEQ ID NO: 54866 - DNA, 1294 bp, Zea Mays
tagatctatgtccattggtcaatagcatattgggagaggtgattaaacttgttgaggtactgcatcatggaatctcccccttgctttagacgtatgaactcctctagcttcatctgtagcaccccttccgaaacataatgttccctgaacacctgtttgaactcttctcacgtgagctgatgtcctgcaggctgaatggctgaaaaatttgaccacaaagtgctggcagggcctctcaactgctgggcgacaaataagggcttctgtatttcagtacatcggattagcccaaacttttgctccataacccgtacccattcatctgcttccagaggcttttcagccttaacaaagagcggtggacgggtttcagagaactctaaatatgtggtgtttcgtggcccttaaggttgacctctacctccatgttactgaaattgatttcccaccaattcacattggaaatgcgtgttgtcggcggtagcgttgactaaggaagcgatagcctcaactagtgtaggaggtacaggtggtgggttgggagtttcctccctgccgcgggaagttccagtcgcgtcatgagcacgagttcttcatggtatctgaggaagaaaaacatcctgaattattacatgccaaacgtacaccatctttattacattgtgctgacatataataattatacatactcattagtacaactcaacttacttatttactttacatgaggacactacttaaactacactactctaattatcctagtcctgtgccgctccactgccagctttaggagaacgttcatctgcgaggttcagggaaggaggggcttcaaaaaggtccaactccccatcaggtcctccattagctgctccagatggtctagctcccatagctgcaacttctggtggcacatttggatgcagccggtcatataaaacgtgcacctcttcatgtatggtgttacaatacacttgcagattttccaaggatgcgcttagttccactacccgggctagagccttggcctcacaatcccaagcgaaagagcgcgaatttacggcccagtcaatggccgtgtctcgttccgcaatttcctactgcaagcgatgaacttccgctgacagttcagtaatgcgacaactgtctcgcgcacactccctactcccatggcgtagctctaacatgagtcgcgccaccctggcctccagatcccctattgggtcgttacttccactgctgctcccctcatgtctaggagccatttgatgccggggtacaccataaggtccgg

SEQ ID NO: 54867 - DNA, 650 bp, Zea Mays
aaaggaaaaccctcctattcaggttgtttttgcacatcatagttcccatgcagtacaaatcaaagtcttctccaagtccatcttcctttaagagccacacaacttggtcaaattcttgttgtgctcgacaccgagttctctagtttttgatggaaatggactcagaaatattagcaatgtgatcttccaaactcattttttttcttaggagggctattcactttgtcttccatgattggccttttggtcgatgatctaatattggagcaacctacatggttgtcagataagtatggagtatcctggctgccgtagttgggagagggctcacagacacctttagcagtaatcaagttgcccctgtcgtgtgtggttcgaccgaacaaagtgtacagctcatcaagaaaaggtggtggttttcctcgaatggccggagtactaggatcctgcatttgaacatagtgcagatttagtattgaccataaaaaataaaattgtaatcaattcatgagctacctaaatggtggttttgtgattcaacgtaccctttcctgggtcccccagtacgaatcatcaaccactatagcaccaatccttgagtcatgaccaagtcgtcgtacgtcgtattttcatgtgcgcctgcagagttc

SEQ ID NO: 54868 - DNA, 473 bp, Zea Mays
cgagcttcacgtggaagtttttcatctaccaatagcataaaacgatgtgttttttttaataaattcctctgttcaataattagacgtcctatgtcctatataaatcggttacggttgaaagcgtaatgctaaaactaattacaccaaggtagtacacaccaccaatcattatcgcacaaaaccatgggcagcagaaaaaaagggtaaaactccaaaggggacaaacttgccattccatgctcaaatcgacctttaaccacagatctacccctccctatgcatgacatgagttgagcagtttacccccaacagacagggacaaacccgtcacttgtctccgcgcccacggagttctccgtccccctcccaacaacggcaacaacaccgtgacccaccgcccgggtccacctgtcaacgtcgtccttgccccgtccccacaccgcctacacccactacgccacgtactctgtggg

SEQ ID NO: 54869 - DNA, 507 bp, Zea Mays
catcaagtttgataggaatatcaatgacactagactgcgacatattgaagaggcagcaaatagtaataaaaatagttacgatcagatgggagcagagaaacgagctgagcgatctggacctttgctggtgctgaacggttgcataggtctagagatagacgaacgccaagagcactagcgacgaacgaccgacgccagccaaggcggacaggtgccagacggatggccgaggtaggaggtgcaaacggacgagacagacatacacaaatggacgaacattgagaggtggacaggcacgagtggacggtcgtcggagatgatgcgggcgagcgtcgggcgatgaggcgaccaacattgggggtcgactcgatgggtgaccacgacgagaggcggacatgcgtcgggggctgaagaggatgtgcggctgagccccgagatggaagaactgtcagaggcaaaggcagacgtgatgacggaaacgcaacaccggcgaaaaaagtggatcac

SEQ ID NO: 54870 - DNA, 589 bp, Zea Mays
cgcaggtgttttatacagccaccaaaaaaattgcaggagttatatcagctgttcaaaaagtacgcccggtcagaagagctccaccaacggaaaatcgagtcacagcgaaagcccaaggacactctgtagtccagcaggacatgggtcaggccctggcaatcagactcaggccggcaaaaccgcacccagtcccaagtgcacaacatcaccaattagtagcagactggggacactgctcgttgtcacgaataccctccgcagcaaggccacgacagtaacgcaaccagaggcaggggtagaggtcgaggcccgtagaagcgaaggttctattgtcttttccatggcgaagactcggcacacccaaccagggattgccctaaaaccaaagccacaaaggatcgaatgtccagaaaccaatggctaacaactaaagagttatcacccacacctaccatccccatcagtacaaccagcaccaattccataatgaacatttccatactcaccagcaaaaccacaatatataccagcaacaccaagagatcctagctctactgcctccactaccaccatagcatccaaatcagcc

SEQ ID NO: 54871 - DNA, 843 bp, Zea Mays
gaggctacgacaagaaggggtgcaataatgcagttaactatttacctcttcatagcaattttcgatcataaacccatgtgctcgcagatgcttacaatttaataatttataaaccaaccagaataccagcataacgatttaaaacacttgtacgaggggaaataaacttttgcatttaccaacaagacaagctatacatcattgacaccatgaatcacttgggacagacaagaggtctcggatgtgagttccgctggtggtctcctactgtcaccattgttgcatcggagtacctcctttttagatgttaatacatgttgtctaattctctctggttcttggtatttttctaattataccccatttgaactttttggtaaacacttaataagatgcttcaatgttagtcagaatatttcagattcggggagctgggctttcactcatcttgatgttgtgccccgtcaacaagaggtaaataagttttttatttaagagcattgttctctctggaaaatatgcggtctcaaagagttggttgcatttggatctacataatgatagaacaagcacttacctgagggataaggccaggttccaatttaaaagaccacaaggcaagatgagatgacaacttcttagctattaccaataaatcccaaaatctatcaacgtcctaatttaacatctaatctcacatggaatttaattagcttgacccttatccccaatgtacacattgatcctcttttggcaagtttaataaatttaaaataaaaacgtcaagtcaacatagtcaccatactatgcattagtatattaaaaacaactattttaattctg

SEQ ID NO: 54872 - DNA, 1426 bp, Zea Mays
gtttagggtttctaaccttgggatcaaaaactgggatgttacagacctatcccacttaaaagaatctcgccctcgagattcaggctgggcttgagaaaaggtaaaggtattccctcctcaatgagtcctcactttcccaggtagcctcctcttctccttctctgctccattggactttacagagccttacttctgagtttcgggtctttcgaacgactgaatcaagaatcttcactggcttttctcggtactgcaaatctttttgaatctgaactgactcttctgcgatgtgactctctggtacttttagacatttccagagctgggatacatgaaatacattgtggatattagacatggattctggcaactaaaggcggtaagctgctggccctattctgccgatgataggataggggccgacaaatcgcgaagctagcttcccgtttgcttgaaatcttttgactccacgcattggggagaccttgaggtagacaaaattaccttcctcggaactgagttctctcctcttgttgtctgcataactcttttgccgactctgggcttcgaggagtctcttgcgaattagggcaactttctcttctgtctctttgatgaaggcaggtccttctagggtcttttctcccacatttgaccacatcagaggggtttggcatctccttccatataaggcttcaaaaggtgacatcttgatgctggtctggtaactattgttatactagaattctgcatacgacaaactggactcccaatctctatcgaaggtcagcacacaggctctcaacaaatcttcgaggactttattgactcttttctgtctgttcatctgactgggggtggtaggcggtgctgaaatctagcttggtgcccatagcttgctgaagactcaaccaaaactttgaggtgaattgtgttcctctgtctgatactattcttcgcgggatgccatgaagtctgactatttctttgagatatgtctgggcaagtgtggctcctccgaaggtagtctttactagtatgaagtgagctaccatggtatgacggtcaattacgacccagatagaatcattccctttttgggtccgtggcagtccgattccgaagtccatgtctatttcttcccacttccatttaggcaatggaaggggttgcagtaggcctgcgggcctctgatgttctgccttagtttgttgacaagtatcacaccgggctacatgctgagctatctcctttttcattcctctccacccgtatctggtcatgaggtctaggtacatcttggtagaccctggtggatagaataggctgagttgtgggcttcatctagcaggattttgcgtgcccctccctttggtacacatagatggttcctgaaccaaagggttcccttttcatctactatgaa

SEQ ID NO: 54873 - DNA, 624 bp, Zea Mays
gtagggcaccttggtggtgtgaccgaacctcgggataaatcttgtgtctcttgtgttcttgctcattgtgtttatttgtgttcttcattctctcaccattccgtgaaagatttgtttatatctttttggtgtgtggattttgagaagtgcccttcttagatctactactttgaaccctgtggatcatttagaacatctcatttccaaagttaactgggtgaatttcgagatcaattcagttttacccagtttgcttctagtttttgttgaaaaaagtgttaacttgcctattcacccccccccctctaggcaactttcatccccgcagtcgtactaaagctcagacacttcagacctaagctttacaatatctctctaggcagcttcgccctcgacatttttttctattcttcatggccttgctcaagaacatgccctacaaaagtcaaaaataaaaaataactaagttttgtaacaattcaatccaaagtatagatggaaaatcaatgtaaacattacctttagatgggtgtaggtgaggcagtctgagaaatcttctgaggacatggttggtaacattgcctctagattcggaaaccaatattgtccgccatatagcgacag

SEQ ID NO: 54874 - DNA, 318 bp, Zea Mays
aactggctgatggggccacacatgcaaaaaatggcatgcatcaagaagaacatgaacgctccgtgggggaggccgtgggcgacaacggcaggatgatcttaggtgaggtcacattagtgttctccaaggccatcgtcatggtgttttgatctagagaaattacaacggaaaatgacgctacgtattattgagaaagggctgcagggtaatgaaaggagttgtctaacatacaatatcagtggcaatgcaatccttactaatactacggacgctgccttggggatgttgcctcccttccctccggcgaacaatcaccag

SEQ ID NO: 54875 - DNA, 677 bp, Zea Mays
cttatattacaacatctgttgtgcctattttgatgatgtccctatttgttgttcttttggtgcctgcggacctttcctctctatgcccccttcaggattgatcgacctttgtggccgagcagccggacaatcttgctggacttacgcccagtgaccaaattgaggtgccaacctgtcaaatacagaagtttggggtgcccccaagcggggtactgtggcatcccatatggatatggtggcatgccccacatttggtttgggatataaggtggtggtaggtatgcatactgatatggcataggtggctatgggggtggatggtctccatgtagatacattgggtcttgaatggatattttgatgtgctgactcctccgattggtgagatgacccaagtggtcttacgtgtcatcgctcttaggtatgtgagcgaggtcgctttgttagccggtcacttggcccagccttccttttcacatatttagataataactgatcaaaggttgggtcggctttgaccagtcgactggatggcttaaacatgtttgtcttccacgtacctatttttggtcgtcgagatttgaaggtacacggtcgtcgctgctcttgggcgctgccggagcgtccgcttgatccttccagactgctcggtggtgtctgaaagtcgcctagagggg

SEQ ID NO: 54876 - DNA, 382 bp, Zea Mays
tatacttctcactaaaacatgaaataacccccttataggaatgttctatccttcgaggcactctaaggccaacctttttgtatttcgatatacttatcaatagagtcaacaacactactataggcgagcatacatagggtggtggtgcatttttggtagggggagaaatcgttgcggttgagtgcatcgattctaagagtgaaataggaaaaatgctcacctaacctaagcaagatttgaagaaacatactctttcacatgtggtaccttcaaagaaagtaaagtgaagggtagatacacgggtcgttaaagtagtcttgcatcaatcggtcgtggacgccttcacaatcatgtttgatgtaactctgaagttgtgtccctt

SEQ ID NO: 54877 - DNA, 674 bp, Zea Mays
gattttgttacttgccacagcacagtaaccctatttacttttactgcgatagcctgtttggtttgatcccagccatgaatcccaggcatccaatttttggagatctgtggctgagattgctgctttggctgggagttgcttggaaggcctccaaccaaacacaagtgtggacagatagttggtgtactcaaagctggaaatgatgcttaggactactaaatcttacagctctgtgggagttaaagtaacgtgctgagcggaatggtttatgttttatttgtgctcgctggctcagatattttctttacctcatctcataaaatcaactttttttgtagtggaaccatcggaatgagaagaatacatattatctcataaacatgatttttccagttctgcttcctgcatgaatgcatgatctgtcagccacatgacattattatatcacaggggtttggttacactatttgtgccatgtctttgttctatttggtttggcataatgcatatgaatcatggcatctatcctctgggcatggaacttgaacatttgtcctagatagttggtttcaagtgtcagcatggaatcatatgactggattgtcttgattcatttaaccctttcatcttacagatgtatattgtatccagcttttgatccttttgtaactatc

SEQ ID NO: 54878 - DNA, 907 bp, Zea Mays
atttggtatcctaagggttcaaactttgatcttcttagatatttagatgtcaattatgtcagatgtaagaatgtgccagctggactattgacaaggaaattgatcaagtgtcgacccctcctatctgtccaaccatcagacataagtgtgcaaccaaattcagtccaagccaactcatgagtctttttttatctcatctacactcttctttgccttctcaagcaatggcaccttaacatcatgatatgagggtttcacgtacccaggaccatattgcccaaccgcctcaagcatgatctcaaaggcccttgagttgatgacattaagtggtaagccgctctcataaataaaatcagcaacatacatatatgttatttccttctcctccttgctctttcgctgcaatgtagtttgagtgttgcccttacaatgcctctcgcgaaccacatcttcaggtgctttgcgaaacatggatgcaattgacttagaagacttcgacgcgtgttgattgttttggcttgcttcagctaagagccttctcttttgggttgttccggaactgagctgaacaactaaatgggatgctctactttccccttgtccaagtacttcaacttcatcatctttatcaccatctttatcatcatccaagtcaataggcttctgtctagcattcttcttcaaataatcactcatctctttgctaattgtcgatgttgtctttgggcacttagcaacatcaccatgaccaccaacaaggtgctgcctcaaccttctaacacctgcatgaacgattttgccacaaagtatgcacttcaccacatcttttttgttcaaatcaggccagtaacaatagttccatgtcgaatccttcgattttgcctttcttttaggatctttagctgga

SEQ ID NO: 54879 - DNA, 309 bp, Zea Mays
atttgttgttctagatggtccagctcccattgctgccacatcgggtggcacgttcgggtgcagccggtcatacaacacgtgcacatcttcatgcaaggtgttgcagtatgcttgcaggtttttgagggatgctttaagttctgctactcgagctagagctttggattcatagtcccaagcaaaagagcgcgagtttacgacccattcaatggtcgtatcgcattccgaaatttcatactgcaggcgattaacttcggctgatagttcagcaatgcggcgactatcgcgcacacgctccctacacccgtg

SEQ ID NO: 54880 - DNA, 559 bp, Zea Mays
cttggattcagtatgttaggccatatcctgcggatcatttatgagcgtgcaaaacactattttacattgtagactacactgtttacatagtgaagtttgaatagagagtgagattgagagtgagatagtgaggatgatggagataaccttaacaactttagtagggctcctgatggggttctcggcccacttgcctgaataactatttaactgtccgtctacctcatttcaaaagcacacatgtttttctcatttttttggagtccgacctagatggccttcaatcacctgcaccagtggcaactagaggcgaggtagaccgagagtcctagaccatttgctgccctttctcactccgacactccccagtcctcaatttttagtccttttcttcctctcttccaagtagcagcgacagtagtggaggactagaacagtagtacaaagaaaggcggttcataactcatttttattagcgtttttgaaaaccgccagcggtaggggtcagttgaaatatttattttcatagacggttaattaagaaccgcaagtggaaatc

SEQ ID NO: 54881 - DNA, 322 bp, Zea Mays
cggccggtcagcatcagtgccacgcgggctgtgcaggtacatgaagcaatatatccaagccataaaatgctcgtagttcgtgagcttgctcatattcagctaggctcaacatcctttacacagtaggattgtcggcactacaacagcgtaagagtagacgttacagaccagcgagaacgacgacatcgacgtagaggaagcagacaaacagcgattagtcacgacaacgctttctaaaaacctaatacaactcctagctacccgtgcagggacacgatggaacataggcttcgaagatcctgttctcccaaccccgatggca

SEQ ID NO: 54882 - DNA, 816 bp, Zea Mays
atcctttcacttttctatgaaggaccttaggacctagagcaagattgctagtgtgaaaggtgtaggccccttgtacccactatttttaccactaccgtccaccgctttgctccatgcccaccttgatagtgtttcatacaactatggaatcatggtattggtcatattggccatgaagacctctctagtttaacaaggacacccctgatgaccatgtttatcatgcttctcaactcggtcgtcatgtgcgcctctccttcgctttctcgcaatattgcacattatataattttgatcttatacactttgacctttggatgtcccatatgtctactgtttctggattcaaatattatcttgtcattctagatgactgctctcaccacttgtgaacatcccctatgcctgaaatccaacaagtttcattccattgaaaggttgttttgcctacattgcaactcattttggcaccattatcaaatccttttagtgagacaaaggccatgattttgacaatcccactaaagccttccctcacccatggcttcacccttcacatatcctagccctacacctcccaacagaatggtaaggttaattatatcttgcacaccaccaacaatattatacactccctccacttttagactcacctcccctcatatagtggctttaggctctccacactactacctacctcctcaatagccacaccactacatttgtatttctccacccctcacttttctctctataacactcctccctctacacgcacctctatgtctatgggtgttagtgctatcggaatatctc

SEQ ID NO: 54883 - DNA, 410 bp, Zea Mays
ggtcactccgagttaagtaagtatgcaggtcaatcgtaaataagctgagtatctttgtaatctctctttattgatgacacatttccactttacagaatacattgttgccccagcagttttgaaatacagcctaggaataaaactttctgaggtgctctatgttccaggagttcccaacttctgtgccatccatctgagtgaggcgatatgatccgggccgagtgacttctaccactatgaaaggtccttcccataagggtgataacttgtgccgtccctctcccgttagaattcggcggaggacgaggtctcctatcgaaaagaaccgttgccgcacagccttgtcgtgatagcgccttagagtctgctggtaccgtgctgattggattactgcattcagtcgctcttcc

SEQ ID NO: 54884 - DNA, 491 bp, Zea Mays
cgaagggtaacagaccacattacaatacaagtcacaaattacatacacacggcgaagggccaccagccccacctcacaaataaatacagtcgtgctctcccctccctctttattacgagccgggggagggtagtgttttcacttactagtgacggcatcacacactacatcggctcagccttcgggataatgcccgcctctcgataattaaacaacatcattctcaattcctcaccctcaaacagattccgtagatccccctcaccaatacttgtctaaaacgacgaggatagcaaacgcgttggccaccccgatctacccgaagacgggttcgctccaacccatccgacggcgcctaccacttcgtgacatctcgccaacgctatgcttcgccaccacttttcgttgtcgtcgttcggacctcgcgccagccgggggatcaaacgcttcacccacctccagccgcggcgaagactccgccgcggccacat

SEQ ID NO: 54885 - DNA, 598 bp, Zea Mays
agccgaagaggctcgtaatgtacgtgttgcgttggccacagatgggttcaatccctatggaatgagcgctgcctcgtacacatgttggcccgtgtttgttatcccaatcaatctcccccctggtgtgtgctttcaaaggcagaatatattcgtgtcgttgataattcccagacacccggggaataaaatgggcgtgtacatggagcctttgatcgatgaattggtatgtgcctgggaggaaggggtttggatgtatgaccgagctacgaagacaaacttcagaatgcatgtttggtaccagtactccatgcatgacttaccagcgtatgggtcattctgcgcctggtgtgttcatggtaagttcccatgcccagtttgcaaggaagctctcaggttcatttggttgaaaaagggtggcaaatattcgtgcttcgataaacatcgacaatttctccctcctgaccatccattccgcctagacatcaagaactttacgaaaggtgtcgtagtgatagaccgcccacctgcaatgatgactggtgccgaaattcgtcaacagatagatgggctcgtggccaatacagaaggtggttttgtg

SEQ ID NO: 54886 - DNA, 356 bp, Zea Mays
cgacctttggaggaggcgtgtccaagccatgtagcagcatggctggcgggatggcctggtcctttgtgtcgtctttggtcagcagcctgacacatgatccatgttacctgtcctttttgaggtagagagccgaggctaggtcgggagcatgagcaggtgtctgagcccatcctggacgagacatttgttgagtcgtagttgttaaaacagtgcttgccatggtgaaaaagtgtggtgatctggtctgggcgtcatccacgacggcggaaagtagattggacaacagtcttgttgtttatgtagccatcctatcttcagcgtgttttccgggatagcaggcggcatcatgtgcttcc

SEQ ID NO: 54887 - DNA, 287 bp, Zea Mays
cagagactcacactttccaccttccctgcagtgagatgactatgacgcttgaagattgccagaagattcttggtctcagcattattggtcgtccagtgaccggtcaggcatcaccaggcggatagaggcagagggtggaggcctttcttgggagactgcttccggatgacctacgaggtagccacaacaccggagtctcactgacctggcttaggcaggcctttgggcagtgtccacctggtgcagacgagcagacggttggataccattgtcgagcttggattctc

SEQ ID NO: 54888 - DNA, 915 bp, Zea Mays
gcgagctcgtcttcttcccctcggtgacccagcctggcggcgctgtatagagcctcggcagagggcgtaccggtgaccctcactggcgatttcgcgcgctaaactccgattacccaggtgctaaacgaatagagggactgcaaaatacaaaggaagggtacacaccggtgatcattcagcagagcagcacgacgacgttggggtacgcggatcggcaacactgcaagtccggcgacaaatcctggctatggtcaaccagattccgacaagatcaagcgtcgcgctcctccccacaaatcaccggagtcttcccccacgatcgcgcacgagattaccgtatatcccgtggtctctctctcttcgattcctctctctcagctcgacgcagatgcgtacggcggtggctacgactaggcggtcaggagtttataggagcccaaaggcatccggtcggtaggattcccaggtgagccggcgctacggcatctctactcgatggcgaggcggctgtcgagctcaagttttatagccgcaaatacgtgggtgaaacggctgaggcgtatatcacggcttctgttgtaacagacaacaagatcaaagggtttaccgttcttaccgcggactctacatcgactgctgaggcttcacggtacatgcaggtatggttctggaacccgaacactggccagggcgatggagtcgcccgcgtagctaacgccctgctgatgcaagcgtctagctcattaaataaaaaaaaataaaaaaaatgtggaagggcttgtgggctacgcgggagctagctaggaatatgggtcgacaggccaacatacaaaggtaaggtcgtaggcttcctttttctgtttttctgatttgttttaatccttttctattttcggtttagctttcaaaataaaa

SEQ ID NO: 54889 - DNA, 511 bp, Zea Mays
caaagccgcagcagaacacatcgccaggcagtcagcccactataccctcattggggatgcactgtacagaaggggcgcaataggagtcctcatgaagtgcattcctttggttactgggaagcaactgttagatgagatccacgccggacagtgcgggatacacgcagcatccaggaccctggttgggaaggtcttcaggtctggtttctactggccgacagcaaagagtgatgcagccgagttagtccagaggtgtgaagcttgccaattcttatcaaagcagcaacatttaccagcacgacaactgcagaccatacacgtaacatggccgtttgtgtgctggggactggacatgatcaaacccttcaagaaagctcagggaggatacactcacgtactggtcaccattgacaaattcaccaaatggatagaatacaaacccattgcttctctgacttcaaccaaggcagtggagttcatacaagatataatattcaggtttgggataccg

SEQ ID NO: 54890 - DNA, 688 bp, Zea Mays
ggacaaccctcgggtcagcggtgaccgcacagttgcgggaagaaagggtgtagcaaaatcagaccaaaaaaggaagtcagcaagcccgaaggaaggagcttacctcggatcatgaccaacaaagtgcgacatcccaatagctcaaggtttgaccatcaacctggtcgaaggcaagctcgagggacacatcaagaatgactagtaggcgaacgaccggctgaggtttataaaaagaggcgaagagcgcccgattttgtcccaagagatgattgaccaccataaatacgacgttaggttctgaggggacgccatgatttctcggggaatgaaaagacgggacaccgtccgacctacattagccctcaaagggagatattctcccctcaggggctactgttggggaaatgatccccagtccctatgacccgccagtcagacaatgcgctgaggaaagggcccttggtcgctaggtcccattagtgagttggtagaggtggatatgtcaaccctgaaagaacccgcccctagtcgaatcccgcgacactgagcatggggccaggcatggcataacctgaccggaggggggcaagcgtgttcgaaggggaccactctagtggatcctgtgtctggccatagactgacctgccatataagctgaccgcacttaacagcgcgagcgccggtccac

SEQ ID NO: 54891 - DNA, 428 bp, Zea Mays
ttggtggactagaatgaaaagggaaattgccaagtacatatcggaatgtgacacctgccagagaattaaagccagtcacttgaaggcagcaggccctttgcaaccccttcccataccatcttggaaatgggaagacatttgcatggacttcatagtgggattacccaatacctccaggcaccatgattctatttgggttatcgtggacagattgaccaagactgttcatttcttgccagtgcacaccacccacaagacagagaagtatgctaaaatttatgttgatcagatagtaaggctgcatggtattccaaagaccattatatctgacagaggagcactgtttgtggcacgcttttgggagaaattgcaagaatcacttgggacccatgtcatccgaagctcagcatatcaccctcaaacagatg

SEQ ID NO: 54892 - DNA, 570 bp, Zea Mays
gagtggtccgactagggggctcgatccgctgggcatcttatcaagtccttccttatgcaatcctgtatcagccctttggtccgtggccaccccgtcggccgagttttcacgggagaatgtgaggtacgatcttggacgtggattcgagcaaatgacctatgggacggtcaccttgcctgtggctcgctaggagcatgctcggtccatcccttgctctatgtgggatttttgaatgcattttgatttatcacctagctatttcgagacagttactattgtggtgcggtaataacgggtagccatcatgatgttacttggtgtgagcgacctgatgggacgtgaaatggttcgtctgtcatgtcgtgcttgggttgcgtggtggtctggctaacctccccggtcgttactattgtacctctcgtggcttatcttcctggtgctctaccccaggcggcgaggtcctgcaaaacacatggtctctttgctctatacccgtggttcctccatcgtttgttcgtggttgtccctggctttgcataaataaaggaagagtgtgctcaaggtcagttt

SEQ ID NO: 54893 - DNA, 935 bp, Zea Mays
aaccggaggggcgtaaccatgacgggcttcgcgggaatccgttggggacgcctcaatcgaccttcctagcgaccataaagcgcagcaccagaccctatctctcctcctcttccctcgccgcacacaaatctctagccaccagaacaaaaccgaagcgagcagggcgccgccgcagctaattctcgtcctcgactccgttggggacttggaaaagggtcgtggcgcttcaccatgtctccaggagatcgtccttggcgaagcctgacgggattgttcctcggggcggccgtaattcttcgtcgtatttcatcgccgccgcgggaaccgcaatgcactgtggatgagcgtactccccgacctagttcctggtatgacaccacgactaacctcactaccctctgttctttgttttgcgctagaaaccgtgtagtgattaacaccggtggccggattgggcgtgcgacggcgagactccgccctgtgtgatggcgcgccgccgtggctcggtctgggtgaaaggggaatcgaccgcgggccgttggatcaggtgcgtgtggccctgattagaagtatgggtaacgcttcgcgtgcgggatcggatctgttggatcgcgatcggtcggtctcgggaggatcctaactttttaaaatctggaccgtagatccatgattgagcgattagaagtgaatcgatgtcgcgggcgactctcagtcgtcgatcatggatcctacggtggtgagtgaaagctaggttttatccaaggccgatctaatctcgtgcatccattttagatcgtgcggctcagatgccctcataccccttcgcgggtatattttgttaaagatacctcgtcaaactttaaaaaacaatccgcagtcctcgggtactattcactgtgtctcaggagtcttgcaccgaggcccctgaccttcct

SEQ ID NO: 54894 - DNA, 562 bp, Zea Mays
taggatcgaattcttctcttaaagcagccttgttgccactagggtctacaattcctccgaatcgatagtggagacctcgaattcatgtgggtatgaagcgaccatggctacagtttgaggtccagcggtggatgtgtgatctagggttttgcaaattgtttgagaagttgaatcggtggtagaagcaagtttggtaggaagtgataagctaatggaagactaataagggtggtagagtggtcctatttgtaagtaatagtgtaagtccatgcatcacggacctataacctaagaagttgaagcgatgtgaatttgtagaatctataacactagtccaaagttttggtcaagtcatgaatagttaaaggccaagtcctaagactctaggtctgtgtatcaaagcgaaggctatcgttgggaaaactcaggatatcaaattagcttaacaacaagattcaataaaagagttcaatctacctaagctaataactctacaaaattaaactcaagggctattgttaatgatatatactaggagtacccaagagcacttcaatgaaca

SEQ ID NO: 54895 - DNA, 1031 bp, Zea Mays
atttggagcatttgcataaataaaataataaaaaaattatgcttgcataacatgtattattatttgctatttcacttgggtgcaaatcctagatttgaatcttgtgtgaatatagaaattccaaatagaattcaaaagaaaatagaaatggaaaaaaataaaggagactacacctgcgtcatgggccaattctgccttatcctagcccaactaccagcctctctctcgcgcgcgtgatctgaccgacatgtgggccccacttcctagcccctcagccccacaagcacgcgctaccttgccactgacatgcaggccctgctgtccagggtcttcttcctgggcgagatttgcacggacgcataacaaacttcaccggaaatgaggtagccccaatcccgagcctttcgctctcgtgcacccctggggaatataaaaccggacgccaagcacctcctcatcccatgatcggagcaaatcaaaatcaaggacccgtgagcaccgtggcgcatcgagcgctgagaggaagttaggccgcggtcacacatgggtcaaggtctataccatcgtcgaaaagccatggaatcgggtccgggggcttcgcagagtttccgtggggatgctcgtcgcttctctgggcgccatttatggtcggtgcggtgtgaatttctcaccgacgttgggatacgccttggtgctgcgcatggacaaagccagacattcttgtgccgccaaccttggtaaggtcactcctaattagttcgttccggtctcttctacgcatagcacctttcggattgggatttggggctctagggcgcaacatcaccttctccggccatggcaccaccacgattgcgtcggctgggaagtggggaaaaccctggtcgttgatcaactaataaacgaccacaatagggcgcctgggtaccattttggtgtattatgctggtgccacagatcgatgatctaagggtgtaggttagccgggtggcgtggtcggctttgaaccgttggatgtcgatctgacaaac

SEQ ID NO: 54896 - DNA, 395 bp, Zea Mays
agattagaagcattgaaaagtaacgagtttttctgctggacagagaggtagtattcactcaccacaaccatatcacacctccggcttcttgaattcgatgagtagagtattatatttatactagtgtatgtgtatcatgtcatgtgtgatccgcgggtagacgggagcggggcagcggagccatgcggcggggagacatcgcaggtgcggggtgtcagagcggggagcatctaatgctgctgacagctcatccccaacagcgccaaccaggtctcttcactcacctccctccacacactccctgccctgccctgctcccacactcactctcacactacactactgctagcccctgctgctgctgcttctgagctgctgctgcctgttgcctctcc

SEQ ID NO: 54897 - DNA, 455 bp, Zea Mays
agatatcacctaggtacatcaattacgttcttccagtttatctaaatctagctgcaacatcatcacaacaataaactatacacacgctctacccccttagctaatgctcaacactttaagactaataaacttagacttattagtttttgacctctaaatttagaacaaggatggaggcatcgtagttatttttgtaaattcatatctggattaatgtgcacaatacgctaattacatgaacattacactattctatagtctcgtaggtagagtattatcaaggactatagacctttataagaccataaccttaaggcctaatgacttaaaacattaatgaacgagggccgcttagaagttttcaaattttacggaaatagacctaatgacatcacttgcttctcaatatttaggataagaataaatatttattcaagattattaatctaatgacc

SEQ ID NO: 54898 - DNA, 563 bp, Zea Mays
gaaaattctggtataaataggagacaccagcaatttcagtaagggattcgatgatatttgctcgagatcgactaatattaataacagtaataattcgagccaaattactgaagaaggcagggcggcgaagaaattcccataccagaggagtagcgggaaggagaggaacaccagcgagggtgtcacttgttgcgccttgccctgaaacacacatcaatgccttgttgcgcctgatgcacctgaggaggatcacgctggtgtggtggccttgatatatagggggtttctcgatggtaggggatcccgttcacctcgcggcgtaaggaagggagacgctgaagatggaagggcaaatttggctcggatttgtcggatttggcgcggactcatatcagcgtggagcgctagccacgggtgggtgcattgggtatgctcccccacggatttggctcggatgctcccacacgggtgggtgcattgggtatgctccccatggatttgccgatggatgggattgaagaacgctcccctctcggtgccgaagatgctcccccacatatttg

SEQ ID NO: 54899 - DNA, 465 bp, Zea Mays
gcattttacgcttccactaaaaagcaagtgccacattcgtcgttacaaaacagatcgttgatttacgctaaaatttgtattcatttacgctgtttcggatcacgttttacgcttaaatccacatgagctagaacccgagcacgatcggagcgcgcgattttcacgccgtaatttaggccccattcgtcgttacgaaatagattgatgatgtacgctaaaatttgtacccatttacgctgttttggttcatgttttacgctgaaatttgaccaagccagaatccgtgcacgatcgaacgtgcgcaattttcacgctgtaattttcgggccccattcgctgttacgaaactggtcatgtttatacaattgcatatatgggctgacgtctcgatattgcatggtttatgatgttaagttatatgtctttatacagtcgtaaatgctgaacaaactggcaaattcgttc

SEQ ID NO: 54900 - DNA, 655 bp, Zea Mays
tacaagaaataagtgcgtggacaccactaccgtgttgtgtaatataagctagaaatctcacaaccctcgtcgtgcacccatttcccactattttgtttacggtgtaccatcatgtgttgtcatcaccccttcgtagccacaattaattttaatagccattagatctatttagtatttttgaaaaagtttcccatgcctaccattatgaaaaacatgcataaccaaaaatctggaaaggaaatataaattatattgccatcacatcctatcacacatggtattggccaagcccctccgtcataacttctagccccagacacgtagcttcaatcagttggggatcgagagacataattgggagcacctcaaattcttagatcttcgtcttcctctataagggcttgtttggatggccatgtatccacatcaatccatgtgggttggagtggtttcgtgtgaaaatttagtttaatttctacaccacacgaaccctacatggatacatgatgagcatccaaataaggccgaaatgtagtctgcaagaatagaacaacacaagatatagtttggtgcttcggagactataaatggtaaatatggaggaggcactattgtgacatcactaaccattgtcaccaatgttacaacctacaga

SEQ ID NO: 54901 - DNA, 309 bp, Zea Mays
gccagctggccgaggtcgaatttagagtggtggctgctgagattagcactagagacctagtgcaggaatacttggcaaatagaacatttccaacctctagcagctaggggatgtcgaagaaaaaggaagggggaaaaggtatgaacttgtttggctcccttattgattcaaatttgagaagcagttcaagaagccatgcagtgagtggctagaaatgatcgaaaccatgtgcaatgaaattcttggcaactacacgaagaaagaggactagctaatgactactgccttcagtacccaaccaaaatgaag

SEQ ID NO: 54902 - DNA, 824 bp, Zea Mays
gctcgtttgtgacagcttttattgtctcttttttggaaggaaaaggtcttgccatcgtttttgtcctcttttgcttagtttctgtcgtaaaaaatatttcttaaaagtaggctaaataaacttcaagcgatttgcatccgcagctcactgactattgcatatgacctcaaggccatgaaggaaatcggagcatttctttcatattttctttcatattcagtcaatgaagaagatgataccagagatcgtcgtgtggtcatcaatctcactgtaatcacagtgctgcagtaaactgcatgttgtcctgtacaagagcggacccagagcgaaatgagagcgagggcacatttatgaagacaaacattaaaacaccagagtagaggcatctaagttgaactaagcaggtgaccttatagtgaaaatctagtctctactacttgcaccaaataagcagataatcttatagtgaaaatctagtctctactacttacactaaataaatgagcgagggtctgtgccctcactccactatactaggtccgcccctacctgtacctgactttcccttatctcgagaaatcagtgcagacacgattttgatgcagtggtggtatcagattaagatttcgttttttgcttgcgcatccatgcatccttgttgtgtagtacggttacaaatcctgaagctggtagtaacaagtttttcctttaaacacttttgttagagaacagatacttggacgcctcaggaactgctccctggctcctacagtcctacgtgaagctggtagtaacaagtttttgtttttttactttttaattct

SEQ ID NO: 54903 - DNA, 314 bp, Zea Mays
agacccagggaagggaaggagggttagttggtcacggaggtcgcgtagaggagctcaggatctccagcgatctcggcaattcggttgcaacaacccacgcgagtcagctggaaggaggttctgactactggggcccacgagccggtgagtggtcacgagtccgcgcacacgtgagtggatgagaacctgacgaggtgaccccgctgcgcagagatgtttggctcgcttcagacgatccgagcccgcggtcagtcactcagcgaggaaatcggctgtcgcagtggaggaagtggagatgggctgcgggcgcattg

SEQ ID NO: 54904 - DNA, 332 bp, Zea Mays
gcataaacttgtcagcctgtgaagcttataactgtacaaagagatgtttccagcataaaacggtgatgtttatgtcataaacttgagacaaaataagcataacatgatgttgttgacatcataaaaatgtacaggaattagcataatcaagtgcatgaaacacacatgaagataaaacacatagggtacaatattccagtttagacatcactgctccccaagttgtcattgacataacataagaaacgtctaccgtctttgccatagtatacacacatgactcaactgaagtttatggaaccattgtatacacaatatattacatatctaaa

SEQ ID NO: 54905 - DNA, 720 bp, Zea Mays
gtggtcctcctccttctccatggcaacctgctactcatggtgcatctcaatgtgctcattagcatcatcaagctaaagttggagatcatggagttggtcctccaaaatcccgatggtgaccgcttgctcgtgcacctcctcttggagttggtgaacctgggtgcccatctactcaatcttcaaatctttctccgccatctcggcagagagatcaatgacataccccttcgtatcgctaagagtgtggcagaagtcagggtgatggcggtcagatgtgccattgcctgactctatagggcctgcagacgatacaacgcatgcatgctcctcaccgaggtgaaggccccactatggcagagagaacataagtcctccgggtggtccaagcgatcgagccacatggggtcatcatgcctttcagtagggaacaagcccatggggtgaatgaccaccttctcagtgtggtgctcacaaaaggtagcgagagccttcatggcggtggtctcccaagtgtcgtcacggcgaaaccgcatggtcttagcgttaagtgatggccactttgagtgctatgggtggggtgctattgtgagatgcacatgacaccgatacacctagtgctcctcgaactccttcacagtgtagtggggtggtaggacatagcctgcccacattagtacttcccacagaatagcaggaaaaccatccgatcccaaatattca

SEQ ID NO: 54906 - DNA, 306 bp, Zea Mays
cccttttgtatatattagtttgcattaaaacgtgtattcatggccacaatataatgctgtgcaaattgagcagctgtgcaaattatagtgtagtgattgctttcccccttttttggtgaaatgctgctgtgactaactattgatggtaagctaacatcaagcataccaaatcaggaatttgacagctccttttagttggatttcgaccccaccaagaaaattaagtctggccttattattacctgataacctatatgtttcaagggcatctctgtttgtaattattacaacatgtcagaggaaggt

SEQ ID NO: 54907 - DNA, 687 bp, Zea Mays
aaaaaatccaatcacatcaaaatctctgtgtagtctcctcctgtcgcgagcaccaaaagcagttgtcatggcttcgtccattgccttcgcataacctcccaacagctcatcgctggtagcatcaatagcctctaaccaatcgtcattcggctcgtcaaattgacttatatagcggaaagtgtatcttagatcaaccagaccaccttcgctgggcccagcagcagtctcctttggcatctctcagtcatttacaagcagccacaccttgtaagcaatgtgctcttgaaccaaatccctggtgccaatgtaagtacacattgtattgaaggccatcaaacatgcttgcacttcgttcccacttgcgatcgatggccttctaatgccaaagcgtgattgtatggggcactggattatactccttacatcttccctctcactcaaatcattcttgacataaatccattacttcatccaagagctcgaacatttcttttggaacgttggcacaggatacctcgcatcagaacggtgcacaaagttgtaacaaccaaagttgttatgatactgatccttcccaatcgccttcgtctagtaggataattcataaatattgcaaaaacacttggcatccggctctagcccttggcttttcatagcccaaataaaaactccaactttaattaggac

SEQ ID NO: 54908 - DNA, 900 bp, Zea Mays
gtcagcatcacataagcagcaagcaaataagcgtcgttctaatcacgaatttgctattggggatttcgtatacagccctaaacgtcgattgccccgcaatgtaataactacatactcgccttcaagtattttggtctatttcagattgtgcaacgcattgatttcgtggcatacaagctggatcttccttctacttcacctgtccacccagtttttcacatgtcacaacttaaacgcgccatttctcctaagcacacggtgagtgccaccttgcccactgcttctgttggccttcagacttctgttgaggtgctggatacgcggaccatcatgtgaggcagctccccagtggaacaagtactggtgcgatggacgtgcttcgatgatgcactggctacctgggaggattcatagctcttcgacaacaattccctcgagccatcacttgggggcaagcagactcgcaaggggatgatgttagcgactgttctctagggacacgaggatggcgggagaacgagcatcgatgttgaagagcttagatcgtagggtgagaaagcccaacacaaattacactggtctagattgggtgtaacagacctacttgtgatttgtgtatgttgtacggttgtagaactctctgagagaggtcaagagggagatgatgcaaggaaggggataaagattttgtaataacatctgcaacaatgtcttatctcgatgccccaaattaaattataggacccaagctaaaaaatgctctatcaatgtcatattttacaaaaaaaattatcaaaaaaatataggtcaccctatgaagtgccataagtatactgtattttattgggctaccctatatctagatctaaatgaacggacacttcacaaaactatcctttc

SEQ ID NO: 54909 - DNA, 441 bp, Zea Mays
atcaatttggactaaatatgatttttctagggattaaataagttctaacaatttttttacattaaaaatcgatttccatattcatttatctaatttctttgccctctagactgcgctgctataatcagaaagattagggtttcctgcgcaaaatttactagacccagtgcacagtcacggtggacggcgggttgatttctatgtttcacaggggcccatacgcgaaagtgcacgaccgaaggggtatcgtgaggtttcgaccgtccgattagagatcaagcgctgggatctaacaacatttaaaacgaaccagtatgctaggtgggctatcagatccacgatctacgatcccaattaaatcgagctttacactgaaccgttacgcaatcgcgaccatcggatcgccgatcaatggtctagttttaatgaaacacgatccac

SEQ ID NO: 54910 - DNA, 530 bp, Zea Mays
caaagttacatggctcttcttacaggctccacgttggttcacagcatggcaaatcagttcacttggtcgatttatcccagccaaaatatcatacctgtccacaacactacaggagagggaacagataagaacttcagtgtggacatgctttaatgggaccagaattagatattttcagcagggggtggggcctctacaccccttttttcgtccaatacttatctctgttagtgctcattcgtggattacagcagggtgaagagatcttttcttcagcttcgatctgattctagattcagtgaactgaatcactctccttttctaccactgcatccccttccagtttacacccttgggtctcacaaatttcaatgataccagaccaacccagttggccaaacatgctccccaaccatagcactattaggttaatacaacaatccaaagtcgaagtcacacagaacaaaagttacaaatgctcaaagtgaacacaatccactaaatgtcgttttcagttaactgaaagaagc

SEQ ID NO: 54911 - DNA, 399 bp, Zea Mays
cacgacatgattggaccgtcgcagctacaggatgctcccttgactcagttgtcatagctcacccctcgtagatggcacccacatctcccctacaatctaggcactaatgctcttggggctaagggcaagggcaagactaggaggaggtgaggctggctatgtggacgacatggtatgtgttgtggactatgatgtggaatatttggactgtgttatggattatttattaatattggaccatttatgatgtagccgatgtggactatttacttattgtgatgtaactgccaggctgaccgaatgaccattcaccccacgcgaaatttcaaggaaaattaggtggacaaatggaggagtgtgtacgtatacttgctctagggacatacacgtatagcagtg

SEQ ID NO: 54912 - DNA, 346 bp, Zea Mays
tgcatactcatctgagcaaaaatttattagaggcgacccgaaggaatcatcgaatggatcggcgaagaagctgaagcctttgacgagatacttagcgaccgtggtgatttctgcaccttcaccggtgccagaggggttgcagtaattttagaaaagactggctgcgaacatattaaagctgcaacccagacggagactgtcttcactgtagacaacacgaaggatccttcggctgaggctactctgatgggtgggaaattatattccaatgtttggatgaaagacggccgggagatagccgacaaagctctaaagaagaacgaaaaagaaacccatgaagcccgag

SEQ ID NO: 54913 - DNA, 432 bp, Zea Mays
ccgcagattcatttcggatttctccaagattgttaaacccattacgggattattgaataatgatacaaagtttgactagtcttcgaaatgcaatgaagcctttgagcagctgaaagtgttgttgaccactgcatcggtgttggcccaaccggttattgaaaagccttttcatgtgtattgtgatgcgtcaggcagtgggctcggatgtgtcctaatgcaagaaggacgagtcatagcgtatgcttcaaggcagctgcgccggcatgaagaacactatccaactcatgatctggaactagctgcagtcgttcatgcccttaagatttggcgtcattatctgccggggaatacctatcatttgtatacggatcacaaaagtttgaagtatatcttttcccagtcagaagtaaacatgagacaaagaatgtggtt

SEQ ID NO: 54914 - DNA, 836 bp, Zea Mays
gaagcgttaccatataggacgttgaatgatgccccttatgtcctccctctggtccaggtcgttcttcacataaaaccacttttgcatccaagacctcgaccacttcttcctaaatgtaggcacatgataattggcctcagagtggggcatgaagctgtagcagccgaagttgttgtggtattgttctttcccagtcgctttcgtctgataggataattcgtgaatattacagaagcacctggcgtctggttctaacccttggctcctcatgcccatataaaacccctactttgataagagcctcgagaataagttgatgaaggtatatttcaaaagttttcagaacttcgaccaacatttatgcagtgggaaatgaagtctggctttcatgaagcttctgaaatctacaaactcgttagcttcgggaagaggaactgtattctcccctccagccctgacaatagaaatatcacgaaagtatctgcccttcatcgctttgatcttcccttgcttaacagatgactttccaaaaacaacatggctaggtgcctccacgaccgatcttcaacttcctcattcccgctctctacatcgaaactctcgctgccgctggaattctcagacaacccaaccagcatctcattggtgatttttctgtattggtcttctccatagcttcataaaaaccaatcagcacagggtcagtgatcttcttctcctcagccatttaggcgatggttgcacagatgccgaagctcaaaagtcaatcgagttcaagaaagcaaagaaactcaaatggcaatcacatcgcaaccagctagatagcacgaaaaata

SEQ ID NO: 54915 - DNA, 332 bp, Zea Mays
ctgctgaaagagaggggtttgactgctgaagctgttgttgctgattttgtcttcaagaatattcagccgctaaaagacagggcgcacccggcttatttgtatcgaggcctagccgactcaactcgaattaccaacagaagaattccctctgcagacttggtgagccgacttgagatgatccttagaggcaaggtgtcaaatgttggagccccagtggcatactcggcctggaacctgcctcctcccaaagccttcaccctttttgtgtcgaatccacctgttactgatggcagtttgggtcttagagtgcgaccctctgctgaagaagttag

SEQ ID NO: 54916 - DNA, 447 bp, Zea Mays
ctcggagttcacaatgtagatacaaagaagaaatgcctgaactttggaacaccacgaacagaagaacttcatgagacatgtataggagtaaaaaaaaaaatttaaaaaaaatctggtgccctcgtaaaaaaaggtacgagtactaccgttggatcaaattcggtgcacggacagaaaagaaaaagaagacactgtttcgcaggaacctgggtccaattattaagtacgggatgtgtgatttatcaatgacaacatcccagtggcgtaactagccactcaggcagcagcctcagtaattgcccccagatggatggatcgacggtgatatcagtgtcatcaccatgcatccagccggaggaggaggaggagcagcagcagctagcatcttgcgtcgattcgctgtcagagttgacggccctggacaaagacgcaatctttcccgtcgag

SEQ ID NO: 54917 - DNA, 569 bp, Zea Mays
gctaaaatgtgttgaaaatactagtgatgaactacttagagcatactccaagtctgaagataatgcactatctgcaaccttcgggagccgaaaaaagaaaaggctaaatagagtttttgatgctattggatttgtgtatcctgattatcgctacccgccgcgggggcaaaaaagaaagggtgcaacttctgggaaggctgctgcttcggctgctccaagcgagtccgcaccgaagaggaaaaaattgaaggtccttactcaccgaccgcgctacattgaagcggccatagtgcctgaatttgacggtgagacctcttcagctattgaagccaaaggacttgctcttacgcagaggattgaagagccggctgcaatgccgaagattgacaaaattgaagaatcgagaatcgaaggggcaaaaacattagaagttctaagcccttcggcaggagtggaggtgccgaagacacaaaaaggtctagcaacgacccccaagagaaaaaggatggctagtgtcctagatgtgctggagacaataaaagcttcaagctctactctaggaaaaattg

SEQ ID NO: 54918 - DNA, 601 bp, Zea Mays
agggcgtagttctcatctcagattgccttgagggcgcaccgacttttgtatctccctgtatttctgtcagccaccgatgtcgagtcagagggtcacctctcttatctaccaggtttgctttcacttctgacctctagtggcagatacattgaggagtgggtcagagtgttctatgccaccgtttggattgaccctgaccatcagtggctggggttccactttgagcgcgaggatgtcactctgcatgccactcagattggacagctctttggattttctaagtcgacgaccaggctccatagcttgtgctacgacacatcgaatcctccccgtcgccctcacgacggagttgccccggctacagctcacattgctgccctgttcagacctccatttttagatgggtcgcgacgttctcctgcagcgaagttttttatgagatgatgagacggactttgctactcaggatgggatacagagaggccaccacacatattcagctatggcaacttggtgccttgatctcacacttagagttcaacgtggttgattttcttatctgtgagatcgaggatacaatattagatggtctctgtgctcg

SEQ ID NO: 54919 - DNA, 686 bp, Zea Mays
caaatgtcggcgaatcgaccgcatccgagctcgacggcggatgagtgggatgtcatcagcaaaaggccaggctaagcgccttggcccatacccggcgcgccaaatgtcggagggaaaatcctccgagcgggtggcggagtgcacccgccccgatcctaagatgaggaggggacctagggattgcctgatttgctagaagaacacgagaatacaaggattagagtggttcgggccgccagagcgtaataccctatatccactgagagttgtattgcttgggagtctctgtgtgttgtcctcaaactcagactccttgaatccgtcgcctgagttagaattgagttgtactgtgtgtgtgccctcccttttatagttcaagggaggcacgtacatggtgtccgcctgttaggatgggccaccattaccatagtggctaagggtagtcccagggtcaccttgacccagcagtagtgagtacctcaatcttgaggtatcaacacagtgataatcaccttggaagttcattgattagagcgacaactgtttagggttgggaacgtgacaacatcggctaaccgatgataaaagatctgtttaattcgctacctaacttgttatgggttgtttaaatttccgtgtctaagattaatttttaattcagacgactaacattaggtaagttttgt

SEQ ID NO: 54920 - DNA, 642 bp, Zea Mays
tgatcacgaggttagaaaccctaaactcctaaccccccttattatcccataagaccccatctcatgaagcattttattcatcatatgcatacaccatgatttctagtaacacttcacatagaatatttcattttggacacctaggaaatttatataaatttttgtttaaaggaaaaaggggttaaggaaaaagaaatagaaaaagaaaaaaaaggggaaatcccctccccctcggctgggtcgattctggcccaagtctttctccccctctcccacggcccatgagacccatctcatgcgcgcccgcccgcatgccacgcccttccctcccccgttgaccacctgaccccacccgtcagccgcaccctctctttctccctcgcacccgctcttccgctgacaacccggtgccgctcgtcagccccctctctctcgcccatgatcggccaatgacgtgatcgtcgccggccaccgcctgccccgtctcctcgccattactcacccaccagcaaggtttggcgccttgcgtccccgtgccctatgaccgagccatcccgtcaccaccgcttgcccgagccatcccgtcgccaccactgtgcgtcatcatcgctgtcgcaagcgcgcctcgccggtgcatgccac

SEQ ID NO: 54921 - DNA, 486 bp, Zea Mays
aatagtgctgaaataaattggaccctactcctataaacatgttttaacctaaattggtgtcttagatgaactaggccatacacaactacttgacctacccgatgggttgcctaattcgtctattccaatctaaagtcaaagtaaaccttgtttgacctatctcatgtttcacaatcatctacctaactaaaccttccaaacccctgatggagacgcaaacacccaagaaggaagagatcgaccccatcaaagaaggatacagagtcaaactagattgcgagataagtcaagatccaccatccgaaacaaagttcttccttgtcctaatcttcttaccccaactttctttactaataactaaaacatgataataatgtacccatgctatcctagtcacccactaattagcaaaaaaacttatggtttggtaccaattaaaaattagaagctaaatacaaacaaaaccctatatatcccttttcttag

SEQ ID NO: 54922 - DNA, 586 bp, Zea Mays
ttcctgctgttttgcccccaggtgaattcggcatcatttttaagctgaaggataggagtgaaagcatcaatcttcccagctaggttagaaataaaccttcataaataattcaccttactgaggaacttcttcatttcaagcttacaggttggaggtcccacattccgaatggatttaattcggtcagggtctatctctataccatgttcatgaatgataaatcctaagaactaccagccgacactccaaaagcacatttacgtgggttcattttagaccgtaccgacacattttatcaaaggctttacacaaatcagctattttagaactaaactcagtcgatttgactacaatatcatcaatatagacttccacagtgtttcccaacagctcgtcaaagatcaaatatatagccctctgataagtagcaccagcatttttcagaccaaatgtcatgacaacccactcaaataaactaatgaagcctagacatataaaagccgttttagaggcatcttcttcggccatgaaaatctaattatatccgacattaccatcaagaaagctaataattctatatcctgac

SEQ ID NO: 54923 - DNA, 685 bp, Zea Mays
gcggaattaatatttgagcaatatcacaagtgaatatgaagcaagaacttgggggtagagaggaaatacaaattgcagagaaataaagaacacaagacacaacaatttgtttgatcgaggtttagctccgaagaacttacgttcccgttgcggtgtcccaactgacgagaggtgcacccaaaccttctcaagtgatccaaagatcaaacttcatgtcacaattttctcttataatttgtctcctcacaaggatctccacaaatccgagtctcttgctagtcgtacacatgttgatgggagcttgatctccaatggaagcaagagagaggaagaaacacaatcaagagcacaatcacgataccaaaagatcgaacaacataagcgcaaaaaactaaagcagtgctctctctcgtgaatactagcgcttgaatcactttgatgtgtatcgctaatgcttggaatgaaattgtatgctcttgagtgaattggtgtgttaaggggactggtttggggtctatttatagccaaagagccgtttgaaaaacatgcacagttccggactgggtataataaccccaacctcagggccgaaaactgctctactctgctctgtatggctgaaaactggatgcagcacctctgatgtattcatacatactaaattgctaggttcgcgacgacagtt

SEQ ID NO: 54924 - DNA, 461 bp, Zea Mays
aagaaatcatgttagattgatcctatgccttgtcaacaatcttgataactttggagggaaggcccagtatgttcaatgggcacaagcagctggtgttaatgtcacaaattctacggattcctttttctttcacccaactattaaaggttactacatggagtatgtaaaggtaatcattatgtattaaacattttttcaaaatttttattgtgctaacatgtttgtattagttttatattcacttaatttttgtcagttactttgttaataggattatgcattgtaacaaattttaaccaaaacatgtttgcataaaatgtcattatgtcaatattaagaatttaaatgatagtgttgggcacttgatttcaatcccctaaaggtattaaatatcaaggcaacatagtttgatcgagcttcatctgcactctctcatttctttattctcaaagaaaaactag

SEQ ID NO: 54925 - DNA, 486 bp, Zea Mays
caaacaccgaagccaggacttcgctctcattaagggacaactttacaagaaggggtcagtcaacccatgcttaaatgcgtcaccgagaccgaaggcgtccagatcctgtgcgaagtccatagcggaacttgcggctctcacgcgaggcctagggccctagctgccaaggtgatccgtcaaggcttctactggcctgctatgatctgtgccgcgaatcgggtcacaaggtcgtgtgaagcctgccaaaagttttctccacgctcgggaagcccttcgcagttcacaaagctaatcgcccacacgtggcccctttagcgctggggcctggacattgtccgaccactacccatggcccaagggaacctcaagttcaccttcgtcgccatcgagtatttcaccaagtggatcaaagcaagagcagtatcaacgataacatcgaagacttcccagaaattcttctggcaaaacattgtttgccgattcgga

SEQ ID NO: 54926 - DNA, 321 bp, Zea Mays
cgctcaggtgagaatagatgatctcaaagatgaagtgaaacatgtgagacaacttaatgaaaactatccaatctaggcggcaaattgttaacccttggcaacagatgctataatgagttagcgaagacttccctcctctactggagcttcatctagagagaagatttttttggatggtgacttggagggcttaatgcggtgggtgcttagcgaaactcatgcctataaatgcattctctcagcacgagaggactattgcgcacggataggcaccgaagcactacttcggttttgcttaagttcaggtgtaatcatttgaag

SEQ ID NO: 54927 - DNA, 2615 bp, Zea Mays
cttagctagaggctctttcactcttgcacatcgttacattctacatgtcaagcatagagtacacaatacacagattcttttaccggagaaaggggggtatttttgcagggaagaagaaaacactaaatatgccaaattactactctaactaaaaaggaagctaatttgttattcatcaaaccacaaagttttttagaaacaaaatacttttatggagagagagagcgtgatgacctttcaatctttacctcgttctcttcattccatgaaataaatgatgcatcgtgttcgtggatttttgtattcagctcttccaatttagcttcataggatctttctttttcaattatatgtgaattcaatctaaggacctcatcacttagatctttaattgttctttgactctccaaattaaactccttcgcattttctttttcttgaagaagtttagtcatttgagactgcattatctgcattccttgaactgcaagctccatttctttgctatgttggcaaagaacctcagcattttgccgctccacagattggaacgcttcattggccctaaggtcgacctataacatggattaaatttaaggtcattcccgatgattaaagattgccagtctatgttgacaaaaattgatcaatgtgaggaacttactgacatataacagtggattgtattgttcaccttgataccaaataacaagagcattagcttacccgatcctctaagttcaaatctgaattttgacaggcgatcacttcagggctcatataaaggcttgactgcaatgtattgaatccaattcgaagctcacgtacagtactgtttgtctttagaacttctgacatcagtcttaacaaaacatttaactcttcatttttaagcttcccaataagctgttccttttcctgagtctgattcaataaatgagcaaaatgtatctttgactggtctaattgtgactccagacgatgaatctcttctcccattgccttttgtaaagaaacacaggtctgttgcagaacctccttctgtacaaaagtctcaattgattcatccaacaataggtttattctgtgaatttcttctagttggtgattgtttacatgtccttgttcagatatttgtgatcttagaaaatatatttctttttcttgatcacatttttcctgctgatgctcttcatttacaacctgcattgctcctcttaaggaccttaatttcaagtctaagtcacgtcttatatcatctgcctctttcaacctgttctgaagctcttcgagtagctcatctctttcagatataccactacacagctttcgaacttgtttctcgatccattttctttgagataaagatttggaaataaaggcaacctgatcagaagcttcacctaaagctgcatttccatccacaagacattttccaatgtcggcagctaatctgttccagtcattggacaatagttcaatttccttttctttttccttggtcacagaagaaaatatttcgttctctttcaacacctcaagtaacttatcattcaactgcttgatttctagttgaagttcatttatgctttgtttggctaacaagtcatttttgttgcttgcatttagttgctgttggactgatatcagatcttcttctaagcattgaatcaccttagctgtttcaacctcaacctgtttacgaacttcatccatttctttctcagcaaaacagtgtgatgcctgatctatttggtaccttgtatttaggttccgtgccttttcaagtgaagcttgcattcttttaaacttcctctgcaaaggtgaatcttctttaccgaaacacttaagaagttccgctttgggctcctctttggtcaagtaatcctgcctatggtggaggtcaagttcactgttcaaccttgagatttcgacacaccccttcttaagttcagctatttcgtttatcaatataatctgctgtgattcaagagcttcaataagagatcttgactcgttcaattctctttccattgcctcacaatgcttacacgattggaggatatgtatgtttgcttcttgcagtttgtcacctaaaccagctggtttttcctcagcttccgcatgggctgttttctcttccacaagatcagctatttccctgtgaagtgatttacttgcttcaataacagaaattccaaccaagaactttttttttgcaaatatgcaattaccttgttagtgctatgttcgattctaagcaaacttgacggttgcttctacatgtttctacttcttggctggtccttttcaactgaacataaaaatagaggtttaaaaaaaatctgtttgtagggagaacgaatgtgcagtgagaactaaatatgaatttaaccttagttttgtcagaaaaggtattttgttgctcggtttctgtcctctgttcaagtatttgtgaaacctgtcagggcaaggaaagttttgtaaaataaacagtattgtgcacctactagaattacaaaataaggttcagtagggacctgatttcgaagctcagaaatttcattcaatagaagctccctctccccttcgttgaagaagagctgggacctatc

SEQ ID NO: 54928 - DNA, 464 bp, Zea Mays
gtaaatcctgagcatcgcttatgtacatatgcttactgtttcaacataggcatacaactgagttacaatttcttgcatatagttccttcaatacttctaattgcattggcatatgaaaattaataaattaatatcaatggattgtcaatagatattatttcattgccctctaaggacctgcgtaataaaggtgttgacacagtgttgctaatgaagatcacatagccctgatcatttatgtccttttatggcctaaactttctcttacctaacattcccgcattggcgcattgttgctggcaatgccatccatgtatatggtctactgcatgatgataaaatccaatctagtttggcatatgtgtggtacatgttaccccagttcatgtaagtaagagtaaaatgtgcttggggtccctaaccttgttccatcacatgagtccacttctagttgcagattcagg

SEQ ID NO: 54929 - DNA, 501 bp, Zea Mays
tggtagccactcaacccatgaccgtggatggtctcctatgatgtacttgaggtacattgtgatggttttattaaccaattcggattagccatctgtttgtggatggaaggttgtgctcatccgaagttttacaccagatagtttgaatagttctcaccaaatgttcccagtgaagacggggtcgcctcactgacaattgactggggaaaaccatgaaggtgaaccactccttcaaagaaagctcgggctacacttgttgttgtataagggtggcttaaggcaatgaagtgcgaatatttggaaaaccgatctactattgtcaagatgactgacttgccatgcaccttggggagcccttctatgaagtccatggatatgtatgaccaaatctgggagggtacctcaagaggttgtagcagcccaactgggtggagagcttcagttttgttttgttggtacactgaacatgctcggacccaatcccgtaccaaggctcaatct

SEQ ID NO: 54930 - DNA, 303 bp, Zea Mays
atgcaatctcttctctatgcagcgacaatttagggcgacatccgacaaccctcatggatcgcccagcccatcgccgcaccagtccagccgcccacctcgctgaaatactttgtgcacatgatcttatctttgttggtgttattaatactttgtgagataacttggtctgaacttgttgatgttggtaatgctttctgaggtagttgagacttatgtttgtgagtgttggagacttatgtttgtgttcaaacttgtttgatgtggtgatatttatgagatttatggtctttgtgagatatgtga

SEQ ID NO: 54931 - DNA, 324 bp, Zea Mays
aaaaaaacagaatctttaggttggttggattagttgggtggcgccgtggcgaggctgtacatgtttgactcgtcgccatgattggctggcgcagccatgtggtggtcgatccagctcacaacacaacaccatgtcctccaactcgcctacaaatccatacaccaagaacactgcctgtctcgtggtcgtagtacccgtaagcagcagcaccagcagcgatgttttggtgaaagggaaaaattaaaagggatttcgtggcggcgtgccttcccttttctgaatgcacgtggagtagtagcaagtgcagtccgactctgtttcgca

SEQ ID NO: 54932 - DNA, 501 bp, Zea Mays
gaagccttgacggatcactttggcagtgagggccctaggccccgcgtgagagccgcaagttccgctgtggacttcgcgcaggatttggacgccttcggtctcggtgacgcatttaaacatgggttggttgacccccttcttgtaaagctggccctcaacgagtgtgaagtcccggcttcggtgcttcaggcgcttgtcctcgttgatgtcgcttggatggtaatatccctacaggaacagggtgattggtgcacgccagtcttcggtcatgatgaggttgactatgcggtggccttcggtgtcattggttatttgtaggccctctgggctgcggatggctggcgtgccgatgacatggtagaacacgtcggagggcaaggcctcgcctctggcggctgctttggccaatgcgtcggcctcgtcatttttggctcggtccacgtgctgcaaggtaaaacccttaaattgtctctcaagactgctgacagccgtgagatattg

SEQ ID NO: 54933 - DNA, 1176 bp, Zea Mays
agcgggtgtagcgaccccctgtttcttcttcctaggagccatcccgatctcataagcaaacaggctcaggtacgacgcaggagcaagcaagggctcgagggactagaatgcggcggaagaaaaacagagttagggtttgcgcactgggaaaccgttgacaaggatgtatatgcgcacgctaagtggggcgcatcatgacggacaagtggctcagactagtttttggcataacagaataaaatgggtcagatagagtttccagtcaggcctacctgagtgcttcgaaaactgacatcgccgatcaggatcaccggaatcaacttatcaggcaaagcaggagtagaacaaaagcagaaatgcaacggtaggatttcattcaattggagcaagaacattacaaaggaaatagggccgactcattatgagccgaccctgctatcctcgttcctctactactactactacaagtatgactactgcaactactactaccacaaccactactatgtacaccggtggcgccttgccaccggcgttaccaccgtcgcccttgtcaccgccggcaccgcctacacagctgtcgccgccgtcctcgccactgctgccatcagcctcctcctcaaagtccaaggagtcctccttctcttccgaggagtcccccgggtagtcctccccctccgagtcatccgacccctcgagccctgcgcgcccaacggatcggatgtaggctcactccaccaccgacaaccccatggagtcatctgagtcatcggacgacaccacgagggacgccggaaggggtgaggcgtcatactcgaaggatgacaccatgaggctcagagggcgcttgtgcttcccctccatcgagtgacgcctgtccctgcttcgtttccctccggccatcgctctcttgggtgaggaggaaggggagaagaggagaatgggtgagcaggaacaagtgaggaaagcaaccgggggtgagtgggctatttaaaggaggcagagggtggcccttcgtttctcgcctgttcggcgaacagtcacaagacttcaatagcagctcggatctctaagaaataagacaggcaactggcgtcgtttcacataacatgacactggatgaaatcaaagtcaaccactcattacacctccctgtcacttcagtttactatttcg

SEQ ID NO: 54934 - DNA, 547 bp, Zea Mays
aataacctcaaaataatttattttgcatcagttcaagcactctatatgcctcccacttgcaggcaaccaaataaacacttacacaaagttaacgcacacggtggtccagaccaagaccatgcgggtaatcaatcagaaggtatgtgcacgaccggatacaataaatcttattccagacatatgaaatcatagggggctctctgctgtattatttggtgcgtgaaataactagctagaaagaaaaggaaatatagctagctcagttgacaaatgaaatcatataaattttacaaaggaaatatagctagaaagaaaggaaaaactagctcagtagataattgtgttgtcccactattcatggggaatcgagtgcaaccttgcatctagcatatctttagttttacaaatgcaattgttcttcacaatcacgtttgccactcgatctgatccgtggtaaacaccatctgcaatatattaccatgattgcctctaagtttctagcttctcaagctgtagtccggcctggcctgcttgtcacaaacctagc

SEQ ID NO: 54935 - DNA, 423 bp, Zea Mays
gcaattgtcaacgcacacacaaaagaaagaaagaacacctggaaagcacatatgtacacataatctgaacaaagacgtctcgtctcccataaaaatatactggcaccaacagcacatgtaaaatgtaatgcatgcaaagaacttggcataggcagacaataggaaataacaatcttgcatactttaataacctgcttgaaggtcaaaaatgattaaatgaacaaaaaactagggacaactgacctgaatgtagattgctgacttgttgattgctttccaattttcagtcagttatcatactattaggatcatcctaacagtaaaaagagtgaaaatagataaatccatgttaatatttaacaaacaaatgtaacaataaaatatgctaaagagtaagtgtttgttcttaccatttcatcctcc

SEQ ID NO: 54936 - DNA, 540 bp, Zea Mays
tctttttcactcttttttataatttcatgggccatctctcagccaccattcacccagacatcattgtagaattttccgcccatcaaggttgcttcagctgaaggatccttcgtataatccacggaaaaggcagcttcagaccgggctatggttttaatatgatcgcatccggccttctccaagatggatgagatcccccgcgcaccagaaaacgcgcagacatccccgtgatcactcaaaatttcttcgaaggtttctgcttctccacttaaccattcaatgacgccttcagggtcaccttgtacgaagttttcttcggcagagtaggcacccactttggcgaagctagtcttcaatttcttcacacaatccaaggatttctcgaagcacctttctttggattggtgaagttcttcaacatttttctctagataatttttccaatactcgctgatctctcggttggcatgtgcaagtgcgcaattctctttagcttcggccagctgcttacgaagatcttcaatttctgctttctgagct

SEQ ID NO: 54937 - DNA, 499 bp, Zea Mays
gctgctctaataatctttcaagctaaagatccattaatattctcgtggattatggtcgtctcttattcgatatataagttataggcagccaccggatatcaagcggatactgtagtgtataatggctcacgatagatcagagagacatcattttacgagccatgaaggtccgtccaagtgcaatcctgctccagtttgaagaagaaaacttctttgtgtgagtgacaacgataaattcactccccttgggccacatgaattccgggcaagtacaaatccatggccactagcccactacctctacctgacggtcgatgaaaagtgagattcgaccgttcatggccacctccccattcataggctctctcgtactcgcatcgtagggcaggacgtaccagtcacaccacaggccaggcggtcccattctcccaggcaacagcttcctgcctgcctgcctgcctgctttgttgtccgacccgctcgtcgccgtcaccgtcac

SEQ ID NO: 54938 - DNA, 461 bp, Zea Mays
ccagccgtggtgcctgagtttgacgcagggtcctcttcagcggccaaaacaatacaagctgcttcgtccgtacatggcgctgaagaaccagctgcaatgccgaagatacatatagttgagccaaccgaagataaggatgaaaagactgaagagccaaagattgacgagataacaaaaatgccaaagattctgagccttccgatagaggcagatctaccgaagatacaaaagacttctgctgccaatcctaacaggagaaggatggtaaacatgctggttgttgtgttggaaatgatgaaagtcttgagtcctgctctcgtaaagaaagtcgttccaaccgaaactaaatcgtaggcagaaaccgaaactaggcaaaccgaagatgcacaagttcaagctgaaaccgaagctacgcaaattcaagctgaaaccgaagctaggccttaagtgcctgtcgcgac

SEQ ID NO: 54939 - DNA, 487 bp, Zea Mays
aacttggctacaacagttgaggctaccacccctcaagtcgaagttggtgctatgactccatctaaggatagcgacaactttgatattaaagaagacatcactaccattcgtcctacgaagtcaagtcacgtgaacttcggcaaattaaaaatcgaaggaggacacgttgatgtacttaaccgctttggctatattgacaatgttgattaggtgtggctaggaggtgatgatttagtgccaaagccaaaagaggacgaggttgtcgtgtttcgaagttttctgaaggctgggcttagatttcctttgcataagatggtagttgcagtttgaaaaggtttaacatatacaacatcaaacgccatagtgtgtttaggaatttttatttaggctatgcggtgttgagcttgatgtcgaagctttccgcgaggccttcagtcaaatccatgaattacactttgagatgaaggcaactaggggccttcacaac

SEQ ID NO: 54940 - DNA, 611 bp, Zea Mays
gcctaaataggcaaagggactatgcatgtgccacatgttcatcgtcgtaccattctacatttgaacaggacaatgtaccgacaattagtaggtggatggaaagtatactggcgtcactggatgaataggtgatgcttgatgcgtcgcccttcgagctattttatttggtcgttttgttttagcgggtgaccgaggtttctttttatgaccgatcgtgtagaatggccttcttgctagcatatttggagagcaattgataaaaagtagggacgacttcgactagccgaccatgtgcgttatatgtactttgcccatttgtccccttttttgctttgtctggaggtcgacgcctctgaccatgggcggactattcggctaagttagtcggaccgtctgcttgatcactggaccgtccgcgcgccagtgttggatcgtccgcgatacttgagttagagagcttgcccccttgtgcctccagatttgttagtcttcctgtacagagctttctgagcaatccctccttgttttacctttgcctttatcagtcacttccgtccaaaccaagactattttgcttgctagttctattacattgacaggaaatggttccg

SEQ ID NO: 54941 - DNA, 439 bp, Zea Mays
ggtgagcggtttttctttgggccagatttagtaaaggaggcggaagagaaagtgaaacttatccaacatcgtttgaagatagcacaacatcgtcacaagcattatgcagataagagaagactacccttgtgtttccgagttagagattttgtgtatctgaaagtttcacctatgaagggggtaactcgtttcggcatcaagggaaagctggcaccacgatatgttggtccttttgaaatactagcacagtgtggattcgtggcttacaaagtgaaactgcctgaacatcttacggccatacataatgtattccacgtatcccaactgaagaaatgccttcaagtacctgacaaagtgataaaagtttctgatgttaatctggaaccagatttaacttattccgagcaccctgtcaagattgtaaatcgacaagaaagga

SEQ ID NO: 54942 - DNA, 310 bp, Zea Mays
tatttatcccttcctaatacacaccaatctaggaaataaaccaatccttaaacttgtcgctaagtgtcaacccggtccataaacttttaaagtgtgctaacccggtccttaaacgatgtttgggtctcaattacatccaaacagcgtttatggaaaagagagaagagatacatgctgacatgtggggttcatatgtcaaccacgactcgtatggatgtaattgagacccaaacagtgtttagggaccgagttgacactctttaaaagtttatggacccggttaacactgagcaacaagtttaaagaccga

SEQ ID NO: 54943 - DNA, 770 bp, Zea Mays
gtgtaagtagcagtagagtaaggtagtgttagttagtagtgtagtgtaagtagtagggtaatgtagtgtaatgtaatctaatgtagtgatatgggtagaagaggctgactcataatgagtcagcttcgagtttgtgttaattccccattatgaatgaaggatgaagttactacaccgtttacttgctttttgttcatgtgcttgaaagtttgttcatgtgcttgacagtgacagcattttagaggtaatgcccgagtgatgattgcagccctcacttttccgagttgtgatctggcactttagatgtaatgcccgacctaaggagccaacttatactcatgctgacgtgccttcttgagttccgaaccctaaatcttactttttcctctgccacttctttgctttctgaattcttgagcccgctcgttctgcctgagagattgtgatggctcccaagcggaagagacagagcgccgccgttctgatcattccgcccatcgaacccaacaaccagcttccatttgctggtaatcacatgttcataatttctgaattagatcttttgcatcatgtggagattggggttttgccgctaaaagaactgtgttcttggcggacctggcgcggggtcactattccgacataggacatccatgaggctgttgtttacgtgtcgtttctcatccgcggacttgctcttcctgtttctccctttttctgcggtctccttgacttttatgatttaaatcttacacatttaaatcccaatt

SEQ ID NO: 54944 - DNA, 548 bp, Zea Mays
gtccgacacctgaaggtctagtggcaagttagtgtgatagaccctccctagaaaataaatttaaaattgaagtgaatatatgacccacataccagatactaaactgtagatacaacactttatcttagccaaaagcccaagaaaggtataagttgtaaaggagatctacccctttttatagctcactcggtccctcgtcctcctatagctagcgaggttgtactatactgctgtgtgactcgtcctacttcagcaactgaggtggtactatccgggagcgccgcgttattggacttagttgttttctcacgattcatctggaggataagaatctggttgttagatgagacgtgtgggagaaaaacatatctactctacgcgaaaaaggtatgagttgaaaaagagacctactgcccattttttatagtccgctcgatcatttgtcctcatttagctagcgaggtactaccactagtacaaataagctcaaagcctgcggcactttcaacttttcattggcggtttccgttatcatacgtcagtgaaag

SEQ ID NO: 54945 - DNA, 488 bp, Zea Mays
aaggatcaagggggccttggtatcttagatctaaatatgatgaatattgcccttcttagcaaatggttgtacaagctactcacctcagatggattgtggcaacaattactctgtaataaatatgttggctcaaaacctttggctcatgtgcagtggaaacttggcgactctcatttctggtcaggcttaatgaaagtaaagccagccttcctcagttttggctcattcctcataaagatggctctcaagtgaagttctgggaggatgcctagttggatgtgtccactttaaaagaccaatatctagccctgtataacattgcgaggaacaaattcatttgaatatcagaagccttgagtgattcgcctccgaccttttcctggcggagacagttatttggagccaatttggtcgattggctttccctattgtcatgcatacaaggtgtggagttgtcccatgatcaggataccttcttctggaacctt

SEQ ID NO: 54946 - DNA, 443 bp, Zea Mays
aagattgtgcctatatcgattgttctagttttgaggcaaataacatcccacggtctatccgttacctatccatttccatgcaagatcattgtgctcagaatttcgaggaacaaatgggaaaactgaaagaaaagatatacattaacaatttgcggagtttgatgatatttggaaaatacattatgttacatctgctcaatattttaagggacacatttaaggaaataagacgtcttcgtgttctatctatattcatatactcccatagttccttgccaaacaacttttcagagcttcttcatctccgctacttaaaacttttgtcaccttattactcagaaatgtcattgccaaacacggtctcaaggttttatcacctgaaatttctagatcttgaacaatggggaagtgatcgttctttgcctaaggacattagccgcctt

SEQ ID NO: 54947 - DNA, 448 bp, Zea Mays
gtggattcatcgtttggtctccaacgttcattttcttcttcttccttcaaagggttagtttcacaaggactagaggaagtagaagcatcatatgaactaatatgtttggacttatcaaatctatttttaattctagtccaaatatcatgcacatcatgaataggttcatcatatctaattatgaaggcatgataatcttctttgctaagagaattacctaagatgtcaaaagcaagataatttaagcgtatacatctttgatcttcctcggaaacatttttcttatcataattagagggtataatactcttgtctaaaatttgttctaatcgtgagtctatggttctaaaagcatttactactctagtagaccatgaagcataattagaacaatcggaaagtaatatctcaagagttacctccttcggagttgttttcttgttctttt

SEQ ID NO: 54948 - DNA, 769 bp, Zea Mays
ctacccattgctcccatggtcgaaaggctcatacgagccccacatttgaccataaagattagtcaccacaacagcaagcaaaccctcgtcggcaaacgtgtgacaaagaacacctaaggatgcgaagacgcctaagggtgtagccagattaaaacaaaatcttgggaaggacatctgagggtgcaaagtcgcctaagggtgcaaccagattaaaaaaaaatcttagcaaggacacatagggtgtgaatacgatatttcttctctaatccctatcattgattcaccgatcaatgaaccacaacacatcctcctcctctaaccaccgagcaacgacatcgttcacacacgatgacggtgccgtgacaagagtttacccaaaccacgcactagggctctaagttttgatcctaacggtgctacgctgttgggatggaggtcgaaccaaacctctatcagctctatgcacaagcaatcccaagctaaaaataaccacatctaagtgctggacatagcacatcgagatactccaccagaatcgcaccactagaggggccttcgttacctttgctcaatgacaaccatatgaaggcaagcgcatgcgggggttcgtcgatggcaaagataactaccacatccttaggacgaaggacaaccgtgtgagagtcacctagagggggtgaataggtgatgcatgtaaaacacaactttaaacacaaacttggtccttataaagagttagttcaaaaccagaccaagacagggtgagaag

SEQ ID NO: 54949 - DNA, 643 bp, Zea Mays
ccaatattgtataatattgtataagcggctggtacagcacccgatagggcgctgcctatttctagtgtacgtagaaacaaatgtgaaataaataaaatatagcattacatcgattaaaaataatctttatatgtgtccagaagtcagatcataagtctcatcatcactatcaaccatttcaatatcatctgaaggcgcaagttcgtcattgtcatgccttcaagcatttctaagtcatcctcgttttccacctcatcatcatcctcatcaacaaccattttaatatctacttccatttctcgcttcggttaagtctatctcaaatcgcccttctagccaatcttctcgaaaaaacttttcgtcatatgtgtccgggtctaagttataatcttcatcgtttgggacaggtaatttatcgtgtgatgacactttatacacaacatcccaatccttaagatgttattttgtttggcacatatgagagataatacacttgtgtggtctattaggccacgatatagacatcctctcctggtaaggtggaatcctgttgaatttcgactagcccaagattagaatgtgtctgtctcgtcacttcaaggtcaaaccaatgacatttgaatatcacaagagtaagaggttt

SEQ ID NO: 54950 - DNA, 403 bp, Zea Mays
ctcgcgtcccatcgtgcacggcttcttactcgggtagattttagcgtaaaacgtaaaccaaaatagcgtaaatgattacaaattttagcgtaaatcgtagatctatttcgtaacggcgaatggggcctaaaaattacagcgtgaaaatctcacacgtcccatcgtgcacgagttttgactcgagcagattttagcgtaaaacgtgaaccaaaacagcataaatgattatgaattttagcgtaaatcgtatatctatttcgtaatggcgaacggggcccaaaaattacggtgtgaaaatctcgcgtgtccgatcgtgcacaggttctgactcgggtagattcagcgtaaaacatgaaccaaaatagcgtaaatcatcgacctgtttcgtaacgaccaatggggg

SEQ ID NO: 54951 - DNA, 290 bp, Zea Mays
tgcaggtgggcggtctatcactacgacacctttcgtaaagttcttgatgtctaggcggaatggatggtcagcaggaagaaattgtcgatgtttatcgaaggacgaatattttccaccctttttcaaccaaatgaacctgagagcttccttgcaaactgggcatgggaacttaccgtgaacacaccaggcacagaatagcccatatgccggtaagtcatgcatggagtactggtaccaaacatgcattctgaagtttgtcttcatagctcagtcatacgtccatacccctt

SEQ ID NO: 54952 - DNA, 406 bp, Zea Mays
gaacatcgcatcaagaaactctcactttaaaagtgcagtgactattagctctagaggttctaatgggcctaaactagcttggcgctttgccactccgcttgcctttgtctgttccacgtcttcgcccctgcgagcgagcatccatcagtcgagcacgctgttgggagtcttcgtctttcgaatgttctaaaaaacacacttaaccatggattgtcaatgtgtttttaagtgttacaggagcttcggcatcaagtaccttcggaacaggatgaggacaagaacgaagatgtcaagcttcgtcacaataccatatggaaacgaaggtgaacaatgccgggagaaggtgtttatgattttgtacgcaagacgatatgggaagaagttgatataaccctctcatcatttt

SEQ ID NO: 54953 - DNA, 377 bp, Zea Mays
gcaggttgagcgagccaacgggatgatactggaggcactcaggaaaaaggtctttgataagaatgaaaagttcgcaggaaagtggataagggaattgccctacgtcgtttggagcctaagaacccaacctagccgagctctgcatggaaacactcctttcttcatggtctatgggtcggaagcagtgttacccgctgatctcaagttcgaggtgccaaggctgatcttcgaaagcatagcagaagccgaagccactaggatggaggacattgatgtactcgaggaagaacgactgaatgcagtaatccaatcagctcggtaccagcagactctaaggcactatcacgacaaggccgtgcgacagcgatccttctctg

SEQ ID NO: 54954 - DNA, 280 bp, Zea Mays
gtggaaataagattagctcatgtgattccaagtatacaagaaaaagaaaacgtatggagaatatagaaggaaactgtattaaaaacttatcatcatgaacataacaggccaatgcaaagaaagaagaaccaactaaaactcaacttaatcatgcatatatatagttattagcacatatgtacttcactaggagttaaggagaggctcatgcatgatcaccgcctactcgtgcttagcttttgatcattaacttatgtaattaaatatttataggaatagt

SEQ ID NO: 54955 - DNA, 903 bp, Zea Mays
attctaaacaaatcgagtgtctctttaataaaactaccgcgcgaaggggtatcgggtaaatctaaccgtcagatctaaaaccaatggctgagcttagatctgcggccgagggcgcgcgcgagcgggcaagcactgactaagtagttgttgggcaagctttgagattggattcgaccatgatccagtaattgtttgactatggctgcaatagcaagattgtagctggatcatagggctatagctttgataaagatggactaagtagttactacatgaaattcaaagatccaggcccctgaaatccctctattagacaccctgatggtgatcgccatggtacagtactgaaaaagatctccaggttcatcgctcctcgtcgccggtgatctagcgcccggattcgcgccggccactgttattggtgcccagcgcaagtggataactgagaggagtaaagatcttagcgctcggattgggtcgggctcgctcaccattgtgtccgccgtacccacttgaactacggctggctggggttatcctcaccggcattagccgcttaacgatcatgcgccacgcgtcttggaagcttagcacatcacaatgaacctgtgtagcaagcctgttcatcgcccgagaacttgccacggtgaaagccacgaatttgtttgcgccattaacttcttccttctccggctgccaccgcgccatcaccaattcatgggccaccgccccggatcctataaattgagtgtgttgtcggctccgctaggtagtcaagcacctaatacatcaactcgtgcctcaaatcgtccaccagagctcgccaatttgagattttccttaaatcggtccagagcaccgtactgagtggccttgccgtggccagcgcattataggtccgtt

SEQ ID NO: 54956 - DNA, 721 bp, Zea Mays
ctggaatgtaatgtcattgagacaaaaagatcccatttggagcacaaagtcatagagacatgaaaaaagtgatgaagaggcccatgtctcaaagaaattttttgacaaagagcattgatgacatgctaaagcgtggaaactggtggggtagtcaacattatgtcatcaatttataaaataaggtaagtagtctttgaaccatgatgataaacaaataaggaggtatctactttggcagtgttgaaaccaataggatacatgtaagttgcgaagcggctactccaataccgaggtgcttgtttgagtctgtagagagacttagtcaagtgatagacatgattgggcaaggataggtcatcaaaattagatgactgcatgcagtacatagtatcaatgaggatcttagagaaaaaaggtattcttcacattgcgttgatgaatcggctaactcaaagtgagaacagtggaaacgtggcaagcttcaccataggactaaagttcgcttcacaatcgatcatcatcactatgtgaatccccgaagaacctaatgatccgtgtatcaatgaagagaaccataaaagcaaagtttgcaatgaaaacctattttctagtggcaacatttactccatgatgacgaggaatccaagtattattagcatgaagtcacgcaaaactcctcgaaattcaagtgttattagcatggagggctgcaaattcctcg

SEQ ID NO: 54957 - DNA, 879 bp, Zea Mays
attgggctggcgtgtcagcctttccccgcgcgcacgcccttgactctgcggtcgctgtcgtgtgggtcgtcggtggtcagactcgtccctaaccttgcagactgtttcaaccgcccgcgtatggcggcatgggagctggggattgggatcaccctatgcccggggataaaaaggcgtggaccggtggctccgctacgaaccctaggaccaaggaccccctaggtttctgccaccaccattaggaccgagagagtaaggaatgggagagtcagggcgctactgctgtggggatcgagctgggctgcatccctgtccgtgaatgggagtcccaaggcatcgcgggtgttcaccgcaaccgtgccgggtcttccctgatgcggtgggatttcatcaagggcagaattcgtcgtcggagttcaatgccctggcgcctcgtctgggttgcggcgatgctctagctcacttttgcggtggacggaggaaggaagaagacgcgactcggatcgttgatccggtgatgggcggaccagattagtggaacacaacactttggccaggggcaatggagtccgtagatcatctagcgaacggatgagatggggttctagtgtatctgttcgctcattttgatcgagccgtagattctaggctcgatggtccggatcgggtgggtgcgcaccgttggatgacgatctggcggccttagtttagtaccggttcggttagggaaagatttaatctgagccctaggtttctaatcggacggctagagtttacccgtaccccttcgccatggctagttttcaaaagagtccccgcagaattccataactaacccgccatccaactcggaatagcctgtgtctggggaacctttca

SEQ ID NO: 54958 - DNA, 365 bp, Zea Mays
aaatgaaattcgaaaaagaaaaacttcagcacataagcccttggctgcactattcacctgagtcatgccctttgcacgtaaccctctgcttttagttgaattcctgcaccatgtcccccacgcgatttgcacagagaagcacaccgggccttcgcaattcccatcgatgggacgctctccgacgacggggaaatagagggggagtacgagggcgccagtgcgcactactggagggttgcagctcagtcggaggtggctggtggagcgctgcccacggctgcgagcagaacgacgacggccatggacgagagctcgcgagaatgggagggacagcgctgggagcgtggagaaggaatggagaacgt

SEQ ID NO: 54959 - DNA, 319 bp, Zea Mays
cacagctggtatcggagcaaattccaccatagatgaggacaataaaccatgaataccaattttcaaaatctaaaacttgcctagaaactgctatggatcgtcaggactagaccgctagacctaggacgaaaggccttaggcatagagggagaaataggtggctaattaattaggccccgtgggccagtacttatatttctatggatgccctaaaaagcaccctattttcttttgagaggcaacgtttcttccagcatgcatgcattatcaaacacaaaaaggaactaaaatttgagctaaccccctttctttaaaacca

SEQ ID NO: 54960 - DNA, 609 bp, Zea Mays
ttggttttgatagtgtgttaagtctaggtgcaatttgtttggtgatttagttggatgagttttgcaaagtttaaaccggtgaattatatagtgatgatatagatttagattggagggagtagggtcatttacttggaaggagataccgaatgctggtatcaaatagtagagtttatttccatgaaataataatctgtttatctcctctccactttgggtaagccgtgtatttcagcccaagggcccatgaacaaggccgaacaattattgcctccccggcaccaggacgaagagtgtagagtgcagggtcgttgagccccaaaccaaaggctagtttaaaaactcaaactctctctaaatttaaaaagaaccaaagagaaaataaacaatttttttcttagtcctttttattccatttaaaagaggatttgacttactaaacttactcgaaaaagctgggcccgacatgtacatcttcagttcgtcactaggaccacaacgatgtgatttatgggtagcacccaaggtttaccgaaccgttttgaaatcaaaaaccgtccctagtcaatttcggttcttcgtcgaaaaaccgctaaaaacctccaaaac

SEQ ID NO: 54961 - DNA, 741 bp, Zea Mays
atccaagtgagatccgaccacccttcggtagggttaggtctcggtgagtggtcccactgggggctcgacccattggaggaatctcattgagtccttccttattcgatcctgtatcggccctttgttcggtatggccgaccaaagaggggccccatggccaccccgtccgacgggttaccataggagaatgtgaggtacgaccttggacgtgggcacaagcaaatgaccgatgggctggtgacctagcttgcggctcactgggagcttactcggtccacccctcgctctacgtgagaagttggggtgagtttcggtttttgatctggtcgatatgaggtagttattgtggcgcgtggtaaatgaggtgtccatcatgacgttgttcggcgcgggtggcttgatgggacatgaaacaacttattcactgtatcatgtgcaggtggcatgatgggtggttagctgccttgcttgttagtggtgtaccccctgcagtgatgcacttctgaagccgtgataataccagaaatcgatcgtgaacacaactcatgatcaatgcttagtactataccctcgaggctcctactttgttgtgctcaatctttcgaatcatgtaactggagcttgccaagcaaagttttgggaaccaacccttaagtttggtcgaggttcggacctttagggaccaagcccaagatactaggacagttgtgctagggtggtggatggtgtaggcttacggta

SEQ ID NO: 54962 - DNA, 656 bp, Zea Mays
gaattaccagggagcacggggtctaaactataaattctagggccaaggacgaattactattacacagtctcggaccacgggttgttttcggggaaacgtaaggacttatctgcaaaatgatacggttgaaggggtatgaatggttttcgaccgtcggattagaaacccacggccgcaattagatctatccgcgcattacagcgaccgttgaaggggtacatcacagcgatcgttgtatcaccaatctacatcgcgtattaaatctaaccacgatcagtcctcgcctgcacgatcctacatcaacggcctagatcagcttgcgcgaaagggtatgtgcaccctaatcagagccatctattaggagatctacgacccctgcccttcttccctaccccgacgatgcccaggcggcgccgctaggaccacggcagagcatcaccggcagcacgagtgaaccgacgccctggtgtttcaaatcgaacgcgaatgcgtgcagaagatataggggaggacggagtactcaatatgggtgatcttaccggatatcacaaggtacaatccctctgtccatggcacctgcggcacgcgagcgatgactgcacttcgacgagacattacccctgcttcgaagtcatacttcgtcaaattggtggtcg

SEQ ID NO: 54963 - DNA, 497 bp, Zea Mays
ctgatgcacctcttaagcagcttttccccatacctaaccttgtgtcaaccactacgatatgggcgacccctcgcgagggggctttggaaagtgacctagccttcggctttgacctcggctctcagtgaaaaacaagcaggcacaagtcaacaacacagtacaagaccataccgtctacaggatacgcaagacaccctctcatagtatacagccaactcccgtcctccaggaaacacccattgaatctataaataggacaatctacggcctctcagggcggcagtcgaatacttcacaagtcttctcctccactcggtattggcacttgcctcaatcatcccctaggacttgagatctttccctctcacgttgtgcttgtaaaccctactgcgagcacttcagtgcgagtaatataagtctcattcccgtctgctggaagtaagacctttcctagcccgaaccacgatagacgacttgtgtcaactcgcatcaccatc

SEQ ID NO: 54964 - DNA, 428 bp, Zea Mays
gaagaaagtggcggagcggcttaccagcgttgatagagttccggtgaggggtcgagtgaggaaggggagtctctagcggtcatgtcgaggtacggatcatcgtctctggtgcccagagttgtcctgatcacgaatcctagcaatggagctcatcgacgcggctggtaggggccaaaccatggcggtagatctcaatcaaaccgcgtagggaggttcacggggtggccgtgagggtgtgtgcacaaggaatcgaagaatggacggttagattacctggtccacggaggccggcggacagggcaagtccggcgaggcgtctaggcttctccggtgaggtttcggttggtccgagcggctaaggagctttggtagcctctagggagactagcggaggaactggattgagtggatttgggctggagcggccg

SEQ ID NO: 54965 - DNA, 512 bp, Zea Mays
gttcacaagaaccagtatggtttcataaaagggagaacaattcaagattgcttggcttgggcctatgaatacattcatctatgacattcctcaaaaaaagaaatcattgttcttaagcttgattttgaaaaggcttttgatactttagagcatgaactgattctgcaggtactgattcataaaggatttggaccaaagtggattaactggactcgaaatatccttcactctggcacttcttcggtgttactcaatggagtcctagggaaaacctttcattgtaaacgcggagtcagacaaggagatcccctctcacccatgttgtttgtcttggcggctgatctccttcagagtattatcaataaagctagacatctgaatttgcttcagctacctttgccagacagttgtgaacaagattttcctattgttcaatacgctgatgatactctcttgataatggaggcctatccaaagcatttattctttctaaaggcaattctcaattcttt

SEQ ID NO: 54966 - DNA, 605 bp, Zea Mays
aggaaatctatagggatattttggttgtgatggtggccctccctacatgggtgggcaagcaagcgggtagaatggtggatacgtaggtcgatacataggtggatatgcaggtggtggacatgtatgtggtggacatgcatgtggtgaataatcaaaaggtgttgtccatggtgcccgtggtgtaggtggaactagctgtactaccttttgggctagtttggtcggtcgtgtttctttttcctgtctttctaaagttggtggatgaggtcgctttgttggacgatctataggagtggtcttcttattgacatatttagaaagaagctaatcaaaaataggacaagtactaataatctgactagatgctttggatgtgttttgtttccccgtacctatttctgatcatcgcagcctaaaggtctagtgtcactagtgcctctggtcatccatggaccattcgggcgttgtagtcagaccatccatgtggggtccaaaccatgcatccttaggtcctaggctatttgacgtgcgctggataggtggtcagattgagtatctgatcctacatgcccctggtgctattgacctaatggtgacctttaaag

SEQ ID NO: 54967 - DNA, 1219 bp, Zea Mays
aatctaaaactattataaacttacaggttatacatgtcctgtgctgttacaggcacactcttaggaccaccgtgcatttctaaaacataatccataatacaatgttgcgggattcaactttcttgcattgaacttatgaactccatgtattcaggatcatgcgtcttgttgcattgtaattgattcttttctgtatccttcttaaaaaattcatgattatgatccaagtgcaacagatcaatacgcactgatataactgtctctttggcatcatcataatttttttaagtttcataccgtccttgcattgtgtccgcttcgagctggtattatgtacctttgggtttgatattccccttactgaactctttccttccatcgagcaagtcaaccacttacaatttttccgttccctatactttttcaatgggaagccaacttcatatgcatacctactataaaattgatatgcttcatccacaccactgaatgtcataccaactttaggtaccaacctcggatcaattgtaacttcctgtgcaaataaataaaatatatatttatgtacatatatccataacatgtatgttgtatggtgtcctacataattttccatcgtatgcacaatataacatttcataccatctagttgcattccatcgtatacaatttaatctacaatactgaaaatccaaatcagttatatagtacttacatgtctctgcagaatcactggtgtgtcctgttcatgctcaccaatagtacgcatagtagtaatttgttgtcctccttgatttatggtcatcctcgacgcatctgatgtgttctgatcatcaaccctctgcgccctcaatgctgctggtggagtaattgcccctacggcagtcgctgtttgcatatgtgcacttgcatccgaggcaaattggttccctcctagttgatcttcctgcaccattgttacgatatccaagcatggatttgatcaatgaactgatgtcggcgttgtatactctctgattggctctttaccccatggcgccgccatcttccagctctggttacgcccttcagccagacacaccctaacaaatgattcttactgtctaacttttctggaagcttgggattctttccttttgcccatgcacatctccattatcgtggacgcgataatcacggcgagtttgcatgtgtatctgctacattataggatcgtggg

SEQ ID NO: 54968 - DNA, 577 bp, Zea Mays
ccgtgtttccctttccttgatttgtgttcccagaagtctgttgaatgtttgatttgttctgcttcaggtaggggcagtctttgatgaaatgtccggacttgccagaattgaagaagccactcaaggaacttggaagggcagggaaacgagcactaggggcactcggctgattgttctgggtggggcaggggtgggacgaataaacacgggttgtctgaagggatatgtgggcggacgaggagaagaacaatttgaattgaaaggtcggattaccaaccttgtcctcttttcaggtccatgagttgatcttaaacccgcatatccttttgactttccttgttctgcatttttggcttcaactcacagtgttgtgctgacagccctgctatatgtgagatccagacacatagccattttgcgctggagtctatcatttagtcccctcataaagctattcttgtttttcaagtctgtgtccacttgatcgatggcgtattgggagaggtgattaaatttgttaagatactgcatcacagaatctcccctctgcttcagacgtatgaattcttctagcttc

SEQ ID NO: 54969 - DNA, 786 bp, Zea Mays
cattatttctgtagtaagagagctttttgtgattatagttagggatgaaaacggacggaaacggacggaaaaatccctctcccattttcgtatccgcattttatcatcggaaacggaatcgagtccgaaatagtcaggaacggaaacgggagtgggataaacggaactgcgaaaacgaacggaaatactaacggaaactcataatttaatataaatagaaatgttattaatgtttgactagtgattgattggcagaacaataacataaaacaaatagatatagagaggcaacattctattgttgtttggttgctaaatgtgtacatttagctacatccgatgttgtttaagactttagatcacttgtcatttgaaaagagccggtggttacaatggccaattgtgctataatttgtcacataaatacacgaggatttagtttatatactaatgcatattaggctcgtcccatatttgtcaaatacggaataaatacgggttcaatccggaaaaaaaacgggatcccgcaaaaatggacggaataagtcatctcccgtttctgtcccgtttccatatttttccgtaaatacggaaacgatcgggtcaaatgtaaaaaacggtataggtcgggacaggattttttccgtccgttttcaaccctaattatagtactcctaacatcatgttttgccactttagtactcctatcgcatgactcgccaaaatatgattgccaacatctaaaactcgctactttgatagaatggccaatctaatagtattcac

SEQ ID NO: 54970 - DNA, 413 bp, Zea Mays
tagagttaggcgataggtctgcataccatgcaaatgtggtaccagtaagggacatcaagaataaacggacactgtaggctaccttatcaaccaattatcctaagtgcggtaagaactggcttacgtgctcgtgcatgcttttcctgctttcactagaaaattgaaagaaatctagtatcttggacccttgtggatatggcacgacgttaaatcggtgattataaggtttccgatatgactgccacatgcctgacacactaacaccaagcttgtctctaaacaacccggctacctcgtccctaatttttccaccatgtctggtaaccatctattaagtttggggtgaaaaccttaggttgttggacattattttgttggcttttctcctaaggatgttcaaaatacgtgttagg

SEQ ID NO: 54971 - DNA, 801 bp, Zea Mays
gttcctagatttatttttataccaaaaattcattttctttattaatttctgatttcctaaagatcctggactaggcacataattcctgagaagcgcagggtgtcgcgtgtaaattgttcctagactccggctaatcccgtagtggacgacgggttaatttggaataagccgaggggctctttagctaaatgtcgcggcgaaggggtaccggtagagctgagccgtccgatcctggatccagggaccagattagatcccaacccaccaatacacccgagccacggatcatgagatcgacggccatcatcctacacccgagctgggccgctatgatccagtctggccgtccatctgcgaaccaacggatcagataccccaagcccaaaaccggtaagagttatgcgatctggaacgtcccttcatgatccgatggtttaggttgcatcacgcgcagagatacgattcctcctaatccggcccacccattacaagatcaacggccaggagattctctcccttaccactcacacggccggcgaaccccaggtagcggcggcattctgcccacagaccatggcggcggccatggccgatccccccccaaatccataacccagacgaatcttcaattcgaacgttgctacacagagccttgatgatcacgagcacaaagaattaagtctcaccggttatcgcggcgtggagagcaccggccacggtgcatcgcggcccgcggcggagcagagacaccggtgagcaatctcgggctcccccgccagtgctttcgctgattgaggtcac

SEQ ID NO: 54972 - DNA, 787 bp, Zea Mays
acaatttttgtgctgatccgactacacccttaggcagctttttctcagatttgtgcattgattagatgactctgcacccttgggtggcttcacacaaattttgtgttgttccggctgcacccttaggcgacttttgtgcggagtgtcgcacacgagggtagtcagcactgcccctcgcggtgactttggtgtggtcgaatgccgaagaccgtcgatgcggtctttttcgacattggcttagttttttgcgggggacttttgcttgtatattacatggcgccggctcattaaaaacctcacccaccctaggaggaaaagagtgcgggccggaataataatgttaagtgaattacaagggcatgatggccctgagggttcacaaaaaatttgcgaagattgtctatattccaggaatgttccaggtcttcgccagattgtgttgttaatctgtacgtgctgggagacgacttcgtcttgacgataaatggtccttcccacttcggttccagcttaccccgtgactctgtccgggttgtgcggacaagtacatggtctccttcgttgaattctcttgggacgaccgcgtggtcgcgcaaggccttcgtttgggcttgatatttgtcgagggcctgcagggtgaagacacggtctccgtcaatgaggtctttggaagttggctcgtcgacgttgggtactgctgaagcgcttgtccgcggggacccatgtttgatttcctgcggggtcatggcctccgatccgtatagcaggcgaaagggagtgaatccgg

SEQ ID NO: 54973 - DNA, 468 bp, Zea Mays
caagagtctaccatatgttgagttctcttataataatagttaccaggccagtctgaagatgtcaccatttgaagctttatatgacaaaaagtgcagaactcctctgtattgggatcagactggtgaaaggcagttctttgggtctgagattattcaagaggcagaagaacaagtctgtatgatctgggagaacttgagggtagcacaaactcggtagaagagctatgctgataatcgaagaagaccactggaatttgaggagggtgatcacgtgtacctcaaggtgtcaccaattcatggaatgagaagattcaaagttaaaggcaagctatcccctcactttattgtacccttcagaatctttaggcgagttggggagatggcctatcagcttgagctacctaaccatctatctgaggtgcatgatgtattccacatatctcaactcaagaagtgccttcgtgtccc

SEQ ID NO: 54974 - DNA, 468 bp, Zea Mays
gaaaaagagcaccagtggaagaacattccactagcctatgttgtttgcgtgtggacaatacgacatgatgcctaattgaataatattctcagcatgaactggcatacactcggtcagctattggttcatccgcaagtgttccagatgcctcgtaggcctactactcacaaggcacttaatttgtcgtgtgtccctgtttgattcgaaagagcaatcatagtaaccacggggattcatgtctatatatgtggttcaacacacacgcacttgatgacgtatttatttttgtagtgtgccccaccatttgacgatagggctggtagttaatgaaagtgcaatgactttcattcctctccacctcctcgcgcttatgagcttgttgtcgctggaacccctcatccaacttcttcatacaatcgtctaatttcttaagctccgcggttgacaaattagtcaggcttgtgtcgt

SEQ ID NO: 54975 - DNA, 985 bp, Zea Mays
aacgggcccaatcactagctgatactaagcttttacattttattttttctagccgatcgttaggctcggccttagcaagcatatctgatgcctcatctactccgtaaggccaatggataagactagccttaatccgttttttgtcacttcaacatggtcacagccttccaagtcaactccatgttgagaacaccttgtgcttctgatggctggccattgaagtcgttaagcgtcacattggtcttgatcaaatcttcattattccacccgaagtggtgtagcatggagtttggcatgatgtttaccgctacttcgttatccaccatcattctgttgacgggcttgccattgatataccccttgatgtacaaggccttcagatgcctgtacccctttttctggtggcttttcaaacactactagttgtggactgagatccatctgagccacaaataattcttcaggttttggtgcgtggaattctggagggagtacgaacaccatgtttatagtagttgatggtgtgtcatcggtttcctcattagcctctttatcggcatccgcattggcttacatctacttgggatgccattcctttcaatgacgctgctctatcctcgtggggtgctgcagttctactgctatgtttgggcgcactttcctgagaatttcgaggtatttggcctaagcttcttctaggttccataactgctataccctgcatttctgagtatagctgagaccatcagggcaccatcatggccgatggtacttgtcttcttcgtcctcaaaatcccttttgtgcgatggtccagcccacatgtcctatcgcgatactggtcccaaacatggaattactagaacttcgttggcctcccgccttcgaggcccgcacttaggatatttgttgaaactgggcatgttcatgccagcatcccagcagtgtttgaagaatggcaatgccaatgaccacatgtacattctc

SEQ ID NO: 54976 - DNA, 1205 bp, Zea Mays
cccctctaggcgactttcacaatctcgttttgctatagttcgagggctagctcggttttgggatgatgaaacactaagcaacattatgacagcttgcattatcatgcataatatggttgttgaagatgagggaatagttgatcccaacgaacgctttgacaatggaggaggtaatgttcaaccatcacatgaccatacaacagatctcgatgaatttattgagaaccatatgaaaatcaggaataaggagactcaccatcaacttcaagaagatctagtcgagtacctatggcaacaccatccagacatgtatacatagtctcatgtttagtcaataataaattatttgtaacctcgaccttatgtaacatgccatgagacacaatgctgttacactaagtgtatcaatcattgtctagacttttacctcatgttggaacagaccagtcatattattcagtacaaaaatccacagatgcacataaaactaaacggaaaacagtatataagagtagcacatgcaactaaaaatccatagattgttcatctctatgtgtactcagtgaaacaaaataatctaaagtagcatctatgatctgaccaaaatttgaagaaaaaaacaactaatgaaacaaaataatctaaagtcgcatctgtgatctgaccaaaatttgaaaaaaacaactaattcatgcgacgtgcaacgatatcagcctgcaaacacatatagtattgtctttgcaattcactcatagtagtaaggtctatactcataattttctgttcttcttcaatccgcttaatgtaaaggttgtttgcttcattggctaggcgctctttctcttgatcaagccttttttgttcatttgtatgcttctgttcttcaattgtaagcctcttgtgttccagctcaagcctctctttatctagagcatatgcttgtgcatacctctcctctctctttaactccttctctacatcagcctgtctcttcttttcccacaaaatgtccaatgcatcagaacatgcatcaaaaccccctttacacattgcttcttttgacctcttcttacccattggtctttctggtgcagctatatttggagggacaatctgtacaggagaaacttcattcccaacttgagtagtaagatcaactaatcccggactcaaatctttggctaccttctgttttttgttgcttg

SEQ ID NO: 54977 - DNA, 636 bp, Zea Mays
accattacaaagtcactaagaaagtcttgtggtatttgaaggtacataaggcatcatgttaacatatagaaaaaatgagtagccttatatgattatagaatactcaactcagattatgtgggtgtgaagaagatagaacgtcaacatcagattacatattcacacttgtaggaggacctataacatggaaaagctcaaaacaaattatcactacattgtcgacgatatattctaagtttgttcacgttatgaggcaacatggcaggttacattgctaaagagattgcacctgatttaaaagtcataacagaataacaaaaaccactgaagttatattgtgataatgaatgggcgaaatttttactccaacaataagccaagtgatgttgtcaaacacattgatattaagtattacattgtaaagaaggtagtctaagatcaaacaattgaacttgggcatataaagaaaaatcagatgcatgtggatccatttactaaagggcttcccccccccaacgagttcaaaaaacacatagttgacatgggtttaatggggtgcctatgattgtagattatgggatcatcaatgcaaccatccccttaagaacaaaatttctagtttgagatagaaaggtg

SEQ ID NO: 54978 - DNA, 433 bp, Zea Mays
tacgaattaaaaccgagcgaagatgttgcatggttcttttagacactcccgcttactgaaattctgcagatttctgcctggctcaggaccttcaccttggcaatggcaggacgacgactaggacaagtcggcatggcatcggaaaaggtcgtggtcgagaagggtttccctaccatacaagggcaccacacagccatcatcttcagctccgtgtagcgttctgttcaccgagaacgatcgaccacctacctacgctacgcattcagcagtaagtacagtgtagcatacagtaaaccagggcacctggacaaagagaaagtggctaaactgcaccaggataacataaacagctacatttggccggatgcgatgctttggagttatctgccgagttcacgacgacttcgatcgttgcaggcgctttgtctactcg

SEQ ID NO: 54979 - DNA, 465 bp, Zea Mays
cacccggctttatcccttaaatccgggtgtgacatgaaagtagaagatgtctccaacattgaaggtgatcgaggtgttgaaggtgatggccatggagtcgtcgtgtatcaacgtcacaccccctacctggcgcactagctgtcgttgtttgtgacccaactgcgcaacacagggtaacccacgtgctacttttgggtaggacgacatcattgattgcgattcaatggtacatgcagaggcacatcggtattgctcgtagatttatacaggttcgttccgctttgaattgtgtaacaccctactttgtgttgatgctaggtattgatttctagaatatggggattacaaatgagctttgtgatggctcagctgctgtgggtgaggatggggtgagatgctgtgagatgagatgatgttgtagggattccccctcggccttatatacatgaccagagagttatctct

SEQ ID NO: 54980 - DNA, 558 bp, Zea Mays
gtagtagccaaaattttcgtgcagaccatctcctctggctttagtctggtagtgtaattcatgaactcggcggttccaccccctggctacgaagagcccaaatgtaaacacttaatctaacaatagcattgggggtcagctgatgaaggtaaatcccaaacttcttcagtacaatagcaataatcttgtttagggggaaccttagaccagctttaagaaaacttttgaagactactacctcgtcctttcctggctttgggatagtttcctctccaccaaaacgaattaattccttcttggcctcactaaaataacccatcttcaccattttagaaagatcagcttcagaaatggtggactttccaaagtccaaatgactaggtttacttggcaccccgtagctgtattcatctttggaaccaacttcttcaacataagcttgtgttgcttcggcagcaggtgtgtcctctgatgaaaccagcccagaacgcctcattgcttcggaaatcggaatagtttcagcggcttcggtctcatctccatcacgctcaaccctag

SEQ ID NO: 54981 - DNA, 504 bp, Zea Mays
gtcgttcccgagggaggcattgggtgtgtatggtgagaaggcgtcgcgggatggaaacaaaatgatagcgtttgtatatatcatcaactcaaggtgatttcaccatttgctacatttttcatatacatcttgtcagactatcatgtgaagacggttccatatttataagtgtctagtatactcactaacatctatgacggttcttatagtctagacgactctaatagtattcttatttgagatggtttcatacatagaagtatctcaaatactcattgccatctaagacagttgttaaagtagggatgactcaaatactatccttatttgagacagttaataataaaaacatgtcttaaatcaatataagacattttttacgacgtaactgtctcaaaaaacttttccaattaagacggatttccaaaaagttgtcttatcttactcaacatcgtatgatataagacacttctataaaatgtacttatatgagtctttaatggt

SEQ ID NO: 54982 - DNA, 431 bp, Zea Mays
cgacgatgcctgacacccttaaattggccagaacccggagaacagtggtatttcaagcctgatttagtcatggaaacagaggcaaaggttcaacagataaggcaccacttgaaagaagctcaagctcggcagaaaagttatgcggacaaacgacgccgacctttgttttttcaagtcaaggatcatgtatatctaaaagtatcaccaatgaagggtgttaatcgattcggggtaaaaggaaagttggcaccccgatacattggcctgtttcccattcttgaacaatgcggaccagtggcgtacagacttcaactacctgaaacattatctgcagtacataatgtgttccatgtatctcagttgaagaagtgccttcgggttcctgatcgaaccatcgacgtagtggatgttgctttggaaccatatttgac

SEQ ID NO: 54983 - DNA, 1103 bp, Zea Mays
atgaagcagtgccatggtacagtgtccgataaggatcagactgccagcgttggatcctcatcgccggtgacctccctgcgcaaggattcgtgctgccgccgcccggattcgcgctagagactaacggataacatcgcgggggagggaatcttcgccgccggtgagctggactccactccggtgaccccccccccgcactcttcccctctaccctccggcttgagctgatatgctccccggtaaaccgtcgttctccggccttgcgccgcgtgtcccaacctcgccaccacatcgccgtgactccccaccgctgtctcatcaacgccgctgaggttgccacgacggtggacacggattcacgtgcgccagtgccttcttctacctccgaccgccgcgcgtccttcttcaaattcccggccaccgtcgatgccctctataaattgatggcgcgggcagctgcgctacatcatcccgaaaccagagcctccaatcccaccctcaatcgttcgccagagcgcacgaatttttaattccccccaattcggttctccgccaccgcgaagaacagcttcaccgcggccagcccctttccggtcagctcatcctcctctctccctcgtttgagctttctcataactcgacaatgcttgccaacccacgtaattgcgctaggagctctctggtcgccgggaacacgacgatctagccgcactgctcacggtcaccgtggccagagaaaaacacttgatcattagtgaaattaagttaggggaaaggcttgggatggattcaattaggtgttagtcgctcggagaccctagtcgttgccccaatcggccggtacaggtgctcgccggagttcggttgcgcgcgacgccgtcgaggacctccctctgcgaaggaatcgaagtttgaggactcttctgcaaagcgtcagtgactcaagaaaacagtgaaagaacccgttcctagttagccggaacaccgagggcttttctgcaaagtatccagcgcgcgcgggcgcggccgcgattccgcgtaggcctgggctgactgggctaaaattggcccagtactgttgctagtttttccttttccttttc

SEQ ID NO: 54984 - DNA, 542 bp, Zea Mays
tggccgtagatagctagctggaccaccgtggctataaagggcaccatgaaccacggcggggtatgcacacctccacccagtgagttgatcgaaatccaaaatttgcgctgcctctgccccctcctcccaaattgaatgtgcacggtgaaactatagttccttacggccgtatagccccaatctccacccccccaatttcacccagagccaccgcgacaccattttccccctttctctgtcaccgacaagcccaggtcctccgtgctccgtggccagaccactctggtaaggctctgtacatcttgagtgttgttttagtagctctgtatgctcgtgaagctttccggcaaccgttggaccaattcaagcatgattgaacgggaacacggggtttgatgtcacggtttccgccgtgcacatgggcaggccattctcaatgtgttcaagccgaaatcaacgagtgttccaaggtcaccttgagtcggttatgcctcccctgtagctagactagacagccaccaccggtcatggccagaacgggc

SEQ ID NO: 54985 - DNA, 301 bp, Zea Mays
cccaaattgaatcatgatgccgagagctgttgggcagacccacaatgaaatccatgctgatatcatcccatttccatgaaggtatcgatagggattgcaaggcagcagctgattttaagtggcttgcctttatcctctgacatgtgtcacattacaatacataatgagctatttccctcttcattctggtccaccaatgcaagggcttcagatcatggtacatcttggtgcttcccggatgcatggagaatttggagagatgagcctcatccaagattttcttcttgaggtctttattttt

SEQ ID NO: 54986 - DNA, 967 bp, Zea Mays
gcgttgctcagtcaggtgtgacaaactgcgctgatccgtataaatgatgaactcagcatgctgcaggtatggctgccattgatcgacagccaagatgatagcgagatattctttttcataagtggaaagtccctgatttttgacacccagcgcgcgactgacaaatgctaaggggtggccatcctatgtaagcactgctcctatgcctgtgccggaagcatctgtttccagggcaaaaggtctggtaaagttgggtaaagccagaaccgacgcaaaagaaagagctgacttcaatgcctgaaatgcttgatcgtgctcgttggtccagacaaacagtgtatgtttcttcaagagggtagtaagtggtttggctagtattccgaagtggcgcacaaacttgcgataataccccgctagtcccaagaatcctcgtagttctttacaattagtaggtgtgggccaagaggtgacaacatcaattttggcagggtgagtagcaaccccttgatgggagacaacatgccccaagtatgaaatttgttgtctggcaaaggagcacttggaaagtttgatctgccaacgatcctgtgagagcagattcaacactagctcgaggtgatgtaaatgatcctcccatgtggtactatataccaggatatcatcgaagaaaaccaacacacatgatctgagtaacggtgccaaggtacgattcattgccccttaaaaggttgccggtgctccggagagaccaaaggccatgaccttgaattcaaaatggccatggtgggtttggaaggctgttttgtgctgatcatgaggtgccagacgaatttgatggaaccctgctcgcagatcaagggtagaaaaccaggctgctccatgtaactcatccaaaaattcgtcgatgaccggcactggaaatttggtttttgctgtcaaggcattcaagtgtctgtaatccacacaa

SEQ ID NO: 54987 - DNA, 407 bp, Zea Mays
aagagatctccaagacaatttcaagtggggacatggtatatttgaaactccaaccgtttgcccaatcttcagtgtttcatagaccatgtgctaatttgtctttcaaatattttggtccctttcccatcttggagaagttgggtactgctgcctacaagatctagcttcctgcatcggcagccattcatccaatattccatgtttcacaactcaagcctcatgttcctaacaacgttccagtatttagggatttacctaccccaacattctctaaagatgttgttcctatgccagaagccattttagaccggcatttggtcaggaaagggtctgcagctgtaactaatgtgttgatcaaatggatgggtcttccagccgacatggcttcttgggaggattataccgtg

SEQ ID NO: 54988 - DNA, 572 bp, Zea Mays
gccggggagatcggcgagctctggtcgtgtgtgtgaaggacctgtcggggcagaaaggttcaccggggtggcatcaattgctcgttggactcaaaggaccacggcagatctgcccattgccacgatcaacaccaattaggcgtccatctgcggtaagatgtatactagcatgttcgtcatattccgtacttcgtataaccctgagccgtgatagaataggagcacgatttggccaaatcgcctaactctggcgatccccaccaaggatggtggcggagccgccgtcgagtagttggtttggggagggcgaagtttggccgtgggatgtcctatgaacagctatgattaaaccgagcgtaccctttcgcgcaaacagatctgggtcgtagatacggtatcgtgtgagcgaggagtcgatcgtagtcgtattaaatttggtccgtggatccttaatcctgcggccataaacgcatatcgattcggatgattatcatattagatccgagccgttcgcctctaatctaacgaccagaactctccaataccctttcgttgtgaccactttgcaaaat

SEQ ID NO: 54989 - DNA, 675 bp, Zea Mays
agccctttgctactagccttgtttctaactagcataccctcattctcttgttccaaaattcccattttgtaccaagcacgttgtagcctttgggtctctccactaactcacaaaacttgtatctagtgaagttgtttagcacttcatgtgtagcatttatccaatttcgatcttttgttggatagttcaactgaaggcacaaatgaaaagtgcccactaaatgataccaatcttgatcttatttacgcaccactcttaaaatcaccaactatttgttcaaaaggatgatctcttccaattggttgacttgttgagggccactagaaactgaaggttgaacattttctcgcactactagacttggcctagcaattgtcacttgatcttaatcatgaaagccacttgtacttgagatttcttgcacacctaatgttgatctggcttgaattgaatcttcaacttgagtttgagcttctctaggccttatatctccaagtgccatgtactttattgcttttttccaatttgtctcctatcacatcatctatgtttttttatcaacttgagagccattgacttcatcaaactccacaccatgaacctcttcaacaatgacatgtgtcttgttgtacactctatatgccttagtactgcaggagtaaccaagaaaaaaaa

SEQ ID NO: 54990 - DNA, 430 bp, Zea Mays
aggtatcttcggcattatagccgactctttagtcctctgcacgggaggaacggtttcctttgtctcggcagatggggaggtcccttcgccaagttcaagtatcacagtcggttcaatgtagcgtggccggtgggtaagtaccttcatctttttgtccgcagccttcggcacaggctcagtcgaggcagccaaagcagcagcttttctcttcttcccctgtccccgtagcgggtagcggtagtcggggtagacgaagccaatggcatcaaaaactctgttcaatctcttctttccccgacttccaaaggctgtggatagtgcattatcttctgccttggaatatgatccaagcagttcatcacttgtagcttcgatgcattttagccagtcatcgtttggctcgtcgaacttatccccatacctgaatgta

SEQ ID NO: 54991 - DNA, 566 bp, Zea Mays
ttccggtagtgatgttaaataaaaaatcaaatgtttccagtagcatgtgcatgtgcatcggatgcacatcgtctattgcagagaagagagagagcatggattggatatacacgattgcgcgatgacatccgtgacctactggaagcgtaaatagtgtgttgttgtcgcgaaaatgcacatgtgctaagatgcgcatgttattggacataggctaaccagtacgcggggcttgcattggcctctggagcacaaggtcctaggatgactgactaataccatgcatgctacgctagctattgtgaatctgtcttctactgatgaattcttagaccgttttgccaccatgcgagagtatgcattttcctgaacatgagattattgccaaactcctggagttaccggcgtgacacacttgaaacaaaaaacaagaacgaggactagaaataacagtcaaagatatacacaattgtcgctgcttttctcataatccttctaaagaaataacacacatttaacttatttaaactgatacatattgacgggactatatggtagggctcattttt

SEQ ID NO: 54992 - DNA, 446 bp, Zea Mays
gcggcatagaaggtgtcttgttttttatctggcatttcgctttctccaatagaagtgtcactttttgttggtattctcatgggccgttctgcactttcgtctagcatgtgatgtcggacttgacctacaaatttgttcgctgccgcgctattattttgtctccttgcgctttcaccttattccgtaatatgtctaacttcatttttgcaaggtctaatatagttatgctgtgttaaactgaatgttgtattcgattcatgatggaccctatttttcggggttgctgttgaaatgtgtgaactctactttcctttgcgttaagcctcacaatggaagcttcagtgttcctaaacaataaccgatgcgttctgtttgttgtcattcatttggatctggtcatacccactagcatgttccttagctttatgccactgtgtcagcaaatt

SEQ ID NO: 54993 - DNA, 365 bp, Zea Mays
gccataccgcagtggtgattattcgaaagcgaggaatttgtcgccctccaatcgatctcttatgctcagctatcaactctcgggttctatgctcaagcggacctttagcacatctcgtcgagagccgattgacgacgtgggcatgaatcgacgacggggcgtcgccgacgaccatagttcttcggcatgggcacacaatagcgctgagagtagatgtcctaagggggtgagggttgctcaggctttatacctcagggtcagagtccagccaaggggaaagaatgactagcagctgagtccggcaaggactcttctttccctgttcgaaccgaacacgagctaggaggagacccctgacaaaccaa

SEQ ID NO: 54994 - DNA, 1187 bp, Zea Mays
gcgttcccgacgatctaaggtagcttagctcaatcgagttggtcgaggagtatcaggggcacacaagaacactaaaacgagagggcagagggtatgagcggacctgagacgagctgaccacggcgaggtcacaccgctcgatgttcttgggtgatttgggggaaatcccaaattggggagttctagtggatgattcgaggcactggttgctctgctgggtgcacaattacttagcaaagcaggcggggtcggcaatttatagcaggcttgagtggtggccagtgaatttgacagagacgtgcggtggtaggagaagaagaaggttactggcacgcgcgattggtggcaattaccgtggcaagctccccggcgaccaccggacgagctaacatgagtcacgacggtgaggttaatgtgtcaaggcacgtggcgcaagaccgcgcagtggctagctccggcgaacccatccaactcaaccgtggtctgctcaggtacggtggccggagtaaaatagtggccggagcgtatccacggcgtgatatttatggatcccagtgttatccaactgatccgagcgcgaatcaccatggcgatagcacgaatccacgcgcggctcgtcagcggcgaggggattagaacctgatcctatctattactgtaccatgggattgttcttcagccagcctgacagcccaagtttggggcgaatttcctcctgattttacatggcaacaagaccattgttctgtagcaaagttgtagcctaatagaccagctccaactttgctacaacgtgcccccataaaaagtcacaagatcttgcttaaaattgagccctaagttcatccaatcccactgtcagtcgaatttaggcttagggtagtctgatagcccaactttgggctcatttttctccaaattcttcatgtgaccatggtttaatctctatagcaaagttattcccctttcatagctctacaaatttgatgtactggccctaggcaaattcttaatatttttggatctacagagccctaaagtcagccctatttcaccgttttctaactcaatcccttggagcactagggtgtcctttttgcaaataagcccaaaacttatggttttatttgcatgtctccaaatatgtgaatcatatgacctaatataccttatttccatgatttttg

SEQ ID NO: 54995 - DNA, 591 bp, Zea Mays
attgagatttcactctaagtctgaatttcagatttgtgggctcaacttttgagccttgtaactttcaaactctagggtctttgccctatgtcaccacatcaaagttgtagagcaaacaaaggagaacaacttttcttaagagtgtgagcatagttttaagaaaattcaggagataattaagcccaaagttggactgtcagactacttaaagtctgaaatcagactgatagtggactgacatgaacttcaggcttaatttcaagcaagatccattgactttttgtggtagcacaatatagcaatgttgtagatggtatattgctctacaattttgctacagagtgttgatcatgttgccatataagtttgggagaaaatcaagctcaaaaacggtctgtcagactgactgaacccattcgccatggtacagtaccccatatggatcagatcgccagcgcagggaatcttcacagccaacgaccctccaccatgattcgtgccgtcgtcaccgcgatcggtgtttggatggtttggatagcgctcggggtcacacaaatatcaccgccgtggataactccggccataaacaag

SEQ ID NO: 54996 - DNA, 462 bp, Zea Mays
agaagaacgaggataataaacagattgataaacaaccctccggcactgtttgattttaccagaggattcttccacaattttctttcttttagactcctgatgaagtcgaatcttgttatcccccaaaacagcctgactgaccacctcattatatctttcagccaaactggttgccatcaagccctgaagcttcttgttgaggccacgtaggaagtagaaccttttcttctcattggtatttacaaaatccaagacgtactgagataggcgagtgaacctctcaaaatattccattacactctcttcttcgccttgcttcaaatctaagaactcattgaatttgatctccatcagggctttcggaatataatgcgtccgaaatacctcacggaactcagcccaagaaatttgatgtccctctggctgcagtgcaaagtattcagcccaccaggccccagcttg

SEQ ID NO: 54997 - DNA, 475 bp, Zea Mays
gttgcacgtagagatattccaggggccgattcctagaatttagcagatcgaatcaagggattatggtgagctgtatataaagggcagacgtccttcagtcggaggtcacaggcgaacaacaactgactcatcctcttcttctcaattccctgcactgccgcttctctgccctgccatcctaaacgacactttaacttttgccttttgtttatttggttatcaaatatcacacctagactgtcacatcaactaggagtaatggacaacgtgcgagatctccgaacggttgcacgtagagatattccaggggccggttcctagaatttagcatatcgaatcaagggattatggcgatccgtctataaaggacaggcgtccttcagtcgaaggtcacaagcgaacagcaactgactcatcctcttcttctcaattccctgcaccgccacttctctgccctgccatcctaaacgacact

SEQ ID NO: 54998 - DNA, 444 bp, Zea Mays
gccgaaatgaaggttaaatggagaccttcggcatgataggcccccaacagtagccccttgcgaaatgagttcgtttcttcataacgagcttaaatcgcaaaatagaaaaattgggaggtcttgtgccgaaggtccaaaaaacaccttctcgaagctcgttatgaataccctgactggtagggcccagatctcagtgggtacaacgggtaagttaataatctacgggtataaaaggaagcgatacccgacggtgttagtacgacatttgctatctgctctacctttgaagcttactttgatcgcttttccacctccaaaccaaccttagctagttgaaaggaagacttattgaaagttccctatgcccgggaatatgatctggatgtcgcctagagggagggtgaataggcgattaataattatcactgtaaaaactggaaattc

SEQ ID NO: 54999 - DNA, 706 bp, Zea Mays
gcagtgacagtgatgaagctaaaatccaggaggagtttccttctcctcccccttgtcgatctctctctaagagaggtcgcaggtcgagaagggttgagggttagggaccctctcacccctctccttttagcagacagaaagtgtcagcctctcgctcgcgtctagggcaacgagctaatgatgctcctctgattcaggaagagggtgacatcattgatcttactcctccacatgctcatgtactacctcattcttacattgttcttagagttatagtagggcccatccctggttgtggcatagtgttaaagatattcttactaagacaattacgaggtaggtatgatatgtcgcgtttatgagtcctatgccatttagtacgatgtagttggtagtcggtgtagccttttgtacttgattgttttcatggtacatacacttcatgtgtgcacacatggctatatgatcaatccacatctcacatagtgatcttcactgacatgtagtctaagttgtgacgacaacatgcccatcaagcttgtaatgttgtccatcacatatgtagtccaagagggtggtgaccttacatgtaaattctatctatggaccctacttgtcattaggccaagtgccctatcctgtcttggccttatacaatactaggtcctctgcctcgaaaacatgtagcacatgttgggtgtgtggt

SEQ ID NO: 55000 - DNA, 601 bp, Zea Mays
taagaaaactgcaaccaaagactcgtgaggcgtatctaatgggaccggtctattaatgcctagcaaaaaatctaacaacagtagccttttttgctggatgtttacacaatttcatattatatttgtgttttaactcatgcatccaatccaaagccaaaaagagagagagagagacatgcctgctgtcaccaacaaagtcagtagtgagtggaaaccaaatcctcttccacgtaacccacccaatcccccttgagagcaccccccccctatggaggagttttacacatcacgcggtgcataccaaaaccgatggagaaaccacgttacgttactttacattacgaagcagcttttccatccctttaccaaacagactgattccaaatgagtgtatcatacacccgtggtgactgactggttttgtaaggtataaaaatgactgtttttttgtaaggtctgcttgcacagacctgatagctttctcgatgtcatcagcaatggacgccaatatgcagcattccatctaaattatcagaacacagtggatcagtggatgccgactttaccataaaagaaaaggcaaaatgaggggaacaacaac

SEQ ID NO: 55001 - DNA, 590 bp, Zea Mays
tagagcctggaaaaaccttgaatgctcaaaaatctgatagtgctcgcccaaagcgccttcgcccggccaatcatccaactggtcctgccgaggggaagaagaagaaaaagaggaggcttcggcgagtctcgtgcttgaatcaggatgctggcccttctattcctgctgctgaagaagtacccgtggaactttttactggggctgaccccaatgggtgtgaccttgatgatgctgatcccaatgggtgtgaccctgctgaagctaaccccaatgggtgtgttgttcgtattgttgacgaggatgaggaagaagaggaggaaattcccttaattcggaagaacagtcggcgttacatagtcagtggggagagtagcgatattccttctccagctttgtctgctctcgttggtctgcaggaattgtccatagctaactttgatcaggctctcgaggatgtggtacctgaagatctgttgtccgagccaacagatggtggtatgatggacgtttgctctgacaatccagatgtgggattagagttatcccaagcagcgtctcgtgcatcgtcgaccttggagtgcggtcttcgg

SEQ ID NO: 55002 - DNA, 782 bp, Zea Mays
gctactttagtcaatctatccacaatcacccatatagcatcatatcctttctgggtgcgaggcaatccagtaatgaaatccatacctgtagaaggataggagattggagaagacaccacacactgcagtgaggtggtgacattcatatatatagccaatgtggctgagtgtacatggctggtgccaatcatagtacatggcaggtgccaatcacagtacatggcaggtgccaataacaatacatggcaggtgctaatcacactgattgtggacttgcctaatatgaacttgcctaatatacacttgctatatatatctatcagcctcccgcagtcgaagcgttaggaatccggatgcaaagactggatcggaaatcctcaaatagctgaattggcaggcctttagtcatgatatcaacgaattgatacttggacggcacatggagaactcggacctcaccaagagccaccttctcacggacgaagtggatgtcaatctcgatgtgcttggtacggcggtgatggaccgggttggctgtcatgtagacggcgctgatgttgtcacagtaaacgactatggcgaccttcaaggaaagatgaagttcctgaaggagttgtcgaagccaacagcattctgcgaccacatgagcaacaaccctgtactcggcctctgcactggaccgtgacacggtggtttgccgtttggaggaccaggaaatcaaattgtcgccgaggaagacacagaagcctgatgtggagcgacgggagtctgggcacccagcc

SEQ ID NO: 55003 - DNA, 822 bp, Zea Mays
gggtccgagttttctatgcttatgtatggatcgaccctgatcaccagtggatgaggttctgctttgagcgagaggatgttacacttcatgctagccagattcgccagctgtttggattcaacgagtcatcaactcgtcttcacagcttgtgctacggtacctctgatcctcctcgtcgccctcacggcggagttgctccagctacagctcacgtcgcggctttgttctgaccgcccttctaagatgggtcgcgacgttcttcggcaaatttcactatagcggccaagttcctatatcagctcatgagacggacgcttctgccgtggatgtgttatagagaggctaccactcatattcagctctagctcctcggtgccctgatctctcattcagagtttgatgttgttgacttccttatttgtgagatcgaggacatggtattggatggacttcgtgcccggcgacagctgctatatgctcactatctctgccacatcttcccacagctgattcggccaccgcagttctagggcactcttgaggcctctcgcctcctctttggctcctaccgtccagcccctgaggacccagtgccgacacctgatccagtgattgacactcaggcagaggatacaactttccatcagtttgagactctgagcgcagcagttctcgatgatgatgatgattttgggattccgcctccgcctcctatgcctccacgctcccatgatcatgaggctaggagttctagtgttgcccctgctgcccctcctgtcattgaccctgctcttgctgcgatcctccagacccttactcaac

SEQ ID NO: 55004 - DNA, 427 bp, Zea Mays
ctcaagtcaactgctcaggcaaatgattacacccctccgtcacatcaaattactacttcaggacaacacgataaacacctttcgcggagcagacaccctttaggcacacccattgggtgtatcgcccgaaaacttcaagattttctgaagtgatgatacctgcaaaatatacgcaatgaatgtaccgcgacaaaacgagaagatcggctgaaatgggaggaagtccaaatgtggttactgaagcgcaagtccaatcaatagaagcattaaagtacatggctgagtgttgtccagccgaggatcctctgtttcaaccagccagatgtccaacttgtcaccgatcaaattgattccagatctaacaaggcatggacagatggcatcacctggttattctaaaaattgttttgaaaacggcacaagatga

SEQ ID NO: 55005 - DNA, 288 bp, Zea Mays
cgacaactgtacgcaagcgctagttatctatacatcatcgggtacacgtagtcaatcatcactggaaaataacaaacacttcctataattatctattgcaaacacgacatcataagttaagcattcgccacgttcacttttatcattcattagttacctattattaaactagttaagtacgcataaatttacgatgacttacacatagacagacttagttcaaaaggaatagttgcttaatcgggtaatcattcacaaccttctacttcaagcatacacccagagaac

SEQ ID NO: 55006 - DNA, 629 bp, Zea Mays
agaccacctggcagatttggtggagaccttcgctaacatgagagaggccagacttcggttggacccagaaaagtgtgtcttcggcatccaaaggggaaaggtcttggggtacccagtgtcatgaaagggcattgaagcgaaccccgataaaatcaaggccatagcagaaatgcattcaccaaaaatagtgaaagaagtctagaagctgacaggccgcattgcagccttaaataggtttatttcaaagtcaggtgagcgaagtctccagttcctaaaagtattgcaaggtgccaaggattttgcctaggggctagagcaagcaacaatgtaataatgacttcactatcattgtggatttggtgattgtgatgcgcttctgtgctagttgtgttttgttggccattgtctttgttcggcgagaattagtgtgaaacgcttccctctccccctttgttgatttggggcaaatgccagaccttggatggttttactattattgtatgggtttctataccctctggtgttttatcgcattttaggtgtattcgcctagatttttatttcagtcttgcgtcacccttcgatgtttttggcacccgaagttgtcttcgccaagattttattttaat

SEQ ID NO: 55007 - DNA, 600 bp, Zea Mays
aaagacaacaatgacggcgctcttacgaacgaagacggtgacgactccccgattacccttaacgacggtgcatcaacgtaccggaagcttcccctggcttttgaggaaggacaacgggaggcgaacgaccagtaaaatcgctgccgccgccgtcgaaggagaggtagcccctcgctaacctcgtcccatcccatctctttcatcttttcctttttttatctaggtgcccgttcgaatcgtgcgccatctcgaagcctccggtggcctcagcctctatgttgtatggctcaagcgaccctgactctacatctcagaccgaacgacgtaaaataatacaagctacgtggacagactacccgtgcgtctttgcgttgtggttctaatcgtgcgccatctcgaagcctccggtggcctcagcctctatggtgtatggctcaagcgaccctagctctacatctcagatcgaacgacgtaaaataatacaggctacgtggatagattgcctttgcgtctttgcgccggtggcctcagcctctatggtgtatggctcaagcgaccctggctctacatctcagatcgaacggcgtaaaataatacagg

SEQ ID NO: 55008 - DNA, 295 bp, Zea Mays
aaagcagtgtgctggtttcgaaacttcttcctattttgtgaggcatagagatcgccctaagatgagtgatcgtaagcatgtttatactagatcgagtagacgtgagcatgttgcaccgccttaagtcattgccgacttaagctgattgctccgttagtagggtatagtggtcaccctacgttaagtaagcgtgagcatgttgcaccgtcttaagtcactgccgacttaagccgattgctccgttagtagggtatagtggtcaccctaagttaagtaagcgtgagcatgttgcaca

SEQ ID NO: 55009 - DNA, 580 bp, Zea Mays
gatattagtacgagatgggatacgagaaggaagcactcaagagatcatgattactgagcttctcagagacacgagggaaccaagacaacagcaacatccattgaacctaatggacacactgtctagagaaaaaaatcgataaaacagtgtcatgatcctcagagaagagtatgagaacgatcatattgagatattagactgatccacatttgatacatgagaacaggttatagcagataaccagataacggagcagaatcaatgaaagatccagatattcggatgataaggccacaacatgattcgcaaaggaaaagattactagatccaggcgaaaagagagatcatcaactcagatggcttctaggttgagcagaggagaatttaatgaggattttggacaaggtttcccaaaaaaaaagaatgtgaggctagacatggtttgcgcgaacagacaataaacatttttttacataaacaagtgcacaaggaagctttagtcgatttagaggtcaagctatgggaatctacaagttgtgtaggtgtaaattcaagtgtgaaacacacaagggtcagaaac

SEQ ID NO: 55010 - DNA, 378 bp, Zea Mays
aactgttatatgtaagcagagcattaaattgttgttctgttgatgccaaaaggctgttctgttagaacactatttttttatctatacacccagtcacccacattgagaccagttaatagcttactgattatgtgtcagcaacaatgagcctatgtaatatgtagttaatggattcatgtgccacagactcgtagttgtctgactgggtgtttggaagacaacctttgtgttgaatgataatatctgatttattttatataagaggtctcttgtgaagacaaatctactgtggcacataatatctgatttgtttggaagacaacccttgtgaagacaaatctactgtgtttaggcttttcatttccacatgatgtctct

SEQ ID NO: 55011 - DNA, 671 bp, Zea Mays
gagtaggtaaatgacatggacatctgatgtttggaatttagttgttggtgttagtgatgctagtatgaacttgcaagattgttgtcaattcgtccaatctatttaactatttccatgatttgagggccaaatcatattgttctgcatttctattagcgttgtggtcttgaaaaatatggtcattttttcaatggatacactatcgacatgattggttgcgtgagggacgggcgcatggctcgacgaagcctggccgaccgtaaacgaggtttctctgcttctccacgcatgcaataaaaatggctcgatttggccttagctgcacctgcacatgcaagcgtggccctgcacatgcaggtatccaaacagaaattggaggccagtcaacgtatggacagaagctggctgtggagaagcacccaaccaatcataaggtataagcttgcagaaaccctgaaactaaggtcgtttctgatggatagtttcatgcactgttttcaaggatgtcatgtgttgaacaccatatttggcgcctgggtacgaccggatagtccggccctatggcccagacggtacgcgcccccatgaccagataaacacgggcgagattacttatctcatgcgtgattatccttacctatccatggggatctgttggatctcgcctagga

SEQ ID NO: 55012 - DNA, 537 bp, Zea Mays
ggcgggcggagttgtcacatggtactgttgttttgataagcatggtacgcccacgaactggatttgataaattaagttctctacagtactaacttaatagatagtaaaaaccagtttgacaaagaacttttgtcacatggtactgttgttttggtctgtagatgccttgacgttgcagtatgatttgacctacttaagcataaaaaagccaataaacatctcatttagtttggatatccatccaaaaccgcatgtaccggtgaggcatggtctgaactttttggaggaatgtgtctgttccctaggaatagccaacggggggtctctacgtagaacaactccatgaaagactgattgattccgcagcttaaaccaaactgcagcacacgccatggaatggttttgtgatgcaaaccaaacacgctgtgagcgaccagagcttgctcacgcaacttgcagtagacaagtggattgaacatctgctgatctacacactgcaccctaaatcatttaacaccaagactgcatgtgtgaatc

SEQ ID NO: 55013 - DNA, 372 bp, Zea Mays
agacgaccgttccgctgttagatggccatgggatggatgagattagaacgtcctgacccgtttggatcctaacccttggatcttaatcagacagatcgaatgaacctccactattttaaatctaagctgcatgttttggatcgagcgattgggaattgggcagactatggtctaatctgaggcgcgcattttagatccaatggccggtctcgttccataccgcttcggcctagaattttgttaaagagtccctacccttgtcacaaatcaacccgccatccacgcacgtaaagaataccacaatcatcccctggaatttacagattgatccctgcatttctctgtaatatctcgcgcagtccagacattgaa

SEQ ID NO: 55014 - DNA, 636 bp, Zea Mays
ctcatgctacgggggataccgtaccgtggtattcattcagaaaagaagcaatcaaagactagatagactgtcgtggcccgcttctctctacacgattttgcaatggacaataacggatgtggtggcatgcatgcacatggatgacatgtgggaccatagtgcctaccttcgtcgagtcaaacgggtgaataaaatggaacgttaacagattgggcagggcagcagctagcaccgacggtaattttagcactgtccttgatcggatagcgcctgaaactttacaatttggcatgagtagtggtgattgctgattggatctactgctgtcgtacgctatgggcgctgtgtatgcattcgtattaaattccccgccattgcagccgaatttgaattggtacgtgtatggtgccgattgcagcttctgcagtgcaggctgttgtttggtccgcctgctggctgttgcagaggtgaggtttgcgggcttcctaaaataagctctgctcttgcgcgaagaagaatgctgcctggggtacggtgttgcggttttgtcgaatgacgatgcacacgttagcaattgcaacgattacagacagggagtttgatgactcttgaccggaatcatcggcaccagcaaag

SEQ ID NO: 55015 - DNA, 1144 bp, Zea Mays
gttggttggtgccgcgccttggagtgcgggaagctgtggcggcgtggggaagagaggcggaggatggaggagacccgcgggagaggggaggaggaggcaagcaagtggacgagacgaaccgtggaagacgcgcttcttcgcttcgctctcgttttgtttgcagcgtatcgggtgcagaaaccatccctggtgcacaagttctatctgatgcgtacattccgaaatcaatggttcccacgattttacaaaataaaccccacgctgctggtgcttggtatttgtgattagcccccgcgaggccaggtgctcttcccctgatacggagttttgagtccagctttgatcgaggcaaaccatcatccttctcatacatgtacaaggctaaaatcataaattgttttcccgctgaaacgttgaaatgacacatatgagagctgaaatgttgatgcaattttaatagagtgatgggcgtcagggcgacggcaagggcagcaggtggcggcgtagacaagcaatggcgtgggcggacgacggcggtccgagtgacgtcgtgggcgacgggtggcatggacgagcggcggtgtgggcgaccgacggcgaccagctaggccatgtgatgatttcgtcaagaagtgaagatggatgatggccgctctgtattggcgaagggcacctgcccgtgggagctaattgcaaatgcgcagcgccagcaaaggaacaagcgcaaggtttattttgcaaaaagggagcgattcgttggttttaggatgaacgttctagttggaatttgtgcacttgtgcaccagatacgctgtcgcttcgtattttagggagggcgcacgtagcgaaatggcccgatacagatagaggggccttctttctgcggggaggacggatatgcccctgcgacgtccgggaacacgcaaatgccgtttccgtatctgcctatgggtgggccgtgggcgccatggtgttggcaaaccgtatggtctcgtcttggccgtatcctactatccctcaatttatgaggaaaccctgcgtgaagtgaagaatcggggaggggacgccaatcgtcactctagggaagattttgtctggttcagtcagtgtgattctatttagttcagctgtaagctagaaaagg

SEQ ID NO: 55016 - DNA, 280 bp, Zea Mays
gcggcgaaggggtatgggcaatccacagccgtccgatcttcaatcgagggctcagattagattatcccatcaccgaaccggtatgcaacaacaacccttggatctatgatcaagggcaaggatttaaagaagccgagatcgccctagatccatacgatccacgatacacgaccacgatccacccaaccaaaaggttatcccaagttaatcaaacccacacattgctagatcaacgactcagatcttattaacaccaatcgtttttctggctctaatctca

SEQ ID NO: 55017 - DNA, 789 bp, Zea Mays
aaaatcctccttcgacctcattgttcatgctctctagtgcaacaacgttcacgagttcgaccactctcattccttcttccttcgtcacgatgttcagttgtgcctctcatgcccctacacatcctaagaatggctgagccgagcgcatgattcgccctaccacaaacatgcggtgttgcctccatttctaggcttctcttcccaccagctactgggtggaggccctaaacactgctacatacctcctcaaccgtctcccatccaaggcggtcagtcatcccactccattcttcaccctcttcagcaccaccccctccttcgagcaccttcgtgtcttcgggtgtgtctgctatatcaacacttccaccatcgctccccacaaacttgtgccccatccactcattgtcttttcctcagatattcttctaatcacaaggggtaccggtgcctagatctcctcacccacaacgtcatcatctttcgtcacgtggtcttcgaccaggacatctttcccctttttagctcatccccgacaccctcctagatgtcgatcatgtcgccatcctcctctttctttaccccaagtcccaccgacatcgtccgtgtcatgcatggccctatcacctccgtccaaaccacacacagctccactaccaccgttcatgccacacatggccctgtcacctccacctgcaccacacacaaccctgcctctccagatgcctatgactcgcttcgtcgacccgacatgtgtctaccagtgatgtgtgcaacccagtacagtggtcc

SEQ ID NO: 55018 - DNA, 608 bp, Zea Mays
ctacgaaccttgggaatgaccctgcagagtagtaatcgtctggcacagcattatagacagtcaatgcaaggctgggctagcgaatcacttcctgcattggctgaaaccctgagcgagaggcagaatagtctgcacgcatactcggaggcccggcgcagaccgtaaagcagtacctctgttgaccagcagcgtatgcctctttactgtgaaggcacgcataggccgttgagaatttctagcggataaaatgctattgaaaaacaggtataagcagagcacttttggaagattcatccactgcatggtttcgttctgctctttgcgttacgttcggagacagtagtccatactcgtattggtcaggaacaaagagctaggggtggtatcatctagatcactgaacttgtatgctaacattagtccgaacaagttctcttatcctgttaccccggccgcatctctcctgagcttcctatctcccttctcggtacccgccctctatctctcctgagcttccagtctcctccctcccagcttacaggcgatggcaggctgtgcttggaccagtagtaagtagcctggcatcagggaacagcgcaacaggttac

SEQ ID NO: 55019 - DNA, 275 bp, Zea Mays
ggcttgcactgctattgaaatgtgtgaatccgtccgtcaatagaccaagtcgtacactcctagggtcgtttgcaaattcgggatcaaactcgtcaaataccttccacgcatcactgtccaacagatggaccaatatgtctggatcagtgaagagacgtacaccattctttggccacgtcatatgcagaacaaccttgaaatctgaggaatgatgggcaactgacgaagttgcttagctgcgaccttcgtaactaccaattcaccctcatcatttg

SEQ ID NO: 55020 - DNA, 759 bp, Zea Mays
gattatggtaacaaacgcgcgacaaagcctaagaccgaatccccgtaatccccgctgggattagcactggttggactcgtcttctacacagtccgaggccacagcaacaacacctccgtgcttgcacggattccgcggatggttaagacctcgctcgccgcatccggctagggaataaaagccaagccctcatgcctcccttcgcccacatcgacttgtgacactacggaagtctcagggagcaaaagcttacaaagaaggggtgaaaagccacgccgcggcatgggtatggctcaccaccgaccgattcaccatgggtggcatgccctgggttttcgccgcctggaacctgccatatgaaacgccctgtgcaaatatttctcgcgcgcgaagttgatggactcaattcgttgctcgccgggggggacttcaccatggagctcgaacgggtggggatcgctgggcggaccggacccctggtcggtggatacctccacaagcggggagcaaccattgctccgtctacctcgcgaagggaagatgatggaggaccgttggatgcgccatcaaggattgaggtaagaggattgttatcggccgtggatcagaaatccaaaggctagaacggtttaatgcgggatagagattttggaccgtggatcttggatcttgtggtgcctaccgtgtattgcttcacgatctattctgagcctttggatcgggatcagatggctggcgatcgaagataccccttcgtcg

SEQ ID NO: 55021 - DNA, 692 bp, Zea Mays
cgcccacacgcatgacccgcgcgcacgctgtggacttcgcgcccacgacgcacgccgaggacgcgcccaccgccaccccggcctattctagttgcccacaccctactcgctctccctcctcctcactcgcgcactcgtagaaccccagcacctgcctcgcaccacgcgcgcaccagaagagctccgccgtcatccgtcgtggtctcggacttgtttctcgaccgtcgtcaagtccccgttgtgtctgttgccctagtgagctttgcctcaatgctagcaacccgggatgcccctcggttcgcccttcccctctatgtctctctgctcgcgctcactagacctccatcgtgcagtcgaagccccaccgccgtcgacccgagacctcaccgcgttcctaccaccgttcaagagtcctagagctctctcttaaggtaacccacctccctctacccctgatttcccctttcctgcctttgtgtgtgtgcaatcgctcaccaaagcaaggtaacaccgctgtcgagccacctcgccacagtctgccaccctatggtgcttctacgccggcgtcgtgcccacagttgtgtttgctacgtcacctcgaacccacctgagcccttcccaacatcctaggcccccctagtgtgctcgcggtctcgccttcggtggagctccgccatggagtcgggcggcgc

SEQ ID NO: 55022 - DNA, 496 bp, Zea Mays
agcctaaggaagaaaggaaataccaaaaccctaacaaccctttctttagagcaatggagcactaaaaagaaactcagtaaaagaccaagaaaatcacattgtcatgacttgggccaattataaaagttgtactacaataaataagctacaaaaaaagtaagagagtttgcccaaaagaatttttcaaaatccccaaacaagccattcaagtggaggccttctatagaaatcagaatttcagatttctaaaattcagcccctcacccaaactcgagcgcgttcaccatgatccctaattcaaaaccgtgagctcccattgacaaatatatgctaaactaacccctctaccacatatataaagatggcattgggattcgagccttagacatgacaaaaccaaggatttgccttgggctcgggctgtgagacagatcctacttgggtgctccatatctctggaaccagtaggccaaatcctttgaccaccacacgaaat

SEQ ID NO: 55023 - DNA, 905 bp, Zea Mays
gaggacatgatagggaggcacctgtggccaagcggggccacatgaagatggtcccgaaccaggggtatagaacgatagccacgccgagccaccgccgcgatcgtagggcccatcccaggtggagtctctgcttctgcggcctcccttgcgagcatgacaacccccgtctatggtgggagggcaaacaaggagccctagtggtgggggcgatgggagggcgcctaggggctcccatcggcagagggcggggtgactggacaccagaaaatgcctaaccatcaggagtcacaccgtagagggctgtggcagggaatggactcaacctccatggtgagctcctcgaggacaatatcgttgtggacatcgtcgaacaaggggaagggcataatctatttcatgagggcctttaggtggtcgtagcggggtctcagaccatgcaagaggttcaggacgacagtgcgatcgacaacgggcttgctaagatcacaaagggagtcaaccatccctttcatttgttggcagtactcgctaatggagagatcccctaggagagaaggcagaatgcatcatcgaggtggagagcctgggcctccctattgccgaggaactgatccttaagggaaacattagcctagcgacctaggacaacaatatgatgtcctgaagcttgatggttagggtgccgatgatccacaagagaacaatgatgtccatctaaaaccaggagggagccactagcgggacaatgtcatcaaggacatggtcggtaagggagtagcgctaaagcatcaggagcacctgatcgagttagcaagcaaagtggggtgacaacgaatctagcctgattgagactagggacccgatgttgtgaactctagccacctgagcgtgaagagcggtgatgg

SEQ ID NO: 55024 - DNA, 1010 bp, Zea Mays
tagaattattcatctagtatttttgttacaaatatatggtctacctatcccttaatcttttacactaataaactatattttaaattaatgtcaacaatcataatcaaattaaaatacacaaaggctaaagacaacggaaacactaataaaaaatagcttatcatatacacctgaaattaatcgttcagtatacacgatttcaagctaaaaatatacaactaaaattatataatgatatagaaattagatcgtgatagaatataaaaatcatgtggactttctttttgagctagaaaatgtatctaaataatttttacacagtgtcaggagctagattcaatcgtgttcacattgctgttacttgcgcagacgtggatgggagcacggctagtggcgtcgacgaagggctcaggcaaacgacaacatatgacagcagaagctcgggaaacttcagcgcagcggcttcgcgggctcaagaacgacgacgatgaaagtagaggcaaacaggaaatgatgttgtgcactagagaggagagcgggaggctgtgacctttataggcgagggagagaggtgggattaaagcaggaatcaacgctcctcgatgtcaattgttgtgccatattgattcacagagaaacagaagtcgtaattgctccattgatggagatttgaagcaaaattcagacacaagaatcagaacggtcgcgagaggagaggagagaacgccggtgtgggagagcttgcagcggcaatcaaaatgccatttatggcccgttactgcctgaagagaggagagtggggagaggaagcggcatcgcggttgtggtggagctccactctgcagggatcgtggcacagactgctcgctcggacatccgtgctgcagctcccagttgaaacaagaacgaccgagtgggagagaaaagaaatgaggctgtgagagagagaaggcgggcccacctgtcatttaaatagaggagaggaggggctggatacgtgaagattagat

SEQ ID NO: 55025 - DNA, 975 bp, Zea Mays
cgtgttaaggtcctccacccaatagcgggtgggaagagaagcctaaaagaggaggcaacacaacatgttggtggtggtgcgaatcatacgctcggcctagccattctaaggtgaggtgtgagggcacgacatccacacttgcatgcgatgagagagaaaaaggtgcaagatgtggagttatcaaactcacgtccattatcacactaaacaacaagaatggtgtagccaaactgagtcaacattcataagcagaagtgagatagactaggaaaggtgtgggaattttagagaaggcgaaaggtccacaatagtgagagaagtcatctaggatgaccagatagtaccagcaaccggagatgctgggaataggggatgtccaaagatcacagtggatgaggtcaaatggacgagtagtgcgggacaaggaagaagaaaagggtatgtgaatgtgatgcccaagctaacaagcatggcaaagtgaggtagcgttgccgcgagaataaggaattgccggggtggcggagagcctagagaggacgtcgtggatggggtggccgaaacgacagtgctaggtggaggcagaggcggtggaggtgaggatgtaggatgtaacaacatgggcaaaggtggggtgggaagcgaatggaatataagggggcaaagttgttgcagcgagcaaccacaacacgagtagtaagatcccatatggtgaacccctagggatcaaactctataaaatagtggttgtcgtgggcggagtgctggcaataattatcagttatggctcactagaggcgtaggagtaggagctacacacaaggggtagagagctagtcactgacacggacgcagtgaagacacggtcgagcaatgtggggtcgacgttggctagagtaggggcggaggggctgcccacaactagtggggacgcttcggggcctcatggggtcgatggcggaaagagagacctgccgg

SEQ ID NO: 55026 - DNA, 862 bp, Zea Mays
attacatattgccaaaagaaagaaacctaaaatcgcagtgataaaaacagcaaacattttagctaaaaaataagcaaagctagttgtgtattatccaattacatagcaccaaaagaaagaaacctaaatctatagtgataaaaagcaaacagtttagctaaagactaatcaacacctaatgtaccatgtaacattaggcattttcagacaatatcttagatcgtagtctcatgtaatattgcttctgatcagcaggcatgacactaaggtctagtgtcataatcctctcttcttccctcttcttatgttgttcaacttcttgctgcctcaattctagctctttactccttaactgcatatttaatttctcattcgcagccctctcttgttcaactgctaatgctaatctaaacctctcgtcttttttcatttctttaaattcatctgtttctttcttcttttcaaataatttgtttaaagtttctgtgtagcctttcttttcagcttgaaatgctgctgctttggccttcttctttccaggtggtcttgttgtgacagtctcatttggagttgtaggctcgcttgtttcggtggcacttggtaaatgtggaggtgaggtttcatttgagttcatcttttgcttcttattagatgacttgccaacagccaattcttcaagtttcatctcccatttacgctgtgtccgcaacttattccaacaatgcatatatggaaaagctttatgttgcttatcttcagacttatataaagcacacgcctgtgtaagctgcacatagcaagaggagaatattaatttgtgaagtacacatatatagacaatatgtgaaggttgtgcaaaaca

SEQ ID NO: 55027 - DNA, 557 bp, Zea Mays
tccgtctccggccgccagcgcatccggctcgaattgaccgtcgccgctgtcgctccctataaattgagcccgcgaatagcttcgcaatatcatcactcgctcagtcaccgctaaccgctagccgcccctcgccagagcttgcgaattttggattcgccccaaatctctttccgccgccgcgaatcacaccctgtcgtggccagcttttcccaggtccgctcattccctccttgtccctgttctagcatccttacttgatgatgatgctccccgatcccttcaattgaaccgaaccgccagggatcgccgggaacacgcaccattttcttcctcatccgcggttcacgtgggcagaaccggatagttgacttaatgagaaattaggttgggggaaacagttgggaagggttcaatccggggtacgtcgctcgggagcgtcggtccttgcgtaaatcgaccggtgcgtgggctcgccggagctctgcaacgccgctcgacgtcgtggacttttccctgcgaagaaataggaatcggaggtcttttctgcaaacagtcag

SEQ ID NO: 55028 - DNA, 528 bp, Zea Mays
catatgcacaatcaagaatctcaacaagatgcatagcttgttattaaaacataggttcaaatagaccttattactattcctagaataataaagaactagctactacctaaggcattatttaggtcttacaaatactatccgctaaagaaaactactctaatcatgtttctcattcccctcttcactggcttctttgccttcaaccggcacctctttcaggttttcgggttctccaggttcagcttctgcttccacatggttgacctatccccgattgacggataaggcccgactcttacttcctgagacctgaccctacttcatcagagctggagtgatataagcaaccctgttgggacagtagttggcataatgaccgacctatccacatttgaagcatgacctgtttgtggatgcattaggagcaacaggtcccttgtaggtgcttgcttagggtatagcttgattttgttgagtttgttgtccgaaactgtcatgagctggcgtgccttgaggtgtagcataatg

SEQ ID NO: 55029 - DNA, 998 bp, Zea Mays
atactgtcaggtatcataattaggggtacctggattatgcccctaaacatgcttaacacctaagtaccgaaaaatcagaaaacacgttccccatggtcaagcagggttgaatcacgattcactcgaaacttcgctcaacagttgctcaaagctacgcctcacccgagcccatcctcaggcgaaggcaggccctaggagaaatcgtcgcctcacccaaaggcacaatttctgcatcacccgaacctgtctcggacaggaggacagccctgagcccagcctcaagcaaaggccgcgtgaaccgtggagatgtgcacattaaatgcgacgattcagatatctactccatgtaacaccgcagtaaaacaaaggacgatggaactgcggtcccatctactttcaccaactacgatgacgcatgcccacgagtaacggacactgctcccccatgccggctactgtcctcgaacaactctggatgggacgtgcacgtgcctaggcacaacctcaccctagggagagaacaccgtctcgaccgaagacgacttcagcctcgagagaaaactctgcctcgcccgagctcggcctcggccaactgccctgcagcaactccccgcgaatctcataggaggccactctagcgaatgttctaaccactcccttcatgactgcatgccccatcataggtccgaccatggccttgggaggactctttgcctcgcccgagcatggcctcggcctagataacatcgacaaaaggacacccgacgccaccaaccccttcgaggagattgctgacaacaggatggctatagaaactgcatgaccaatgtcaagtatgctttacaccatacggggcgaattaccatgcgcttttcaccatacttatcattgtttcaacaactatgactcgaataacagatccatcatgtaggctcaggtacgcgaccgagccctgatcctggcctcgactctctgctcagtcaagatgcaagatacat

SEQ ID NO: 55030 - DNA, 325 bp, Zea Mays
cgggcaggtcgagcgagccaacgggatgatattagaggcactcaggaaaagggtcttcgacaagaacgaaaaattcgcagggaaatggataagagaattactttatgttgtttggagcctgaggacccaacctagccgagctctgcatggaaacactcctttcttcatggtctataggtcggaggcagtgctacctgctgatctcaagtttggggcgcccaaggttgatctttgaaagcatagcagaagctgaggccaccaggctagaagatatcgatgtactcgaggaagaacggctaaatgcagtgatccaatcagcacggta

SEQ ID NO: 55031 - DNA, 462 bp, Zea Mays
atgagcttgagggggagagagcgagctactcggctgcaccagcaagcttggcttgctcatcgatagaggggatggtgtggggagctcagactatctagaacctgcgtacggtgagaagaagcatggagaagatgacgtcctgggagtgagcactggctaggagacaaagaaatgagcgctcgtacaggaaaaaatctagcgaccgggtaaggactggtcatgagcggtgacgaaaaaatcagaggaaggcagtaggtgaggccaagagataaggttgatggtggagatttttccaaagatcactcagatgaggataaaaatcaagagaagatgttttctctgttttaacaaaatcttcacggagaaggacaaagccaggggcggtgtgggagataagaacatgagcgctacgttgttttctaaaaaatcccagatgatggcaataataggtacgaagaagat

SEQ ID NO: 55032 - DNA, 411 bp, Zea Mays
ctgtctcgcagcagccgccgcctgagacctgtcgcgcagcagccgccgccggggcctgggcgctgccagggggacgaggactccataggtgatccgtgggggatgggtcctgggctctgtcaggggacgaggactccataggcgatctgcggggacgacaagaattgttccgctttgcacgtgctgccagtctgcctgtgctaccagatttcaacctcgacatcgacgcacatcaccaatttgctgcgcctggtaaggattactctaaccatgtagatctatttatatgaaacagatactacaattagcaatatggtgcactggttgaggagatatgagaataatggtgcttgttgttctatgcagttgttgtattatgggtactccgtagatagaaaagacagataattt

SEQ ID NO: 55033 - DNA, 881 bp, Zea Mays
taaccatttctccccctaactcgtatatcgttctaatcattaattgggatcaagctgttagcttgtttgtaagctgtaaaatttcaggtttcgtctattcactggcccgctaagcgacttttagtattgccccctccaacaaatgtagcgaccttatgagagttaggatgacggaagaccctttgcatagggaggatattagagaagtgttgatgtaacaccctacatttgcatggtacaaaacacctttgatttcataaataacatgttacaaatattgagaggaagttgaaatttttcttttaaacataggattatgtaaacttgctctaataagataaaggggaacattatttttggataaaaaacttgacccagaaatgagccaaactttactataaagtgttcttctaaacatttctggttttatggattaatttgaagcgatttagagtttatttaatttgaatttaaaaatcaaacctcaattaaaatatgaaaaaatagaaaaaggagaaaaccacgatcggaaccgtccaaaggacatttagcctagtaacatagcacacccatgccatccctctcactaacaggtgagagagaccagcctattggtgtcgctctatcacgctcgcaccaagtcacagacaggcggggccgcttcgtcagccagtctctgtgcccattcgcgatctatcgctttcgtctaagacctgatgtcatgtccgatctctcgctcgttccttgttgtcaccggtgaatgcaccatcacaaaaactacccctacaacgtccgctcagacttcctgtagctgtcaaccgataatggggattcacacgcatatctgtctcttatccccgcccattcttccttgaatcgat

SEQ ID NO: 55034 - DNA, 636 bp, Zea Mays
ttcatagatcttttcagaatttagaattagatgatcaaactaggtatttgccagcatagccctatgcttatatctgtagtcctcgccggcatatctctatttatactcctttaaagagagagtttcttcgtgaattttagtttgtctttcttctctgttgctctaatttgttagtttgtttttgtcgtacgcgatcgttggttgcaaaattcggtgagtaatttgagatctttccttttctaattgtcatttattgagttgttagcgtatatcatatcacatgttgtcctactctcatgagaagaaaagaaactcctttctattgctttctctgagttgaagagaacaatggattcttttatgttccatcacgaatctatatgtgcactattgtcctgtttggttactggcatccttggcgcctggctcgcgcaggcctgcattagtggaaacgaacgaatattacttctccacgcgtatagaccaacgaagataaaaaagcctattttgcatctgtgcgtacaagcgcggatgctacggtgcagttaaaaaacatgcacacaaggatggtcaacgtatacacaggaccaggtcgcgggtgttcggccaatcaatcacgcagtatgtgtatgggag

SEQ ID NO: 55035 - DNA, 640 bp, Zea Mays
cccatccgctacggtggtgtgtccccggcgtgtggcaatcgcatccattatgccctaattcaacccccgaaagggtcctactctatgctggcgcctacaggaatcagatgaacaaacacgtaccgacgatcgaagccccggcgatgctggccacgcaacggtgcgggttcgcggggaagactcgactacggcgaggaattcctgcccggttgatgtcgcgttctcccggctcctgcctcgagtgtgatccgtgcaaccacacgaacgtctaggacgtggctatcgggatggatcggcggtgatgacgcggttcgacgacgacggcggtgaactaccgtgtttctctcttgtggcgtctggaaggaggtggaaagagagaattgtttcagctgggcaaagagaaagggaagtcggtcgagagttttatgccacctaggccgggtaatggggttgttcacggaggccgagatctccggcgagctccagcgcgaggtgggcgcagtccatgcggagagaccggtacgaccctaacgaacgggccctagtcaggtgtgacgtagtccagcggggaccacctgctagagagggcgcaatgagtgtggcgcggtcacgtgtgattaagcagtgggccgcgcagggg

SEQ ID NO: 55036 - DNA, 332 bp, Zea Mays
cttacccatctcccggcaaacagatatttctttgttgtccgggagacaatataagaagtcaccatcattagtgtcattaaacactaaagctcccttcagatatttcaacttttgcgcatagtgtctggcttccagaatttctggacaatttcttccctgaagcgtgtcgaatgatgtagtcaacattttcgatcggagcttcgggagtaggagtctcgatattttcaggtgcaatctgccctgccgtttttccaccgcggcgggtgctcaaggcacagcttcggcttcagcctgagttttcatagcttcggcttctgcttgcccagtttcgg

SEQ ID NO: 55037 - DNA, 371 bp, Zea Mays
gttgcgtgcacgacccaagttgccaggcctggtgacgctgaccaacaagctagtgagcttgcttgcagtcaggctcctgagttcattcagggctttcagcaggtgccattgaaggcgccacacgtactactgtagtatactacgtacatgttaggcgaattaattaaagatcacgtctggattccgtcaggatgtttatgtttttgtccagagttccagcaggtttcctctggtcccagcccatccatcctctgggacctgtttggcctcaaagctggtgtacactctagcgccgaacgatctgtgcagaccgtttcactgaacatgctgttgcagttccatgaacaccatttcgcccggttggaaacatc

SEQ ID NO: 55038 - DNA, 492 bp, Zea Mays
cttcctgtggtttctgtgatgaatttgaatcgaccactcatctcttctttacctgtcataccgccaaatctgtgtggggagttgttgctaaatgctttaattcaaatgttgttcttggaaacttaaatcagtgctggatttgtcttgagcataatttgggtgatgccaaggatattggtattgtttgtgcttctgccatttgttgggccctttggaaagctagaaataatgtgtgctttcaaaacattgtagtcaattctcctgtcgaaattgtttgtcacgcatgtgcgttgatctttaactgggcaggcctgagcaagaaggagttgcaggatttacttcatgatggggtgaaacttcttctgaaggctacaaatgcaaggaattcagggagagagctgcaagggaacaatgaagatggtgaccagacgctggatatggagtgaccgtcggtctttgtctgctggttggttgcttagtggcttgggtctc

SEQ ID NO: 55039 - DNA, 322 bp, Zea Mays
gaatcaaagcttcatattctgctgcattattggatgctgaaaataacaactgaagggcatatttgagttgttcacctccacgtgcaatgaagaggatccctgcgcctgccccttgtagcttcaacgagccattgaaatacatctgccatacttctgcagtctccgggttatctagcacttgttgctcggtccactctgatacgaagtcaactagtgcttgagtctttattgcagtgcgaggtcgaaatttgatgtcgtgagctcccagctctcaagcccacttggctattctttcgatggcttctttgttgtggagaatatc

SEQ ID NO: 55040 - DNA, 359 bp, Zea Mays
agaagaggatgatggccgacaggtaggagaggagggtgagaagaggacgactggctgccgcacggggaggagaacgggtacgactcgttagggtttaacacatactatgttgtatattgttacagaagtggggccatgcggtggaggaacgggagacggtggatgagcggacaaagaagaggtggagaatcgcaagctcaccctggtgaagtgaaggggcgaggggaggagcagtcggcggcagaagaggcgacgcagcagctcctcgcgttggtggcggtgactcaagaggagcatggagtgggcatcgatggttgacagacgaggatatctaatttcagtgggacagggacacaaat

SEQ ID NO: 55041 - DNA, 957 bp, Zea Mays
gcaaagaaagatcggcgaactatacaacggcaacagtttgtttatcgagtactttttatcaagcactcggctctcaggaggtactcggtaaagaaagtcgcattcacagcactaggtgacggcgacggagtctttgccgaatatcatagagtgacaatcggtaaaggctcactctttgccaagtatacactatactgatgctctacagcgccacaaccacagttgcttgcctgtgagtgtgctgatgctctcttccagttatttgcactgttttttccttcttcaaggactcaatcagcagcggtgatttcgctctcatcatcatggccttggtggcatcctttgtactgttgatgtagtattatggatagattcctctggtagatggttgatttcgaaacgaaacaaagcctgaattctatcctagttttgttgtcgtcgtcgtccatcctttgcactgttgatgtagtatcgggagtatgagattctctcaaagggggaacagtactatgaaatcatgcatgtggaataataatatcacgtgaaccagctagctagtgccgtatatgggtgaatttggggtcagcgatttgtggaatgttgctgtagagaatcgccataattcacaaacggtccgagaagtccgtccggatgtcaacttgggcggcggtaggtcaatgatgatagagggttaataccctaccataatgcagagccagcgtgtatccactgatcttaatcgaatggagctgacggagtgtccgatctgacttgcagcaatattacttgcaacaacttcctgctacttaatggatgcatgctaaaagctagcatctaggtctacaccgttgattaatgatgacagtagatttattatgaataacgtgtattttgcatatataatactccctccacttcataaaatactatatatgacatgatgcttttcttcatgtg

SEQ ID NO: 55042 - DNA, 391 bp, Zea Mays
atgacaaccatggtgatgctggattatatggtgcagttgagagtggtgcaagagggagtggtacaggagattggaggtccagtggaggaagtcggttcacccatgccacagaagattcttaccatgatgcacctcattaacagtgggagacaataagtggtcaacatcgttcgatttcatttcttgtccaagatggaatccatagctcaagtagctccagttcttctaactatccacttggacaagacccaatctataacccttatgcatggcaatggcaaccgggtcagggaccaccaggcgaagtaccaccatcgatcatgtatgggcatggaccactccaccaccatattcaaatttgtcacttatgtatccaccagaaccacattat

SEQ ID NO: 55043 - DNA, 643 bp, Zea Mays
gttagctgagacgttgattcattatgatttatgagaatagggagtatcagtcaaaggtgaatcatcagaagaagacaacatataagatgaagatgacacactagaagaatctatgacctaacgggtgtagacatgtgtcactggaggcttcatagtgtagtcatgggctaggaaaacaagctctaagggagacgctaaaggaggggccatagaagaaggcactaaacgagagatagacacatctaaaggaggtgaggctgctattatgtgctaagttactaaagcgggtgccggaatcgagtgctctaagagtgttggcattgccatagtcatgttgcatagtaaaacacaacaatctcaagagaaaaggcacttgccccctacttggtgttgcaaatgtcatcatggaaagacactggattacataagtaccaaaaataagagagttattaatgagggcaagggcataggcgagcgatatgttgaacttaggcacaaccaggaactaacatgttgcagccagtttaaagaggtttaggtcatagtgtgtgtaatatcctaaatcctcttgctactcatcgattgatgaacataaaggtaaagaagattacaagttcatgaatcaactaagcaccatgatctc

SEQ ID NO: 55044 - DNA, 302 bp, Zea Mays
ttcgtgctcaacagagtacatataactgctcggggtaagaaatatcgcattgaggatgaacttaggccactgttccgccccggccgccgtgtccgcctgactcacggccggttcagataagctcgctggagttggccgcatgttgatcggttgccacgtgccttggtgctctaccacgtcgcagtaacgtgccttggcgtgtccattcatcgctggtaaccttgccacggtgaaagccacacacctcttgcgctagtgctctcccctctctccggccgccagcgcgccatgccaaattcaag

SEQ ID NO: 55045 - DNA, 674 bp, Zea Mays
gcggcctgtactggccatggccggcgatggctgccaagtctagctatcggggaggcataaccgacctaaggtgactcaggaacactcactaatcttagcttgaatactttgggaatggtctggccatgtgcacggcggagaccgtgatcacgagctcgtgttcccgcttaaccatggccgaattgagctaaaggttgccacgacaagcttcacaagcatgcagagatactaaaacaacgcttgaattggacagagtcttaccagagcgggctggccacggatgagctgttctcggcggcgcgactgaccgatttgggggaaaacagcgtcgtggcgtgctcggctgaaattgagggcggagcttggggctatacgaccgcaagggactctagttttactgtgcacaatcaatttgagaggagggggcagaggcagcgcgaatttggcttcgattcaactcactgtgtgtgtgatgttcatacctcgccgtggaccacagggctatttatagctacggcggtccggcgatcacttcatggccacggataaccttgtcagcgcaagcttacatgtaaggaaaagatacagtgaggtagaatcggggcatggatgacaccgtggcaaaactggctgagtcacggtggtcgccggtgattatctccggccacagtcga

SEQ ID NO: 55046 - DNA, 755 bp, Zea Mays
caatgtgattaggccaagtttggggccttgtatttcctaatccaagaagatttgccccaagtcattacaataaacttgtagagctatgtttggggtacaagtttgactaagggactaagcattggtgctgtacaaaaattggagaaaaatagacatgaagttggactgttagtcaaccttaagactaaatcttgaccatcagtggaattggatgaactgagatcgatttgcgggggatttagtggatgtttgagcaaggtccttgtaacaaagctgtagctggtacattggacaacaacattgatacagacatattagtaggttgccacatgaaaaattgagaacaaagcacttcaattcgctctatcagaacatccgatgaagaacgtgatggtacagtaactgaaccagatcgttggttcagtgaacctgtcgccgctggtgggcgtgcgccatgatcctcgtcggcgttgcgattcgtgtgctctggtgtgtggataatggccgacggtgaaaagatcttgaccgcggatgaggccgtgagctggccgtcatacccacttgccccgcggccggtcgagatgaccctcgccggagtttgccgcttgccgcctggacgccacatatttagaagtgttaccacgtcacagtagactgccgtaggtagcctgtccatcgcctgagacattgccccagtgaacgccacgtagttcgcgccagtgactcaccccactcttcggctgccagcctccctt

SEQ ID NO: 55047 - DNA, 509 bp, Zea Mays
agggaattctatggtttggagaccgattggttgttcctaagaaccccgagcttagaaagaaaatattggatgaagctcacctttctaaattctccatgcaccccggcagtaacaagatgtatcatgatctcagatccttgtactggtggaccagaatgaagagggagattgccacgtatatatctgaatgcgacacttgccagagaatcaaggccagccacttgaaggcagcaggcaatttacagccccttcccctaccatcttggaaatgggaggatatttgcatggatttcattgtgggattacccaatacctcccgacaccatgattctatttgggtcatcatggatagattgaccaagacagctcatttcttgccagtgcataccacccacaagaccgagaaatatgtagaaatctatgttgatcaaatagtgcgtttgcatggaatttcgaagactagtgtatctgacagaggagcactgtttgtggcacgcttttgggagcag

SEQ ID NO: 55048 - DNA, 1299 bp, Zea Mays
accttgaagctatgggccatcctatttatagcctcaaggagggctacttggagtaccggagttggctgcgtacgatgaggaggcatagccctacccctgtagacagtatggcccgtagcatgggtcttgtacttgctgttgactcgcgcccgtccgatttctgctgagagccgaggcttgggccgagggcttggttacgtacccgagccctccttacaatgaggttgcccaggctgtagtggttgacacagtaccgagtatggcaaaaagtcctagagtaatacataagctctttacgatgacatcggcgcatttccgttgcggatatagctgaagtcgggctcggatgaggcggaagtctacccgaggtcgtgatcgagcccgctccaggatccgtagacatgcacgccatagttgaaggagtggcctcccgcgggattcgtggggagcaggtagccgaggccgggcttgggcgaggcagagtttgttccgaggctaaattcgacttcgggcgaggtagagtttgcgcctgagggccagcctacactcttgtcgtattgtacgtcctattgggaattgggaggcggcgtgcaggaacagtggccgcatgtgtcatcgtagttggtgaagtttgacaggaccacggtcttgtcgcttctgttcacctgcaactctacgtggggtaggtatgtgcattgaatgctcctgtcccctacggactttgactgagtcatgcctcgagtctgtcttccttacctgggacgggctcaggcgaagcggagacatcagttctggggagaggggtcctcgaccggggcaaggatccttccaagaacaatccatatccgagggcaggctcgatcgaggcagagctatggtaacccctgagagaggccttagatgaagtgtggtttgcactcccttgtcctcgaggaacttgtcttgatggtggtcttggggttaagcgtgttttaggggcgtaatctaggtaaccctaattatgatacctgacaaatactgatatggctgaagattggatacaaatcgaatatgaaggactgatgaggcaatcagtgggggtgaatgggaggcacaaaattttctccactcgagagcaagcgtgactttttcccaacttcaacccaacccagcgggactccaaaaacatagtagcattgtgcaaatcattctagtgttgattgacaacaccaaaatgctagagaacccactcaaatgtctgtaaaaaaccagaagcagaactgcagaaaaatggcgagcggcagtgccgctcttatggcc

SEQ ID NO: 55049 - DNA, 683 bp, Zea Mays
ctctgtttggccgacgcaagggaaaattgcaggcatcatcggacctcccgttaagatgggacgggccgggacgactgcattgcatgcatgcgcccatatgcgcgctacatacgcagtatacaaaaagttcacatgaacgcatgtagtgagggaggcactgtttggtgtatatatatatatatatatatatatatactatatactgtatacgaatgccgaatgcgtccatccagtctcttgcgcttttgccgggcagcaggagcagcacgcacttttgcagtaaaagtcagagcaggatatccaagtgcaggctgcatgtttcgcctcaccgacctgtcctccggagagacgggagagaggacgacggacggagggagctacacgtagctagccctgtcagtcaggattctgatctctctggggccaggccagagccctcggtcgttgctggccaggtggctggccgggccgctttctccgttcggctttcgtaacggcacctgcataataccattttccgttcattagaagggagctagacacgcccctccgtcactcctccatgacaacccacgcggccctctgcttcgcactcatcgtggacacttgtgattgggataggccagagaaggagttatatcagtatatgacattcaagaagcagcaagaagggcaaaagggcc

SEQ ID NO: 55050 - DNA, 391 bp, Zea Mays
cgagatctcctactaaaaaggatcgtcgccgcacgaccttgtcgtgatagcgtctcagagtcttctggtattgtgctgattgaattactgcgttcaaccgttcttctttgagtacatcaatatcctccaacctagtagcttcggcttctgctatgctttcaaagatcaaccttggcgccccaaacttgagatcaacgggtaatactgcctctgacccatagaccatgaaggaaggagtatttccgtgcagagctcgactatgttgacttcttaggctccaaacgacgtagggcaactcccttatccattttcctgcgaacttttcatttttatcgaagacctttttcctgagtgcctctaatatcatcccgttagctcgttcaacctgccc

SEQ ID NO: 55051 - DNA, 401 bp, Zea Mays
ctgggccaaggttttaacatgttcacaacctgccttctccaaaatggctgcaatccccctcgcaccagagaatgcacagacgtccccacggtcactcaaaatctcctcaaaagcttcggcttcattactaatccactcaatgacgccctcggggtcgcctcgtatgaagttgttttcgcttgaatacgcgcccaggttggcaaaactagtctctatcttttttacacattccatagacttctcaaaacatctttcctttgatgcgcgaagttctgcaactgttttttcaaaataatttttccagtactcactggcatctcggtcagcttcggcaatagcgcattttaatttggcctcagtcagttgtttttgaaggtcttcaatctcattcttttgaattt

SEQ ID NO: 55052 - DNA, 327 bp, Zea Mays
cttgtttgacagtaggtcagcagtaagttcgtgagggagagaagaagtgagtgaaaagagagagcccaaggggtattaaaggactcccaaaaggttgcgggccgtctggactttctacacaaatcccagttgaaccagatttaaattcgattgaaccgagatctactagagaggatctcggtcgagtgccttactgagtacctgagttaacaggatcaaacccggttgaaccgagatcgaccagagaggttctcggtcgaattccctactgagcacatgagtcaacagggccaaacctggctgagtcgactctaaagtcggatgaac

SEQ ID NO: 55053 - DNA, 655 bp, Zea Mays
tgcaagtgaacgaatcactctaattcaagtgaagtttcatgattcgaacaacaaagcacgcaatgctttgttctcgcctctagctgggtgagtttgagcgagttggacatttggctatggctcacgaaatctggcccacccttgagaaattccatgagggcaaagatcatgtgaaaaccagactctttgagacgtatcagcgagagtatgagaactttgtttagttggctggagagaccatagacattatgttttcttggttccagtccatcgtgaacaagatgcgtgccaacaaggcacaattaccctatgatgatcatgagagagcgctcaagcttcttgatgctctagattaaatctcttataactgtactgggacaacgagttgattcttttatttacagggtctcttttgtaaattttactaggcgaaggggtattctcaactcatagacactcgatcggacatggacagtcatgattagaacatggattcatcaaatcagtatccagttctgagcctcagatctcgcatctacggtcctagttgagaattctagttcatatgtcgtccatccaccgatccatggctcagatcgcttttcgtcgaaccggtacgagaaaccagatctccaccgcaactttctaatctaat

SEQ ID NO: 55054 - DNA, 504 bp, Zea Mays
cagcacagcgtgttacgccctgtcatgacgtcgtatcatactagcacattcctgaaccatcaaatctggattctggaaccacaccgattgctagctacttgcaacaagcactgtgtatggaggccctcctccgttgcttttcaccaggcagcgcgagttggagctagaatcagctgttgctgttgttgcagctggtgcacagaactgaagactccttttcgtgtatgaggacagcaacagcacgagacagaaagtgaagccccaatgatgccgactcccatcttccacgagatcccatcacaggacgctcacgcctcatgttacagtgcccatcctgttcgcccgtggcgactacctggaaaacgagggacacagaaagtcgtgcggttttcgtgcaacgtcgagaccccggtgtacaacggccatgagattaatgtaagcgaaacggacaacggtggagcaatcaagcagtgacgctggcaccttgcatactttatataagcc

SEQ ID NO: 55055 - DNA, 296 bp, Zea Mays
cgcttgaactggtaggcttctaagtgagacttgtctgcattctgctcttcgaaagccatcatatcctccgtagcagtccctggttgaaggttggtttcatatttacttccttgattagcaccattgtagcttatagaaagtaaaacattggcggatggcaaagtcagatccccatgaatatggtccttttccactgacccaatatttgcagagacaaatgggatgattccaccgggctcatgaaatgaactcacgatatacctcctcatctaggatgagttgatccttaaaccaag

SEQ ID NO: 55056 - DNA, 318 bp, Zea Mays
gtcgtgatctattaccactgctacttgtagcccgaaatggcactaggccgtctgctaatttgaacggttcatatcagcccagcccactcaaggttactcaaagtcgaaggcatcgttcaggcgtggtgatcttgttctgacatgtaggctgagtctccttgtgtctaagtcggagtccctcgactgagtccgagtactctgtctaaatccgagtcccgtctgagttacttggtcccaccagtcaatgcctacattgttgcagtgtcttgaatatctatggtatatatccttaacataatcctcatcctcatttcccgc

SEQ ID NO: 55057 - DNA, 845 bp, Zea Mays
cgtcacgccacctgcgcacgatacggtgggtaggacatttcacgacacgtcaagctacccacgccaagcgatgtcatgatggcctcctcttttagcacgccacctcaataactacctcaggtcaaccaggtaaaaaccgaaagcttcccccaacttctcacgtagagcgaggggtggaacgagcaagctcccagcaaaccacaacataggtgaccgacacataggtcatttgcttgaatccatgtccaaggtcgtacctcacattcccctacggaaacctggctaacggggtggccatggggcccctctttggtcggcttgaccgaccagagagctgatacagggtccaataaggaaggactcaatgagatgccccaactgggtcgagcccctagtgggaccacttgctgagacttaaccctaccggagggtggtcggatctcacttagataacccattcatagctcaacgaccaccttctccgtgccaactatgtcggtggagggtggccctgccctcgaaaggaccacaaaaagcctttcgagggggatgcgtgcacgtcaaggatcaagcacccagaagacgaacaactcagtggatcatcctccaagaccacacccatttctcgcactgcatggactcacactcagcacaagacgaccatcacgggaagggtccatccctgaattgcacaaataccgaataaaccccaagccatccacatggattactcggggggctacatctagcagatgcgctttcgagcacccaggaattcagtctctaaaagagagccagtatccatggactcacgctcagcgcgtgatgaccatcgtgggaagcgt

SEQ ID NO: 55058 - DNA, 345 bp, Zea Mays
cactgaatgtggtatggatgtggccgtggacgtgtggtcaggccaagcttcttgaccaaatctgaactcaccaaattattgcagcttccaccatcaataataacacgtgcacgccgattctcgatggcgaagaaagtctggaacaaattatggcgttgttgcttctctgattcaggctgagaactaagaacacgctgcaccatgatgcttcgaaggttcaccgtagcatcagcaccaagcatggcatcatcattagcaacaacatcactggagtcatcatcgtcaccctcaccgtcggaagcactaatgtagccatcatccatagcaatgtatgttcgctaactc

SEQ ID NO: 55059 - DNA, 662 bp, Zea Mays
ctcaaggaggatacactcatgtactggttgctattgacaaattcactaagtggatagagtacaagcccatcgtttctctaacttcggctaaggcagtggaattcatacaagacataatattcaggttcggaataccgaatagcatcataactgacctaggatccaatttcactagttcatagttctttgatttctgcgaacaaaaaaagcatccagatcaagtatgcatcagtggcacacccaagagccaacgggcaagtagaaagagccaacagaatgatattggaagcactcagaaagaaagtcttcgacaagaatgaaaagttcgcaggaaagtggatcagagagttgccgtatgtggtctagagcctaagaactcaacctagccgagctttgcacggaaacactcccttctttatggtctatggttcggaggcagtgctacctgctgatctcaagtttggggcaccaagattgatcttcgaaaacatagccgaagctgaagctactagactagaagatgttgatatactagaagaagaacgattgaatacagtgattcagtcagccaggtaccaacaaactctgagacgctatcatgataaggccatacgacattgatccttcgtagtgggagatcttgtcctccgccgaattctaat

SEQ ID NO: 55060 - DNA, 491 bp, Zea Mays
ccttcttcttgatcttcattagttcgatagggatgtggtaatttctaaagcctgacgtgaattcggcccaagtgatggtgtcagtggcatcatgttctacgcaataaggatcccaccaatcagcagcggggccagtgaggcggcctaatgcataaatgactttctctcgatcaatgcactgtacgatattaagcatttttccatagatttaagacattcatcgtcttgaagtggatatagggtgctggagaatatgggaggcttgtggctcataaactctttgtgcttgcatattggccattgcattggccatctactgcagtaactatgtctgagcgacgaagaatgcttctatcctagcaagtggagaatttatgggatccattagttattctgaactagtccttgcaattctttgacatatgcgttcatgttgatcaacacctcctcttgtcttggtattcaccatctagggttagggcacattgtta

SEQ ID NO: 55061 - DNA, 589 bp, Zea Mays
catcttttgacctttgggtgcattatgtacgtctagaacatggcgccacacctaaagaagctagatgaccatttcttcaagatgattttcatcggctacgagcgaatctctaaggcatattgcacgtatataaaacatcatcatgaagcatgtacaagtgactcatgacatgttgtttgatgagcgggcccaatgggacaagggcaccagtgtcgatcatagcaaggcaagcagagatgatgacgtcttcatggtggagtacgccaccttaagccaggtgacaccatttgtagatagagtggatgaggcactgatagagcagtcactatttccttccagggctgatgatgtggagccaaatactaatgttgtcgatgacaaccttgacgctaaccatgataatgatttactactctgtttttgcaacatcaatgacatcatcttgatggcctcactacatagattcacacctcgcacattagtggttgtggtactatatggggtgaatattgatgatcctgcctcatttgtcaagttcgatcatagccttatcgagaaaaaggtgatgttggaggacatggagtccttc

SEQ ID NO: 55062 - DNA, 840 bp, Zea Mays
tgcatacctactgagattttgattgctgcattaagatttgaatttaaatctgtgaatcagaaatggatttgaatctagaatagaaaacataaaactgaaagtgaaactaaaaacaattggagagctggctggctgggttacattgcccacagcccattcattttccacgccgctagcctatgtctccatgccatacgtgtttttttcctatttgtttattcaccttgtcgcgtatgacatcagcatgacatcaagcaagcaacttcagcggtcgttctgttcgtgcgtgaatctcgcgcgggatctcgccagcaaaccatgcgggtcgccatagtcattgatcgagctcctccgccaaaaaaaatcggacaccgttcgtaactaatcctcacgaatttagcggtccgttgtaactccgcgcgattcggggatcctggggactataaaaatgaacaccgcttccagctttttagttggtggtcggggacgtttgtggcatcaccgaggagctcccatggccgcgtcgggggaaatctgctatctgggcaaatccaattgctcgccggaattgagtttttgttccgggactgccatatgtcgtggccgagccttcagtcgcctccaccactggtacgatcgggtcccagctatttgcctcttcctccacatcgcgtagagcctatccatggtagaaatcgtgcccccgtgtgcttgagagaggtcgagatggtcgtttggggcaccggtgttgctctattgctcggtatctggcgccgccaccgtttctggttaatcagaggttgaagaagcgctctggccgtccgatctgatgtggacggg

SEQ ID NO: 55063 - DNA, 643 bp, Zea Mays
ttatcccttaattcaaagtacttacccttgtacctctgctgcctatttaaacagttgagtttatatgaccatgaccttcctgtcttttgagatcctttcccatttcgttgttaagtcgttatcttttggcaatttctattctcttggtattggtatgctcgtatccttggagtcttgcgtactctcatattttcatgtatgcttaccttcataccccaatgactattcaagacatttcagttaacgtgcccttgatcacccttgtttcctaataatccatgagcggtcatttttattttgcacatccttggtgatctcgttaattccttgtaacttccttcgataatgaacttttacttcaactcttatgtcagaatctcacttatcttttccttgattgttttccccacttcatcactttgcgagtcttgccttaactatccttaactcctctatatcttaccttgaggtttatcttatactagcctttaaaaatatcatcttttccatctcaatctgagcattgtactgtacctacttttcccttggtcgtatcctcttctttgtcacctgcgagttttaactctatcatttgttgtgttttgtttgtcgtctcctttacccttctcatcactctatccta

SEQ ID NO: 55064 - DNA, 631 bp, Zea Mays
ggatggagtcgtggctcagcctgctgcccaccttcacgaggctggtgatcatccttccccccgaatgctggaggaagaagcggtaaggagcgtcgcctccacggacatcccgctgaggtaggcgatgatggtcgcctaaaagatgaagcaggactccacgggtagtggctggaggccaagcccctccagcagctgcacgaataaagatgggatcggcagagccaacccgctggggagtttggaaacaaagaacacaaactcttcggtggaaaggtcgccgagaagacagacatcagcacaagtcctcccggcaaataccggcacatcctatccaagtaggcggcacaccatgtcgagcacccactcagtctgggcatgctcgagatagacttacaaggccatggtaaactatggcgacacaaaacagaaaccttgaaggcaaaggggcgcagagagctcgaaggcgaaagggcaccgcgagtgggagagaagcaagacatggctgctactcgagggatgaaccccttttttaaaggcagatttccccgctcgcgccccgaagcgtcacgggcaaggtctcccccgatgcgcaccagggttcccatcctatgacacgggggccaggcctcac

SEQ ID NO: 55065 - DNA, 484 bp, Zea Mays
atcggagccagctagcgaaaaaaatctgaatcagtaactattttgcgaaaaatccaaaaatcttaaaatctgacggtcaagatttcaatcgacgggtgtaattggtatctgatctaaagttttacgggtgtaggacgtgcttctgttttaaccctcaccgaaatatggtttattctctattttacgaaaaaatattaaaaaacaatagtacttattttgaataagtaacttaattaataatttataaaatattttgttgtttctcaacatgagaatgtttaaaattcatagatataagtaaattattcatggtacttaattgtttatagctgaattatctacctacacccttatataaagtatcacctcaaactttgcaacaaccacccaaacaatggcaacagaatcattctacctttgaaatcaagggacgagatcagtccggatctcttctttctcttgctcactcaaatccaataatcta

SEQ ID NO: 55066 - DNA, 759 bp, Zea Mays
acacacaagcgttaaaggtgtcatcagcttgcgttcgagccttcgagtcttaggaatgtttggctcatgatttatcatgcagatagacagcgagccatcagctccggtcgaatggagccggaaactatatgagtcgatgcccaggaatataaggacggtcaccaacggaccccctcacttggatcctatgaaaagaaccagggcatcactcgaatcacccggttgtagctcaccgagcgctcgctaacccatggaggaaagtgtggcacaactcactgaaagggaaatgtgcaacatagccatttatacctattttggtgattaaatatccaacgcaacatcgtggactaacttaatagcttagtgtatgagaacaggttcacttctatgcaaatcagagaatccaagtccatttgagctaaaacgatgacagaatgtgcaacttacgataaaatggtaaaactgcaaggtcagaacacttagataagttgcatatgtctatgtctatgtcaatgtttctagcacttgcatttggtctctggctcattttgtagcaaataattttttttggacttggtttgggaaaaaaacattatcaaacggtgttaaagtgtcacgtaccctattttgcacgatccactggagacagacacaatgcatatcacgcacgatcgaccgcaggagcaaatgtcgcctgtcagaagcattcaatgcgatgtattttttgcctaatgcatgcccacatgcatgctcgggtta

SEQ ID NO: 55067 - DNA, 1188 bp, Zea Mays
accgcgagagcaggggccgacagccaagtggcgacggatgggggataagaggagcaaggggttgatggctgagggtgggagggaagatatgtagacctagctagatatcatgatagaaatagaatccctaaccctaaccaaggttgggagtggtattaatatttgagttagatggaccaaggactcatacaacaaggggccaaaatagaacccctacacaacacacacaatacatttcaacaattatcaacatcaacttcttgtacaaactagcattgatatagtctggaaaaatggcgttgggcaagccggcctatcccattttttatcctcgtaggtcgcccgttgccaagcctagactgcacgctagagcaaggaacacaaaggctgaggtcgcagtagctgtcaatggaaaagcttgaggtcacagtggcctttgctagggaaataacgcacgcgtggacccaacctcctttgccatagatatgctcaccactatggatctaacgagaaaactaatcattggagggcgcgaagctttacaaagccaccggagagggcgaggagagaggaggtgaaaggaatccagagatgaggggatgggagacggggcgaatttagtggttggtccatatggaccatgacacttcataagaatacaagagagcagttagcgtagtggtctaaatgatgtgttttaaactaaccggttaccgttcatagtttaaatcttgatttatttcttttccaaaaaatttcccgccacattctagacatgggttcaccacttatgggagagaggtgtagtcaggataatcagagaaagagagggaaggcgagagtgggaacataggctaggattttctgattatatagtcctaggttgttcgggggttaagatgaaatatgctttttacacagacgatagcaatacaaatatttttattttaaaaatacatttacatagtttaactatttaacttactatatgttaaatactcttccttatattgtacgtgctttcgctaacaataaatacaagggtttaagagaagggaaatgataagagatgtagagtaagaattgatcgatatgtacaatgcaataaagaacaagaaagaagatcactgttaatctatgaaccgtggtatgtttgataaactctaaaatcatcgcatgctcacaaaa

SEQ ID NO: 55068 - DNA, 479 bp, Zea Mays
gattttcaatgctctctggattgggcctcaaatactaggaagcgcaggggctctggcgcaagaaaccagagactcagtgaatagcgcccccaggacggcgggttgattcctagattttctagggtctcttctgcaaaccggtaaagtgaaggggtacgggcgaaactgagccgcccgatcagaaacggagggctcagattagatctgggttccgcgtgaaccggtacgcaatgcaggccctcggatccaagatccatagccagggaacacacaccctctcacccattcgatcccgatcggatggccctcgcgaatttggccgaatcgttatctcgcttctaatcaggaccgttcgccgtgcatccaacggcgcccggacacccccttctcctcctaccccgcgacggcggcgcataccacccactcggcggagcatcgccggaggaacacaatccccgacaatatcgcaccaaattccc

SEQ ID NO: 55069 - DNA, 700 bp, Zea Mays
gtagtggccacttgagtataataaattcgcccagtcttcttgacatttttgcccgctgaattattagccatgttccctttgccttgattggaactcccagagttctgttgattgttgaacttattctgcttcggatatggacagtcttttataaaatgaccaaactttccacggttgaagcagccagttgaagaactagggagggcggggtaacgagcaccaggggcactcggctgatttgtagaagtgggggcagtggtaggacgaacgaaaacaggttgttcgaatggataggagggtggacgaggcgaagaacgattctgattaaaaggtcggattaccagcctggttcgcttctcaggtccctgattggacatgtcacctccaaattcctttgattttccctggcctatgttcttggtttctactgctagcgccgtgctgatagctctgttgtaagtaagatccagacaggtggccattttccattggagtcggtcgttgagtcctctcatgaagccatttttcttctttaggtcagtgtttactttttcaatagcatattgggacaaatggttaaacttgttgagatactgcattacataatctcccccttgttttagtcgaatgaactcctcttgtttcatgtgaagcactccctttggaacatagtgttcaaggaatgcttgtttgaattcat

SEQ ID NO: 55070 - DNA, 287 bp, Zea Mays
gttgttcttgtagaattgctaactagaagaaaaccattttgctatcagtctgacaatggtgatgatcttgttacacattttacgtcactactcatagaaggcaaactagaagacataatagatcctcagattatggaagaggaggatggagaaatcctaaaagtagcaagactagccacattatgtacggaattgaggggagaagaccgaccaccaatgagagaagtggagatgacacttgagaatttaatccttaaaaagaggcaagttctattcaataaatcatc

SEQ ID NO: 55071 - DNA, 498 bp, Zea Mays
atcagataggaaaagttgttcaccgaaggacgtctgaaccgccgtgtagacccaccgaccgttccagcccgcacctcccgcaaccgtcgtcgccaccagagccacccgtggttcaggcactcggcaaagcgctcgattccggtagtgtatatgcatgcatctgcaggttaaggttcctagaatggatggtcttcttcacatcatggccacctgccgtactcgaaggctgcagcaacaaccaggttatacacacatatatgtgcatcaaacaaagtggggaaaaagaagaaggtgccggtaataatcaaagtgcgcgcgcagacgatgtccatcatgatcacattataccaaaaccgtggctgatgaaacgcatatcgcatatggtcttagctcataatgcaagtcacttgctccagggcctgtctggcctctcacgccctccccgccaaaacagtttacttgtctcgctttgtactagcaacgtcgcttgcttccggc

SEQ ID NO: 55072 - DNA, 363 bp, Zea Mays
acaccgtaaacaaccacacgctaacattagttatttgcacgttatcggtgtttcaacatcaacaccattaaaaagacgacaacattttatttatttacgcaacctaactacgacatcacaagtacgcgcattttatttatttgaatacggcttttcattagttcttctagtgatcatacaaaagcatcccaaacacaagtttaacagaggacacaacaagcaagcacatgaatcatggaacacatgttaacttaagtttagacattacaagtctaagtctgttaagtgctaactaagcatttttagccaaaagggtgaactaacaatcaaataagcactagcagaatttttgggacagcaaca

SEQ ID NO: 55073 - DNA, 394 bp, Zea Mays
attagaatggaggtgcccccagcctgaatagacaaagggagtacgcatgtaccatgggttcatcatcgtaccattccatatttgaacaggacaatacatcgatgatgactaggtgggtgggaagcatcctggcatgacaggatgaacatgcgatgcttgttgcgtcgtctttcgggccgttttactcggtcgttttgttttagtgggtgaccggggtttctttgttggccgatcgcatagaacgaccttcttgctagcatatttggctagcaactgatcgaatgtagggccagcttttaccagccgaccatgtgcgtcatgttggctttgcccttgcgtctctttccttgctttgtgtggacactgacgcctctggccatgggtggactgtctg

SEQ ID NO: 55074 - DNA, 515 bp, Zea Mays
aggcgaagcagatttagaagaatgattcaactgtagacagtatgaagttaaacaaaatcccacaccatttagccttcgtgccttggacttctatggttgatgcgttatggttgccttgtgcccttgtgtgaattgtgattgaatcagattttattcgaaactgaataaaacgttatccagttgggttctgttgtttactacggagtaccatgtcgtggattgggcgtatgcatctagcagcgtgcacatgccatgccacacaggtgggtgtggatcttcctgggcagtggcgaaactctgttctcaagcttagggcttccggttgagtgaagcgagaagaagtttccgtttggtcgttcgatctggctctatagtctatagcttgtagaccaagtctcaagtcaatgcaagtcggggcaacccatattttattattgaccaaagactattcgcatgtcaatgcaaggaggggggtccgacctggtaggacacggttttttttatagtcacccgcg

SEQ ID NO: 55075 - DNA, 328 bp, Zea Mays
atttctaggcttgtaaaaccttgcttcatcaggtggcttggtgtcatcttttatccatggttttggccatcaaattcaaccgtttcaaaacagttttttaaacatttaaaaatatgctaaccacaaatattgcctcatataacaactaccacctttaagtctgagaattttcacaaatatattttcataaaggttgtcaaacaattttttcaacctccactcgaccttagcaatatatgaaaagctagatggctcaaatgctttagatgaccaatatataaataagtatgccgagttgttaatgttacggttacctatcataaactcg

SEQ ID NO: 55076 - DNA, 2446 bp, Zea Mays
gaactccttctttgtttcttgcaaacaaacaacctcacaaccagcatctcgaatagaacaacgaatagcattccacttagcggtagagttaattcctctaacgttgtggctcagcacagaccactccaagaagttaacagtattgggattactcattgagtacaccaaaagtttttggagcataacaatactcaaaccagtgggtaaagccagaatcagtccacaagcaaaatattaacagaacattaaaacaagcacgcacaggtgccagccaagtatccagaagacctgcatgaaccaaaagtaaaaccaagcacacccaaaagttaatggggcccacaccgaagcccagatcccccgccatccgcctattggttgccttgtttatcctcatcagatgaatcatcagttttgtcatcagccaggtccttcctgtcaaccctccgcggcccaacaggtcccacagtcgatttcttttgcttcaacctctgctcaaaaagatcatcctcagacaggttacaaagcctggtgcccagattccatagcacattggaggatagtgggggtgggccatcgaagttatgttggcacatgaggcagttcctttttgggcaggccccatgcctgaacccagcacgtgattccttcaattgtttgcttcttctgagccctgactccacaatgattggagacggcccaccacaaccatcggaatccttggagatcccagaagtgacatcccccagggaggaatcagctggacattccttagggaccacaaaagggatggaattcattccctgctcctgcaaatttggggggatatctgacagcagaaaagtcttcgaccaattgaaagcatccggctgaagaagattcgaaagaaaaaaaggtgcccacttcttagggatgtccaccgagtggtcagtcgacccagacggagcaaagaatttggcccagagcctagagaactggacaactcttttcctctcttcaaacatctggaagacggggtcaggctgccattcctgatggagcatgaagttcatctccaaattctgagggtgattattgttaggctcatcaacatgggcctgagggggcacgacctccaaatcatggacatgatccacctgaggcaccggtccatcaacctcctgaggcccaataaatggggcaacattgatgtcaattccatccccaagcagcgcatgaccattcaccgcaaaatgaccattcggaaggggtgcaagctgaccagcaccaatggagctatctgacgacaagccagagtgttggttactgagttgtagttcttcctgctgaatgtgttgctcctctggcaaaaagggctgtggggcctgctgaatgggctgttcattcacaatccactggtcccactctccctggccaaagtcatcctgctgagccggcaacactccacccgcaggctccggagggaagtttaggtcaagccctgccggaggcaggggctgacccagcccgaagaaggccagggggagctgatggccatcctcgggggccgaggggatggggtcctcatcctgagcctgcccaccaagcatgagctgctgaataatttcacattgcatagtccaggagtcaccagcaaagccctcagcctccgaaaaaacaataaattgggggacttcatccagcgaagtgacgcgaacacgaagcagggttctagagatattactccgatcctcctcccatagaatcaacctcccaaacgacccaatggcggcctgcaagaactctgaagaacgatagtccaagggaaaccccaaaagcataagccaacactcatggttgaagagaagagcacggtgattccaagcatcattgtgacggaccgtagtgaaagtagcgtctaaatattgttgggggccaagcagaaccaagttatctcgttccagaacactacggaattgcacaatcacctgccccaaatgcgagcgctgaatggctcgaacaccaaccctacgatgctcaacaagatactccctgaccacatccctaaccgcagggaacaagacctcgtgctcaggcaaaggatgaatattgataatcgcccagtcctcgtgagaaggcggcaaacgctgcgaaactgacctgaccatgatcccacgatgctggaccaccgaggcgctgaatcctggtgggaggaacggctccgggtcaacacgccggtacgccattgacagattctcagacgatcgccggagagccaagagcgaaggagcggtttggggttttggtgaagtgacacccaacgcgagctccaaggacgtttctggcgcctgttcggatatttttaataataccgccctggcgaattcaccgaaggaggcaaaggagggaggggtcccacccgtcagggaccgggtggaagggcggaaccaggatccgaagtccaagaggc

SEQ ID NO: 55077 - DNA, 846 bp, Zea Mays
atgccatgcttttccgcaaaactagtggcgatgaatgaatgggatgctctagaatcaaaaagtacaacagtaggggtaaattcgactaggaactcactgagcactactccaggggcttgctgagcttcttgggcgtcaacgtgattcactcgagccctgccgtgaaactgggtcttgcttatccggctgttggtggagggtgccttggaggtgggtgataaaacattcttggggccattcaccaagttggagtaggcaggtacggatgtcttcaactaaggacaattattcttgtagtgactggggtctccatagtgccaacaagcattggctagaggttggctgcttgcaacagatggggtgtggagggaactttgaccaggctggctgaaacgtgacggagcagaccctgttggcttgttgaaactcggccctttgggagggaacccaaaagatcgaactctctggtgcctgtcctgctgctgagctcggagaacttgaaacttcctcttgaggtcacccttttcttcttctcgtgctctttccacctggatggccttgtttgagaggtgcgagaaaatgaggaaatcatggctggcgaggatggtcttgagttctagtctcaaccccttcaataaacgggccatcttcttggcttccgtgctgacatcatcaggcgcatagcgagccagctctgtgaatttgtggacgtactcgctaacagatctccctccttgagttaactcccgaaagtcttcttctttgagttggacgattcccaagggcatgtgatgctctcgaaaagcggcttcaaattctgcccaggtagcatctctaacggccgcg

SEQ ID NO: 55078 - DNA, 850 bp, Zea Mays
gaagagatcaagtgtttgaaggagaagctagggaaagcatttgagataaaggaccttggataccttcgatatttccttggaatcgaaattgctcggtcatcaaagggaatagtcctttcccaaaggaagtatgtccttgacctattgacagaaacatgaatgcttggatgtcgcccatgtagttcgcctattgataaaaatcatcaaacccatgttaaattaggagatcatattgatagggaggcatatcaaagattggttggacgattgatctacttgtgccacacaagacctgatatatcatatgcagtgagtgtggtgggatgatactaggataggacatatgtatgttgtttataacattctaagatacctaaagggaacccctagaaaggattgtggtttaaaaagaacaagcatatagacttggaagggtattgtgatgtcgattgggcaagtagtagagatgatcgaagatctacatccagatattgtgtgtttgttggaggtaatcttgtctcatggagaagcaagaagcagcttgtggtggctaagtcaaccacagaagccgaatatatagcaatggcattaaacctatgtgagatgatgtggctcaagcaactattgggggagttgaaagttctgaggaatggaactatgagactccattgtgacaatattgttgcaataaacaatacaaacaatgcagttcagtttgagcgtactaaacatgtgaagatcaacaaattctttatcaaggtgaagatagatagtggagtattaaggttagagcacgttaagtattgtaaccaattagttgattgcctcacaaaaggtttaggccctaatg

SEQ ID NO: 55079 - DNA, 363 bp, Zea Mays
gtcaacaacacaggctgacaggtagcacttggagagtacatgaacgccaattcaccgctcagacattcagtcttcactggagagcacatcagcacacaccacttacagtcttggacagctaaacatcaacactaagagtctagagtcttggatagctgaataacaacacttagagtcttgaagtatcgaagaattgaagtatttactgtagacaaatcaacgagcgtgtgatctgatcagcacaacactcaggcactcagcacttggagagcacatgggccttttctgttgttttgcgtctggtggatatccgtgggcaacccgtgggcgagaaataaaacccgtacccgacccgaatttatc

SEQ ID NO: 55080 - DNA, 591 bp, Zea Mays
ggaaaaaatccacattctcgcgggtggtccggagctaggtagcctcttagcctagtcccataccataagcctacacctcccactgccctagaatagctgacctagtattttatagaccaggtacatgaaagacctatgcctcattcaaaattaagggtcagatctcataaactccgcttcgcaaaaacccagttatataattcgatggaatgagtacgacaaagctaagatctcgatggctcactgctaagcactactcctaagccactctcggaataccttacactcctaagcactattcttaaaccacattcgggagtagctccctggactaaaggcagcccccacatctaggataacctcttgggagccttaacgacgggggatgggaaaggtaaactcttggcttcccaaaactggataagcatgagggggagaccactttctttgccttatgcagcaacaacatatgccgacaagcaacccacctggcatgaaggctacatgcactatgatgctgcatgaggttgggattctgtagataggacccaaacctttttgtgggcccaacaaaccctcggacaaatgggt

SEQ ID NO: 55081 - DNA, 966 bp, Zea Mays
aggcctaaggagtgttgccccccaactaatttcaccagtggcgcactaacacgccctgcccacggtgacaacggacatcacggttaaccgagcacgttcccggcgatcctagggactctagctcaattggaggggtcgagcagcattaggagaacttaaggatactaaaacaaatgaccagcgagtatgaaccgacctgggattcgctgaccacggtgaggtcaaaccgagcggtgttcttgagcgatttgggggaatgagaaattggggagctctggtgaacaattggaggcacgactaggtggcttggtgcgtgattatcctacggacccgacggtgtgctcaatttatagtgtgcttgagcggtggtctccaattttggattggtgcgctggcggtcggagaagaaaggagttactggcgcacgagattagtggttgtaaccgtggcaacctcaccgacgatctctggataggtcagtacgagtcacgacggcatggttaaagtgctgaggcacgtggcacaagaccgtgaggtgtctaactccggcgaggattgatccaaggcgatcggggtagagcggacacggcgaccgtagtaaacagtggtcggagttcatccactgggtgatatttcgcacccccacaatgttatccaacgacgccaagcacgaatcacgtcgatcggcgcaaatctagacgcgcggctcatcggtggcgagggggactgaacccagggatatttagtgcactgtaccatcagattgttcttcagttagcctgacagaccaagtttgtcattgattttctcctaaatttacatggcaagttgttgatcggctagtagcaaatttgttgtctaatgatctagctataaacctattgtggtagccatgctcaaacatccacgtgatcatcttcaaaatggcacccaaagttcatcccatgccactggataccataattc

SEQ ID NO: 55082 - DNA, 522 bp, Zea Mays
caatcggtggttgctattaaaaatattgagattgatagactcacggttgctccttcttcctatagcagaaatcttttaagtgatgctgaggaagcagagtttgatgttgtgttatctcacactgctgataggtgggatgatgagtctgaattgaccactttagatagatgttgtgagctttctgttgcgccgcgtagaaagaaatcgaacaaggctttctcaaatagaaaggttaatcgtccttctataaagccatttacaccctctaaaattagtttaaaatgaaaggaattttttggaattgtagaggtctgggggatttggctaaacacaattacttatctcacctttctagagaacatagactcgactttattgctctcatggagacaggtcgtagtgcattctcagagtctactttgagacattttttgtagtgcgtcgatttcctctggcaccttatgccacctagaggaagatcaggagggatgttgttaggggttaatccgggggtttatgaca

SEQ ID NO: 55083 - DNA, 478 bp, Zea Mays
atagaattattagctttcttgatggtaatgctggatataatcagattttcatggccgaagaagatgcgtctaaaacggtctttatctgtccaggcttcattggtttatttgaatgggttgtcatgacatttggtctgaaaaatgccggtgctacttatcagagggctatgaatttgatctttcacgagctgttcgaaaacactatggaagtctatattgatgatattgtagtaaaatcggctgagtttagttctcatttagctgatttgcgcaaagcctttgataagatgtgtcggtatggtttgaaaatgaacccacataaatgtgcttttggagtgtcggctggtaagtttttaggatttttcatccatgaacatggtatagagatagaccctgaccgaatcaagtctattcggaatgtgggacctccgacctgtaaggtcgaagtgcagaagtttctcggcaaggtaaattattt

SEQ ID NO: 55084 - DNA, 394 bp, Zea Mays
gggagcattccgccattgtccctgtcaggtgctcgtggcggaagtgggcgtgatcggcgattggtgcgacctcaattgctcaccgacgaagagcgtcgagcctggatccgcccatcgccgcggcctacaccagtcaggcgtccatttgcggtaagatgcatacctgtgtgctcgttatactccgtactccgtaaaaaaaccctgagacccgttggaattggtgcaccatgtggccgattcaccttgcttcggcgatcccccgtcgagaacggtggcggcgccgccgaaattggcgtcgggtagaaggggggtggctcctggccgtccgatctggacgtgtggtcaggattagggagggcgtgtaccccttcgtcccattaagtaacagccgtgg

SEQ ID NO: 55085 - DNA, 632 bp, Zea Mays
aagaggatagtagtatcgggtgcttttggttcgccaagctctaccaaaaggcagggatcatctgttgagcaccatatttggcatcgggcacggtcggatggtccaaccttgtggttggacggtccgctcccgggtggtccgtgggatagtctggacggttcatgatcatattaacttgaacaagagtacttatttcatgcttggttatcctaacctatccgtgagaatttattggatctcgcttaggaacgggtccagacctcccctataaatataaaggggtacgaccgattaaaacccgtgagcccaatacaatcgaaccaatctatttactttatttatcattcatgccttatgattagatgtagcgtagctttagttgtagtttccacataccaatctttacctctattggacactatgtcgtctagaggtttcgtgggtggcctgccgaccctacaacgaccctaagatcttttcctgacgaggtccctatgggacgagatccaggttctgcaggagctcattgctatcactacgcatatcatgtcatggacggtccgatgacctatttagttcgttgctatttgatcataagaaggtaccaacatagaggcggagttcaagacagt

SEQ ID NO: 55086 - DNA, 374 bp, Zea Mays
gctcccctcgagagcttcaggcccagctgaacccgctgttggacgccttgcgtaggctccaggagcgtggtcttactatggccggggtcatcatcgctttccactggaggagggtattgccgctgaccgagtgtcggcttcgtctggacgagatgacgtcggatgcctctgtcgaaagctctccgatggcctcggccaccctctccaccaatgaactcctccggtgggtgaaaggggcggtggggaggactacaccactcctgtcccgatgtgccctgaccaaagctatgtgtccctagtgagtttttggtcttttccttcagtttctagccatttccttctcgtctcatcccttccatcccttttgtagggat

SEQ ID NO: 55087 - DNA, 482 bp, Zea Mays
ttcgatgcttaggacccgaaaacgttatttatgcatggtattgttcctctacttatagtcacggggtacagcttcggacaaaattacaaatatgtccctaaatcctatacatggttactacaaacattatgagtgcaatgtagtacttttccatcttcatatcttgcagaacaagtcttcacgaccttcatctttgcacatgcttcgtcagccatagctcacctgaagctgcttccttcgacatcgactgacctagcattctcgtgaacctgattctccttagcttcgtccctgttgttagcttcgacttggtgacaaaggtgaaaatttttatctgaaacttacttttcatgatgaagttagtaatttgtagaccttcgacgacaaaggatctccccaacaggactgatagagacaaccttaagaggtggcaacaactagcaaatgtaagcaccctatagaggatggtacatcgaaattca

SEQ ID NO: 55088 - DNA, 1413 bp, Zea Mays
gtgagcatgttgtaccgtcttaagccactgccgacttaagtcgattgcttcgttagtagggtatagtggacaccctaagtcgagtaagcatgcagattgataataaatagtttgagtgccattgagaatgaagtcttttcattgatgatgtattttccgattacagaatacaatgctgccccgatagcctttgaaatctagctaggggtaaaacttcatgagatgctctatattccatgaattccctatttccgtgccatccatttgagtaagccgatatgatcctggtcgagtgacttctgctaccatgaatggcccttcccatagtggcgacaatttgtgtcgtccttcccccgttagaattcggcgaaggaccaagtctcccactatgaaggatcgatgtcgtatggccttatcatggtagcgcctcagggtttgctggtatctagctgactaaattactatattcagtcgttcttcttccaatatatcaatatcctctagtctggtagcttctgcctcagctatgttttcgaagaccagccttggtgccccaaacctgaggtcggcaggtagcactacctccgaaccatagaccatgaagaagggagtatttccatgcaaagctcgactgggttgagttcttaagctccaaaccacatacggcaactctctgatccactttcccgcgaacttttcattcttgtcgaagactttcttcctgagtgcttccaatatcattccattagccctttctacctgactgttggctcttgggtgtgctactgacgcatatttgatctggatgcttctttgttcgcagaaatcaaagaattcagagctagtgaaattggatcccaaatcagttataatgctattcgatattccaaacctgaatattatatcttgtatgaattctactaccttagctgaagtcagagaagcaatgggtttgtactttatccacttagtgaatttgtcaatggcaaccagcacgtgagtgtatcctccctgagctttcttgaagggtccaatcatgtccagtccccagcacgcaaatggccatgttacgggtatggtctgcagttgctatgctggtaaatgctgctgctttgataagtattggcaagcttcacacctctggactaactcggttgcatcactctttgctgtcggccagtagaaatcggacctaaagaccttcccaactagagtcttggatgctgcgtgtatcccgcactgtccggtatggatctcatctaacagctgcttcccagtaaccgaaggaatgcacttcatgaggactcctgctgcgcctcttctgtatagtgtatccccaatgagggtgtagtcggctgactgtcttgcgatacgttctgctgcagctttatcatccggctcctcttcgttttt

SEQ ID NO: 55089 - DNA, 482 bp, Zea Mays
aactataatgacgtgtcacgagagattggaatcaacgacggaaatggtgcggtggtgtagtgtgtgcaagcagctcaagcaagaggggagcaggcgagcagagacccgaaggactgataagagagtgtggcgaggtgagaagcgcggacgggtctgctcttatagttgagcagaggaagtggagagggtgtcgggtgccagcttaaaggtgccttgaaggctatttgctgtggtgttgaatgtcgtgattgaaatctccattaatggaggaggtaaggctgggaaagaaaccatcgtgacgagaaacgggcgagcgactgattgggcgctgggccagcgaggcgacatgggctgaatcgacgatgactgctgctgctgattattgcgaacagagcaacgtgagagaaagtggaggagaggaggaatagtgtcatgggtcccatgcgtcattgagaggtgagagaagagaggaagagtgcgag

SEQ ID NO: 55090 - DNA, 830 bp, Zea Mays
aaaggtgccctaagagagcatatcattagatcataagtaatagccgccagtttccagaatccaaggtattatcttgcattaagagtatgaacatgtctaaatcttagggtatcctatgtgttttaccttcgattctcttcttgtgatctaccccataaattcattgtcgaataaccatgatagttgcacactaggtaggggtgtgtgttgatcatagcagatatgaaggcgaccatgattttgcatcaggttagacaacaattgctgacaccccaagattagctacgaattcatgcggaaaccttgagatcgtcccgcaaccaatgattgcatcgctactccttcattgatccatacttaactgaatcctagatgattggatattatgatgatgatgagttggactcgaactccactgtgacaccgactcggacctgacctcgagcctaaaataaacctcgacgttggctcagaccaggatacgtattcaaggtcttaagataatggatagatgacacacgtaggacaacacattgatgttctggcagtcacatggtagagttacccttaggtcaaaactttgtacaaccgaactcaaggtaaatcaaagctcatgtgagtcaaccaaacaagaatcgcaccaacctactagaccaagctacactttccaacaacagacgaagagattctgaactatgtaatctaaaaggaaaatcaaatccatgattccagctcacctacaaattggctttggacaaatagttgagggtggattaggctctaagggcaatctaagaccggctctgaaaccttgctagactccatcacat

SEQ ID NO: 55091 - DNA, 781 bp, Zea Mays
gacggcagctactattgtttagaaccccatggtctattatgcaaaagaaaagacctagttgtaatgatcttattactataatggatggcgggttgtttataaagaaatctggggactcttcaataaaatatcctcggtcgaagaggtatgagcacactttagccgatcaatctaaaactaacgactcagattaaatcgtagtttatatatgaatcggtatgaagttatgcctatcaaattaaagatcgtcggtcttattttatgaattgagatctaaaagggatcgaacagatcacatgtaacggcctgaattgtctcgaccgaagtggtacccaattctaatctctaccgttgaacccagatcaacgacagacgtgccctcttctccctcctagtgacccgctatggcggagcagtgcatctacgacggagccatcgccgaagagacctgatcggctactacctcgtcctaacgccagtctccttgatgctatacgatgagaaggtcatggcgaatactatagagaggtacttacgatgcgctgcgcagcgaagaggctcgcccacaagcaaggcggatccacggcatcaccatgtcaccgtgagcaattacgcgcacaccaattggtgtccgtgcttgtgtagacctggtgcacgagcggcgtgttatgacgaagtcccacgatgctctctcaaaaccccgcaatgatggggcactcatcggccacggtggatcccctctctctgactctctgtttggcatcggcgtagcgaaggctcg

SEQ ID NO: 55092 - DNA, 698 bp, Zea Mays
ccaggatcaatacatcaaatttgtagagctactaaaggagtataactttgtttaagacatcagacataagtgttgtacaaaagttggagttaaatggactcaaagtctggctgtcagtcgacttagaacctgaacttttacttacagtgacttgggatgaactttgggagctcttttaaagacaatccagtgagtatttgagtagggttactatagcaagattgtaggtggattatagggccagaactttgttataggtggattaacaagttctcacgtaaaaattggagatctgggcgctgtaaacctctctatcaggtgttctgaatggtgttctgatagtacagtgaactgaagaagatccttggtgcagtgcatcttgtctccggcgacccccgcgcctggattcacgctgtcacggtgattcgtgctcactgaagcccggataacgcttcagggtgaaaagatcttcgccgcggatgagactcggggctggccgccatacccccttgccttgcggccggtctagataagtttgccggagatgggcgcctaccgatcgggtgccacgtgccttgaagcttcagcacgtcgcagtaagccgctctagatagctggttcgtcgccgataagcctaccacggtgaaagccacgcagctcttgcgctagtgctctcccctccctccatccgccagcgc

SEQ ID NO: 55093 - DNA, 330 bp, Zea Mays
cgtacacacgttttttttatttatttactcctcttgccgcgcgtgatgtcagcatgacaccggcgtgacatcaagctagcaagatcactcgtcgttcctgcgcaacagaagttggttacgaactcccgcgtttatccaagggattaggccaaaccgtcattatccattcaccgtcgtggccatataaagtaagctgcccccttgtccatcgtgcaaccgaacgccatcacgtgtggagggagaaaccaagagagattggatcaacgtcgtcgctgccgtcgaacgacgctcaagatgacgtccccgtcctcggtgacaggtgccatggag

SEQ ID NO: 55094 - DNA, 2187 bp, Zea Mays
ttatggtagtctgcttcagcaataagcttactcttgtcttaggatgacaaatgtttatagtaagatcagatccttcgctgtatccaaacattctaataattttgggttctttgaaagggagctggagtctttgctgaaaatgtttggttgcagattacgactttgcacacttaaatgttgtgttccctctcccacaactttcccgtttgggtgctttccagaaaaaaaaactgttgccattttgtttggaagtatcagtttgcacgcattgtttggatgtgaagtatcttaatggttttgactggggtttttcagcaagtcacaccttggaatatctttcacagccgtgcttttttagaaagggagaaaaagaaaaaaaaaatcagttacgggtgagctcgtggtcatgccgtgcgctcgtatttctaagccgagccatttgcatgaatgaggtgctaggctttcctgtgataccaaaatgaagcgtcggtctgcaataaatcggtaagctgtgggtcatatttttaccaggcgagcaactgcccccgttgctacagaagttaagctgtgtaaaataaaaaggtgaaataaattgattgagtctgttgcccttgtcgagttaattaatgagaaacaggtacctgcagtacatctacggtggggatgtcatgtgtcagtcgatcacctctgactggagcataagaaggttctgtgagatcttgtcctctgacactgtctggtacgtacacccttttctcacgcattgtgcacaggtgtatctttaaaaattgccggtggagtcaaaagaaaataggagcatgcagtgcactgtattttatttggatttgaagcccctgcatgtttggcagcagttatctgttcctcagctcctgtaacctgaggcgcatctcggagtccgaattattatttttaatcatcacctacgttagaaatgaatctgtttgatgttgcctaggcgcagtggacagagaggtaaggttctttttgggaccatatatatgactaagctggtctccccaaatcattcccggcaaaatcatggaccttagcgaggaaccggaagctgcttggttttctttctttctttcttttatgtatatgtttgtattctgtatagattattaatccgctcaaagcggcaaaccgacatgcatggtatagtaaaatatgaatatactagtactatagataagttccagcatcatcgcaagaaaaaagaaatgcgttggaaaacgttgggaacttggaatctgttactacgttgtagtagtcctccatatccacattaatggtacctccatccctggaggctggagcggtagacaataccaaaaaaaaaaatgcagtctactaatctggcagtgcagagatggattattagtgttgacaagagttgtagtagttgggcactttccagtctttacatgcatgggtccgtcatcatcagtagattagaaagccggccggttgtcctactctcgtctcgtgcggagatcagtagatctgaactgggcatcaaagtgtgggttggtgaaaggaggggcaagtaggatatggtcagctgtgccgtaattgcacggttttgccctagcaactactcgccatctgtttttaacttttgttgttatctttccttggaaagctgaggccgcaaggacaaatctggggacagcgcaataaagctggctttaatcactcggatccactccaaccgtagctttctcgtgcgtggtggagtgtggatcgagccagcggccatggcgcgccacagctagcctaccacgcccatgggtctggggggtctcttttagcctcctccaactgcatcccctcgcaaaaaaacaggctggccgggccagttcgaacgctgtgctccaggcatgtgctcacatgacagactatatagcagtagtactggtgtctagtacttgattagggagcacacgtgcgtgtttgaccagtggtaatttccatgtatgtcgagtggcttgctcgcgcggatggatttccaaaagcttattagcctttttcttctatgtaccgacaaacaatccctgagcttacacactctagcctcaggacatgcatggttccgttgtgatcgatcggaccggacgtcgacctctttggcaactaattaatcaatgcaaagtacatcaaaaacac

SEQ ID NO: 55095 - DNA, 526 bp, Zea Mays
ccatgcatgcctcgccgcagtgcaggtcccctctggcgcctcctgatggtggcggcggagaggaggaacggtggtggtgccctgagtggaggaggcagcgatgccgatgcggccatggcttggctgcagccatcagtaatgcagcggagaaaatctagagagggtaggggaagccgtggatgtggcaggggggctgcctcggcggccatcgcggggaggaggcatgtgcgcacggtgaaggcattggtaggcattgcgagggaagaggcagacgagggtgtgggtgatgtccccgatggaaggcgattgtgggcttactttgaaggcgcgggcgcgacgatggcgatgagaatggcaggagacatgggctcgacggtcgcgacgggagggggtctcgtacaagggtggaggcgcgacaatggcggaggagtcgcagacgggggcgggggcgcgaggatagcggcgagaatggtagaggcgcgcgctaggtttgtgggagtcggaagtgcgggctcgacgatcgtgg

SEQ ID NO: 55096 - DNA, 671 bp, Zea Mays
tggttttctagggtataaagtcagtcggggtcgcgcccgatttgcccaacaaactggaggctcgagcaacccctttgtccagcgccactgccaccacaaaatgaagtcagagagagagaaccaaagccatcacaccctcatcccacgtccgctgacgttcggtgcccgaggaggagtcacagacgtttgccaataatcgtaggacacgtccaagccaaccatcggtcgcgaaggtcattggaggttcatgaattgctcgtgggagttggattgttccgcggcgccgcccctcgccgcgggctaccttctctaccgtgctatagctagtaagtcctctaccagaacgttcgtcgtgtctcgggcatcacataggacagttcatagcatagattggggtcgggagcatcgtaatgggtttgctctggccatggccgtggagatcggaggggggcaagattgtatgcgtagttgatctaatcctaaatggctaggattagattttacctacccctttgcgcgatttaatccaaaccatagaatctagatcgaatggatacgagttgatctccaccacttagaatccagaccgtagatcacagatccgagggtccaggaatcataccgattcgttgaggagaagttctaatcaggatcgaccacttcatatccag

SEQ ID NO: 55097 - DNA, 488 bp, Zea Mays
acgggggcaagctggagccgaaatgggaaggcccattcattgtcaagacgaaggcatcccccagcgcgtataggctggtaacgccttctggcgaagacttagagcactcctggaacatcgataatctccgcaaatttttcgtctaaccctcagggcccatgcgcccttgtaatccagcaaacaatgttgtcccggcccgcactcttttcctcccggggggtgaggtttttaacgaggcagagccgtgtaatatatcagtaaaagcccccgcaaaaacaaaaactcaagtgcaacatgtcgaaaaagaccacttcaacggtcttcggcattcgaccaattctaggtcaccgcgataggtagcgtagactaccctcgcgtgcgacaatccgtgcaaaagttgcctaagggtgcagccggactagcacaacaagtgcattaatcgaagtcttttacccaaaagacaatccgtgcaaaagtcacctaagggt

SEQ ID NO: 55098 - DNA, 357 bp, Zea Mays
cacccttctccaggagcctagtcaaaggcttagcaatgctggaaaaatttggtacgaagcgccaataatacccagcaagccccaagatacttcggatttcagagacactagagggtctcttccactccaccacagccgcaacatttttgggatcaaccgcaataccctgctgattaatcatgtgccctaggaaagccacttcggatagccaaaaggcacacttcttcaacttgccatagaattgattcttccttagggcacccagaacgaggcggagatgctgctcatgctcggcctcggtctttgaataaatcagaatatcatccaggaacacgaccacaaagtcatccaggaatt

SEQ ID NO: 55099 - DNA, 849 bp, Zea Mays
ttctgcagcatgcacgaacttctgtatgagacaaaggccatgggtaaagtacagtaccccaacaactttggttgttatggatttgtcgcccgcgccaatgacagccacccagtgccaacatttcggaagagatggtccggaacttgaatagaagaatggttttatatgaagaacgacttgacggcgagggaggacatcaaagaggttatcatgcgccccatatggtctcgcttcggtctccgaaaaccgaaggttgaaattgatgatgctgtggaagcgtgccagaaggccttcagcactgtctgctttttcattggtacaagagatttaattcaagagcatatagcatttagagtgtggccgcttgcggaaggctgggaaatgctgaagtaaatcatcaatgatcctagcgaaggtgatttggtccggctgaaatacaccttcaggtttggagataagtttgatgaaccaaacaatgattagctgaagtgtattgaagttgcaagtgatgaactgcttggatcatataccaaggtagaagataatgcattatccacagcctttggaagtaggggaaaaagagattgaatagagtttttgatgctattggcttcgtctaccccgactaccgctacccgttgcgggtacaggggaagaagagaaaagttgatgcaacgggtgccccagccaagcctgtgccggaggctgtaagcaaaaagttgaaggtgcttacccactggccgcgttacattgaaccggccgtggttcctgagtttggcgtagggacatcttctgctgctgaagcaaagcgcgctgcctcgactgtgcagagtactgaagagtcgattg

SEQ ID NO: 55100 - DNA, 474 bp, Zea Mays
cttttgacgaattcagcattcggcacatctctagagttgagaatcacagagctagcaatttgggacaagatgcatcaggttatcggataaagtgagggaaatttcacaacaccgaaaatctgataactggtatagggtcaattccctaggtcacgtaccgtccgggtgaaggatccggaccgtccggggttgccaggaaagttctcctgattgattcggcttgtaatgaagccgatgcaagtgattggaggacaccaataattaattatctacgaaatcccagtgttaggatggataggaacgtttggcgtacaactttcaagtatgttttaatgagtgatgaactctaccaccgaacagtcaacgatgtcctgcttaaatgcttgggcctaggtgatgctatattagccatgacaaaagtacatgaagggatttgtggtacccatcaatcggctccaaagatgaagtggttat

SEQ ID NO: 55101 - DNA, 897 bp, Zea Mays
agacgatacgccatatcagacatacgcctacatatgatgaaaggtgacacaagatgaagttgtaccgaagacatccctaaacctcacctcgagctgactctgcaggacccaccaagcaccggtatgtatatatcagaatagttacaggaacccatatggcgaacggacaatatgtgacgccataccaggggtatggttgggcacgacctagcatacgacaccataggggctacgatgtccaaaagaaagaggccaaactccaccccgataaaatacaagttctcattgtaaagtctaaccttgagctataaaagggcaagacaaccccatcttcacagacatccaatctgatccaatccatccacaactgtacacaagcacccaattgtaacacgctccaaacaatacacgatcagcactacactagattagggctccggcctgaaccagtatatctcctgtctcagatccgccttcgagctctctatagctcatcattcagagtaagtctgcgatagcacccctcctgaacacaaatcttattatctccggttcccgaaactacgacacattgagttgtgcatgaatttctatcgtgttggatttggtgtttttttttactatccatctttgagttaacggtctattggtaggcgagaacttggacagacaaactgatccatatgtgaatgtgatgttactcgccacgtctttcataaattgagggtttctttatccccaccaaaacaacagtacacgcgccggaaccggaagtcatgccacgtaggacgtgtgaatgtgatgtttggccaaatgggtggcccggcccgggctcggtaaagccaggcccgttttgggcccggcccgccaggcacggttagaaaaccgggccggccg

SEQ ID NO: 55102 - DNA, 330 bp, Zea Mays
gcccaaagttccagatggccaaccctacaaagtacctcttatcaatggcagatggagtggcaacattagatgtgcgaaatcagcaagattagatgtgcagaactagtgttcttaaaatcttatcatcatcttccacattgcagctttcagatgattcattactgtagggccataatttcaagaagaatgcacaatgctcttagagacttcaccccacctctcactatgagcaaaccgttgttagatgtcaaaatcttgaccttacaaaaaatattacctggtcgtcaactccatttatgtttccccccttttgcatcagtttaggcaaaa

SEQ ID NO: 55103 - DNA, 376 bp, Zea Mays
ctacctgccgacctcaggtttgcggcaccaaggctggtcttcgaaagcatagctgaagcagaagctaccaggctagatgatattgatgtgctagaggaagagcgattaaacacagtaattcagtcagccagataccagcagaccttgaggtgctatcatgataaggctatacgacgtcgatcctttgcaatgggaggcttggtccttcgccgaattctaacgggggaaggatggcacaagatgtcaccactataggaagggccattcattatatcggaggtcactcggccaggatcaaatcggcttactcaaatggatggtacggaagtggggaattcatggaacatagagcatcttagaaagttttacccttagc

SEQ ID NO: 55104 - DNA, 327 bp, Zea Mays
agttagaaataaaaaagaagaaaaggtattaatttatttattagtattaaagacgataattatcatttaatttcattgatgatattaaaatatattaatactagttaaaactgtgtttattgcacccactcataaattcatcatttaggactcacaataatagctataattgaattaataagtatttacgcgtttaggacgtatttaaagtgtgataagtgcgatatgttaatgtgcatgtaatggtgtatgtttatgtaatggtgcgtgtttatttattggtgtatgctttctttttgtatggcaacgtgtaacgttattagaggc

SEQ ID NO: 55105 - DNA, 580 bp, Zea Mays
taaccaagtattgtgttgttgtgctgtcaatgttctttgtggagcttttggcattccttcgatgacctgtgccgcgcagaatgttattggcttcttgttggctttattgctccattagttctatatactttctccctttagtggggtgcaaagaatgttagattacatgattatcttttcatgatggcaagaacaatgtttaggaagattaggagttttggtttcaatagaactacttgtttcgtggtgctttgaggtgaggtgtttgatcttcttatacattcatctagtgtggatgtttcaccatttaattaaaatgaattgttgaagttggtaagggttgtgcttagtgcatattaccccttcataaaagagtgttgttttaagacattgatgttgatgtctagctacatccaaattcgatgttgtgaaatcgtagtgttgattgcatctatgacttgctttgagcttcattgcatgttgtttcatgcttgttgtcaggttatgtagcttccttagaccattagtccgaggtagaagttcttgtgtagattaataccaataatggacccttgttttg

SEQ ID NO: 55106 - DNA, 1072 bp, Zea Mays
agagagtgagagagagggagagggagagggaagagagaggagggagagggaagagagaggagggagagggaagagagaggagaggagagagggaaagggaagagagaggaaagagagtggagggagggagagagagagaagagagagaggagggagagggagtgtatagaaagtattactgtacaccgaacgacaattaagttcatgtacgaatcttcacacgcactactcgcccattgctgccttcttcgtcaaattgctcgctggtgagcagtctgacgcgaacatcctcgaggtccgcgacgtcacacgtcgtggttgatccatgggagctgtcggctggcggcacatatgccaagaactcagcccatggacgcctcctggcttgcttcacaatccaacgtgtttacgggacggtctcaaatgtatgccatgcttctcttccatgtatgttcaataaaaatgcaaaatcctcactcgctaaccttaatcctcaatttgtttacttagttgccactcgcacaaatgagaagcatgcatacaacgccatttcctctgccatagttaccgtgttaccgtggtcataatcgccttcatggtgtacgcaagagagacatgaatgtcatagaaagtttggacgatacccataaagaagaagatgatggcccaaatagttcagtggcaaatgcgagtcatcgtcaatagcgcgccacacacattccatagaattacgatggtgtgttgactgttgtcgatgcacatttcgtagaactagatgcttgattgttgtctgttgatacgtttagcatttatttcttgaattgtgattagaattagcacatgatctctgatatggttttttagtgagacgcggaaaaaagactaagtaaagagatgcagacgggtgagaaggaggacacacagagagtagcgggcgagcctagttggcaccccttcccttcacacagcatgtgggccacacatcaagcagctgcctaggtcgcgcaatatcattcgactaagtatgagcctagttttactcatacttgcgtcacctcctcgagcgagcaag

SEQ ID NO: 55107 - DNA, 362 bp, Zea Mays
acagaggcacagacggtccgggaccacgccggatggtccggagaattccagtggatggtccgatcatactcaagacccgcaacgaccgcgtaccatcaaaccacaacgaccagagataggtacgtggaaaacaaatacatttaaagcagctgttcgactggtcaaatccagcccgactttcgatcaattattgtccaaatatgtgaaaaagaaggccggccccagtgaccggccagcaaagcgacctcgctcgcccattcgtgagcaatatcaagtaagaccgattggaccacctcaccaatcggaaaaaatgaaaggttatactgtccaattaagacctaacatacctaaatggacacctc

SEQ ID NO: 55108 - DNA, 561 bp, Zea Mays
ttcttatccagtcctgtgaacacattaaagcctccaaagattcaggagtaagcctgctgcgatgctcactaagaatccgcccactagtgctaaaagctgactctgatgcaactgtgctgaccagaataaccaatatgtcacgtgctatctttctaagtgtaggataacgggttccagccaccttccaccagtctaggatctggaagttctcagttaaaaaatgaaccaaatcatcctccaagtatctatctagctcagttttaactcttgtcatcgctggccttcgactagcaacacgtgcactaattgttgacaacaaactagtgtcaagtagaggagttgatgactctgttgtatcttcaccctcttccatttcatagtacttcatcaaatcacataaagactctttcacttcatcaacttttagcacacactgatcactattttgacctatcaaagtctcaaagaacccaaggagataatcaaccttaaacctaggatctaaaatagttgctattcccattaatccttgaatatccttccaatatttttcaaaatttt

SEQ ID NO: 55109 - DNA, 581 bp, Zea Mays
gttttgcttgttatttttagatctgtagctctagtgctccaaatgggttgaaatttgtacagtagactcttggtgtgattcttggtgactggtaaaaattgcgtgaattgatgtgcatgtatgattaagttagtgatttaacttgtttaatgcaccttaagtagttttaaatgatttataaataatatatgaatgcaaaaatagaaaatgatgttccactgtccttgcatgatattatagtagcctaaggaaacttaatatggtcatgcatccacagaaaataactaattttagatttaacttgctctcacatgctttattgcattaacaaattgttatttttgtattaaataaaatataaaatctggacatgtgaaatttatacattggtcatgatttgttattacctatgcctcataaaaatcccagcaccaaattagatagtttgatatggtgctaaaataacacccattttataattacaagacttagtgaaaatttggagtaaacaaaatcatgcatattcatgaaaggcttgagttataccttaaaaccaattagaggttaagtggttgtgtcat

SEQ ID NO: 55110 - DNA, 965 bp, Zea Mays
gtttaagtggtcattttgcgtgggagattcatgaagagcaactctagtaaactggtggcttgttggagtgctctttattatggttcttacattattgtaggcttggtatgtgatgtcaattagcatgtgaaccactaatcttggactcactacaatgaggatgcaggttgctagcaagcaacctaaccttagggatatatcttatttcatctcttgtcccatgtgctttgcactatatacatactcttgcaatcacattatctttgtgttgtacaatatttttcagctagtcttatgtaggttgtaactagtaccattatgattgttatctcttagtcataagtagttttctttgctaaatataagaagctactagaattatttatgggacgtgcatatagaaaactttaactaaccttctattctaatcaactttgctatagtgatagttgtgtgtgtaggataatttaataggttattcagtattcaccctctgatagccttctagatactaataggttaccatctcctagatgactttgtggcttgtggtcttcgttgaagaacatgtggtgattgtgtgtggcttcggataagggttttttgaggagtgttgtgctcaccttgcgagagatcatgaatagaaactctagttgagtgaggtgcaaaaacaccaagtagtctagccaaatcaaagtgctagagatcttgtatgaatgctccatttagtggagagtgtgatcttgtatgttcaacattagcaagaggattgccatgaaccttaggcttgcctcaataagaaataagtagttggcaaaccactaaaccatatgataaaaaatgtcatgttaacttgtcttctcgttggtttgaaattgcccaccacaagcttgtatttattcgtttgtatatcatgcttatgttgttgctcttgtgctagtgtggtataggctctatgcgctttg

SEQ ID NO: 55111 - DNA, 395 bp, Zea Mays
cgccgcgcctaaaccgaaaagagctaaggttttgacacgtaggccgaagccacgttctttagagaggacagctgcagtgcttgatacataaaagatggagattgttgaccatgccgaaaccatccctttggcttcggagacaattcttgttgtggcagtcgaagctagtgtcgatctagtagaggagacagaagcaaagagctcaaaggtagaagagcatccaaaactgttgagtcccccaaccacgatggggttgccaaagttaacaaccgctgcaactcctaggaaaaggagaatggaactgcaagactgaagtttccgatgacaagattgaagatgtaagagaagtagccactgcaagcgcttctcctattcacgttgaagcgggacctttg

SEQ ID NO: 55112 - DNA, 596 bp, Zea Mays
actagtttagccaggagatccattacgctttgaaccttcgtgattgtgtcttgtaatctgcaatgtttaatccgaggaagggtagctgataccgcccacatgttttggttggcttcactctcagtttgtatcttgatggatatttgaagttttttggctcttgtgttcttcccctccttcttcttgtgaatttgtgaagaaccatcgagttcttttggtgtcagtgttgtttgggtttgttggtgggcgatatatactcctagtatcattacttacgtcctgatggtgctatttgtggtcgtgatcctcttcgatctcgttttgagttcgttctaggaaacttcatcaaaaccccaaccgaaacgagatttctgatctatgctttggtttctgtattgcccgggttgattcttcaccagtagacatctttctccccgcacaaaatttttgcaaagtttgaggcgattctgccagggttttagtgcgcgacactgtcggacttcaagccgtcttgagcttttgactctaattttttgcatacagtagggttgttcttcttccaaatttttggtgtattcaaacgacattggtttgaa

SEQ ID NO: 55113 - DNA, 396 bp, Zea Mays
acccggagtatcatccacaagagtgtgaggtaaagtacacatctttagtttcgtatgtgtatacctaattagttgatttcacaatgtctattacacatgaataggaggtcttgtctcaatatcgtgcgatacttgatgaagccgtggcacattaccaagacgcaccgaggctgaaccaagatgaagacgcaccggtaccgaccaatacaaccaccgagaggtcaaggaaaaggacaaagagcgaccagaaaagaggtgataggggactgaacaagtttcctgacaaaacatataaaatctcagatgtgagcccaaaaggtcagcccctagctccagaagaggcactccctaagttccggaatgcacttgggttcttagttagggataatcttgaca

SEQ ID NO: 55114 - DNA, 471 bp, Zea Mays
gtggtggtcgtgcgtccgggcaagcacgtcgcctagctccagtggggagcggaaccgtggccaggctccctctcggtgttgtcccggtggccctcgcagcctcgcttgcgcgacctgggcgataggaagaagacgacgtgggaggaagaaaaaaaatcagcctgggccatggtgctgtgaccaacggtggggatttgctgatgcctgatgggtgtcgcgcccgtgtggatgatctgagtcattggtcacatgatgggcgatccagatcggtatgcacttacctctctgcgccatctaatcgggatcgtatacttccaatccaacggtccctgttgcgtttcccttcgcgggtacatcttactaaagattccctgaacttcctaggaaccaacccgccatcccgtgccattataagacccttaccgtttagtcctagaatttatgcagaacccccctgggctttgttaaaat

SEQ ID NO: 55115 - DNA, 271 bp, Zea Mays
aaatatctggtcaagccctaccaaagaatcttcagtacataaccaactattagcttattcattctgcctaccaaatgattcccttgcaaaactatcttacgatatgcttctaacttagatggtcaataccaggaggggtggtggaattgatttacctcctaatcgacacactcggcggatatatagacaaccccagccacagccagtagagatgaatcctcctaatcctccaccaggcggagttgacccactgattgcagctcaaatgagg

SEQ ID NO: 55116 - DNA, 609 bp, Zea Mays
cttatttttgctcggatttgaagtagaggttttcatgttgtctagttcaagtcatttcccctgaaaattcgctacattgggatacatgcgttattcagttgttttcactgatttttgctgggatctgcggtagatgttttcatttttctttcttttccctgaaaattcacaaggtcacgatcgactcgttattgccgctttctcaggattgttgcgtttgccattgtcagtaatgtatttttccttctaggaagtttactgatcgttgttatggtgctctgtttttagattccatggccaaaaataataaatgtggtaaaattaattgtcattgctggatttgaatctctctttgatggtattggttgtggcaggtcagattctaccatcagtgtaatgatagagcgatacgtgaggttctctctacacataagtaaatttaatattataacaaaacagtctatataccatttattaaattgataaaaataaatattatactttattttaagttaaacgtcaaaaaaaggtgtggaaccgtccaaattatttgagctaagtgcataactcttagtttagagacaatgacacacttaaatagaaataaac

SEQ ID NO: 55117 - DNA, 963 bp, Zea Mays
taacgatggtagagactataatattatgaaatattattgtatgtgggatagattaaaccgatagaagattattttctagtgattcggctcctaatagcaaaacgtcccttactccttgatggctctcgacgagaagtcgtttttaagatcgtttgatacggcttcacgaagagccagagaaggaaccgtcgtgagagccctgccaaaggggctgaaaaataaagatagtacggagtcgagagcgactggagcgcttcggtgtgcggtgtgtatattgtatacatgtccatacggaccggtccgttgggcaacccgtgacccgaccctctagaaacctcgcacaccacgacccaacccgctattaaccccgcacagcacgacccgacccgatagacggtggccaccttggcacgatgtgtgtgtcgtgcttgggctacatgtacggctcgtggggtaagcacgacccaacccgactaaagtgcacgaccttgcactggtccgcctccatgcatgcacatgtatacacatcggtcagttgcacactagcacacttcccaccattcccacacgtccgctcgttcgagaaaccctaatcttgtctatttcccattcgcctcccttgccgcctcgcgcaaacgcactcgctcgcgtcgtcgtctccgacttcgatcggtgctcgacgtttagatcggtgcactcgctcgcgtcgtcgtctccgactccgattggtgccccctcattgagtatctggtgctctggtttcaggtttggtctccaatctccatcgccactcgcttgctccacttccaagttttatatctgctctagcctataggtatcagcttccagtgttgtgttctcctctattattgtcttctactaccttttagctacccctcctgccctccattatctcctaccttctctatttggaaaccctaatcctcgatctttcaagatatc

SEQ ID NO: 55118 - DNA, 336 bp, Zea Mays
acttgatgaccaaagtcaccaagatggaggtcattaagggtgaagttggggaggtttgtcatgaagaggggcaaagtgccataagaaatgtataacatgatcaagtccctagtgaaccaagttcgcaactatgggagcacaagatatacagatcatgaagtcgttcgactcatactaaggtcatttacgtttttatgctaaccttgtctccttagttcgcgagaaccccaggtacacaaaaatgagtctcgaggaggtgctgggcaagtttgttagccatcaaatgatggttatgaacgcaaagtacatcaacgacgttgccaacgggagcctcac

SEQ ID NO: 55119 - DNA, 1696 bp, Zea Mays
acatttaggtggaaggtcccaatatcataagggtcaaaggcgataatagacaagggcataagggaaaagacgaaagcacagaagagccagtggtatacgaacaacaaagaatggaggtatgtcaaggcttatgcggtaaagaagaggatatagccaagggtgggataagtaaaacatagctctcgaattgagatcgaaaagaagggatttcaacaagcagacctaagataagtatcaagacaagatctacagattacaaaggtaaggatgatatcaaacaaaagctcaaccaaggatgaagttaaggtgagacaagattgcaaagcgatagagggaaaggaaacgaacaagagcgggatagggaaaacaacactctcggattgaaatgcaataagtgaggctaagaaaaataggtaaacatcatggtaaatatggagagaggtcaagggtcaaaggtgataataggcaaggatataaaggaagaggtaaatgtgcataaaaaaccaggaatctaggtacaaccaagaatagagttaaggtaagtcttgcaagtggtaaagtataggatataaccacgagtgagataagtaaaagaccacgcttgaactaaggtgggagattagaggttttagataacgaacataccgtaatcaccaaggtaagattgagagatgagaagggtaaaggcactaagaaacaaaagcacaacaaaggatgaggttacaaactcgcgagccaaagaagaggatacgaacaagagaaagatggtatgagatggaagaggggcgattttaaagggcaggtatgcgatgaacatcaatgcaatatatagaagtgtcaagggtaaaggtgacaataacaaagagaatagtaaaggatggagctaaggcaagactcacgaaatggagagatggagaaaacaatcacgggcaaggtaggtaaggttccaacataatggtttggtaaaagaaattattaccgagggaagttataaggaattaatgagatcaccaaggatgtgcaaaataaaatgaccgctcatggatcattaggaaacaagggtgatcaagggcatgaaaaatgaaatgtcttgaacattcattggggtatgaaagataagcatacataaaaaatatgagagtatgcaagattccaaggatacaggcatgccaaaacaagggaactgaaaaggccaaaggataacgacttaacgacggtagacaagaagttcatggatatataaactggaatgtttaagtaggcacgagaaattcagatgtgggtatttaaaacaagagtattgaagaatctaggggtacgagcatgccaataccaagagacaagaaattgccgaaagatagcgacttaacaacagaataagaaatgatctcagaagacaagaaggtcatggacacataaactgaactgtttaaataggcaatagaggtacaagggtaagtactttagattaagggataagggtattaaaaatgcaagaataagagcatgtcaataacaaaatggaatagagatggtcaaatggtagcaatttaataatggacgaggaaagagtcccaaaagactaaaggctatggtcagggggcatctacaaagatgtcgcaagcacaagagtgagatcagatctaatagattgagagaagtatagaccatactagaataaaatacttttggcaag

SEQ ID NO: 55120 - DNA, 469 bp, Zea Mays
atggcaaccgaaagcaacaaaatataaaaacatccaacattatagctaagagagactaaatccctagaatcggagccataagaagggccaaacttttggccccggctatttcccaaagctccttttcttctccagcccttctgatagctgcatccaggtttggggaaaggccgtcaaacacacaactgtttctgtggttccaaataaccccagaataattaaggagttaaaccctttcttggcgattccatgcagctgatcgctgcagcttttccaccactgcatggtgtttccctctcccatttgaggagtgagaccctcaagattaacctgtccaagcagcctgtaccaaaaactcctagcgaaaacacagtctacaagcaggtggtctatggtttctggttcttggtcacacaatgggcaacaatcaggatggttgagccccctcttttgtaacatatctgctgtc

SEQ ID NO: 55121 - DNA, 666 bp, Zea Mays
ccaaattgggggaagaaaggaattagagcgctatggtggctaatcggaggcaagggtaggtgctttggcttcgtgacaacctaacggagctagcggcacactcaatttatagtgttcgagggcggtggctccgaattttgaaggagaaggctggcggccggagggaggggtgagtcaccggagtcgcataacgtggcattactggggtagaggcctgagacgatgactgaccaattcatacgacaccttacgacgaggtaacagggtcagtagcgcggcggattctagtaaacggcggtcacaccggcgatgggccgtgcagccacgtcgtggcgcaagtggacgagcaacagagcggccacagtgctccgacttcatccacggcgagatcttttcactagggggtcgttatccgcatgttactgggtgcgaagcacaacaccggcgttaatccgagcgtgcgggtcaccggcgacgaggttcagcgcatatgagatttttctggctactgtaccatggccatcttgttcagtcgttctgacagcgtgatttgaggagccttgttctccattttccatgtgacaacttactaatcggtttgtaacaaagttactgacctataattcagctataattcaactatagaagccttgagcgaattctgat

SEQ ID NO: 55122 - DNA, 356 bp, Zea Mays
tgccaccagaggttgcggcaatgggagctggaacatcaggagcagctggtgttggtcacttgttctcagatgctataatcctgttcttgtaaagaattctaacctattttaataccttgggacctcaaacagtcggccaaccaataatgcaaatgaaaccctgaaaaacatggaaaaccacccaccgtctaggttaatgttgaatacattgcaggggtccctggcatttacaaaagtgacccttaacttatttagaattgtggccgcaacccttatcacggttaattggtaagaattaattcaaaaatgatatttaatatagaaataattctagaaacttgtttaattcctaagta

SEQ ID NO: 55123 - DNA, 1280 bp, Zea Mays
gcgaaaatgcgatggacaaggccatctgtgtagtccggatcctgatgaagaggtcttgcattgtggggcctgatgatattgtggctgacgtgcttgctgcgtcggctaattcgagtaattattctgctttcggtgattctgcagataaggttcctcgcgaggatgctcctgcacagtaaccgtggaatgaaagcaaacattgatttgttcaaacagaaagcctttttcattaagatgacatttttctaattgatcgcgttgttccgatttaaggcgtttccgacctaagccgattgctgcgctagtagggtatagtaggcaccctaagtcaggtacatgtgtgagcatgacacaccgacttaaggagtttctgacttaatccggttgctctgttagcagggtatagtaatcacccatagtcatgtatgcgtgagcatgtcacaccaacttaaggcgtttctgacttaagtcgattgctctattagtagggtataataatcacccttaggcatgtatgcgtgagcatgtcgcaccgacttaaggcatttccgacttaagtcgattgctccgttagtagggtatagtaatcacccttaggcatgtatgtctgagcatgtcgcaccgacttaaggcgtttctgacttaagccaattgctccgttagtagggtatagtaatcacccttaggcatgtatgtgtgagcatgtcgcactgacataaggtgtttccgacttaagtcgattgctccgttagtagggtatagtaatcacccttaggcatgtatgtgtgagcactcgcaccgacttaaggcgtttccgacttaagttgatcgctatttgagagtttatttgcaagtggacgaacacagaagctttattgataatgatgtctcttgtttacaatgtctagcttgtcgactggagtttatggtatcactacaggtagaatttcctgagatgctcatattccatgagtttcctacttgagttccatcaatttggtaagccggtaggacccagatcgggtgacctctgcgatgatgaaaggcccttcccacgacagtgatagtttgtgtcgtccttctcctaccaatacgcggcggagtaccaggtttcttactgcaaaggatcgatgccgcactgctttgtcatggtagcgactcagagtttgctgatacctggccgattggatgacgacattcaaacattcttcttccaatacgtcaacatcctctagtatggttgcttccgcttcagctatgctttcaaatgttaacctggg

SEQ ID NO: 55124 - DNA, 861 bp, Zea Mays
attggatatattattgttattggaagtaatgttaagcacagctaaaaaaactatgaattaccatggtctatgtttagggacggagttttatataaactgttgctctccatattgtatccctaatccctatagttttagctaaatgtgaagatcagctatccacatatagtttatatatgtttaaaagttattcttttttcatcagctatatgatgtattggttgcatttatctcttgtaacaaaagataccttcatacctattccaagcagtcataataaagtaaaactgaaataaatacagaagacttgggctacaaaataacctacaaattattatgcatgttattaggggctaaaacacaaatttagtgaggatatcatagttacatatctacaaagcagcattgatgcaaatgatttttgaataaatgatttccatccaaattgtagtgtcttgcccatatctttgcatttatttactgttgcacatagcagcaaccattcgtagaggttgcatgatgtgtatattggagaagcaaaatatggcgtagcactagcgaagcaaatctgcagattttcttggtagcagtgcagtggagaattgatgcagatgccagaatttacaggtttgcaaagcatggcaaaaacacgattcagagttcaattttgtccaatactttttgccaaaaaaggaggattattttgtcaagaatctatgctgctgcttctttccaacaatgccattggcaattcagaagtactagcaagatataaatgtaatgtacagtttgtaggaaagcaggaaagatacgtaacaagtacccttaggcccatttgttccgttggatttgaatttcatt

SEQ ID NO: 55125 - DNA, 434 bp, Zea Mays
aaaaaaagtaactcaaaataaagatcacaacagattttggatccataaatcaaacgcaattgagtctctgcaggaggagtctttgaaggacagcaggttcatctcctttgacgaagtttctttgactgctgcaactgaaggttgttggctactaaaaataaaatcattgaaccatccctgttagtctgaactgctaggaaaccgttgaacctttcgtgtcaatcttagactatcaaggtttatcccgccaatacataccaagttgttaggacaccataacacctttcacatcggtctgaaaccgtcaggagatcttctatttccacatcaattttctactatttttattcatcgaaattagtactgcagcagctcaattaaccatacatccacaagcactacaaaagataaatccagttgtcatgatacgcaca

SEQ ID NO: 55126 - DNA, 674 bp, Zea Mays
ggccacacctacaaacatctcgcagaggtggacgaatattgctgcctggaggatggagtggggcgtgaggtgttgaagctaaagctcgaactcctccagcagcagcaggaagaagggcgaaatcggcagcgccaacccacaagagatgtaggaagtaaacaacacaaactccccagtggtgagatcgccaaggggggcagcgacgacacggattcttctggcgagccctggcgcactccacccaagcaggccacacaccagattaagagcttcctgagactgaaagcggtcaggatgaccaagcgaagccatggcgtgtgtggcagtgcaagcgtggaacagaggagcatgaaggcaaaggggcgcagccgattgggagagaatgcgaaaaggtaactgttgcacgcggggtgaatcctttttcaagtaaacctgaatccttgttcagggaaactcttccacacgcccctgaaacgctgcaagaaatcccgttcgacgagcacctaggacctaggcagcccagtgtctgacacgggggcccgggtccacaagtcatacagttcgtgtgccagatttcgggtgcggaaagagcgggatgcaaactgccgcacgcgatagcgtgcctccttggggccgctgcagaagacaaaaggttattttaaaccagtgcagcg

SEQ ID NO: 55127 - DNA, 647 bp, Zea Mays
cctccggtgtgtgcgcacggcctcggtgggcgcaatcgaagctctgtacaccggcaattcctcatcgaacttcaaccggggccgcatcacgtggccgtgggtcgtctgcgcaacaaagacctggtgagctaccctattttgtctgcccttctctgagcatcgcgtagcacttttccgattaggaattagtgcactgcagcgcgggtgaggggaggaactccggccatgggccgccgcgctcctggcagcgccgccgtagaccgtcgggttggggaagaagatcctccagtcgctgatatggtagtggacggctgggattagtcctcgtgtatcctttcgcattgattcgatctggtctgtcgatctggtttggacggacagggttggatgtagggtaataaaatcctcaccgttaaagtctgattcaacggttagattcatgtgccggttcattaaaatttggatctaatctagagcgtagattttagatcgcgcggtctagatctagccataccctttcgctgtgcaaaacttacaaaggagaccccagggttgtacctattcaacccgctgtcctcatttcctattctctgagtctcgataaacttgcgccagaaccccctgacttttctggaaatgaggcccag

SEQ ID NO: 55128 - DNA, 459 bp, Zea Mays
gcgcaaagcggtaatgatacggtattgcggaggatgatactctccaagactcaaagaggtaaccaatgcttcccacggcgcacggcggaaaccgatgtccgatgatgaattccagacgccaccgcggtcgatccttccctagacggccacaactcttcaccagccactccacaaagctcccggacatgacccaagcccccagcctttaggcaaagacgacaacggtgttggtggttgatttatgtcctcggctctctcttctgcactcgtgcggcatttggccctgggctccgatgacttggtatgggaaggaggagcggttggggaggtcgttagataaacccgatagaagtaggcaaggtggattgcaacaactccgaaggaagtgcgcaggttgttgagctcggtgcgccactcgcgcggagataggggaagggcgccctgacttcccgatcccac

SEQ ID NO: 55129 - DNA, 389 bp, Zea Mays
acagcatagggacaggacaaacatttttgatgtccctcgtcccgatccttgtggtcatcataccattcatatccagctcccattgatcaaggatatgctttcaagtaagatcaagcagctccaaccacgtgaccggccgaaattcataaaaaagtttgttgagtacgattctgaagttggcaaagcgtgttccatcatacaaaatactcttaccaagatggttgtgaagcagtatgaattagcggacacatttgctgagttgattgatgatgtccttcgtgcggagtttggcgacccagacaatgttgcggaagcgcctcaaacagctaaacctccagatatatctcatcatatgtcgtcaggttaccttccgtcattgtcattttttt

SEQ ID NO: 55130 - DNA, 486 bp, Zea Mays
gggagattaaccctaaccttaacctgctttggtaccatgttactaacattcctttagtccttaggacttggtagaatatataggcacatgtaatatgggccacataagccttaacagaaactagttttccatatgctcaattggacactacaagtacttaaggttgtcagatgttcaaactacagatacaataaccctcaactggtataaatgaaatttgacatgcacaaagtagttgatatcatgatgtttagtatttgtaacttggtaagctgcaaatagacatcttatccataccatattgtcctgtacacaagaatatggcctggctttcaaaagtcatgggattttgcgttaatataaagaaggatcatgtgccatcatttggagcagctatctagggacctttggtgctttcggtgtcacaaactctgtttggaatagaggttcattaacaaaaacaacattataagaaaagaattccag

SEQ ID NO: 55131 - DNA, 782 bp, Zea Mays
cgagcgcacgactcgcacatgtctaagtcaggccatggtcgttcttccccaagctatgtcatcgtgcttgccgtgtcgtttgtgaggacgaagacactgtgtcattgtccgttttctgtttataatcagtgccatcgtgcttgtcgttgtccttagtgtgattccttgtgtggttaatgctaggagagattccagaaggttttggtggagaggagaagaaagcccgtgtcggtcgctcctttggtgttcggtcgaatactcgaactaggatccgtcgttgatttttcacgaattcgagtcaaggttggtttggtgagcaattcgctactcctgctagctgacttgtgtgacggattgagtaagtatattggtcgcgatgaatcttctgttagttgcacatgtgcattgtggttatattaaatgtttgttaaaatgactcctcacatgtagtgtgtggttatgctcataaatgtggagtagacacatcgtctttgttgggtgaagcttaggttgtaatgtgaattatgcacagtgggacaagtttagttctttcagcatttgtggatatgtgttgttggggttgcgatgatgatttaattatattgatgaatatgtatgtgattatgttagggttgtgatagaggagtttagtagtttctatatcactagtgatacgttgattttttgggtagtggaatcaatgctctacctattagctcaaaagtgtgattaggttaagtcaatgtttgtgatgtgcttgtgttaacgatcatggagtagac

SEQ ID NO: 55132 - DNA, 445 bp, Zea Mays
gttgtgatgacccgtggccgagggtagcagatctactccgacgtgagctctccttgctacggacgaggccaccacggtgacaaccgaggaagaactctccaggtaagcaagacacaggaatgattccaatatctggatttctgttattcagttcgtaactgccttctcaaccaccagatctagtatttatagaagtctatcttcctattacaagcctattaacaggccattaagcagactaacaggccgcacacaggcccatctcacagatctaagaataccaatactactactaggcgataatgcaacttcacatacctaggcatctgacatcttcccctcgcctagagtttgattgtcccaatcaaaatcagcaaaaaatctggtcttgagcacatcataatcctcccaagtagtcacttcatcagtaaaatgtgaccacaac

SEQ ID NO: 55133 - DNA, 351 bp, Zea Mays
agttgctgaaacaagagtgactgctccaattgcgcagagcactgaagagccagttgtaatgccgaagttatcttctgttaagttggttgagacgaagactgataaggataaggctgaagggttgaaagttgaaaaaatgccagagattttgagcccgtcaacagagataacagtgccgaaagcacaaaatggttctgccgccactcctaagaggagaagaatggcaaatgtgttagatgttgtgctagaaacaacaaaatccttgagtcctgctccttcaggaaaaattgccaaagctgaaacgaagcaagcagaagccgaagctgcaaaaattcaagttgaaaccgaagc

SEQ ID NO: 55134 - DNA, 767 bp, Zea Mays
aaacaatgactggctaaaatgtatcgaagctacaagcgatgaactgcttggatcatattccaaggcggaagacaatgcattatccacagccttcggaggccaaggaaaaaagaggttgaacagagtttttgatgccattggtttcgtttaccccgactaccgctatccgctgcgaggacggggaaagaagaggaaaactgctgcttcggccacttcagatgagcctgcgccgaagggcaaaaagttgaaggtccttacccaccggccacgctatattgaaccggtcgtggtacctgagtttggcggggagtcttcttcagctgctgacccgaaagaacctgctcctcccacgcagaaggttgaagagccggctgtaataccaaaggcacctttggctgagctaattgaaacgaaggttgacaaagataaggctgaagggtcaaaaactgaagaagtaacaaagatgcccgggattttaagtccttcaatagaagcaacagtgctgaaggcagaaaagagttctgccataactcctagaagaaaaaggatggtaaatgtattagatattttggaaacaacggattccataagccccgctcccataaagaaagttgccgaagctgtcagagcgcaaaccaaagctgatactaagcagatagaagttgaagctgcaatgggaatagatattgggcctttagagcccgctgagaaaagtctgccgaaattgaagaaatggcaacagaagaaaaggctacagagcaaatttt

SEQ ID NO: 55135 - DNA, 543 bp, Zea Mays
ggattatgtgtgaaggagatgaagaggtcatagggtttatggtctagaaagtgacatattcctcttgttgtgatgactcagtcgattctatattcacgttgatttagataattttcacagaagcaagctaaaaacttgaacgcttgatagcccacagtagcttgtggtagccataatctatatttaaactgaaacaaacgtgccatagtagccgatcctagctcaaaggaaagctctggtctttatcaatactggagcatcacaaagaaatttttgggtgtatttgggcctacagcggctggaggccagctggatgcaaggtgtcatgtttggttgagctagagtagctgacaccagttcacccatatgtatggccaaccaaaatattgttttgtcctgttttgtattgtagtgcacaatttgcacggtggagtttgaatatagaaatggggatgcataagttgttgatgttggtcacttattttttattactaaaggatatcaaaacaagacaacgcaagtcattaaaacagaagcttctcc

SEQ ID NO: 55136 - DNA, 669 bp, Zea Mays
tgattccggagtcgaaggaggatgaagttgttgtctttaaaagcttcttcagtgcagggctttggttccctttatatgacataataggagaggttttgaagaagtttgaaatataccttcatcagctaacgccaaatgccattgttaggctaagtatttacatatgggctctccgaagccaaggcatgagtgctaatgccgaaggtttctgccgagtgtatgaattgcacttttagacgaaggcttgggcggatggccttcacaaaaactttggatgctataacttagcgtaccaaaaggacaccagagccccggtgatcggctactgcaccaagtggccaaccgagtggacaaatgagtggttctacgtgaagcctgacgagaagaagagggagaaattgatgagcatggttatgagtcctatgagattaagcttcagaatgacaaggccgttgtgccatatgcaacttggctccccgtgccagttggccgaggttgaatttagagtggtggctactgaaatcagcactagggatttagtacaagagtacttggcaaacaagacttttccgacctctagtggtgggggatgccgaagaagaatgatggggaaagaaatatgagcttgttcggctcccctatcgttttaaatttgagaagcaattcaag

SEQ ID NO: 55137 - DNA, 578 bp, Zea Mays
gtggattatctgttgctcactctaacttctccagctctagtgccacactgaggtacgtctttttgcgcggggctgcttgggtgattttggagggtgtgtacggccggtgggggcccacatgtaggaggcgtgtacgaccgatgggggcagatagatgacagaacaggtcccacggttcagaggcagaacgacgccacactgaggtacgtctttttgtgcggggttgcttgggtgattttggagggtgtgtacgaccggtgggggcccacatgtaggaggcgtgtacgaccggtgggggcaggtagatgacagaacaggtcccacggttcagaggcagaacggccgttggcagaacatgtcagaggcaggctactattgcagccttaataagtagtagagatattgggtctagcctattttttctaacactctaccgagcaaagcgtgtccaagtagtgaactacgtggctttgatggaggacgaaacgcaagacctcaacatactggacaaatacatggaaatactacactttagggctatcttggtaactctatttttcaagaaattttcatttttt

SEQ ID NO: 55138 - DNA, 941 bp, Zea Mays
gcaaaggtgaatggctcaaatctgatgttatcggatcatatatctttacttgctgataatttgcatcaggatggagcaacaaccatttttggtaagaatagcacatcatttcagtgcactgccaaaagtagaacttttgtttttggtgctagtagtggccagtaccatcagacatatcagcaatcccagtcttctctgctatcagagcaacataattcaggtactagtatggagcatggtcattctgactcaataaattcgcatagaggcagcgctgcttcgccatcagtagagcataatggtgttccttttgcacaaacacgaacattctccagtggctcagcttttgaaggtttggatgatatttgcaatggttttactacactgaatatttctgaatgccctcaaggaactactgagaccagggctcaagatccacctactaatggtccttcaatgtgcatgctagataattatgaacatcctgtagtttttcgcgagaacagatcaacttttgacttggattctaaccccagctgctatcagaatcactctagtgatcctcaaagtggccaacctcctttcagcgactatatttggcaccaacctaatctgtccagtgatatgcaaagctcctctgagctctctggagataagccaagacatctgccaaattctactgagcctaaagttggaataatattgcaagctttgggcatattgaagactgagaagatattcccaacagaaactaacattgcagactgtatatgttacggagagctgaatttaacaggttttgatgttaagaaggctcttgaacttgccattcgccatgaagctgtcgttatgaagaaattactaaacgacatgccgttatttgttgcaaaagacgagagcctctggaaatgcgtgaacgtaacaaataccaaatcaaagaa

SEQ ID NO: 55139 - DNA, 540 bp, Zea Mays
tcacgctcacgcgcgcgctgacctgcgggtcccgctcgcagcacccgcgcgctcgcctggtgctcagtcactgacatcgtagccctgcacgtcagacgcgttatcttcttccctccgcacggtccgctcggggcatgagggtgtaccgagtccatggctgagctccagtcccgcgtatccgaagccgattataccggggcccacggtcagggtggtcttcgaccccgtctgttgcgacatgcgcgccgtcttctccggggttgacttcaacagaaatggcgagaaccttgcccggatcctcatcctttcgccgtgtgcttgggggaaagtggattccgcatgcgggggggcataaaacccgccgcgacctcttgcctcgcctctcgggtcccctagtcgagccatcatcttctcccatcacgcacggcaacgcgccgccgtgactcgtgaggctaccaattgccaaatccgactgtccgccgtttgataccgccctttagaaccacctttgtgtgtgcggtgtgggtctcgggagaattc

SEQ ID NO: 55140 - DNA, 366 bp, Zea Mays
agaggtccggaagctgttgcacgctggctttattgaagaggttcatcaccccgtgtggctggccaacctagtcgtcgtgccgaaggcaaacgggaagcttcggatgtgcatcgactacactagcctgaataaggcatgccccaaggacccgtatccactgtcgcgtatagatcagattgtggactctacctcggggtgcgacctcttgtccttcttggacgcttactccggatggctaaggaggataggaggcatactgcttttgtgacagtagatggactatactgttatgttgtaatgccctatggtctgaggaatgccttgccaacatttgttcgagcgatgagcaagaccttcggggacctg

SEQ ID NO: 55141 - DNA, 570 bp, Zea Mays
gagaagccatgccaccatgccttatgccaagagtggcaacagacctattgatcattcatgtgatgcacctgctgctattccaactgaggtgccaacaccagtgttttcttcagctgaagttggtttgttgatgtccaccccgaggaaaattaggagagctgtcaataagcttactcccaagaagaagatgcatggcatgtagacagcttcaatggtgaatgtcgactgtattttgtttcagaatatctatggcatgaagacagcttcaacgcatgttaactgaatgtatctgtctttcctttcagttatgtgttgtttcagaaacaaatgtgcatgtgattatgtgaactgaatgtatctgtgaaccgaatgtgcctgtgcaatgaatgttcgtgttaattgaatgtgtctgttacctgttatgttgtggcgtggtaactaaatgtattaactgaaattacagactacatgcagatttaactgaatgtgcctcttactcctatactacacttcaattcggttaactgaaacttatgcttctccattgtacatgttcacaattcaattttg

SEQ ID NO: 55142 - DNA, 546 bp, Zea Mays
cacaaacaataaactgtcaggttttgatggaatttgagctaaattgtggcccagcatactctgcgattcgcgagactggcattcttccttgagtaacaaagctaatgttttagaaacttgcttgtaaaccttgaatgttttgtcattctccttatacataaatgttttagttttaaagcattctcttagtttctagactgttcacgacctgtagtgataaaaaatgttgatagagcttgtttgaatctaattctgtgccaaacaaagcaccataggaatatatattgtaatataaccatgctcacgctaagcgaaggatcaatacaggcatgtcatatatataacttatatacgccaaaacacccttgtgacatggacatataactgcaactatgatttagtcttaaatatgagtgcatgaaaaacaaccatttatgtgtctgaattttagcttgtgacttctgttgagttttaactctagactatctcaacttacttgggtctaaaagactttattgttgttatatcaaaacagcttgtctggct

SEQ ID NO: 55143 - DNA, 569 bp, Zea Mays
ttttctacaaattaaacaagtttctagatttatttgtgcactaaaaattgatttctgatattaatttctgattttcaatgctctctggattgggcctcaataacagaaaacagcaggggctcactggtaaattatcctagactcagtgaataatgcccccaggacggcgggttggtttaggaaaagccgaggggctcatttacaattgttctgaagcgaaacggtatttcccaacctcagccgttggattccccacctacggccgagattagatcacaataacaattaaatcaacaggctatgtgggccgccagattggtcatccacggcacgcacacgcgaatgacatcgaccgctagattcgccctgagcggccagattttccccaatcgaacaggtatactctagattgatctggaccaaccgatccaaggcgaacgacctggattcatttgcgatgaagcgtttagcaactctaatcctagccgttcgcgcccgaatccacggctgccagactttcttcactaacccagcgcaagccgacggcgcaagcacggcggtgcccagac

SEQ ID NO: 55144 - DNA, 374 bp, Zea Mays
cgagtctgtagtggcaagtagttctactcttgataacctagcttttggaacttagaatgtaataggctagttgagttgagtacctcttttgcttgatgtcaccccatgtggtgaggatctgttgtaagaacttggtctgcttgggaaatgtttagagcgaagttgatattgtttctatgcatcccacagctcaatgtcttaatgatgcaaatctcatgtttaccttgatattgggaaacctattcttcatgactttcgtaattaaaccatgagttttctgagaatgatgattagatttattagcatttttagcattcttggcatgatagttcttaggataaataatataaccttcattatcatgaaccattgaa

SEQ ID NO: 55145 - DNA, 1565 bp, Zea Mays
tagaaatgctggaacaacttgtaatttttataagagagagtacttttttatggcagtcattttgagtccagaatgcacatgttttgaaccatcaatggtgtactatcatctcttgtgacagtactatgtaatttctcttgaggccttcctccatgtaaggcccttcatttgctgtcaacttgtcatgttgcagcttagctagttgcatcaattaatggtgcagatattggtctctatccagcactaatgaaatggtacaccagataaccagcaaccgattgaattatatcagtcttcttgtctggatatgcccaagtatgaagggcaattgctggtatgtgttcttttcaaccaaccgagtaatgatgatacggaggcttcctatttcttagtgcgcctttatctttactgtctgtgtaccaaatttgttgagggttgtccatgccgatgttcaaccatgcagatcattataaaaaaaaactatgcagttaagtggagaatactgttcgtctaaaaaacttttagttatatgtagtgctggtttgatttttttccgtattatcaattagtttaaccacaagatctgaaaaatatttgatcctccaataatttttagctgtgatttaattctggcattttctcttgtttccagtttactatattatagcagtacaatttgtacatgtgtttaattttcgagtcactagggttttaaccatatgatattatttttcactcatttgttgtccaattggtttgagttggtctatacaggtaaacatctggaaagttcaaccatggatatattgagttgtaatgtatgtagctatatggaacatggagtcagtaagtaggatactagaaatgtatacgtataccattgttctcaatgacatctactagggttttatgtgtttttttttgacatctctgcaaataaggcaagatacccagctttgttccttggatttttggtagatgcattgttatcttgtgttttattgtctagtcaatcctcgtgcgtgcactattagagctagtttggaaaccctattttcttaagggattttttctcaagaaaaaataaaataatttactttgggaaatgaaaatcctgttccaaaactagcccttatagagttataaaccgttttagatttgccaccctgatttgttgggtgagcgagatgtcgagatctaataataccatggaataagtcattgtggtctttttttttgtctttatacccattttgtcttttaggaccatgcttagcgtcgctctagcggtaaggcgcgcgcagagcagggcgacggcgcgtaaggcgtccaccgtgacgtaaggcatcggcagggcgacacctttggggggtaggtagggttttgggtggggatttaattgaagtggaccagacaagacgcgtacttttctgttcgggttgagcggcgacggctgggaatggcacatccagtagcgacctcggcagcgcgcgacctcagactagccgcagcggttgacgctgcacctccccctcctcttgcatgcggcgtgtagggggcaccct

SEQ ID NO: 55146 - DNA, 514 bp, Zea Mays
cttcatcttcaaccttcgtacaagcccccaacatttcctcactagtcgcttctatggcatcaagccatgcatcatctggctcgccaaatttacttctatagaggtaggtatatttcaggtaaactaggacaccttcgcttgaactagcagcggtctcattcggcatctcccattcattaacaaggggccacactttgaaggctatatgctcttgtaccaagtctctagtaccaatgtagctgcacacagtgttgaaggccaccaggcatgcttgagccttttcactattcatgatcgaaggccttctgatgccgaagcatgattgtatgggtcgttgaattacatccttcacatcctccctctcaaccaaatcattcttaacatagaaccactacttcatccaggttcctagccactttttccgaaatgttggaatagggtgtctcgcatcagaacgatatatgaaggagtaacaaccaaagttgttatggtattgttccttcccaaccgcctt

SEQ ID NO: 55147 - DNA, 613 bp, Zea Mays
tagcggcggtgctaattttctatttttccacggggagggtagcctcccccaaattcgtacaggaggtagtttgctagatgcggcaagttgtgactgatttccatgtgatcgaaggcatgcaggaaaatgatgtctgcatggttgtcattatcgacttgccattatcgacgagggccttgggcaactcccgaccagctatgttgtagtttattaccattgcattggtgtgtggggcattccagaggtccacatcctttgcatcaaatgtgagagatatatgagaccacttggtctagacaacgggcccggtaacgacaacatgtttaacccttcggtagcgttcttttttctggtgcttgttttcgaagtctatgctatagcctctaaagatcatatttattatctcatggactggtgcttggagaaatcgtctttgtccttgggtggggaggtggtaactggtggattggagggataatttgtggagttggcgggagaggtaatctttcttggtggtgtatttggctgtggtaattggtggaataaggggggaggtggttattttggtatcgagggggttgctgggtgtcttggtaatggaggaggtgtgggc

SEQ ID NO: 55148 - DNA, 866 bp, Zea Mays
ttttatggctcagagcccaagcaccaacagtaccaaatgaaatcgtcattgaagcaatgatcaagaggcttcaatcgagaccagcagcacaatattttgctaggaagcctcctcaaactctagagaagctccttaaaaaatggatgaatatatcagggccggcaatgatttttgacaaaggagagaagaagccttcaggtactccgaggtgacaaggagctttggtggaagattcaatccaatacacgtcagaacaattcaccacccaagccaaagtgaagacaaaacaaccataattaagggcaacataatcactcccaatcaacaggggctcaacagagattcttcagaccgccaaccccaagaggaggaaggggaggaagaagcttcgaagggagatacaacattcagccaagaagactattctgcttattttatggagaagataagggcacacaacaagaacctaccaggttacaattcaaaagcagaaagaaattgccaaagctgaggcaaggcagaatcagccgaagtaggtcctccatattgcttcatattattctccatacatcccagagtatgtactcgatcaacagccaatccagtagccttcagcttcagtagcttcagcaagccattctctgaccagatgagccctgcctcaatcagccacatcagctccaactttgtcatataacccgtagcatcaagggcaattttaggatcagttacaacacgatgcaagggaacagtctgaagcttgaacagtcaacaatactgttctggaatctaaacatatctactgaagcacgtgaggggctagatcaagaatccaaaactatctacaaaactctattgtaattata

SEQ ID NO: 55149 - DNA, 1741 bp, Zea Mays
cttagactcggttgagggactcgaactcaaacgtcaagggactcgacccacatgtcaggaaaggatcaacatgtatgaacaaaaaagggaagatgatgatttgtgataaggacgacatctttgtaatatatgaatatcctgatttataagagaatccacatgtaaagatagagaaatatttcctttattgtagggaggatcattttagaccaacctccatccttatctagctgatgtctagataagcttcatataatctggcacacctccttggactataaaagggcgcggtaacgcatatccatgacacatcataaacaatagccaccaacatacaggatgtagggtattatttcgcatcaaggcccaaacttgtctaaatcctcgtgtcctttatgtgcttacttttagttctcaatgttgtgatccaccccatataaattcattgccgaaatttcctcaacaaaaagcaactaggacctttgtggtttcagtgattaatggaagcacaagattattatgactaatgtatgtttggtagaggtaaattgaagttagatcacatagatggagattgtttaggcaatctatggtttgtatgcccctgattatggatttttcggttttgaatggattgaagacaaggttaaggatgaactagttctaaatttcatttggattaggagacattgagaatagtttagaattttgtttccgtttaaccatactataaagagggtatggactagtagcttgacctagattagtgtggtgcacactagttgtctttagctctaggtggcttaagggagatccaaaagaagtttggatgaaaactcatttactaaattttcaaagttggacaagttagaggggggttttgaggcatcaaaccctaagtttcacgatcgttaaaccaatggtgactagtatgacacctccatgtatgcaacccaagagagcatgaccattggaccctgtgaacagtacaacactggaccgataagttgagtctgatagtatgtggaaataggccagagtgttcgagggcgcgttggactagtccaacgatgagcattggaccataagacaatattatttgagttagtgctccttccataggtttgccgggccctatgaatagttgtagcatcgaactataaagttggatctgaatgtctcttttaagtgactagagagggtttcatggacgtcggactagtatgacagtagaagtcagaccatacacttgcaacagtagttcaaatgactagttctaatatagaaagtgtgtggttactgttgtgtctcgtcggaccatgcgatttggtctttcagtcacaaaaattgcacagagttactatatggctagttgtccagttgatggttataaataccccataaactggccaatactagtagtcttgcctattcaatagctaaaataacccacatagagtgtgagaatgaaccttggtctagtgaggatcttgagttgaaacttgcttggttagtagccccattcgtccttgaaagtgtaaatagtatgcacccattgatcccattcatcctagtagagtcatgtgagagtttgtgattttggtgattgatagtatggtgatcgcccgaagaatttatgggtgatctagctcagaacatatacatggttacgagcaacttaccatgttgaagtgatgaagaatcaattggtatagagcacttggttcttgcacaaatcaag

SEQ ID NO: 55150 - DNA, 279 bp, Zea Mays
agcatgcgaaaggccaagttactggtatggtctgcagttgctgtgctggcagatgttgttgttttgacaagtattggcaagcttcgcacctctgaactaactcggctgcatcactcttcgttgttggccaatagaatcctgacctgaagaccttcccgactagtgttctggacactgcatgtattccgcattgcccagcatggacctcctccagaagtcgcttcccagtagatgggagaatgcacctcatgaggacgcctgatgcaccccttttgtaca

SEQ ID NO: 55151 - DNA, 742 bp, Zea Mays
atggaattgatcaccctaatcatgtgccttgacctatgtgttatcctcttgtcttgaatccaatggtgggttacacaaggttgcaccaaatcttcgttgatggcagaagcaacctcagcatccattttgtcaggacctttagaaagatgggttgttcgataagtccttgaagccaagtccaacaccgttcaacagaatcatctcaggcaagtcaacaactccccttggacggataaccctgctcgccacctttggaatagaaaacaatttccaaataggtttccacactttgaggtggcaaatattgatgtagctcacctgtggccatcagaaggaaagggctagcaaagtttatggctatccctcaccacacatacctagttctcaagatgtcgggtcccaatagggtattcacagtcaagggcaatttgaagtagtcctacgtatgtgacaaagagtgcaacctcactaagtcccaactgatacaagataaatgcgtcagcctaaagaaaagccctaagatacaattaccctggagaaggaaaggaggaaaatcttaagcctcctccaaagaagtcattgctagtaactctacagatcgagttctcatttaccaagcagatccagttggaccatgacaactcttcatggccactcacatcagggttaacttggatctaggactgggcattcaggtatacccgaaatttcgggtcaggttgttcgggttttaaataatttc

SEQ ID NO: 55152 - DNA, 611 bp, Zea Mays
actggataagaccaaatttctgctcaatcacctgcaactatttatctgcttcaagaggttcttatgctttagaaatcactggtgggtgagtctccataaactccagatatgtagcattcctttgctaattctggagaatacaaaccccagcttgattgttttgatggtgggcaagctctcgcagaaccctggaattatcagcagtggcatttaccagggcagcaatggcgtctatcagggtaggtggagctagtggttgtggaggattgatattagcttctacatcaccatgcgatgttctagccccatccgaacctcgagtacgcataggcatctgaagtaaaaaaagttcatgaacatacatccataaccacgaaatatattacatagaattggtacatggagcattattcattacaataccgaaattggcatagtttacaatcctatgcctacaacagaggtcacgacatcaacacacatgccacactaaccctctatattagtagctaccttagaaacatcactaccacctgggactcaccatccggtacaaggagcagcttctatgtctaagtcggcgttgggttcacccccatctgctaacacca

SEQ ID NO: 55153 - DNA, 374 bp, Zea Mays
tgtgtgtgcaaggaatcgaagaatggcttgctagattacctagaccaggaacgtcggtgggtggaggaagtccggtgaggtgattcggtgtctccggcaaagtagcattcggtctgaaggtttgggaagcttcactagcctcttggaagctaacggtgaagctagactgggcgaagaggggctagggtggtcgtaccgcggtggccgaggctcagcgagcttgcgggcggtgttgtgctcgatttcctggtgatcactgacgtttaggcttcgactaggttgtgagacgtgcgggagagcaaggccaaggggttgggccatcttataggcgaaggcacgggcacggtcgcggggttgggcgcacggtcgtgccg

SEQ ID NO: 55154 - DNA, 911 bp, Zea Mays
cggaagccgaaggcccccaacagtttactccatgtatcattttctcttgccctcccagctctgattcgacggtgttctgatgttgaggagaggtgtgctcaaagtcaagccgatctaaatcaggtttccacattcttggatggtgctcgagccatgaattcttccttgaatgctcagcttgattcagaaaagagatctcaagacgtaacttcttttgattgttcatagtaccttatgcgcgctttttgcttggatgtttagtactcttcttgtctgtaggaggagatgcagaaattcttgattcccaagacagtctgaataaactgtaccatgatgccagcatctccctcactactttggagaggagtcatcattttactatgttggagcttgaccgctatagagacgagttgaaggtttcctagaacgaagtgtcacggcttaatagtttgctatcttagaagattctgtcatcagagagttgggtgcctcaaaaaagattgtttagcaggagttggaaattgctcgtcgcgttatcaaggtcttagaaggtgaccgcgatattatgaaggcactgtgcgataaagcgatggacaaggctattcgtgccgaacagatcctgatgaagaggcctgcgtggtgcctgacgacattgtagctgacgtgcttgctgcgtctgccgatacaagtaaaccttctccttctggtgatcctgtagacaaggtcccttgcggggatgctcctgcacagtaattgtgtagtgaaaacaggaattgatctgtccaaacagaaaacacttttcactgagatggtattttttccgcagttttttaaacgttgagttactcttccctttttgttgtgtgtaagtagggtatagtaagtgccctgaggttttctttgcttaatcg

SEQ ID NO: 55155 - DNA, 318 bp, Zea Mays
cgtagagagaggtcgagttcaagtgcggattggctccaaatctttgagattatggccatgatcccgttgagagatctcttcctctgactttcctttgtcatttatgtgtggaggcttgcaggttttgctgactggatcaagagatagagaggggagaaatctggtttgtctcactaccgcgcacagagagaagatcacgggtttgacatgtccaaagcacacgtcctgatgccatcttctgacatgagatagaggggttagttaggcacaattttgtcaatggggtcattaggatttgagctagggatcaaggtgaac

SEQ ID NO: 55156 - DNA, 497 bp, Zea Mays
ccctataaattgagccccccaccagttccctaaggtcctaagctaaccagccaccttgaattagccccgatcgttcgctgaggtccgtgaattcggagtttcccccaaatccgatttctgccaccgtgaaacaagctcaccgtcaccagccatactccggtcagttcccgtcttctgctcccttgtttaagcattcacatacgtcggtgatacttgccaacccatcgaattgaactaagagccctctggtcgccgggaacacgaccgtatagtcgccatactcacggccatcgtggccagagccccatagttgatcaatagcacaattaagttaggggaaatggttaggctagccccaatttcatgtccgccgctcggagaacccagccgttgccccgttcggccggtgtaagtgctcgccggagcgcggccgtgcgtgaacggcgtcgaggacgtgtcgggtgaagaaatagaacatcaggggcatttctgcaaac

SEQ ID NO: 55157 - DNA, 330 bp, Zea Mays
ctgcagagttagatctgatttatgtgtgctttctacagatgtctgagaacaggcgccgaggtgcaatgcgtgctcagcccgaacagcaggcaccctaggaagatgcagctcagcagcagttgccaccgccacccccgatgaccattgagcagatgttcctcatgcagacccaagcagtccaagcaattggtcagaccttagcagcgatgcagcaggtgcagcaacaaccacccccacctcaacctcaggtgcaagtccagatgccacaggtgcccagagacaagcgggcaaaattcatgaggggccaccccttgtctttgcccattctgc

SEQ ID NO: 55158 - DNA, 546 bp, Zea Mays
tggaaatgggagggtctcagcattgattttattgtgggtttacccaacacatcccgacaccacgattctatttgggtcatcgtggacaggctgactaagacaactcattttttgctagtacataccacccacagggcagaaaagtatgcagaaatctatattgaccagatagtgtgtctgcacggaataccaaaagactatcgtatcagacagaggagcaccgttcgtagcacgtttctgggagcagctgcaagagtcactaggaactcaggtgataaggagctcagcataccatcctcagacggatggttagacagagagggtaaatcagattttggaagacatgttgagggcatgtgtgctgcactatgggaagaattgggacaagtgcctttccttggcagaattctcttataacaacagctaccagtccagcctaaagatggcactgttcgaggccttgtatgggagaaggtgtagaacaccgctaaattggtcacaagctggagaaagggaaatatttggacctgacctagtacttgaagc

SEQ ID NO: 55159 - DNA, 677 bp, Zea Mays
cctaagggtgcagccggaccagcacaacaagtgcgaaaaatcgaagtcttcctcaaaaagactatccgtgcaaaagtcgcctaagggtgcagccggaccagcacaacaagtgcgaaaaatcgaagtcttcctcaaaaagactatccgtgcaaaactcgcctaagggtgcagccggactagcacaacaagtgcgaaaaatcgaagtcttcctcaaaagactactcgcgctaaaccctacaccaaactgtccgcgcaaagaccgactacaggcgcgccggactgacataataaacacactagaccaagtgcgcaacgcctttatgagcatagccggatgcgcgaaggcgcacagcctcatcatacaagctatagttacatatgtacaacgagggcatcacaccttacatcggttcaaccttcggaatgattcccatcttcctatagttaaatggcattatcctcagctcctcaccctcaaaaagacttcgcagctccccctcacccacactcgcaacggccggcgaggacaacaattcctgcttgccagccctgcccacacgaagccgaccgccgtccgcctcactcactctacgcttcgcaaccgcccttcaccgcctacgcccagcactcggaccaggcacaacttcagcatccgcagcacacggcgaagcctccgc

SEQ ID NO: 55160 - DNA, 438 bp, Zea Mays
cgtctgccctcagggtcggaccgtccgcacgccattttctatgctcaacagtcgtaacacgctcggtggagtggtgttacatatattaaccttgagttaagtcatggacttctattcgtactcgactacatggattgttgatgtgtagttgttggtcaaggtgaaacgtggcagatggtgatgagagaaactacttttcgataataagtttagagatgaactcaagtacataaagtagatttcatgactaagtccagaaagaaactaaggtccttggttggagatgttgagcagtccacaaggtcggtaatgactgtgttggggccatgaccggtcagtatcgcttttcgcactgttgcctcgatcggtagtcgccaccggttgccatgtgccatgattttattggtttgttccaatttttaattcaaactttttaaa

SEQ ID NO: 55161 - DNA, 479 bp, Zea Mays
cgggtcagcagcaattccagcagcaggcgggaagaggttatccacaaggccctcgtgagactacctatctggacttctctgaaacccgtccacctctattcgtcaaggcagaagatcccctagaagccgacgagtggattcgggttattgaacaaaagtttggtcttctccgttgctcagaaacgcagaagccgttgttcgccgcacaacaactccgtggtcctgccagtacctggtggggaaattttgtggctattcaacctgacaaccatcaagtcacctgggatgagtttaaagcagctttccgtgaacactacatccccgaaggagtgctgcatatgaaacaagaggagtttatgaagttacaacaaggcggagatatcgtcactcaatagctcaacaaattcaatcacctgtcgcagtatgccatcgaccaggtgaatacggatttaaagaagaagaactgttttatgcggggt

SEQ ID NO: 55162 - DNA, 341 bp, Zea Mays
catttttttagtactgaccaatgtaaccaaacagttagcatgttttggcaacttaatgaccatttgctacagtagaatggctattttgataatgagttgtggtgtctgaagaggtgggtgtatattgttatgttaggcaaagggattcttgtttcatggttaacatggtacagacatctttgcatagaaagtacagccagtgcagttttgaatgtaattgtttttacttatctttaatgtatggactatggagaattggagataccaaataacattaagtagttcttgagatgcgttttttacgacacgtccttgtttttatgatatgtccttgttttata

SEQ ID NO: 55163 - DNA, 390 bp, Zea Mays
cggggatgaaggaggaagaaggcgtcggaaccgtggatgtcgcgatgaacggtcatgattaaatggaaagtagtgcaagtgacagtcgtcggatcgcgatcgtgcggatcggatcggttatcgcgtaacccttcaccgggagtaatgacaggcgtcgatctcatatcgtgcggatgcagggtgatcccggttcattaaatctagacggttgaaattaaatccggcgactgctatgccttaccagttcgggggtagcataggctaatctgggccgtgtgtttcacattcgacggcttagaattcaccataccctttcgcatagctcatcttgcaaaagagtcctcgtagtattgatgaataaatccacagtcctggctactagagtctgag

SEQ ID NO: 55164 - DNA, 609 bp, Zea Mays
agttggctattcagattgattgggggaatagcgggtgtagcagcccctgtctcttcttcctaggcgccatccggacctcacgagcaagtaggcttgagcacaaccgcaaggacgagcgggagtttcagagactagattgtggcaaaggaaaagcagagttagggttcatgcaccgggaaacagttggcatgggcatatatacacactaagtcgggcgcattgtgacaggcaagtaactcggaccaattttcaaccgaatagaataagtcgggcagagttgtcagtcgaacctatcaacacggcttgtcatttggaatcgtcagttgggttcacttgaattgatttatcagacgaagcgtaagttgaatagaaacataaattcaggatcagatacgacaagcatgtttcattcatcagaagaagatcattacaaaggaaaagggtcaactcattatgaaccgaccctaatatcctcacttctccactatcattcccactactactactaccacaaccgctacctactaactaccactacactagactactatttatgccggtggaacatcgtcaccggcgtcgccgccgccgccgctcttgtcatcgctg

SEQ ID NO: 55165 - DNA, 615 bp, Zea Mays
gctcatgacacacatatgcacacattacaacacaaaatcaatgttttgcataataatagaacattacacacattatcaaagctttgcacatcatcacttagataccaattaaacaatatacaccacataaacatgaatcagagcaatatcatcaagataagcaaaatcaacaacatctgatcatcataataccaacaaatcactatatatcacaatatatcatcatgattaagcaatattcaacatagataccaattaaacatatagataccaatttaaagtgatgctacaccatgttaatatcaattaaaaaaaatagcatcacaataacaccattatcaacacattcttagcattatcaccacaatatcatagttatccatatgataaacaatatacactaatttagcataatatcatccataattaaagcaacctcccacatctacaagagatcccaaggcagagcaccacttgcacgcggagaggaccagccctcttgtgagctttcctttgagcagggacaccaacgaatattagtaagaaccttaagtcgttcttgataccttggtaaaaatataggcacatctatgatagtttgtttttctatcacat

SEQ ID NO: 55166 - DNA, 602 bp, Zea Mays
tgcgtggatttcagagacctcaatagggccacactgaaggacgaatactccatgccagtcgtggaagtgttgatcaacgcaggtgccgaccacaagatcttgagcttcaaggatgggaatgttgggtacaaccaaattttcatggccctggaatacatgcacaaaaccttcagggtacccagctcggtaggattgtttgaatatttggtcatgatttttgggttgaagaacaccagagttacattttccatgaccaaatagggaagctggtggagatttacatcgacaatgttgtagtcaagtttacatccaccaggggcatatagaagtcttgtgccaaatgctggaatggactaggaggtttgggctaaagatgaaaccgaagaagtgtacctttggggtaatgatcgatcagttccttggattcttagtgcatgagccagggatagagatcagccttaagtgtcagaaagccactagatcaatgatactgacgaccacaaacaaggaactacaacaactaatcagaaaaattaagttcgtcagaaggtctatttccaacctatctaggcaacttgagccatttatgagtttggttaaaa

SEQ ID NO: 55167 - DNA, 824 bp, Zea Mays
gattgggcctttcaagaaagctcaaggaggatacactcatgtactggtagcaatcgacaaattcactaaatggatagagttcaaacccattgcttctttaacctcagctaaggccgtggaattcatacaagacataatattcagattcggaataccgaacagtatcataactgacctgggatccaacttcacaagttcagaattcttcgatttctgcgagcaaaagaacattcagatcaagtacgcttcggtggcacacccaagagccaacgggcatgttgaacgagctaacgggatgatattggaggcactcagaaaaaaggtcttcgataaaaatgaaaagttcgcaggaaaatggataagggaattgccctatgtcgtttggagcctaagaacccaacctagccgagctctgcatggaaacactcccttcttcatggtctatgggtcagaggcagtattacccgctgatctcaagttcggggcgccaaggttggcttttgaaagcatagcagaagccgaagctactaggctagaggatattgatgtactcgaagaagaatggctgaacgcagtaattcaatcagcacgataccagcagactctgagacgctatcacgacaaagccgtacgacgacgatccttttcagtgggggatctcgttctccaccgaattctaacgggggagggacgacacaagttgtcacccttatgggaaggaccattcatagtagcagaagtcactcggccgggatcgtatcgccttactcaaatggacggcatagaaattgggaactcctggaatatagaacacctcaggaagt

SEQ ID NO: 55168 - DNA, 420 bp, Zea Mays
caaaattttagttcactaattaaccaacaaagtataataaggaagttttgccatttgaacttttcaaaatccccaaatcagctcctaaactaatgcacttgggggaaattcagaaattcagaaatctgaatttcagcccctttccaaagatcaaccgcgttctctgtttttcaaaactcaaatcaagcaagtccaagtatcaaagtggcgccaaattcccttgaacacaccgtggcaaagtttggagacctctcttcaccgtttgacacgatcttgacatggttttacctcgggacttgaccttgtgacactgccacctttgtgacacgacaactctctgtacacagccccaaaccgctcgacttccacacataaacgacaaagctctgtcgggagagcaaatcttgtgcagtgatcatg

SEQ ID NO: 55169 - DNA, 422 bp, Zea Mays
aatacatccttgttgcgattcaaacatgacaacaatttgttttcttctatttcggtgaggtcttcattgattaagatcgtttggttagggactaccacgtccagggggactttcttggtgccttcattgcgttgtagctaggccttgactgtctcttatttgttcgggtcaaggcttctaggtctttgccctcggtggtgaggcaatgtacgttgcgttgaccagggacagagtctgtctcaatattacaggtgacctgctggtctccgtacactattattatgccctgagggcctagaattttcatacacaagtacaatccatgcatagttgcctagagtttgtttatggacactcatcccatgatagcgttatatgggtaaaccatgtcaactatattgacggtgacatgttgacttctt

SEQ ID NO: 55170 - DNA, 599 bp, Zea Mays
cctaccacaccactcccactgcaggcacgctctctcggtcccatcccatccattcctcccacccctcctcgatcgttgttggaaacagtgccactttgctagtcacctcagtaggtgcctcggttctccctgggccgttcggcgttctcgtagcccctcacatcactcataatcttattttgtttgtcggttcaccaccgacaactcttgttccatttttgacccctctgttttttctgtgaaggatctgaccaccaggacccctctcgcccgctgtgacaactcaggggccctctacaggctctgccctaaccccaccggtgcgtctccacctcccgtcctggtctccaccacttggcatcgtcgtctcgaccatcaaggatcatgatcaagctcaccaatagtttagatctttcatgtagtgggggacattttgatggtctctgccatgcttgttagctagatcgatatacttgtctcccattcactacttctagggctaagcaggcttttgatctgggtcattatgatctctggacctcccctgtactcagtttgtctggatataaatactatctggtgatttaagatgattttcc

SEQ ID NO: 55171 - DNA, 597 bp, Zea Mays
attacaaatcctaccccgttaaaaggaatctcgacctcgagattaagatgaactagggaaaatgtggtgaaattttacttgcagttcctcttctctctccgaggtagtttcatcctctccatgatgactccattgtactttgcacatcttaatcactttattcctcgtgacacgagtcaagtatcaatgatctgattgggcactcagtataagtcagatcacgttgaacattaagttcctccactggtagttgctcttctggtaccctgaggcacttcttcaactgggatacatggaatacatcatgtacatccgcaagatggtcaggtagttccagttggtaggcaacttgccccactcacttgaggatcttgaagggtctgataaagcaaggacaacttccctttaactttaaatctcctcataccccgaatcagtgacacctttaaatacatgtgatcaccctactcaaactctaattgccttcttcgggtatctgcatagcttttcttcctagactgcgcagttctcaagttctctcatatcaaccggacttgttcctcggcctcttgtataatttctggcccggagaactgc

SEQ ID NO: 55172 - DNA, 618 bp, Zea Mays
acaggggttaccatgctcgcgtgactgctgcgtgcgcggggccgtacctacgcagtggaaagcgcgatggagcagttcgagcatggagtctgcacgcaccaaggatcaactctgctaccgtcagaaaatacaagtacgtgctcctaggttacttgctaactcgtacgcattgagtagatgcctccagtatggagaacggggaaccaaggtgtcgaggcatttgctctaccattgcgggcactgtggaggactccctcgccgcgcgagccgcgaggccctctctgtgattctgcactctctctctgctcgattcaacggacacatcacgtgatggacgtacatccgcgtgaatgtggtgagccgtgggcgatgggggtggaggatcccacagcgatcttcaccaccggtctcactatcctcgtcaggtccaggtcggatgggagtggtttgaaacggatgctgtgcttgacagtcggggggaggaagaagcacgttagccgtttgatcttcaacggatggccggatcggttgttgcgctccgtcaggttcggccagcgagggaagaagatgagggcgcgcccgtcgatctgggtttggacggctcatattgagtgtagc

SEQ ID NO: 55173 - DNA, 923 bp, Zea Mays
gtcaggggtcggcatagcctaaatgatggcacatgtgacccacgcgaccccgcgccatccgccacagtaaatacgacacaaccaggcaaccctgaggcccacgagtatgtgtgactttacccctggtaagaacgtttggttttatccctgccttacagctccttcctaaggaagccaccgctggccgacacctctcccggcctataaaagggaggggttggcccccaagaaagggggttggacggagttgagttcacctggacacgcacccacaaggacaagcccagatgaaccgacggataggaggaggagcaccgatgaggaccaggagaccgaaggcccaccaccaagtcaagacttagctaggactccactctgtagcttctaagctccgcttccaccccaataaagagaactgggagtctctcctccctctctcgcccgtttgtaacccctactacgaattttgatcatcaatggtgccgctagcgcaagtcgatgatgaatagaattagggacgttttgcccgaaacagtataaatcttgcgcccaccgtgcacaccctccgaggtctggaacacgcataagaaattttaaatagtaatgggtttagctccctcaatcccctctaatatccttgctctcaaacacgcctttaggtttcaacctaaccagctcgtgggaggacgacgataccaatgattttgattttccatgcggacgaggctgcattatttaattaaacaactagctctcttgggatctctttattttcttgatcttttttatccctctctttaattcttttttctttgcatgcccccctggcattccaggtggcaggcgggatggttgttggataaagtcattagtcactacggtcagtagtgcttagagtactaagtactaacttataggttgag

SEQ ID NO: 55174 - DNA, 1624 bp, Zea Mays
ttggacttatttgcaaaaagtcctatttaaactctattggctaagtctgaatttcagtgggattggcgcaactttggggccctatatcttccaagttataaagttttttccctaggtcaccacatcaagtttgtagagctatgataggagaacaagtttacttaagtgactaagcactgggactaaacagaaattggagaaaagtgtgcccaaagtcgaggtatcagactatcttaagtctgaattaagactgacattgtaattgagtaatctttggactaaaattcaaccatgatcttgtgagagtttggctatgattgctattgtaagtttgtagctggatcattaggctacaactttgctgcagagtggtagtctggtcactacacaaaatttggcacaaaatgtcctcaaaagagccctgtcagaccaactgaataggctgtgcgatggtacagtagccaaaagatcaacagattctgttagctggacgccgatgacccttcgccgagattagtactgctcaccgtgattcgtgtgtatgggctgtggatcgagctcgccggcgaaaagatctcattgcggatgggttcaagtactgcggccacgctgtccctcgattccccgcgccggcaacgtggccttacggccatcaccggaatccgcgatactcaccgtggttgcgccacgtctctagcctttaaaccgcaccgccatgactcgcagtagtcgtccgttcatcgccggggagcttgccacggtaataggacaccaatcacgcgcgccagtaacttcatgtttctcccaccgccgcgcgtctttgtccaattcaccggccaccgctcaaggactctataaattgagtgcaccgtcgggttcgtaggataatcacgcaccaagccagcaagtcgtgcctccaattgttcaccagagagctccaatttctcatttcccccaaatcactcaagaacaccgctcggattgacctcatcggggtcagtgagacccaggtccgttcatactccatgttctctcgttttagcgtgcttgtgtgcccatgttgctccctgaccccgccaattgagctaggacctcttagatcgccgggaacgcgcttggttgtccgttgtggccgctgtcaccgtggacaaaacatattagagcgacattcgcgaaattagtttaggggaaacgtttgttaggccctgaatttggtttcaaccaaagtagaacgccggccatcgagtgaatcagcgggtacagactcgccggtgctcggttctccgccgtgcgacgtcgtggacttggcgcagtgaagaattagaagttcaggggtctaactgtaactatcagcgactcatagaaatagtgcagtgaactctgtttgggttattcaaaaagacagggtcttctgtgcaaagttgcacgcgggcgcgcttctgcctatgttgggctgacctaggccggttgcggtccagcactattcctatctttttctttttcttattctgccagagctaaagaaattctagaaaattgtagcaaaatgataaaaataccaaaccaattttgctaggtttctaattttctatagtatttactaaaaatagtttcatgattttta

SEQ ID NO: 55175 - DNA, 361 bp, Zea Mays
cgaaggtttaggcaaggaaagcttccatcccggatggtgaatcttgatttgtctgaagatatggtttgacttttatccttccttgacgaggttgatcttctcttctcgggtcttggtgttatcatccaagtaaaggacatttggttttggtgtttccttctgggtttaggtatagatggttgtgaaatgtgatatagataaaacatggtttatttttgtttttaggttggactagataggttacaatcttgttttgaaatagattgtgggcgagaaaggttatggtaaggagagattccatcccggatggtggatcccaacttttgaagatcttttctggcttctgttcttccttgtcttg

SEQ ID NO: 55176 - DNA, 484 bp, Zea Mays
gtcatggcagccgcgcgcgtgcatggtgtgcgccatgccgccatgtacgtcggtgagaggcaaggcaacacccccctttttgcctctctgatttgctcctcctcctgctaaatttttcgctctcaccattattcccggttcaagttttgaggccggtcggtgagagttaccgaataggctgcgaaggagaaacagggatcaatattggatgctcttcatgtacgcttattgaaatggaatgtccgttttgaacttgaaatcttcagtacaggcatggggcatacgtgatgttttgtgtctgttcatgaatcgtgaaattttcccagctggtgcatttcctcgcatcacgaattactggaactgtccagtaacaggtcaatctcattcacattcccatctcatccacagcgcaccgcatttcagaagaagcaaaggtcgtcggtcaaccccaggtccagcccgccatgaacggtgaagctgcaca

SEQ ID NO: 55177 - DNA, 328 bp, Zea Mays
gttggggagatggcataccaactcgaactacctaatagtctatcggatgtgcacaatgtatttcacgtgtctcaacttaagaagtgtctccgtgtccctgaggaacagttaccaatggaagagctcagtgtttagggtgatttgacttacacggagtatcctgtcaagattcttgacactttgactcgagttacaagaaataaggagataaagatgtgcaaagtgcaatggagtcaccatggagaagataaacaacatgggaaagagaagaagagcttcagatagattttccccatcttttccctagtccttcctaaatctcgaggac

SEQ ID NO: 55178 - DNA, 776 bp, Zea Mays
ggggtacgggacagtgaccgtgagatcacagatcgacggaagaggttttaaagaggtaaggagggttctggaccgcccgattagagattcacggcccagatcggccccggccgaaggggtatcctatttctaatcgtagccgtccatgcgatgatcaacggtcgcggaagcatcgtctcctacccagcccgagccacccaactggcctcagcgcacggcggcggagtcaccggagtccatgaatccgaccaacccgagcgccagactcaaattcgttcggccctcgcgaaattgacgacgcccagagcctgattcacccatcaattgctactgccatccatcgtaggacctggcccacagtgcaccgcgccagcatcacccgctaccccgaattgacacacgagccatggctaattgagtgcaatacgactgacaaaccaaggaattaacggtgtttctcatacctaattgcgcagcagaggttctccggccccggtggatagttggaggtcgagattccgcgacaacgacgaggaacttcagagagccgcaaccccaatttgtgtgtgcaggggtcttggtttgcttcctgtcgtaccgaagactccaatccgcgacaaaccgaacccacacgatgtgagtgcggtgacggtgccgctcgcaagctctcaatctctctcttcctctcctcggatttctttctccatcgattttgcgttggcgctcggttccagctcagatgtgacgaaacggggaggccgaagcggtcgtggctg

SEQ ID NO: 55179 - DNA, 574 bp, Zea Mays
gtaatgaccttcacatccacattgatagcaagcttttcttgaagttatttcttgacttttttcatgtttccctttttgtttcttggacctgatgcgacgacgaggctgaaactgtgtgcaagtaatagtccatccatcaatgtaacactcatgtgtttcttcatggggctgggcatccttgtgatgtttcctttttggaatactttgcaattcatcgaatgacagtgcattaggtatgagagactctgctattagttgttcagggggagacatctgtcttttaatgccagaaaataaaatctggttcttctgttttgtagtttcactttcgtttgtactgatctggcgacaaggaattccatagtactcacaacaacatgttccaaggtcacttgtcggttggtttggttgtgcattcttttgtgtcttgaatgtctgttcatcaactgttttatttatagtgttgttttgacttgccaacacaccacattctttgcatttagtgacatcacttgtagttgacattccaaggtctgacatctgtatgggtgtggaagaatggaagagacaaaag

SEQ ID NO: 55180 - DNA, 1180 bp, Zea Mays
aggggatttgaggtttccaaagtagccctaaagggtgaacgaaaagtgcttggataacatcgatggtgtttgtggcagccaaaggaactctagtgagcaatttgctactactcaggccgtaatctagcgatgggaggggtgtgacagggttactacctgctggtgcacctcctagtgccgtgtagagaaatagggaacagctagagatgaatcgtaaatgacgaggcgacatgccatggatcaggacaatagatttggtgctgagccttattacagatgtcttgaatgccggcaaaggtgatggcaccaaagacaaggacgaaaggctcgggtgaggacggaatgctccttgggagctcgggaacaacaacaatggcactattggcaaggggtgaggtcttctagtggttgtgagctcgaggtgagatgagcagggggtgcagaggggtctgttttatagcacgatgccattgattaagaaataaagtcaatggaaagggcgatgcagatgaggaggtgatgacgaccattgtgacgttcttagcattgatgagcatcattaagaggggaccaggtgaggataaagggctttagatgttgggtgaaacctctattgaggcataacgggcatggggagtcctgtcgagctttgtgtgggtttaaataccgatgggatgtccactgttaatacagaagtcgagccctatgttagggatgacaagcgaggtccattggttagagagagagcatgagagaaagtaggcacccacaaggtgtaacaccctagttttcccaatattaaattttatttttttaacccaaaccctaatttcttcttatttaatgtgcttagattgtctcatatgctttcaataataaattggctcttgagcaattaagtaattgaaataaatattggatcaagtgttttgttgcattttatgttagtctgttagcttgttttggttgaatagctaattattttcaaaacacgtttaaatttgaaagacaaaatcttatgagtaaaatttataaaagaaaaggaaaaggctttttctatccccttttctagattttggcctagcctagtccaatagtcgcgacgcacccccatgtgttcgtgtcatgcgccctaccacgcgtcaccctctaatgtgtcccgcaccatagcctgcaacac

SEQ ID NO: 55181 - DNA, 724 bp, Zea Mays
gtcgtgttgattggaagccggatcgtctatgtgacatctccaccaaatcgatagttatcttcacctgacggaagatcgggcacccccattactatcaagtggtattcaaagactcaggtattaccgtcaggcttaccctagtttagtttaggtttttcatcctataactccagataattgccatacaaaaaaatccgctatcctataaccctgtttagccttgcaatttcgtttcaaattgctttgttgagtttgtgtccgtgtcgagtcttgttgcttgtttaggtcgggtcgtcatcgtagttcaaccgatccgtcgttgttatttagttctgccgctatctcatccacctttcccacattacaagtcgagcaccacattactcgatttgccctcgctagccgccttgtgtgaactctcgccacgctagccctagattaggttgcaaaccacattgcattgcagccgctccttgtttcatcatttggcgcttacctattgctaatactagggaggtttgtgcccctgtgctctatagccgccggtacggttcctaccaatttgtgcccttgaaaaccataacttgaggtaccttccataaaacgggcataacttttcgctcggtactccatttgagctcaaatttttacagcagattcctgactccattctggggtgacccaaacttgcctacgacctgtttggttcggtcaaaaaattcaa

SEQ ID NO: 55182 - DNA, 744 bp, Zea Mays
aaaaggtcttggttcagccagaagtgaccgataaggacaaaggcaagaacattgtcattggtgatcctcacacgtcaaatacataatgaggagtagttgctcaaaaggcttcgggcaagaatactaataagaccagatgtgctaggggcaagggcgatcgggcagtcgatcaaagttccctttctcacgcatcacgaacggtctgacatttgtgcccaaatagtccagagcccacgtggacagtctgactaactcagccggacggtccgaggcaactagaggctacaacgcccacacaaaacaaaacagggtacacagcaggggcaaagtacatatgaaacactagatcggctagtcaaagctggccctacttctgatcaattactctacaaatacgctaagaaggtcgttctgcgtgatcggccaacaaagcagcttcggtcacccactaaaacaaaacagtcgaataaaacggctcgaaaggcaacgcaacggccatcacctattcatccatctccagtgatgtcaggatactttccacctgcctactaatcgtcgatacattatcttgttcaaatgtgaaatagtacgatgatgaacccataatacgtgcataatccctttgcttattcaggctggaggcaccacaatgttgtgcttattgacccattgatcaagtggttatggccgagaattatgcaatcttaaacgaccttaggactctattaaataatcacctcatta

SEQ ID NO: 55183 - DNA, 1009 bp, Zea Mays
ctggcttcctagaattatttatttattttggtaaatattcccatttatgcatttggatgcaatacgtcagaatcatgccatttgtgacatttttcagttaattagtgatacgtataaaacacatctcagattttatatcactgatattgaagctgatagtgacgcgcaaacgacatcactaataatagaactactttagtaacatgtatttataaaccgagattcgaactcttgacgttctgtcgcatatgacctcctctatcactacatctatctcatttgtgtcgatattatgtgtcgagtactcggtaaatatggaacccgaaataggcccttcaaaaatggctcactccgccgattaactctgtgagacagatcggatgaccaactctcggatgatgaccaactcttcgtagatgaccaactttccgatgatgaccaactctacgagacggaccagatgactaactctccggtgatgactaactctccagtgatgaccaactcttcggtgatgaccaactctcggatgatgaccaactcttcgtagatgaccaactttccgatgatgaccaactctacgagacggaccagatgactaactctccggtgatgactaactctccagtgatgaccaactcttcggtgatgaccaactccgccgaccaactctacgagatggaccagatgaccaactctccagtgatggccaactctccgatgacgaccggtgatgattaactctccggtgatgaccaactctcggatgacgaccaactctccgatgaccaactccgtcgaccaactctacgagacggaacggattaccaactctacgatgatgaccaactctcaaatgatgaccagctctccggtgatgaccaactctccgatgatgaccaactctcggatgatgatcaactctgcgatgataactaacactccgatgaccaactctgacgaccaactctctaacaatcagctccagctgaccaattccccgtcgagc

SEQ ID NO: 55184 - DNA, 273 bp, Zea Mays
gtccaatccgccggcagacgatgtcagagtcacccagcagacgtcgcgcctgacaggtctattggcaaacagtgcgcccgtgccaagcggcacacagtacccatcaccccttctacaagaagcttaccatgcacggtgaggatatggagatctcgagcgttagggcacaagaagattaccccagtagcaaacattgatgactccaagcgctatagtctttatgtccctgggcccacatgtcggggcccaacacctttgtgcatgccccccttc

SEQ ID NO: 55185 - DNA, 877 bp, Zea Mays
cttaaatcggtgtgatatgatcacgtctacttatcttagggcgaccactatgccctaccagacaggcgatcgacttaagtcggaaaacgccttaaaaccaacacgacacatttactttcacagttgtttagggtgaccgttataccctaacaacaaaacaattagcactccaggaaaaaagaacgttttacttgtcagcaccaggggcatgttctgacgccctgtccacaaaatattcgaacacaaccatcacacgcacatagaattcatattacatcaagtgttttgcaggacatcactacattgaaacgtctttgccagcaatgtctttcgcagaagcaatggaagaagaaggacgactcaaagcatcacgcacagccttgactttggtgacaatatcgtcaggcaccactacgtcgggcctcctcatcaagatccccccagagcgaatggctttgtccatagccttgtcgcgctaagccttcaaaacggtgcaactgtcctccgaagctttgacagccagtcgagcagcttctagctcctgtgcaacaagtttctttaaagcacgtagatctctaatggtcgaatccttggtagataacagttgtccaagccgcagaacttcatcatgggatacttgtagctcgtgacgatgatgatccaggtccgacatagtgaagcggtggttcctttctgagatcacctagagggggggggggtgaataggtgatcctataaaattcaacactaatagccacaaaacttagttgttaaagttagaacggctaagtagcttgaaacgagctcttgtgaacacagacaatcaaaaagaaagcacacaagagacacgcgatttttatcccgtggttcggccaag

SEQ ID NO: 55186 - DNA, 492 bp, Zea Mays
tctgttgacgaatttcggcaccagtcatcgttgcagtgggcggtctatcactacgacatctttcgtaaagttcttgatgtctaggcgaaatggatggtcagcagggagaaattgtcgatgtttatcgaatgacgaatatttgccaccctttttcaaccaaatgaacctgagagcttccttgcaaactgggcatgggaacttaccgtgaacacaccaggcgtagaatagcccatacaccggtaagtcatgcatggagtactggtgccaaacatgcattctgaagtttgtcttcgtagctcggtcatacgtccataccccttcctcccagacacgtaccaattcatcgatcaaaggctccatgtacacgaccgttttattccccgggtgtccgagaattatcaacgacacgaatatattctgcctttgaaagcacacaccagggggggagattgattgggataacaaacacgggccaacatgtgtacggggcag

SEQ ID NO: 55187 - DNA, 782 bp, Zea Mays
cttggctgacgtatttcttggccgatgtgagatggatgggccgacgacgattattttgggtcaaccaaaatgttccatgttagtagctacacatgagggaggtttgagggctatcaaaaagacgggagatgtttaagggatttgttgaaggcttcatttttcacttttccccaaatttctgtttaaggaggattttaagggacgttttggagatgctcttaaaatgaacccgacgccaaatgctcccaattccccactgttggccgctcgttctagccttgctggcttgttgcgttgtgccccatggccccctccaagtcccataggccgcaacaccgctggtggctggccctttcaagctctagagcctttaaccgtggcccgcaagcataataattcttttgttaagttttaattgtgtatgatggtgaattgagaagaaatttgattaattatgctattgaattgttgaaaaatgattgtttctgcatatccgacggatatgcaaaacccgatcgaaatcttatgggcacgggtatgtatataaatttgtacccacgagtatggtcgcagacggatattggttgcagttgcggatatgattgtcggatgtttgcaatatcctatccgaatccgatccattgccatccctaaatggcactgcctggcacaggaccgaaccagaggccgagcgagagtagtgacacccggttgcatcaggatggcaaagacaccgaaggatgcagaaaagcagcaacatagcaaaatgtagctgaccaaac

SEQ ID NO: 55188 - DNA, 742 bp, Zea Mays
gacgccacagtgctcaacgccggtgagtcttcaaccttgtgcccgccaacggtcttcacgggtgcgaccgagcgaatctacacctaccccacacctatccgagcacgctagcatcgttgtaaaccatagcttgtcctcgggctctgtctaccaatgtcaatggcaaacgccgaggatcaccggacctgttcccgaggctcaggtgtagtagcattcaaatttaaagcacgacgagcatcactaactcaccaggagtcgacgacatcaatggagaaggctggaagaaggatgggaatggttgcccacgtcgaggtgcacccacggcgaaacgttccagcggtgagggaccgttctggttgaaaggttgcggtagatatcaagcccaaaggtcaatgagctttcctggcccccaaggagatggggacaaggcatagaggagacaaaacccacctcaactgtcctggccacgccagagctcaccacagtggcgatgacgaccgttcccggggaaattcgatgacctcgagcgatggtggacgagaagggatagatggtggggcgctagctctgtaactaagaggcggagatcagtgcatggtcaatttggatgacgggggtgaagatgcggtgaattttaaagaaccaatgacccacggtgacagcccaagcgataagcttcaccgtgcctcgctggctttcaccgacgacgtcgggctcgactattttccagggaccagacacg

SEQ ID NO: 55189 - DNA, 520 bp, Zea Mays
agggagtgtgcatgtaccatgggttcatcgtcgtaccgttccatatttgaacaggacaacacatcgacgatgagtaggtggtgggaagcatcctggcatgacaggttgaacaggcgatgcttgttgcgtcgtctttcgggccgttttactcgaccgttttgttttagtgggtgaccgaagtttctttgttggccgatcgcatagaacggccttcttgctagcatatttggctagcaattgatcgaatgtaggcccagcttttaccagccgaccatgtgcgtcatgttggctttgcccttgcgtctctttccttgctttgtgtggacgctgacgcctctagccatgggcagactgtctagctgactcagccggaccgtctgtctgagcaccaaactgtctgcacgtaggtgttggaccgtccgcaatgctcgggtcaggttgtcatgctcggctcctcaattgagtctgccccctggcgcctctagacttgctagtctctttgtccggagtcttccgagca

SEQ ID NO: 55190 - DNA, 598 bp, Zea Mays
ccccgacaggtagtgaatctagcaacttcatcatgttacttttaccgtcctaggccttgaaccatttgtagtaaatatagatttagaaatttttcaagaagactaattgtaaaagtctctaaatttacaaactctctataaaccacaattatctctatatctatcaaccttgttgagactctcgaaatcaaaattggcatcaagtccatcgcgaaaagactacgcatgccactattttacgttgtcccactcccaccacacccttgaccctaattccatctccaccatcccacaccattagataatctcttgggctgaggtggtgttagaaaacctcttgtgttgccttcacgtaatcatcgtgaggacctccatggacgatatgtaaaatgtcgggttaataaatctggtcttccatcgacagctctaaccttccaatacgttgatggcaggtacacccttaatcttgctttttatctttcaactcgtttgtgttgatatagatctgtgtcactaacccaactaaaaaatacaaagtagatccacttttttacgtaaacaacttaaaaaattgtaacaaaaaaatagagaaccgtgg

SEQ ID NO: 55191 - DNA, 493 bp, Zea Mays
ccctacgaacagaaaactatgcagagatcaacatctaccgggtagtaagactacatggaatacccaagactatcatttcttatcgaggagcccaattcatagcaagattttgggaacaactgcaagaatcattaggaaccaagctaataagaagtttggcgtaccatccgtagactgaaggtcaaaccgaaacagtgaaccagattcttaaagatatgttgagagcccgtgtgatccattatggtaaaaactgggacaaatgtctctccttagcagagttctaatacaacaacaactatcaagctagtatggaaatgacaccctttgaagcattgtatggaaggaagtgttgaacacccctaaactggccacaagtcagaaaaagagaaatgtttggacccgatttagtacttgaagtcgaagagaaagtaaagataattagaaagaatctagaggctgctcaagccaggcaaaagagcaatcatgacaaaag

SEQ ID NO: 55192 - DNA, 376 bp, Zea Mays
atgatatgttaatgcatatgatgccatgctcaaattttagttctagtaacaccagggctattacactagaggtggaccatccgtgatgcactttatctgacatctggcgacatatttaatgcacttatatccatttatatagttgttgcaactaatcattaagatctagtcattgaccttgcaggggcggatcgtccgagtagagcatgcagaccgttcgcttgtgcacaaaacgaagtaacgattttgggtggtcgaaggctataaataccccctatccatcccattcaatggtatccaagcataccaagcacttcattcagtcctattcactacaagagcaagagcactcactccaagtcatactcaaaacaat

SEQ ID NO: 55193 - DNA, 357 bp, Zea Mays
aaatgtattgaagctaccagcgacgagctacttgggacatattccatggccgaagatgatgccttgtccgcagcttaagggggtcgggagaagaaaagattgaacagggtgtttgatgcaattggcttcgtataccctgattatcactacccactgcgaaggcaaggaaagaagagaaaaactactgcttcggccaccactattgtgctgaagggtaagaaaataaaggttctgacccaccagccacggtatattgaaccggtcgtagtgcctgaatttggcgaagggacctcttcaactgccgaagtaaaacaagtgacccccaccgtgcggagtgctaaagaatcaactgtagtg

SEQ ID NO: 55194 - DNA, 337 bp, Zea Mays
ggaacatttcttcagttgggcccactctctggtaaggcaaggcaaccagcccacagcacactacttctaagttctaattagggatatgttgttctctctcgcggctgattcatcgttttctgggtcgtctcttttgtctacctggtttcagtgccggttccatcgggttttgacgcaagagtagaggacttggtaggtcgttgtgttgtgactcattgttggagagcaggaccgatttcagattgaggacaatttcagccaattttgcaggaacccgtaaaacccatccggagaattttccctgcgcgtcccatgattaggagctgcggctggacag

SEQ ID NO: 55195 - DNA, 621 bp, Zea Mays
gctctagggacgcggcatggcgctggtgagaagccaccaacgacaactacaaaaatcgagggtgtggcgacgggatgtgtacgcttgcacgggagagaaagaaacgagagagaggccgaggtcgtggattgtcggagacactaaaaacactaattctcgtcggcctatacagtgtagtcgatgggagttgaaaggttacgtggtcacagggttttgagtggggtccaaaaggcattaaccgtcggctgggttcgtggtcgacgggaattacataaccctatcgattgcgtgtggctgatggtaattcgtgttatccacgttaccttctagctagctgacagtagttcgttaactcttgttggctggcccaggagtcgacgggagttaatacgaccgacgggtgtaaggaaaatggaccttgggacatttggctaagggcatgtttgtttggtctgaattgggctaaattggaatttgattccaagataaacttgtttggctgcgcctgaaattggaaatcaacattccactcactttcctaacctgaatccgaagcccacgatagattcctacctcctgaagacggaaaaggattcctctccccctgaaagggaaataggc

SEQ ID NO: 55196 - DNA, 815 bp, Zea Mays
ctagaagtcaaattagggaaatatcacaacaaataatggtataagtatgataatattatgaagtctaaacatggtttcaacactagcacatctaatggggaatacctcattgacacttatgagtagtctctccatatggagaataagattgcccctaaaacactcgcggtttttcgcatagatctcggaaccatgatccattgccctcttcagtgaaacttcctacaccactagcaatgtgaagctagtattacttgacattatatttctccatgttcccaaacaccatttatgaccctcattcatctcatcatgctctataagcagcaccatggccacattctcttccatggtgctagtgtggctactagagagagggggagttatgacgggtctttgggatctcgaagccaaagataaagacaatttaggatagtgacaagtatgatatatggtgctacagtggtcgcaagttaagggcccaacatatgttgaagaggtggaaggcatggcaagtgtgacagggcattgcacatcccaagctaaaggttaggagcaagatggggtgggaagggtctcatctcgatagatgtgacaataagatattcttgataagaagtagaaggaccttgatgtatcaaagacagagagttggacatgtgagtgtctgacttagatgatcttgacacaatggagcatgtgaacgggagtgcaccacatcagtttgccacaatgatatgtttagatcttttttgttttttattcctcaaattttctcccaaagttttaagattttttaaatgtggggatctatt

SEQ ID NO: 55197 - DNA, 399 bp, Zea Mays
tcctcgataatctccgggaaagccggagcgaagcaggaaatagcgcaacctccaccgctccgagcgaagactaccacctgcaagccaggagcggaaaattcattcacttgaagaaccccgttgtccacttcatccacagaagagtggacacggattacgaggaaaaaagaaacaaggacccgtcaagctgctcttctggagcctccgccctcaaaggagaacaaaaagaagcttgtcgtcacgacaactccgttctaccccgacatcctctttatcagggggagagtggaattgtcccccatctccgacgatgaaccaactgtgcctggggaagaacctcctcagcgggaagctcgtcgacgaaggaaccgacgccgtaacgcccgacgacatcatgaa

SEQ ID NO: 55198 - DNA, 416 bp, Zea Mays
ggaaatctgaaattcacgatctatggttgatgatcaggagtgaggagtggtgcattgggttcgtaacagagagacagagcaaggggaacactcaatttatagcgatagtcctcgtgctttgcaaatttggaatggaagtgcacacggtggtgaatagatgagtcaccggaactcatctaccgtggtgctcaacgaagtaaagtctcggggtggtaatcgactgtctctcacgaccaactgcgatgtgataacacagtctatggcgtggcgtaactgagataaatggtagccaccatagtgacggctgcacggccacgtcgtcgggcaagtgggtacgacaagcttgctctagggcccaagttcaccccctcggcgatcttttcaccctccccactgatatttttacgctccagcgc

SEQ ID NO: 55199 - DNA, 759 bp, Zea Mays
taacgatttttccactgacggttttataaaccgtggttttaggtgaggagagaggtgaacatggtatggaatggagcatgcagtggtgaaaacttttgtcttgctcagtcaaacaacggctcatggttgactgtactggcatcaacctttgtccacagtccaccccaccatccaccattagcagggcatcaatcagcatgcatctttcttcctggtggcctctgcaagctctgttccgacttcatcgcctttcacctactcccattgctccgccattaattttttaccggatcaagagcaccttccttcctgtcctgtgcatcgaggaggagagagaaagagtatgtgcgtgtgagagggagcagagtcaagaacagcaagcagcccagaacccaacatacatttaagagggggatccaaaaaaattgcagtctttacctgcaccacccctccctaccacaaatttccctctctgctggaactggaagcagccgtggcatccgccgtttcttgcgtgcttcctttcttggttctcctactagctgtcatcgctggtactgaaccagcggagaagagagaggtgaaccacggtgatccccgtgctggacaccatggccgtgtcctggtaggggataagcaacccaggaaagcagcaaccttccgctgtgcggatcacaggagggggactgcgtggggaccagaccaagcatggaggcactggcggccgcattcgccaccggccttgtccttgccctcgcg

SEQ ID NO: 55200 - DNA, 613 bp, Zea Mays
ctgcttcgtcccgaggtaaatccatgccaagatcatgtcaaacggttggagtttgtctccaaacttcaccagggcgtgtctgaggtaatttggcgccactttgatatttggaccatgtggtttttagtttggaattaagagaacacgattgatctttggggaaaggttggatttcagaaatttgaattcctgattttcatttgaagtccccacttgagtggctaatttgagaattttacaaaattcttttggttaaacactctaactatattttgtaggttatttagtgtactaaaattttgttcattggtccaaaacatgattttgtgttacacatagcctttttactagatttccttttggtactcaaatggcttaattagggtagttctagggttttgaatatttttcccacttgaggtgcatgatgtggttagggtatgattcttgagatgaaaaagacttaacttagttttatctccttaagtttggtgtcttttgcccaaattaattcacatgtgataatggtcacaaggtgggtactgagggaaaaccccctcccccttaaaattatctcgccctgagattcgggtcggggtcctccaggggtgag

SEQ ID NO: 55201 - DNA, 403 bp, Zea Mays
caatgtgttatgacaacccgatgtgtgttgagcggaggaggttgaaggtggcaaatgagaagagagaacaggatgcaagggaatgggaggcggctagagtcgagaaacagaggttggggaatcttattggtcgtctgagtgcaagtgagtgagaaaaagaacatgttagttttgcttgtacattatatttatcttgtctttgaaacttatttgtcacatcatatttgcaaagattggatgtgccaagaactatatcgcatatgaggctcgtgcaagatacgtacgttcaggaaaaactggcgacgatggagctgatggaggaggaggacacatcaaggttgattgagcttatcgctctcattgagacagaattacattggaaaggggaggacgacacatcaag

SEQ ID NO: 55202 - DNA, 347 bp, Zea Mays
gtcgcaacgcacgggcacatacctagtcatgtataatgacaaccatctactatatagtcatgctatgtagatcgggtgtgcatcaatgtaatgtgttgaagtgaccctcctaggcccaacctagagcgaggacgagcaccttaatggtgttcagtatggttgcctatatcttttattatattattgtgccttcatatttcctagtcatggctacaatgatttttcatttcttggaagtcgactatgattgcctaatcagatatggtcttagatgtaagggcacacctgcatagtggtgtcgggtacacctatccctgagcatgtgtccaggtgaatgtggactataa

SEQ ID NO: 55203 - DNA, 515 bp, Zea Mays
aaaggttgtcaggactatgtcagcaatatagagcagaagatacaccatatctgcaccatgatgatagacaaatagagagttgtctgtcttagcgccaatcaaacccaactgcaaaaggtgggaagcaaatttgttgtaccaggcatgtggggcctgctttaagccatacaaagaccggttgagccgacagacataatctggatgggaagaatccttgaagagctgatgtataggccaagagcgtgagagagcaagggacaaaacagtccgtactacagctggcttgtccaccagactaaaaatctctacaaaatcaataccaagacgttaggtgaatccacggaggacccgacgagctttgtagtgctcaagggatccatctgcgttgaacttgtgtttgaataaccatttgtcgttgaccacattacaaggggtgaaaacggttggaaacgatcgataaacgctaaaaccatttccgttttcacattttttgtctcggaaacgaaatcgaaaac

SEQ ID NO: 55204 - DNA, 714 bp, Zea Mays
ttcgggtataggtgatgttagcttttctagaagactatcctttgcttactccactgacttagatctcgaaggtccagcttcagcgctggtaggagaagcacttgcagcagctacttcaatcttgtcctcggaagccttagtagaaacaggagttggcaccttcaaagatttcataatagcgtccagaacgctggccatttccttcctttcctaggagttgctgctggagtaggaactaactttgacaaccccgtcatggttgggggactctgcagtttctgatgctcctctgtcttcgagctctttgcttctatttcttctaccggagcgacagtagcttcagcactcgtagcaggtattatctcgaagtcaagggggtagctttggcacattcaacaatttccatgttgtctgtaccaggcacttgagcagtcttctctaaagagtgcagcttcgacctacgagtcaaaactttagctctttttagctttgacgaggtggaagaggtcgtagttgcgattttcctatttgctccttgtttccgagcgagaaagctgtaatcaggataaataaatccaatcacatcaaaaactatgttcagtctccttttgcctcgagcaccgaaagcagtgttcatggcttcgtcctctgccttcgtataagcccccaaaagctcatcactggtcgcctcaatggcttcaagccagtcatcat

SEQ ID NO: 55205 - DNA, 1308 bp, Zea Mays
gaactaagttcataacccaatcccacgagtcactgacactttacttccagccccctccacattctttgtcttttaaaattgggtccctgacgtcggccggcggcgcggacgagtttgccttgcgatactacgtcgaaggagagctcgggcagccattggatatcgaccggatcaaaccttaacctaacccgcacaactttggggcatgaatttggcttatgaacacacagagcggccggattgcatccacggcggaactctagttccgcagtccctgctcgaccgatttgagcaccggatccttcaaattaagagcacagggggcacgagcaagacacgggcgccgtgatgcttacagaaattgacatcgagccaactaggttttggtgggttgacaccagggcagtttatgcggcatcaaactcatgttccgaccaaactatggccgcaaagaccaaactggcacctcggtgatctttactagcctataaggacactagaacattaattcatatgcgttgaatcataccgtagtcgtctggccacataagggtgaggcatcggtgatgtggtcaccaggtacgttgagtcttttgaccagggagtctgggcacgtccaaggtatagttttgggaaaggaaggcaatactactaactggagctacacaaggtgatcaaggactgaggtaaggatctctcctttgttcctgctcctttccctccaacggttttctctttaaataggcagcgaaaagatcatggggactggatttctaaattggcagtagggataatgatgaacaagaagtgtagtcgtggctcagacgggaagatccacgccggtgctgcagggcgaagattatccatggcaaaagggagggggtaaggataggagcgcactgtagcagatatttctactgatgataattcagagatgtgcataaatctgaatatctttgctctccctcatctctactatttcccataccaaagtaggacacgacaaggaggaaaaagtcacagtcagatatttctgttctttttggatctacagttcttgactgatccacctatcttcagttagcttttcctcttaattttggttaagaacaggtcagtcactattaacagaatttgttcccagatcaagggtctataaatttactataagtcacttggacctaatccttatagattacaagttatggtgctcaaaaatcagctgcaatacactggtaccatttcacatttctgaacttcagtattcagttgctcatcagattccttcctttatgacagggatagttt

SEQ ID NO: 55206 - DNA, 311 bp, Zea Mays
gtcctaacgagagtttcccctcaactaattttactattggcgctctaacatgctctgtccacggtgaccgtgtggtcagcgaacattctaatgcgttcccggcgatctaaggtagcttagctcaatcgagttggtcgaggagtatcaggggcaaacaataacactaaaacgagagggcagagggcatgagcggacctgagacgagctgaccacggtgaggactctttcacggtggcggaaacacagtttgggggaaatgagcaattcgtggtctctggtgaacaattggaggcaattgctagtgctttgga

SEQ ID NO: 55207 - DNA, 781 bp, Zea Mays
gggggatagcgtttcctcatagtgatgggtactcagggaatagatgtcatcctagggatgaattggctagataagtatcaggcggttatcagttgtgataagaggacaatcaagttgatgtccccactaggagaggaagtggtgaccgagttagtcccgcctgagccaaagaagggacgttgttatcagatggctattgatagcagtgaagcagatccactggagattatcaaggttgtgtctgagttctcagatgtgtttccaaaggacttaccaggtatgccacctgagcgaaaagttgagtttgccatagaacttcctggcaccgcccccatctttaagagagcttacagagtatctgggccagagttggttgaacttaagaagcagatcgatgagctgtcggagaaaggttacatccagccaagcaccttgccttgggccgcccctgttctatttgtggacaagaaagatggcactaggaggatgtgtatcgattatcgagctctgaatgaagtcacaatcaagaacaagtaccccttgcctagaatagaagatctgttcgaccagttgagaggagtcagcgtgttttcaaagatagatctgaggtcaggttatcaccagctcaggattcaaccttcggacattctgaagacggcattcattaccatgtatgggttgtatgagttcactatgatgtcattcggtctaacgaatgcaccagccttcttcatgaatctgatgaacagtgtattcatggattatcttgacaagtttgtgg

SEQ ID NO: 55208 - DNA, 754 bp, Zea Mays
atgcttttgaaatcggcacttggctttagaggcattgtgaatctgttgggtgcactaaaagtacacccaatgggtgtagcccctatgctttgagtggattttagaagtaatccatttaaaggtcttcatcttataccgttttaagataatttttagaataaccaagtgatgacatctgtccatgtcttgttaggtctggaatcaatttgatcggtgacaagttggacatctggccggttgaaacagaggacccttggctgtacaccactcaacactgtactttaatgtttttgttgattggacttgtgccttggtaaccacatttggacttcctcccatttcagtcgatcttctctttttgtcgcggtacattcattgtgtatattttgcaggtatcgctacttcagaaaatcttgaagattctgagaggtacacccaattggtatgcccaaagggtgtctgcttcgtgaaaggtgtttatcacgttgtcctgaagtagtaacttgatgtgacggagcggtgtaatcatttgcctaggcagttgacttgagtccaaccggtgtcatgttacgcgaaacggtgccagtcgcctgactcatcttcaggcggtttgaattgattattgaattcttgcgactgttcggtgagcggggtaggaagtggacgatcaccccttgatctcttcaaatagcccccttgcctcgggtactttcttcactcgcccttgatcacttgctctcttcttcctccccgc

SEQ ID NO: 55209 - DNA, 542 bp, Zea Mays
tgggactcttgatcttcttcgggagtgtgtggtcaccatggaggtctggtttagattgctgtcctatcggccttcagggtttgcttgaattaagtgcaccatcagtggcagagtggtggatacaggcttgtgctctgctgccaagtgacctgtgcaaggacttcgactcactcatcctactggtgtcctggaccatgtggaaagagaggaacaatagggtgtttggttcacagacagttgccagcacccatctgtgacgaggtagtgcaccagaggggttcactgacttggcaacacttctgagattgatgagcgccttgggtctaagggacgtcgtgtaaagtttgcaaaatgtagtctggcaaacgcacaggatggtgtcttgccacgtgcaagcaaagtattaggcatacgctactcttgttattccgatatagttggccactttgtaatggtcgccttttttcctcttaatgaaacacgtgcaaacggacacgttcttgaaaaaaaatgggactcttggcatatgttagagcatttcc

SEQ ID NO: 55210 - DNA, 296 bp, Zea Mays
cgcgcgtctactgttcacttcgtccgaggcgctcatgcaaagccaataaaaaagctattcaaccctcctgctgctgcgttcacgtaaagataagaaaaagagttcgtatctctagcatccgcaagactgtaaaatgacataaataatattgtactaaaaaaagtatgtactatatatgtatcaactattattcaccaaggtcacctattgtttcgtatagtcagggcctcattatcatcctttcaacctaagacttacataacattgacgatttttgtatagtatcttaactgtta

SEQ ID NO: 55211 - DNA, 577 bp, Zea Mays
ggcttatgtctatgtcgtggagttccagaagcgaggtttgcctcatgcccatttcctactcatcatgcaaagaacatacaagctaacttgccccgatcagtgtggtctccttatctccgctaagatcctagacaagaagaagtacccccaactgtataagatggttatcaagcatatgatgcatggaccgtgtgggttgctaaatcctaaatgcccatgcactaagggtcgtgcttcatgcaaaaaccattatcctagagcttttagcgatgcaacattgcaaggaaaggattcataacctatttataggcgtcgtgatgatgggagtaaggaaaaggttagaggttgtgaattggacaacagatgggtcatcccttataacccttacctcctccggctcttcaactgtcacatcaatgttgaggcttgcgggagcatcaaggctgtcaaataccttttcaaattcatatacaaaggccatgatcgtgcgtctgtggctgtgagagatgcaaaatgctgatgatgacgtttatgagatcaagcagtatagagatgctaggtgggtgacccctccaga

SEQ ID NO: 55212 - DNA, 354 bp, Zea Mays
gtaatgcgatccgtagatccgctggcggacggttaagatttgtgtacggataatgattcgatctggactgttgctctcgatcctgtggccgggatcagataccggttcgcgggtgtgtgggagccgtcgatcttgatctgatggctgccgtctcataccgctttaataaaagcccgatctaatctccgccgctgatgagggatccaacgactcacgtgtgccgacaccccttcggcctgtgcattttgcagataagcccctcgccttattagaatagaacccgccgtctactcacgtgggaatttaattaaatctaggtcccgagtttcatagtttagaccctgacctttcgca

SEQ ID NO: 55213 - DNA, 484 bp, Zea Mays
gaaaaaaatgctctactattaacattgggcccctttccctgtcctcggcccagccaaacccctgggcgtcggcccagtgtgttacccgcctggcccatgactatgagcgccaaggtatttcacttacgtgtgggtcccatgtggcagaaacttcttctaggacggtcgttggaatcctccagttctcctgttgcctacctcccgagcttcgcgcgtgcaacaaactccctagcatggtggagttcagctcctcgatctgcgcctggtcggactctatccgttcttggggataaaatcgacccccttgcaacccccgtttccctcgtccctcctcggcggtaatcatcgtggcgcctggagcactgacgacttgatgcatgatgtggatcggggcaccatgggcaatcccaacaatccctcctactcatggccaaatttgttgccggggggcttgcctgaccctagcggttgtgtccgtaatgcg

SEQ ID NO: 55214 - DNA, 712 bp, Zea Mays
aaatacatagcggagccgattgcacgctcaatttatagggttcgagggcggtggcccatgaattggagatggcgcggtggcgaccgaagagaaggaaagttactggcgcaggtgataccgtggccttcaccgtggcaagcttaccagcgacgacccagctatctaaaatagctcagtgcgacgtggtaaatggcctgaggcgtggcgcaaccacggtgaatggtgcaagttccggtgacggccacttggccatgtcgccggcgcaagtgggcacgacataggatggaatagcgtttcaagctcatccggagtgaagatattttcactccgaggcgttatctgggcaccagtgagcacgaatcacatcgccgtcgtcaatcgcggcgtaaggtcaccggtggcgatattccctgaacctgttgatatttgtgtggcactgtaccattggaggcctattcagagcgcctgacagaccgatttgcagggcgattagctccaaatttcatatagtgacatgaccatctctctgcatcaaagttgtagtcctataatccaactacaaatcgactatagagacctggctcatttacccactcctttgagcttgaatcgagtccaaagttgatcaaatctcactgtcagtaaaaattcaggctataggggtgactgacagcagtacttggagtccatttaactccatcttttgtacaac

SEQ ID NO: 55215 - DNA, 665 bp, Zea Mays
tgaggcagaatatattgcagctgcaacaacttcttgtcaaggagtgtggttatcgcgcctacttgcagagctcagaggaaaagatgtagacactatcactctgaagattgacaatcagtctgctattcagttaagcaaaaatcttgtctttcacgatcgaagcaagcacatagatgtcaactatcactatatttgagagtgcgtcgaagaaggcagggtggatgttgagccagttgacaccaagttccaactagcagacatcctgacaaaggcactagggcgagaccagtttgttcagctgtgttccaagctcggcctcgtcgacaccagtcaagtaaacaaggcttagggggatacttgttgaaaaaataagccttatcacattagatacgtagtcaacacgttagttgcatgcattagctagttagtgggttagtggcagcgcgtgtggtcgcatgagcttctgtggacgccatgcaatagtgggttagtggcagcgagttgcacgcatgcctgaggacgtggacgtactcgcggtgtgcggacgtggggatggacacgtcaatactgtacatcgaggagacgctcggactctacttgtattcctttgcttttgttataaagtgcatcagaaaacgtcgcaagaattagcggcacaaattctc

SEQ ID NO: 55216 - DNA, 540 bp, Zea Mays
gaacaaaccaatcagccatccccgacgtcgacgaatcaatctccaaagatctcattgacggagacagtgtcctcgcattgcaggccctaaacaagtatcaagcccagactaaggcatgacgtgacaacaatgttgtcccaagagaattcagcgaatgggatttagtactcctaaggaccaccagaacagagtcccggggcaagctagagccgaagtgggaagggccatacatagtcaagacaaaggcatccccaaacgcttacaggctaacaacatcatctggcgaagacttagagcattcgtggaacatagataacctccataaattctttatttaagatccaaggcccaagcgcctttgtaattcttcaaacaatgttactcaggcccgcactcttttcctcccagggggtgaggtttttaacgaggcagagccatgtaatatacggccaaaaagcccccgcaaaaaatccagccagcatcatgagtgtcgaaaaagaccgcatcgacggccttcgacattcgtcatacaaaacagtc

SEQ ID NO: 55217 - DNA, 389 bp, Zea Mays
agacaattctttggacccgaacttattcaagaggtagaagaacaagtctgtataatcagggagaacttgaggatagctcaaaccagccaaaagagctacgctgataatagaagaagaccactggaatttgaggaaggtgatcatgtgtacctcaaggtatcaccacttcgtggaatgaggagattcaacgttaagggtaaattgttccctcgctacattggaccattcttgatctttaggagagttggggagatggcataccaactcgagttacctgctagcctatcggatgtgcataatgtgtttcatgtatctcaactcaagaagtgtctccgtgttcccgaggaacagttacccatggaagagctcagtgtccaaggtgatttgac

SEQ ID NO: 55218 - DNA, 364 bp, Zea Mays
tctttttaaggtaattatcttgagcttcaacatcatccattatgcataaaaatatatcacaacacattctaagtctgcgcaacaatgaataataagatgtttttagcctgtgcgctgcagctacgggtgcaatccaggccttgcatacgcagactaccaaacaggagccgacgcttaatcaacgcacgaggagaggctgggtagacacggacatgcaaccaatcacgcggtatatgaccataaacagaaccaccttgtttacatataggttgtgaataaggttaaaggatttgattaaaagcaaaattaaattcgtcgtcgtcgtccaacgatgattcgtccaaaagtttttcgaagaggcatg

SEQ ID NO: 55219 - DNA, 450 bp, Zea Mays
ctgcacccttaggcgacttttgcgcggagtgtcgcacgtgaaggtagtctacgctgcctgtcgcggtgacttcggagtggtcgaatgtcgaagaccgtcgaagcggtctttttcgacacgttgcgtctgagtatttgcttttgcggggggttttgctggtatattacatggctccgcctcgttaaaaacctcaccccccgagagaaaaagagtgcggaccggaataacattgtttggtgaattacaaggacgtgtgggccctgaatgtttagacaaaaaatttgcggagattgtcaatgttccaggagtgctctaattcttcgccggaggccgttgctagcctgtacgcgctaggggatgtcttcaccttgatgatgaatgggccctcccacttcggctccaccttgccccgtgtctctatccgggtggtccgaacgaggacgaggtctc

SEQ ID NO: 55220 - DNA, 514 bp, Zea Mays
aactttctggtgcgagtccctgtgttgctttagtaaatatgtctcgattcgggcacaatgttgttgactgtgcgagcttcggacttctctcgagtgtcacgttgttgttgcgcttgacgatgcccttctggctgctgattatgagccaaggtaggtgccaatggtggtggtggtaactgagcccatgcagcttgagaatgacttgtcgaagcaactaatgtcgtgggttgctggttgcccacatactcagggatatatggcgaatagcatgaggcagtatgcaagacctgcttcggccgattctgccgtgcttcggcttcaactatctccttctgcttttggatcgtgacttggcacgtccttgttgtgtgtctcttatcctccccacagaataagcagaacaatctcatgggttgagtgttgaatcttcctccgaagcttcttccccctctgcctcttggagctggtggcctgtaagaggtttgttgtattcctgaagattgtgagctttgtt

SEQ ID NO: 55221 - DNA, 469 bp, Zea Mays
cctctgataagtagcgccagcatttttaagaccaaatgtcatgacaacccattcaaataaaccaatgaagcctggacatataaaggtcgttttagacgcatcctcttcggccatgaagatctggttatatccggcattaccatcaagaaagctaataattctatttcctgatgcattattgattaatgtgtcggctatgggcatgtgatactcatctttaggagttgctctatttaaattgcgaaaatcaatgcatactctaagcttacctgactccttcttctccactggcacaatattggagacccattctgcgtatctgcaaggtctaataaaatcagcttctagcagccagtggatttcgtccttgatttgtgggagaagatctggacgaaatgttctagctttctgcttgaaaggtctgaaaccggacttaataggcagccgacactctacgatctctcggctt

SEQ ID NO: 55222 - DNA, 434 bp, Zea Mays
gtgccattgaatcatagatgaatgactgagattagagcacggggaacaataattggcttcagctgagattggcgacactgctgacacccatggtgaagagttgccggagacgaggtgagacaaggttttaggaggtctagggtagtcggggtaggctagaaaagttggggttacttggggaatctcgtgacagtgctttggccacgagggagtgaccagagggtttagggcagggaacacgactgtagtagcctccggtctgcacagagagacagaccatgtgattggtagcctggctggctatgtgcaggctcagcgggtgcattgactatagccgtgcacgtgattggtcccctgtgtaggacaagacgagcctgctcacgtgcatgcagcacagttaattttttcatctcccacttgcacgcgtggggatg

SEQ ID NO: 55223 - DNA, 593 bp, Zea Mays
gtggactgcaggtttaatcaccaataacccagggtctctttaagaaaaatgtgccgcgaaggggtatctagggtttctaaccgttggatcggcaatgaagcgctcagactagatctcatccctccccaagtcgtatgccacgacagccgcaggatcccgcatcaatggttctggtttaaaatatatgcgcgcaagtggaatcgtccgatcgcgatcggacgcgtcatcgcgctccagcccaaacgccagctccgatccatcccgaccgcccattttctaatccacggatgtcctgatgttatcaacctcccgctgcccatgcataggcgccgccctccccagtaatctctctctttcccgttggtcaaccggcgtgaacaccgcccggaccagtacccgacacctccgttctccgacggcacacccatttcggtccacacctaaactccgctcaggacaactgctcttccacggatcacataaatgccataggatggagaaaaggaggtaagtccgaggtggctactcacccgaggtcccggcgtcgtgatctgttcggtggcgaagtccctgcctggtggggaatcggccac

SEQ ID NO: 55224 - DNA, 643 bp, Zea Mays
ttttatagtgctatttatttgctatttgactacttcatttcctttagttgatcatgcacacaaagaagaggaaatcaaatgattctcaaaacaataacacctaagtgtacttatttatttatcctattattttatttctatacagattttgggctttacatgatgttgtatgaaaatgggagataattgggtccaatgttgggctgtcagtcattagtgaagtctcaaccttggccaacagtggcatcatatgatcttggggatagaattgaagagaatttagtggatgtttgcgcaaaacctttgtaacaaagttgtagctggtacattgcacaacaactttactacaagtggattggtgagttactacatagaaattggagaacaaagccctataattctctctgtcaggcgcactgaagagtgttcatgatggtagagtaacctgaataagatcgcgggttcagtgtatctcgctgccgatgactccgcgccgcgatcctcgccggcgctgtgatttgcacccagtaacgcgtggataacgactcctggtgaaaagatattgccgtggatggagtcggagcactgtattgccctgtcgccgtacccacttgcccagcgacgtggtcgcacggtcatcgcc

SEQ ID NO: 55225 - DNA, 386 bp, Zea Mays
atgacatgtcctgttgtatggtattctagactttactagtttttagatgtttagttgtatgctttatgactgtcacatgtacccttttgggttcaagttgtatggcctggactgctgaaaggtattccagactttaccagttgtttgatgtttgaagtagctcaagaactatgatgtattgactttattgatgatccctagagcatattatatacactgggtatttttcacctcctgttatgttgttttctaagttgactggttgtcagttttgggtgaggctaccatccatctcattgttttgttggcctggccttttggttttgcaatctaactgttgtgcaatgttgagtttttttcatttttttcatctatgttatattggt

SEQ ID NO: 55226 - DNA, 475 bp, Zea Mays
gatgttttaggtgcgggtgaaaacaacacaacagacccctagcactacactcaaaggaaagcgcaaggtgttccatgactcttcaaagcctaggaagaaaaaggaactaagggatgagtacatgagaaggattgtcgatgcattcaagtctaggacctttagctcgaacaagtccatacatcctttgacaacgacccggtgcgcaaagagattgctgctcaattacaataagtcatccaagatgttgcgacttgcatttctttgcaactcaattgttaatagacaaacatcatcaagatgtctttgcaacacttaagaccaaagaaggaaggaacgcttggctatgcggggcttacaacaagcaagagtagtccagttacgtcttggtggtgggatggagttgaagctgtctatgtggtgtcatgggtggccactgttttgtgttgtcgttcagagtcctgttcgtcgtttaggt

SEQ ID NO: 55227 - DNA, 337 bp, Zea Mays
gacatttgctcaaataagatcaaaatgaacttaagatttatagcatattctaaattatcctgaatcaagaaaacaatatcatctacatattgtagaaatcacaacctttgtctatgatgtggggaatcagtcccacaatcagaccactctcttgtgctttttttatcagaaaagtcagcccatttgctgttatgttaaaaaggagtggggagaaaggatcccctgtctgactcctttatgagtgggaaagaatgggcccactttattattggttctgatgacaactttaccacctctaacaattctcaccacccagtctccccatttatcacgaaag

SEQ ID NO: 55228 - DNA, 630 bp, Zea Mays
tgttggtgttctgtacccaccggcgaggtggagcccttccatgtgaggcagttgcaaccagcgtatatgttacagttgcaactgaaattgtaatcgtagttgcaactgaccatgaccactcctttttattttctatgtttgtaaccagcatgatggcaaactttgcaaacctgtttatgagtagtagcaactgttatatgataataaaacaagatatattttaattatatgtcgagacgtaaacagataacacagattcatgtattattcagtgtatacatacagttgcaatcagcgcaactatgatgttgcaattggttggtcatgtgtgtccactgttttccgaacagtcacacagtcattattgagtttaacttacacagagttataaaataagataaaattgaaatattacattggagattcagtcagattcatagtcattcttaatcactttcgtcctggtaattaacatggcaagttgtcgtcctcctaattcttgcaatcaccgcgtgtgctgctgactcctccacgggtatagtgcacccagattgctgtgtctcatccccctcactctgcgcctcgtcttgattcccatctagtccttttttattgttgggcgacctcttt

SEQ ID NO: 55229 - DNA, 599 bp, Zea Mays
tgccatggcactcttcacaagggaggataagaacacaaagaatgaactggtgggcggatatggaagcagaaacaatcatgagaacaaatttatggttctcaagcggattgggcaaagtagacaattatataccattcaaggcctgacctgatgtcattcaaactttatagtgaaacaagcaacaagcgggttaatcaaatctcaaacggtcagtgcaaccgaaccatcatagtgacaaatcaagaaccgaagtgtaggaagtcagagaagtacacaaaccagataccttctgcattcatccagttttcgtacatctaaaaggagtgaacagactcaactgcaaaataccactagcactacattaccactaccactacattgccattaccactaccactacactacactactactaaactactacactactactaccactaaattatactacctacgccggtggcacattgcaccaccctcaccgctgccaccgttgtcgccctcgctgctgccatcacccttgctgcttcctcccttgctcttgccatcatcgtcgccttggtccttatcgccgtcctcgctgtcactagactcctctt

SEQ ID NO: 55230 - DNA, 758 bp, Zea Mays
tacaagttcctattgacatcaagatcctagattattggacaaacaattttgatggatcgctacaacttggtgaggctagagtaggagtgaatgttacttctcctaaggatgagaagtttaaatttgtactacaaatacagttccctacttcaaacaacattaatgagtatgaagccatattgctcagatacgagtcctaggagactcaatgcttgtgataaatcaagtcaataaatagtgaacatgcaatgaggacaaaatgatagtctactaacaagaaattcacaagctcgaagacaagttagatgacattgagattctacatattcttcgagccaaaaatgaagaagcaaacatcttggcaaaaatgggaccttgaaggccactggttacaccaagagtctttctacaagtgttgcatgcttcaaccattcagaaaaatgtagtaccttctcaaactgagtcatctagggacttagatctcaagtcatccaagactcagctagccaagaccataactatcacctcagactagcatgatcccttcatcaaataccttcatgataaagttctaccatcgaataaatcatagaaattccaagctgaatgcaagccaaaaaaccaatgtgttaattggcaatgagctatacaaaaagagtgactcagggattctaatcagatgtgtcatagccaaggaaggaaaagtattactcaaggtcttgctcctccctaagcttttgccactcaatagctagtgg

SEQ ID NO: 55231 - DNA, 502 bp, Zea Mays
cacacgcttgccccagtgattggctaagcatgtttgaatagctctctgataagtcgctccagcgtttttgaggccgaacgacatggaggtatagcagaaagcaccgaatggagtgacgaatgttgttttttcctcatcttctttcgccaggctaatctggtgatacccagagtagcaatccaagaaggacaacacagaacatccagcggtggaatctaccacttgatctatcctagggagcccgaagggatcctttggacagtgtttgttgagattcgtatagtcgacgcacatgcgccaatccactttattctttttgagtacaagaacaggattggctaaccactcgggatgtaacacctctctaataaatccagcagcgaccaagcgagccagctcaacgtgaatggcctctcttttgtcgggcgtgaaacgacgtaacttttgccgaatcggcctcgcctaggggtagaccttcagtttgtgctcggccagttctctt

SEQ ID NO: 55232 - DNA, 394 bp, Zea Mays
gtgatactaaccttatgttgaagttcaatgaagcaattagcaacttagacttgattgaaattcccctgcacgggctaacattcacatggtcgaacagacagcgggaacctcttcttcagaggctggattggtttttcatctcccaagaatggtcgatcatatacccggactcccatgctaagactatgccgcgagacatttccgatcatgttccttgtttggtttcctttaagtctagaattcctaaacctaagttattccggtttgaaaacttctggcttgaattggatggtttcatgaatcttttccaagctacatggaatgggctccctagcatccccgacaaagctaagaacctgactgccaagttcaagtatgtaaggaaagttctgaa

SEQ ID NO: 55233 - DNA, 845 bp, Zea Mays
ctctgagtcagcaaacctataaatctcgtcgaagtccaccaaggggctccgatgactcaacagagagacaaaaatcgtatcaactcctaattccatcatatcgctgcgttaaaaatgtgcaagttgtgctgcacaggcaccaaaccataatcagtgtatattcctacgctttgtaccaccaaaatataccaactctaccgatacaaccttcaggccacattcctttcccacgattgtgccaaggatgcatggtgaagccatccattcaaatccgcattgaggtcggtgtcctatgaagtcacccacccaacgtccaccctggagtcaaccagactcttcgcctccacgatcagtcgcacctaagacagacaacacaattattaggccataacaaagctacgtaactaatgtaaaaaattagttgctctatttcacgcctcattctctcccacacaacggacagaccatacggccccacatctggtcaaagagcatcccgatggactcttcagtgtcatgtccttgacattgtacactccacggtcaaaggagccgttggagacctcgaaccactcaaagtggctacagccttcatgcgcaagggcatttatactgccctcatgtgtaacaagggcaaagtaggccatcaacccctagatgactctagggaggttgacaaattgatcttgtagccaaccaaagaaacagttacctaggttacccctcctcgtcgaaaggctccgcctcaacacccaatgccttgtaggcctcgcagaatggtgcgcacatcggtttcacctcctcacaaatatcagcgggaccaactccctgaccatcctatccga

SEQ ID NO: 55234 - DNA, 629 bp, Zea Mays
taaggatcgtgttttgtaatatcagtactctctgttgctgttgaactagcatgttgccatgaagcatcaatgaatgcatgaagtcgttacttgtttcataattttactttctcgttgattaatcattgatatatccatatatgtgtttatgatggttttgacttaatgttatcccatgtgaactatgaatagaatggacccagcaaacaatgacacaaatgctcaccctgcgggaaactatgcacgtggtgaggacttttccatgcaaccactattgtggcctagggattcattcaacagcaacttgttgattctagctatatgggaaacatttcttttccaaatccatcgcaaggtccaaccacaatgtgggctccaattcaaactaggaacacaagttcccaatccaccatgatcccagcaatacaatctaccctttattggaccccttatatgaaccttgtcaacaatccatttccatatgttcattcaaatctaattgctgactcagtgcatgcttccaacactagtacaccattacagggttccaatagccttgtttcacttcctgttaacttggaatcagatgcagaacctagtgtacaagagatcaatagcccctccaaaac

SEQ ID NO: 55235 - DNA, 734 bp, Zea Mays
aaactatgttcatgatttgttgtgtgatcacaaacaactctgggagtcaaggactacgccactaccgagagctctgggagggatattgctggccaacggcggccaggcgatcgcctccatggcatggaagcttgaggggtcatgtccattagggagagtggaggagatccgatgagtccattctctagagtccagactccagactaggatagaataaggctgaggcatccagtttcatcaattcatcacgtcagttaccaggcgcacgccacatggctgattaccaaggtgggcctttcctatcctcttcacacctttcttgaggcagtgtcaatctttaaataatctcgacatatatcttctcctttcattttctatgctagagttaccttcattcgatatattttttccttttatttatctttgcttcaaacaaatatattattttctaaagtactgactttttgtgtcctgtaaaagtaaaacctatttgaatagtcaaatcttagttgtatctataacaagatgaaagtggtggcagccaagatgaaagtggtggtggccgcatcaaaggagaaggtgcaacaagacgaaccgaaaggtgaaaagatttcttttcccaaatcaacttgcatctacctgtgattgtttgtgaacaagttttttatgctaattttttatgtagctgctatctcagatgtgaaatgtgacaacccaaaagaggagggcaatgt

SEQ ID NO: 55236 - DNA, 642 bp, Zea Mays
ctcgggtggacttccgccttgcccaagcctagctctgacctcaatatccacaacggaaaggcacccaacgtcaccatatactgcagagtggatgtattacttaggggattttcccatacttaatattgtgtcaaccactacggtatgggcaactcccttgacaggggcttgggtacgtgactgaaccctccgccctggccttggctctcaccagaaatcaagtgggcacaagccaaacaacaagtacaagaccatactctagaccatattatctacaggggcacggcgacacctcctcacagtatgcagccaactccagtgctccaggcagccctccttgaggctataaatagaatagcctatggcttcaaggaggcaggcaaacacttcacgattttctcctccatcacaatattggcactagcctcaatcaagcctagggacttaggtgcaagtaatataagtctcatccccctctgttggaagtagggcctctcttgcccgaaccaggataaaaacttgtatcctcttgcatcaccatttgggttacgggcacacaaaattattttactagttggttaggccctcgggtctagacaccgataatatgctacctttatttttaggctgacaatattgttg

SEQ ID NO: 55237 - DNA, 707 bp, Zea Mays
tagaaaccgatgtggtacagagagtgtattaattattaaaaacagttatagatatctacgactatagacacaaatccatgttagcatctatcctatatggcaacaaattaaatgaataaagagaatggtgctatctatgaacctggagtaagcctatacacagaaaccgatgtggtacaaagagtgtattaagtattaaaaacaactatagatatctatgactatagacacaccattgtaaagatttactatagtatagtatatccatatttcgatgatatgaatattttactatagagggtgtgtatgtctgtatctacgctactgtggctgccctaaggctatccgcagcggttcttcctatatcatatttttatgtcgcatcatcaacattctatccactgttttttcatctcccgcaacgattccccctaaatacttccttcataccttactatatcatataataatgaatctcgtgccacggctacagtaacccgtgcggatattctaagcgacgggatgcgtctacggaggggaagcaatgcatgcatgtcgggaatagtcgcaaatagtcggttcgcgtatcacatccagacacgttggtgtcggtgtagctgttgtgctcccaccggtcccacagccacaggcggacaggtcctggactccttgctcgcccagcggacaaccccacaaaaccctatcac

SEQ ID NO: 55238 - DNA, 1201 bp, Zea Mays
ttcaagtctctgtggtgcgatatttgtcgcaaagaaactcatgtgactgctcgttgtgtccttcccaaacaaaacaagtcttgcatgcctattgttggtatggcagctgacgggttaggattttactcttcccattttgtgaaacccctatctagaaaaccaaaaaggagcttcatcagtttggtgaaggttgttgaggggctgatttctgctgaagaccttgagaaggattttggttttcattttccgtggggcaaaacttgaaaagcaaccaagtgccatgtcgggttcttgatgcaattcccttctcaagagaaacttgatgagatgattaatttccctgaacttaaaatgaaaatgtccagggcaaaaatttatgtctcttattggagctcacaggctaaacctaaatccaagcttcattatgtgtagattgtggctgaaaatgtcgctgaggaacttcaaaactatcaagctatttgtgagctgggatcaacaattgggactgttgaagaggtggatatcttatctttagattctaaagatattgtgagattcaaggtacacgtcaaaagtgttgctatgattcctccaattatagaggtaggtgttaaaccttttctctatgacatatttttcaagattgatgatatcactgatgagggatggaatgatgagtctataaatcttggcaaaagagcatcggtggacaggcaaggtcttgatgacctttcttatgaaaaaactggcaaaaaagctagaaatgtaggggacaagtctgttaaagaagagttgagacttgaaaacattggggatatgatgtctcaaggcaaatcttctggtcgggggcctgacttgggtgataacaatgaaaacctgaacccggtatctgaagataaaggttatgacaataatcctataaatgaagatgaagagtttcatgagagtgaagatgacctcctgagttctcaagatttggaagaatttgccaaagatgatgaggggtgtttaccttcaagccaagaaaaaatcaacaagtctcctttgggtgctcaagctaaaggctctggaaaagctaaagctgaaaaacaagtaatgaatatggaagtggagcatggtgaaggcattaggaggaggagcagacttgaatccaatgacgacatgaagattgctgacaaagctgcagcgagagctatggcta

SEQ ID NO: 55239 - DNA, 352 bp, Zea Mays
aagagccggctgcaatgccgaagactgacaaaattgaagaaccgagaatcaaagagacgaaaacattagaagttctaagccattcggcaggagtggaggtgccgaagacacaaaaaggtctagcagcgacccccaagataaaaaggatggctagtgtactagatgtgctggagacaataaaagcttcaagctctactccagggaaaattgctaaggcttcgaaggcgcagattgaaaccgaggcaaaggtaaccgaagccgaagctacaatgggccaggccgatgccgaagctgggccttcagagcctgtcaaggagaaatcctcagaaactggagaaaaggcaacgagaga

SEQ ID NO: 55240 - DNA, 642 bp, Zea Mays
cgcggtatgtacatggctccaagtgctgccagtggggcccacataccagccatacatctccttctcacctcgctgtgccgctgacaatgtggggcccagtcgtcaggttcatcttccacccggtaaacagactccgccgaacggcgcgtgtggaatccggataagattgcccaccgccccaactccagcctccctccaatttcccccatccaacaaactctcactgccggtgggcccctgcggcaggtccatcttctccgtatcccaacaaacttgccacagccgacgcatccgcgaccgcggggcggaactccaccgatccgagtgcaacaggatcgcaacaacctgcagtgtcgccaggacttctccctcgcgaaggctgcgtgtaccaaattagagttcgttgaagaccttccgtgatctctggcgctggcccatggtggaggatgtcatcctcgcctccggggtataaaaatcgtagaccagctctcccggtttcccattgcaagctcccaccgtcggccgagctacttcgtctcgccctctgctcgaccgtgcccaggttcggggatttccgtaccgatgcctaggcatcgccgtagtgccacatcgcgtcgcgggccgccgtacgccgtgaccctg

SEQ ID NO: 55241 - DNA, 742 bp, Zea Mays
gaagaggagggggaggagaagacagagagggagagggagagggagagggaaggggagagggaaaggggagttcacctcggggtccaaatccggcgatcaccgtctccaaaacctagggcaccataaatgtccgaacttcaagctcgtgactttcattttgcgattattggttcagtctcgattgcatttatcaatgacccgataagagagcttcaagcactcatgcctaggacattgttttggatccctttgcaatctatagaggcaagataggtgtcgacacatttgtctcccacatttaataatgatcttcgtcatttcccaaaacgagagattcattgttctgtattcccagcacaatgatattgtgcgcattgctaggaatttcatcatcaagatgaacctcttcatgagacaaatcaccatcaaggtgaattaatcggaggagagttatcacagaccatgtgaatctacaatcagaacatatgctttgactaaggctgatggatcatattcgcaggcgtccccgcggaatagatcaaatgccaataagtcaaatgtggatatgatattaatcccgggtacatccacatctacatcaggtagaagcattcaaaccaatatggttaatcctcaacgatttctggcaaactccatatacacaggggtacacactaaacgacaggttcagtttggctttcgtgcgttttatagaatattgaggcattacacttagatgggc

SEQ ID NO: 55242 - DNA, 775 bp, Zea Mays
cgagggtcatagcttcgtatagcttagccttcgaagaaccttcgtgtcgccttgcattaaggagccaaaggtatgcttgtaactcatctaatgtaagaagaaattgaatgaaaatgctacgacaaagaagatgagtttcgtactcaatggtgtaatgttgtttcattcttcattgtttcgtttacacttctttatgaagacctttgtccttcagattaacactaagtcaaggatgaagatctactttcttaacttgtgttgccttgattttcaacaccttcatgggattggaatcaagtatccaacattggcgcccacctctggtgattcaacgaccacatcagcatacactatgccgccgaagaaaacaacgacaactagctctatccttgcacccattgatcccaatcaagggaacgaagctctcataatagaagcacggaatcaaaagaagaaggccactagcccatcaccccgagaagaggagcttaatgaggagatcagcaaccttgaactaatccatcagcatgtcgagaagcgcaaggagaaaatgcttcacctttctaagcttcagaggaagattaacgaagcaactgaagagatgtgcaacatcgaagagcacgaaaacatgtacaactacagggaccaagaccatgatggtcacaatcatgacaacctttgtcatgaagaattcaacgttcaagatttcctctatgacaaagcttcctcattgacaccagaattacatgctacaccatggccaccactgtacatg

SEQ ID NO: 55243 - DNA, 428 bp, Zea Mays
aaagaaaggctctggtaccattggatctcctttagatggctcggatctattgccacgtatcgcttcggataagaactaataggaacccttagatcgtgatcggacggatccgtccgtgcgtgctcgtttaaaatctccgtcgtcgatgggggatccatcagccgccgtggcgtaccatttcggggtttacatagtttaatctgaaccgctgatttgggatcgtgtggatctgagcgcaggataccccttcactggttctttttacatataagcccatgcagaatatagaaatcaacccgccgtccacgccagggactctctgagtcttagaaacatttacactgtagcccctgtactcttcactatttgatgcccaatccagtgagtattgaaaatcagaaattaatatcagaaattagttttaatgc

SEQ ID NO: 55244 - DNA, 350 bp, Zea Mays
caaacctggcctcctcaccgggcgtgaagactgcacgaacgtcgtcgagtcgtggacctgggcgtgcttcaaagagcgccgcggtttggccttgccatcttgatcgaccggtaaaattctttccaccctgttcgcattaacaccccctccacgtagcactcttcagatccgggttttgggaaccagagagggaaactatgcatctccggtgaacttcattgtcgtgagcttggcagcgccgccgcgcgcgggctgcttgatggggttgtagctggagaaaggaacagtggtcgtcggataggcgatggatggacgagatttgggccccttcgcgcgatcggatttgggct

SEQ ID NO: 55245 - DNA, 1026 bp, Zea Mays
cgaggagggcccatggaagctccccacacacgcaggtgttcccaagacccaacccatcgaacacaagctccatggtgttcgaggttgcaaacaacaacctctgttgggcgttgattacccttcgagccagacgtgcaatggagctcaggcggtttaggtcggcctcgaaccttacacccagaaggtagcatgagaacgaactcttcctttgtcacagggttacatttatctatgtcccaatacggtaaggtgggcctccatagacccagtttccggtgccatccgaggcttggccttgtcaaagccgcccttacgaacacggacctaggtgatacatgtatcccactgcgaaggaagagtcagtcctcattcatcggtttcttttcctttttatgcatgttgattgcttttaccccttttagggatctaaacttctgttgtactcgagaaaaccaaataatatagtctattattgcttctggtttgggacatcatttgacaatgaataaggatctgatcaccgaatgtttagtacaggaaaagggccacattctcagggatggtccagggtcgtgtagccacttagcctggtcatgcaccctaagccaacgcgctccaccaccctagaacagttgaccgagtaacttagaatgaatactcagaggtccggacctcatacaaaccaaggggatgctccaaactaggatcagctagaataaacactattattggaagattaattatagcaacacccgaagcaagatcagatttctaattacattcatgaaacctggattatggttccaccttgtcactcggtttcgggaccccccttgtaacgggtaaggattaggtcacgaagggctaggtccaggggaaggaacacgttctcaggggtggttcggagccgtttaccgcttagcctggtcctgcaccctaagcccacacagaattagaggctaatgctaaacctcagctatattccttggtaagccttacgttgtactttttctactatgtaccaac

SEQ ID NO: 55246 - DNA, 673 bp, Zea Mays
ccggaagctgctagacgctggcttcattgaagaggttcatcacccagtgtggctggccaacccagtcattgtccccgaagcgaatgggaagcttcgaatgtgcatcgactacaccagcctaaacaaggcctgtcccaaggacccgtatccacttccatgtatagatcaaatcgtggattctacctccaggtgcgacctattgtcgttcctagatgcttactctggtttccatcaaatccagatgtctagcgaagataggaagcataccgcttttgtaacagtggatgggctttactgctatgttgttatgccttatggtctgaaaaacgccttgccgacatttgtgtaggcgatgagtaagactttcggggacctaattagggacaaagtggaagtctacgtcgatgacatcgtggtcaagactaagagagggtcgaccctagtggaagacttaaccctggtcttggacaagctacgggcaacccgcacaaagctgaacccagacaaatgcgtctttggtgtctccactgggaagttgttggggttcctggtgtcgtaccggggcattgaagcaaacccggagaagatcaaagcgattgaggcaatgaggcctccggcccgtatcaaggacgtccagaagcttacggggtcattagccgcccttagccgcttc

SEQ ID NO: 55247 - DNA, 415 bp, Zea Mays
ttcacatacacctagttttaaattattaatcaagagaataatggataaatgtcgattttacccaacctcagcgagtgcagtatagcggagcttctttacagtattggattggaaccaccatgataactaagcaacatttcacacaaaggataaggctaaggggatcggatcaccttgaactgcaccacggtacctgaaacgacctgcaccacatcgagcgcttctctttagatatgattcagtgggatctactaggaactgcaagtacctggtatggcttcccttcagaggcatcgtcattcttatacccaagcagtggaggatttgggtgcaggttggtcggtggctgcaggatgcgtgggtcgacgtcatctccatggaaggcagggcatggatagcggtgaggatgagggga

SEQ ID NO: 55248 - DNA, 494 bp, Zea Mays
tgacaccccagtgtcacctagggtttctcttaaaaagccaaaccaagaaccattattttatgtgaaccaaagtgagcatgagcatcaaaataacttaagtaagaaagagttcaccaagtatatacttaaatgtgtcatgatcaaaacaattgagacttttgaaagataagaatgtacaaccctaattcaaaaccctaagtaagccccatgaacaaaattcaagaaagtaagaaagagggaatgaaaggtttaaaattttgagttgagccaattatataagttaaagtatatttgttaagcaacaagaaagattgagaaggcttaaccaaaataactcaaataaatccccaaatcagcccttgatcaatgaacccttagagaaattcagatttctgaatttctgaatttcagacctcttctcaaagatcatctgtgttctctgcttttccaaactcaaagccagaagatccaaatatcgaagtcgtgccaaatta

SEQ ID NO: 55249 - DNA, 712 bp, Zea Mays
ctgaactgaacaagaatccaggttcagcgcatctcgccgccggtgaactcgcgccacgatctacgccggcgttgcgattcgtgcctagtggtgcgcggatatctacgtgaggtgaaagatcttgcgcagaggatgaacttggggcactgttactgctcagtcgtcgtacccacttgaacggcaatgtggtcgcgcgaccgccgttgtcgtgcccgccgttcacctcggtcacaacacgccttaagccatttcaccacgtcatcgcgggttgtgaagactaagttgtgaccgtcgtaaaccctttgcctagtaaatgccacgatacgtgactccggtgactcaccttgctccggcctccagcatgcctttcccaaattcggagccacggcttgcagacgctataaattgagtgtgcgacctgctccgttagcatgttatgatgccaggacaccaactctcgccctcgattagccactgtagaccgcgaatttgggtttcccccaaatcggccaaaattgccgtcgtgaggaatgtcgccgtggccagccgatctcaggtccattcatcccattctgtgccatgttttagcatccttgactgttaacatttctcatcggcccaaccgattgagcgacaccgtgttctagtatcaagaacatcatctcgccaccacggaacacccccgagagcacgctcacgccgactcactctt

SEQ ID NO: 55250 - DNA, 467 bp, Zea Mays
gtgatcaacaacattaatgtttcatgatgttctatattgtactcatgcataaatttaaatggaggtagccaattctatagaagaatcaagttaacaacaatagcattgttgttggaaatccctgcgagatcaattgcccctgacgaaacaacctaagaactagatgtgctactgaatgtgtatagactagaacaataccgtactcaactccaaaccacactctctccccaaaaccgatctacactgaattgcatgtcttggtgcatccagacaaccaaccaaattacaacactgatctgcaccgatctgcactgatgttgaagtaccattacacattggacaagcctatttaacatgttgctccaagccaaaccagagttgtgcctcttctctaaccatccccacccaaactacatcaacctagatacaaaaaccgatccacgccatccggtttgacccaaaccatt

SEQ ID NO: 55251 - DNA, 574 bp, Zea Mays
caaaatttcggctcaatcggagtctgtttggattgattttgtattctagaagactagaactttgattcgagatgctaaaagcaacatgagtaaggggcacattgtcgggtcgttctagacttttcaatgtccattctgcgactcgcttgttttgtttgactactgtatgtcacatgaacttttcatatctcttgggtgttatttggattttaggggtttggggtgtgacattgagaaacaagacgattgtccgagcgcaaaattttattggctctcactcactcatatctagtgcttgtttgggagggctcttgagccgctctggcaccagctccttaccagagccctcccaaacggcgtctggaaaatggctccgtccaaggagtgcgagccggttttcacctcaggagccagatcctagaattctagctctcgtagtgctccacgccttcactcccacgtgcgttctttgaccagcgcgtctccggatcagcgttgccgccaatcactggccacgagcatcccgagtccccgagcaacgagcatgcctcctctgatctcaaacccaaggctt

SEQ ID NO: 55252 - DNA, 1271 bp, Zea Mays
cgcgggacccggtctctgccgtttgggccccatcgcgcagaagcctccttccaccatgaatgcagggagatgaacgctgtgaaggccatggagatcggaatgccgtttgatgcacaaccaaatccgccgccgcgacggattgaccgcgcccatgcgcgtgggctcttggcgcccgggatcctcggggtaggggcgaatcctgccctgggtataaaaaaaatcaaagtcaggtgccctcctcgccataagtctcgcggccatgaacggcttcgactgagcttcgcgcgattcttcaggatccgataaatcctcgctgccatggactcgttacccgccccttaaagatgaccatcgcttcttccccctcgcatctccatagcaacctaagtactcgaaacacagagaaacatgggagagagagtgcggcgcgggcgggctcggtccgccgtgtgttgcgtggccacgccgtcgattgagcttggagggttgccggggaggaccgtcttgaccgcccgagcgtgggaagggcaccatcttccactgcggggcatcgactgcgtgtgaattgctcaccggatttcttcatccgcgcggggccgccatgcaccgtggccgaagcttgctgctgcgcgattcacagtaaggtattcctgattctattctacctatactccgcttcgtctagcaagtttcagcgcttggaatagggcaccgaggtggagagtagcaccggtcgtcgacaatggcgccgccggatttgggggtgttcctgtagaaacccggtggggttgtgtgagatattttctagccgtcgaactcacgatgagcgatctgtatgggatcggcgtaccgatcgggtgtggggtggctgtggccgttgatcttctgatgaacgcgccagattaaatctagataacgtttcgcccacgactgttagatctcgatcgggtggttgaggttagttagtgcaggatgagatctatgccgttggatctttatccatcggtggtggttgcatacccgttcagtagagttgtcggtctaatctgggcgcttggctgaggatccaacgatggagaattgcctataccccttcgccgtgcctatttgttaaagagcccctggaatatctgtgaatcaacccgctgtccactcgtttgggcgctgagtctagaaagttttgcgtagtggcccttgtcttatctgataattgaggcccagtccagagcctatttaaactgtataaatgaattagaaattgaatatttaat

SEQ ID NO: 55253 - DNA, 596 bp, Zea Mays
gaggccgtggaggtcatatcctccatgtcggtggaaggggagacgcccccgcctggctccgcgtgagcgaccttcttccctttttttcttcgcttggaggcgcctcaggtgcgccgccaaggtctcccctctatgttcctttttcgcttccgctccgccttgatgatgacaccctcaggaaggggtggaaggcagggcgctaggggcccgatcccatgcagagccgcggacgaacatcaccgatgaagaaggccacaggaacaaaaaaaatacaaggaagaagaaactcaccaaactgctcgcgactcctttggagagagggaggggtgaatcctcgtccataaaggaccctaacgacaacgtcatgatgaccttgacccaggcctcgatctcagtcagcgcaagtggttcagaggaatggcggtcaaggtcatttacaccggaattcctgtgcatcggcttctggcaggccatcaaaggctgaaccccacgatgcatgaagacgcgcaccagccgcgcgccggtaaggccttgttgctttagtgttttgatcgccgtcagaaggtgctccacctcgctcttgaaggacgcctcca

SEQ ID NO: 55254 - DNA, 541 bp, Zea Mays
gggagatgaaaaggtaggaaataaaatattgacaacgtgactagggatgaaaacggacggaaaaactcctctcccgtttccgtatccgcattttatcatcggaaacaggatcgaatctggaatagtcaggaacggaaacgggagcgggataaacggaattgcgaaaacgaacggaaacggaaatactaacggaaactcataatttaatagaaatagaaatgttattgatgtttgactagtgattgattggcaaaacaataatataaaacaaatagatatagagaggcaacattctattgttgtttggttgctaaatatgtacatttagctacatttgatgttgtttaagactttagatcacttgtcatttgaaaagtgccggtggttacaatggtcagctgtgctataatttgtcacctaaattcacgacgatttagtttatatactaatgcatattaggctcgtcccatatttatcaaatacggaataaatacgtgttcaatccggaaaaaataggatcccgcaaaaaggacggaataag

SEQ ID NO: 55255 - DNA, 590 bp, Zea Mays
agagagtggatttgggggaaaacaaaattggggcgctacggtggatgatcggaggcgagggctggtgctctaggtttgtaacaagtagatagaacaggccgaggcatcaatttatagaggacgactgcgaggagggcgaatttggacggggaagtgctcgcattaagaagggggaggagtcaccaaaggccgctaatgtggcgctcacaggctaactatctacgacggtcactaccgagtccttacagcttgcgacgatgtggtgaatcgactacggcgtggcacactcgcggtgaacggcgatctccatggcaatgatcgtccggccacgtcgcagcgcaagtgggtacggtgatagggcagccacaatgcaccgacttcatcccttgcatgagatcttttaccctgagtcattatccgcgtgccattgggcacgaatcacagcgccagcgaggatcgcggcgcgggatcactagcggtggtgcactgaacctggcgatctgattcagttactgtaccatcgtgctcttccttagttgttctaacaaagcgacttgtagtgcttggttcttcaatttttgtgtggcaac

SEQ ID NO: 55256 - DNA, 726 bp, Zea Mays
ggcctatcagaccttgaagatagactttgacaagaagctaaaggcgctcgcccccaaaaagaagatccagaagaagaccactaaccaaggatgccaaacagagaagaagaagaagaaggcccctctagccctacctccccccagaatagatgactggtctaacgaagaagatgtatccctagccagcctcgacgaccttctcaaggcatttggggacaccttagacaaggaactcgctagtacctcgaagaacgctctcgtgtagtctccccctgtagtagtcttatgcttgtaatgtgatggtgtaatgaataaaataacttggttgaaaacaatttgcatgtgcatgatagtgactctcttccctggcagatggcttcggataaaaccacgcctaccgcctcagggattggagcaggtttcccccgaagagctgaaggggaagtcgttagagaggaaagtgaaacccacctccccgcacctccacccctacccttagacctagcccaagttctagccaatcagacccgactcatcgaggtcctcacttgaaatctggaaaatcaacggccaaatggtggaagaccgcaagatagaatgggggactttatgagactcaaacctcccacgttcgccagatcaagcaaccccctcgatgcagacgattggatgcgcacgatcaaaaggaaactggaagccattggttgcccagaaaatcagcgtgtt

SEQ ID NO: 55257 - DNA, 732 bp, Zea Mays
gcggacctgagacgcgctggccacagtgaggtcaaaccgagcggtgttcttgagtgatttgggggaaatgagtgattcgcggtctctggtggacaattgaagacaagcgtgggtgctatggatgggtgattacccgacggagctcgcagtgcgctcaatttataacgggcttaggcggtggccggggatttggatgaagacgtgcggcggccggagaattaggaggtcactagcgtagttgattcgtggagtataccttggcggactcaccggcgatgatgagacggctaacgtgagtcacggcggtgcggtgaatgtgccaaggaacgtggcgcaaggccatgaagcggctgtctccggtgaactcatccgaatcatccatggtctgctcgggtacggtggccggagtaaaataatggccggagtttttccacggcgtgataattactgacccccggcactatccaactgatctgagagcgaatcacggcggcgatagcacgaatccgcgtgcggctcgtcgacggcgagggggctgaaattgggattatgtctgttactgtaccatgggaagcatttgacagagcgcctgacagaccactttgcagggcttagatcttaggtttttacataataacatgttgaactgccagtagcaaagttgttgtccgatgatcccgctataatttttttataacaatcatagccaaataatgactagatcatgatcga

SEQ ID NO: 55258 - DNA, 394 bp, Zea Mays
tagccaccgttgatctccagatcaatgggctccatgcttcttcaacctcccgatggtcaagcagggaggcggcgctcctagcaaccacggtcgtgacatcgccgccgcacccaaccaacagaggaagaaggggggatcagagacactgagaccggccgagtggcacaggcagggagcgacgacgacggtggctccttccctgtacatcggcgagcagtagattccaaggctccctgcacccatattgcttccacaatattagccatggcgcggctcaatcctgcaccggaaaccccccgctcacgctaggaaaacgaggaacgacatgggtgagcgttcggccatggccatactctacgacacggcgtggatcattttgcagcgcagctttctc

SEQ ID NO: 55259 - DNA, 571 bp, Zea Mays
cgccgggatcgtcgccgccgttaagattcgcgctcactggtaaccggatagcgcttcggggcaaaagatcttcgcctggggataactccggcagctggccgccgtaccccccatgccttacggtcggcgcagatcagttcatcggcaatggctgcccgttggtcgcctgccacgtgctaaagcgttagaccacgtcgctgtaagtcgcgtctcacatgcacggtgatcgccggagggagcaccacggtgaaaaccactaaacgcttgcgccagtgctcctctcctcctccgaccgccgggcgtctcgcccaaattcatcagtcgtcgcttaacaatcctataaagtgatggtcagggctgttgcgccatgtaatcacgaagccaacgcaccagctattgcttcaaatcactcaccagagaccacgaattccttacttcccccaaaccggttcatcccaccgcaagaacaccctcgtcgtggctagcgcaattcaggttagttcttaccctcttctccctcgtttaagcagtctcatgcgtctgtgatgctcactgacccacccaatcgaat

SEQ ID NO: 55260 - DNA, 568 bp, Zea Mays
ggaacatgtcggaaggtattcaagcgaagactaaggagcgtgaagactgaagaatgagctccactatagagggagcgcacagagtgggtgaaggcctaggtgcaccctccatctcggtgggtcagaacgaagaccaccgaggatttcgaaggctgagcatgtggaacgcgaagaccatgtcttgttacccgctcgttattgtaataaggggcccacgtataaacgacccatgttacagggtcccacttgtaagctactatgagggcagagttgttagtgtgtctgtctgtgcttgtaattaataatgctgtaatgacccaccgtaaccccccaagggggaatattccagggttaacgtaggtaactgagggcacaatcgtctttgacagggcagagttgtccctcggttacatataaataccacgtacaacaccattgcgggggacagaaaaaacattgttgcccaaatactctgcgttaaacggtatcaaactatttcttgttctcccactgtttgagctaggtttaccacgagttggcaagttccaacatttggcgcccaccgttc

SEQ ID NO: 55261 - DNA, 778 bp, Zea Mays
tgacaatgtccaccattgaccatgcattggaggaggttattctcgaagtcctcttgttggagttttctgaacctggaagtaccgacatccgtatagaggtcccggaagacgcacccttcgctagttttctggctgggcaagaaataacctcgtagtttgccatgcatctccaacctttaggggtgctttatttcgtgagaatgctccgatccccgagggtacaactgaggattgtccagcacttgagggtgtgactaaagataatctagcccccgagggtgctactgaagatgatccagcccccgagggtcctgaggctggttcttcctcggctgtctccatgaatgttcatgttgtatcaccgctggttcgatctaaggaggttgtggtgatgagtcctagttttcctgctgtccctgctggcctggcaaccttagaggttggtgatccgggcactaagggtccgatttctgctactacagccgagatcccgctgggcatcacgcttagcatggattacaatcttcctttggtgttcaaacctactcctgatactgcttaagtcagtgctttaccatctgatagtatctcaatgcctccggccttgggatttcctttgttcctttccaaccttcaggtgagtgtgtccttactatgctctacccttatcaattgatggcttccttgttaacttttatatttgcagagtattctagactcagtatcggcttagttgaagtcgtgtggcatttccattcctgattagattttatctctg

SEQ ID NO: 55262 - DNA, 857 bp, Zea Mays
gtcttcgaatgaggatttggattatttcgcggcattggatgtggctgaggtggagacttctccgcgtgttatggatgctattcccggtccgagtgctgggtgtaggcggcgaagggtggtggcgaagcgtagggtgagtgaggttgagggtggtcgtcttcgtgtggacagggctagcaagcgggaattgttggcctcgccggctggggtgagcgtaggtgagggggagttgcgaaatctttttgagggtgaagagctgaggataatgctgtttaactatagggagatgggtatcatcccgaaagttgaaccaatgtaatgtgtggtgccctcgatgcacgtatgtaactgtaatttgtatgatgagtctgtgtgccttcgctgatccagccgtgcctgtgggggacttgtgcatttgatctagcgcgtttattatgccggtccggctgcacctgtaatcggtctttgcgcggatagtttttcgacgaagattttcgcacggatgtgccttcgattttgcgcacttgttgtgctagtccggctgcacccttgggtgacttttgcacggatagtcttttgaagaagacttcgattttgcgcacttgttgtgctagtccggctgcacccttaggcgactttagcacggatagtcttttgatgaagacttcaattttgcgcacttgttgtgctagtccggctgcacccttaggcgacttttgcacggatagtcttttgaagaagacttcgattttgcgcacttgttgtgctagtccggctgcacctttaggcgacttttgcgcggagtgtcgcacgcgagggtagccagcgctgcccctcgcggtgactttgtattggtc

SEQ ID NO: 55263 - DNA, 640 bp, Zea Mays
gggaaattggagagttgtggtggctaatcggaggcaggagcgggtgctcaggcttggtgatgacctaacgcagcagaccgtgctgtcaatttatagcggcgctaagcggtggccagtgaatttggtttggcgtggtggcggttggagaagaaaggagtcactggcgcacgagattagtggctgcaaccgtggcaacctcaccagcgatctctggataggtcagtacgagtcacgacggtgtggttaaagtgctgaggcacgtggcacaataccgtgaggtgtctaactccggcgagggtcgattcaaggcgatcggggtagagcggacacggcggccggacaaacagtggcttaagctcatccgggggggagaagatcttttcaccgcggaacgttatccgggcgccggtgagcacgaatcacctcaccggtgtgaatccacgcgtggggtcgccggcggccggttcactgaaccaatagattcttctggtcactgtaccatcagattcttcttcagtcagtctgacagaccatgtttggggcgaatttcctcccgattttatatggcaactagaccaatgctctgcagcaaagttgtagcctaatagaccaactctaactttgctacattgtgcaccca

SEQ ID NO: 55264 - DNA, 1335 bp, Zea Mays
atggagatgtttgacaccttcggcaattccttcgcgtagggtggacttagtaccttcaactcttctgctgttttctccattttcggctcctcagtcacacttgttctagcttcgacgggcatagagcgacttggctcagacatagaagcagacccttcaattagcttcgacacctcggccgtctcaatgcgcctgggtcgatgcgtcaaaactttaaccttttttgaccttgatgtaccagaagtcatcgaggtagcaactttcctctttttcccttgtttccgcgagggataacagtagtccgggtacacaaacccaattacaccaaacactctatttaatctctttttgccacgagccccgaaggtagttgtcatggcttcatctttggcctttgactatgctccaagcagctcgtcactagtcgcttctatggaatttagccagtcatcattcggttcatcaaattggctcctatacctgaaggtatacttcaggtagactaaaccaccttggctagagccagcagcagtctccttcggcatttcccacccatctgcaagtggccacactctataagcaatgtgctcctgcaccaagtcccttgtgcctatgtaagtacacactgtattgaaagccgcctgacatgtttgtatatcattcccaagggcagtggctggcctcctaatgccgaagtgagaccatatagggcgttgaataatctcttttacatcctccctctgacttaggtcattcttcacgtaaaaccatccctgcatccaagagcccgaccatctcttccgaaatatgggaattgggtagctcttctcagacagaggcacaaaactataacaaccaaagttgttgtgatactactcctttccgatagccttcgtatcataagacaactcatggatgttgcaaaagcatcttgcatcttgttccagtccttggctcctcatggcccatataaagatccccactttaatgatggcttcgggagtaagttgatgaaggtaaatttcaaaggtttttagaacctcgaccaacaatttgtccagggggaaccgaagctcggctttcatgaagcttctgtaaaccaccacttcgtcagctttgggaagaggaacattattatcccctctggccctcttgattgagatatcacgaaaatacctccccctcattgcatcgatctgcccttgtttaatagttgattttccgaagacaacatgacttggtctccatggccgatcttcggcatcttcatttccactttccacatcgaagctttcactattgctagagtttttagaaatcctagctaacatctca

SEQ ID NO: 55265 - DNA, 569 bp, Zea Mays
ggaacggggtcacctcacaacaccagagaagaggactgaaggaaggaggaagatggggctggaggatgtgaaactaaaaatggggaaaggaggaggggagtggaaccaaacgaacttacaaactccacaaagcctagctcaggacacattggagggcaacctggattcaaaacacatatgggatgatggcctcatccgcacccttgtgaacttccatggccttcgtgagccagcgagcgatcttcacgttattaagaagtggagcactcagccaactgccatccgatggggccttggtagtcatcgtaaatagtggcaatcgtctgccaatgagaggagccacccccatggaggtaattcccaatcttctcgccagcgtgaccccgcgatcgcgaagaatggacagcgccgcaatggccccggtcgtccttttctccccttccttcgggacaccccatgctcaagtttgaggggccttcgagggtgcctcaggaagaatagcaggaaggccatggacggcggcggatggagcctcatggttgcgcaggtaaaaccattggttgtgccac

SEQ ID NO: 55266 - DNA, 982 bp, Zea Mays
ttaatataaaaaattatgtaatgtcagagagataaaaaaatatggtgttgttctacctctttccataagcgttcaaacaatgtacgcctcattcgaaacctgcatttaaagattataagacgcatgcgtacactagtttttaaaaaaaatgcaaaaaaatatgtgtaatatatacataccgatgtcgaaaatagcaatgtccgtatgtaggattctctgaaaaataattttgatatagcctatgatgccctgctattctgtctcgccgaaggactcgatgcccttgaatagaaccacgatatttcttgtcatcatcagattcattcgtattcgtggccacatgcgttacagcgagaaaataatcatcatcttcctcatctaatgatgattccaatactagttgcattgaaaggcttagtcgagccataaccaatctagacgtcaaacaattgttttatttataaaattcctgattacggtcaagctaagatgcaaaaacttatatcacggtggagagaaaaaaccatacttgaaaacttgctgtcgtgatgcaatgatttgtcgatcgcgcatgaaatcccacgcggctggcacctggtaacggctggtggcggctgagtacagctcccagagagttgcagcgtaaaagtcaaaaccaactatatgccgtatgcaacaaatgggatgcgatttaggcaaaatgggccagcaatttttaaaagttagcccagttttatttcagttttttattttgaggaaactgttggagttaccatttatttcacccctacaaaacgttcaatatgccctccataatcagtttttggggattttttttttgcatttcctcttggagatgctcttaataaacgacagtcacggaaatattattattgtattgtataaatctgatgaaacgctttgtctaaaagtgaaaacgacgacataaaatgacgtcaacaatgcaaaggcagcatatggc

SEQ ID NO: 55267 - DNA, 582 bp, Zea Mays
cgagggtttagagtggttcgggccgtcggagcataataccctactccactatatgttggattgctgtggaagcttgagagtctgagtgaacttgtgttgtaacgtcgcatgcctccccctttatagctgaagggggacatgcacaaaggtactgagccccgacatgtgggcccagggacaaaatgtatatagcacttggagctactaatgttcgctgctggggtaatcttctcgtgccctgacacccgagatctgcgtatcctcgacgtgccggggaagcttcttgtacaagggacgatatccatagtgcgctgtatagcacgggcgcactgtttggtaacagacctaacaggcgcgccgcctgcaaggttaccctgacgccatctgccagcagagtggacaggacacattaaatgctgagagggcacatcgtctgtcagcatggtggcaggtggtgcgtcctctccgtattaaatgcagagactgtgcggctttaggggccttacatcaggctccgcccattggcttatgtcacgggtcacaagccacgcggcagcagcgggtctccgcctgagcggggag

SEQ ID NO: 55268 - DNA, 661 bp, Zea Mays
cgagtccagatgatgcgaaaatagatgttgttttcgatatgttggctggagagtcttctgactcggcccctgttgaaacgatggccgttacggttataccagagctcgacaatacagtgaacacccgaaagcctgatggtactcgcccgaagggtcgtcgctaggtcagccgtccaactgcgcctgctgaggagaagaagaagaaaaagagacgacttcagcgactgtcatgcttagactaggatgctggaccttctgctcctttttgtgaagaagtactagcagaggtctttactgaagttgatcccactggtgatgtacctgttgaagctgaccccaatgggtgtgatcctgttgagactgaccccaatgggtgtaaccctattgaagctgaacccaatgggtgtgattctgttgagactggccctaatgggtgttactctgttgaagctgaccccaatgggtgtgatcgtgcaccatctcttgtccgtatttttgacgaggatgaagaagaggaagaggaagaagaagaagttccgctaattcgtaagaatagccggcgttatagaggtagtaggggggatagtgatattccttctccagctctgtctgctcttgttagccttcaagaattatccataacaaattttgatcaggccct

SEQ ID NO: 55269 - DNA, 945 bp, Zea Mays
tattcctcgtgacacgagtcagggtatcaagaatcttgatggggtactcagcataagtcaggtcatcttgaacactaaggtcctccattggtagctgctctttaggtaccctgagacatttcttcagctgagatacatgaaagacatcatgaacatccgcgagatgatccggtaactccaattgatatgccacctctcccactcgctttaaaatcaagaagggtccaataaagcgaggggacaacttccctttgactttaaatcttctcatatcccggagtggtgacaccttcaaatagacataatcaccctccttaaactctagcagtcttctctgggtatcagcatagcttttctgtcttgactgcgcagttctcaaattctcccttatttgatggacttgttcttctttttcttgtataatctcaggcccaaacaactgcatttcaccagtttgatcccaatacagtggagtcctgcactttctgctatacaaagcctcaaacggtgacatcttcaaactggccagatagctattattatatgagaactccgcacaagctctgaacatatcttccagcacttggttggtcctctcagtctgcccatcagtctgaggatggtaagtcgaactaaaattcaatcttgtatccaaggactcgtgcaacttcttccaataccgagaggtaaactgtgatccccggtctgacataatcttctttggcacaccatgtaagtagacaatccgtgccatgtacaactctgccaacttggcacctgaatatgtggtcttcactggaataaagtgggctactttagttagcctgttcacaatcacccatatagaatcatatccagcagatgtgcggggcaatctagttatgaaatccataccaatctcttcccacttccactcaggtatcttcagttgatgcagtagtccag

SEQ ID NO: 55270 - DNA, 686 bp, Zea Mays
caggtgccgagcaagaagcagcgctagtcctgctccctcgcatcctgtcctgtgcccaccaggtccttagtgacactggggcggcaatcttgcgggagtgggaggcgctagaggctgagcaccaacgcctcagcgactggcgcacccaacaggaggagcacaccaagtcggcgtctcgatagttcctctccaagcggggccgcaaggagtacaagagggacctccagaaagtgtgcgccagggagctggaggcgtcctggagggagaagaaggtgaccaggagggaggaggccgtgtctcagcgggaggccctcgcagcagagttctgggccaagctgagtgccctggaccagaccctggaagcccagcgggtccagcagaccaaggctgtggagaggctgcaaaagtggcagcaggagctcaagggcaaggccagcgatgccgccctcgccaaggagaaacttaaagcgaaggagcagtccttggataggcgggagacggacctcgccaggcaggagatggatctcaccttccgggaagaaatgctcacccggcaaggcgagatgctggctgagcacgagcttgaagcagaagagagggagaggaagttggaggagcggatctgccagttcaacgcggcccaggcggcaccgggcccacaggcagtggaggccactaggaaggcc

SEQ ID NO: 55271 - DNA, 1021 bp, Zea Mays
gttggtaggtgtgagggacaactctttgcttgttagctggcatggccctggccattccatcctttgttgctttagtctctgggtagtccctggtcgggtgtgctgagtcttcgccgtggaaaacacaatagaatcttctctgttgttgaagtccccagcccctgtctctgcccctggtcgcgttgccaccgcgaccttgttgcaggggtaatcttggcgacgaggggggttatcttctagttgctgctgatttgcaatattgtgtacctaggaatggccatggtcttgccgggctgaatctggttgcgaaggcctgatccatgttctgctagattgcggagtctccttatgttttcatggagacttgactttcctctggtggatctcttctgaacgggcatacttttaaaatagctggtacaactcctacaggtttttgggtggatcccttatgtagtggctgtatagaacacctgtccaaagtccgctgattgcatagtggatggctatatggtcatcgaccgaaggcaactgtgattttagtaagagaaactttttgtagtattcccaaagagtttctttctcttgctgcctacagagcaagagttctgccagggcgtctgtcttgggtctatacccttgaaaattcaacaagaatttgtcacaaagtgtcttccatgaatcaattgacaatggtggcagtattgagtaccatgtgagagctaggcctttgagggctatgatgaatgacatggccatggtggcgtcgtccccccagataatgtgattgcaacttgatagctcatgatgtacttactgagttgggtctgcgctgccattgtactttgggtaggtgcctgctctgaagttttgcggccagggggaggcctcaagagggcttcgctcatcaaggtaatttaacccttggaaggcacatggtgcgaggactagcatgtgggggtgaggaaggtttatgtagtgtgtagggtcctgctgctagtattggcggtcctcgccctgc

SEQ ID NO: 55272 - DNA, 450 bp, Zea Mays
gggcgagttgtgactgcgtcaggcgagttgtggcctcgggcgagttgtgacttaggtccctcgtgccttgtccggtatgccatgcgaccgaaggcatgcaatggtcggctcggccatagaaggaaacagatcacagacaaggaaggttgattgcttcccaaatgaagaaccaatggctcctaggctccttgaggctataaaaggacccctaggcgccatggagcagcaccgaaaaatatcacaagagcatacaacaactctgagattctgcgatcatgctttggttcattagagagagatttgagcgcatttgagttgagactctgtcggttttaattcgtgcgctcttttcttcacttgtgtgcgtggtcttgcaacatttgtgctcttgtgtgtgttgctacttgctcccttactcttgttcttgattgtgatcatattgagtaaggt

SEQ ID NO: 55273 - DNA, 576 bp, Zea Mays
aaaaaaacttttatgtagtaggtacaaccaaatctaaagaaacctagttttgttctaactttttctcgatagtccattgctcaacccgctctccatccaagtcgttcgatttcttcccctaatggctagctactcgttgctcgatcgctccttcagtcatgagtggaatggtagtgagtgaccaaactcgtccactaccagtgtcaccttgtcatctcgccactcgtcagttcatcgcgttgtcgtgatcccacacacagtgtcactactttacatcctagtccgcatcaactgacatacatgctattggtgggatcttgccttggcaccagggtgccaccaccatttgcgctcactaagtcaccagggtcccaccacgtcgttgcaatgcaacaaatgttgtcgcttgtcaccgcctaccttcgcttgccctcgctgcccctcatatcttgccccctcatcgtcgccatctcgaggcagacttgccacagcgatgcgtcgatgcggtcgcttcaccccggagctctcccctcgccccttgttgggccaaccctttccctctgtctccgcttttcc

SEQ ID NO: 55274 - DNA, 852 bp, Zea Mays
aaggaacgtcggccttgtgagtggacgacaagtaggagaggtgtgccatggcgccgcgtgtggggccgatccgccaaggcctgatgtggcgatgcctcgacggatgagggtgaggccgggcggccagccgacagcggggcaggacacggccggcggcgagggagcgttggcgctgcgcgcgtggccagctaccagcagtcggactcagacggcggttgttgatagcatattatgctactctgctttctgctagggcacgtggccacatgctcatatgctccaccgaacgcatgaagccatgagcctaggacgtcaagacgtcaactgcgagatgtcgagatgcttggctgcgttcgtttgcttcggttcgaaaacaggcaccgggtggttcactctgatagatccggctctctagaataaaacctggtggccactaagggcccgttcgtttgttacggtttaaaaacaggtctatttttattcatgatctaaatagagtggatccagttggttccctcaaacctagtaaatttgcgttactggccaggattctatccagaggatataacacatgactttgttcctggccatagaaggaggagaaagtttaaaccggacctgttttgcttccatgtcaaagctaaacgaacggttgaaatggccccaaccaaattccaaaccggatcaatttaatccacccggaaggaacctggaaacagaccaatctggtccatacgaacgggccctaaagcttgccaggactgattccattccatgcggttcacttccacccacttcggttcggcaggtggctccctgcagttcactttggttccatccatgcagtcaaac

SEQ ID NO: 55275 - DNA, 757 bp, Zea Mays
ctgcaactccgcacttcctgcaccttatgttcatcttttttctcctttggcacctaattttacagtccttacctcatcgtttctaattgttcttccttttggtttcgcatttattggtttatccatacttactcctccaatgttaaaatctagcttctgcataataaattaaaaacaaacacgtcagttgtaccctttaacacattggttgttattgatactgcattgtattttcgtttattacctagcttcctagactgtttgtccgtttcgcaaccaccccatccttctattccaatgcctcccaccatttttcttatgccaacgacatcttgtcaacatattggagtgtcataatttattatggtatttaacataaatataattcttatgatgcataaattcttacatgttcaactcttactaaagcatttgatgcaccagactcacacccagctttatcacccacggtttcatcaccaatgtcctgcaacacagacttattctaatacaataacccttaccagcaatgttacaataaaaatttattcaaattagtgatgtaacacagaattttctttcattttgatcagattgttcagtttggccgcctgatcccacaaccccagcaaattcacccacctcctgcactcaataataatacaataaaatattaattacttagtatatacatatataaaatcaagtagatcaaagttcaaccatcacctgattttcatcacaatcaataccgtcg

SEQ ID NO: 55276 - DNA, 704 bp, Zea Mays
aaaaaagtacaacaaatttatataccttccggtggatgggggaacctgtccgcataagttatcaaagtaccttgtaatactctagtgtcatgtacggatcctggccatcctgtgacaataaatgtaaacctcatatcaaagtcacaaacggccagtacattctgcgatgcgtaaccgtgccggccaatatatctggcttgctccgaggccgggactgacgctggaaagtgactaccatcaattgctcctatgcaatccttgaagtgtggccaaaatctcgcctctcgcaaacgaggatgaatctcgatgaaatttgggtctttgggcttgattatgtcagatgacatcttatacagtgcattaaggacttcactatacttgcgactaattatttccaaggagtgaccaaacttattccttatctgcctaaatgattgtggacccccacatgcccacaagaaaatgcctagagcttccatagtactgacaccccgccttggaagcagaccataattttccaccaacgtatcatgcaatcgtctaaaaacagttcgtcgcatgcgaaacatgtcgaagcagtcgttactattctccaacgttctctcaacccattgaataccagtttcaaccattgttcttctaggaacctgactgaaaggcctgccccaaatgtctacatcatatagagcaacaagcaattctgc

SEQ ID NO: 55277 - DNA, 466 bp, Zea Mays
agaaggaggagagcgctcacaaaagtcagggaggagagtgtggtgccccgaggctactaaggccaagggtcgacgtagtccaaacaatggcactcgggccatgttgtccacgtcgtccgcgataaagaatacgccgcaactaggtgatcccggggacaacgggcgtgcgtggcttcaccccgggtagaacgcttggttttaccatcattcgatgactccttcctaaggaagacaccgctggccgacccctccttggcctataaaaggaagatgttggcccctagacgaacagacgaaccctagacgcgaagacgacggaccgacgaacagaaggaggacgcaccaacgaggacccagaggccagagctccgccgccaagccaggtacttagttaggactccactctttagcctttagctctatctccaccataataagagacttggaagtatctcttcctctctcg

SEQ ID NO: 55278 - DNA, 632 bp, Zea Mays
cttctaatactataggtgtagactagaattcccttcccataattgtcagtgttaatctgtgtgtcatatagtttgcttcaataggcccttgaggggtgattactaccattggtgtttttagagcttgaactggtaattcatttgtggtggcatagcgagcagaaataaatgaatgcgtagctccagaatcaaataatatggctgctagaattgcattaatgtaaaacataccgatagcgatatccgctccgtcagtagtggcctcagcactgacttggttgaccctagcaatgctgaatcccttgccagaggttggagtctgttgcttattctgagctggtgtgctggattccccgtcggacaagcatttgcatagtgcccaacctgattgcacttgaagcatgtggggcctgtcctctatcctgtaggcctcgccgatgtgctagtgggggcagcctgatgagtgtggggtgtctgtggagtcccttgtggaacgtactgagctgggcacgatcctcctccaggacgagctggtgtaccctggggcagagcatagcgaggacgaatactgctgctaccctacctctaggtaatggccttctgcttcatctctcccaggtgaacacgcttgt

SEQ ID NO: 55279 - DNA, 607 bp, Zea Mays
atgtttaggtaaggttttggtggcgattggcaatgttttcacatcatagtcatcgaggaggccatcaccctcctagtgataagccttggagtgcccccaccgagttacccgtgggttgaaggggatggcgagggacagaggatgagcgataggattggagttgggttcacacccacaaaacatggtaggggtgtgggtgccacattggtcggtggcgatcgcaacacaacagacccattgttgacattgtcgtaggcattcatagccacgccattagcgatggtgttggtataaaagaccatgacaatagtgacaatcatgtggcgcaattgtcagggtattgtacgtgtagttgttgggtggtcatgatggcagttgtatatggtgtcaccgatggtgagggcactagatctcgcctcagcatgtggctatggttgagcgtggtggcaatatttgccgcatatggtgaagtgatagtgtggaattagtcgttaaagagcaatgtgaagatgacacgagtggcaacggtagctatcatgtgacgtgtgacatggcgctggcgtttggtgtatggatggagaggggagggtgcagaagacgtaggaag

SEQ ID NO: 55280 - DNA, 655 bp, Zea Mays
tttatagggcctgagggcggtggctcttgaatttggaatggcgcgctggcggccggagagaggggagagcactggcgcaagagatgtgtggctttcaccgcggcaaggtcaccggcgatgaacgaacacgccaagacaagttactgcgatgtggtagagcacctaggcacatggcaaccgatcgacaggtagccaactccggtgagcttatctagaccggccgtaaggcaagggggtacgacggccagccccaggtctcatccgcggcgaagatcttttaccctgaagcattatccgaccactaacggcacgaatcgcgtcgccggcgcgaatccaggcgcgggggtcaccggcggcaaggtgcaatgcacctgtgatctcattcagtttactgtaccatggtgatcactatcagagcgtctgatagagccatttgcagggcattaatctccgatttttatgtggcaactcgttaatccctctgtaacaaagttcttggcctacaattcagctttaatcttgctatagcaatcaccctcaaatacttattggatcatgctcaaaatagccctcaaagttcaacccaagtcactgtcagtaaaaattcaggccccgagttgactgatagccagactttaggtctatttatctccag

SEQ ID NO: 55281 - DNA, 721 bp, Zea Mays
aaccaagcccctggaatattattcctatgagtaactgaccatgcaaatagcaccctaggcttttgttctttttaacccacaatcctcggtttactagaacagtagccgtggggaagaaagggatggagcggcttaccggcagtggtagagctctaggtaagggcttggtgaggtcgagggtgttgcggtggtcacgtcaaggtgtcggggatggtcggaatcgagctatccatgcacgcatgcagagaggctcgtcggtggtgagtggtctggtcagtagagagctgtagagctccaattgaggggtcgcgagcttcaccggaggttggtggagctggctgaggcttgaattggatggtggtgctctgagttggctggatgacactcaatagggagagaagtctccgacgaacggtggcgtgctcctgtgggtcggtagagtgttgacgagctgactggcaagcttcaccaagacacaaggaatgcagcactggctttggctaaggtaggggtggttgggatttggcggatcgtgatggctgagctgtggtggcggtggcagatgatggcaagctcactagaatgcttagcctagggcatgaagtgagggaaacggtcacgacaacaaggggggcatagcagcaagagctcgggcttttgtaggcatgatggctagaacagaaggcacgacgtgtcggtggctgaccgacaggcaggggcg

SEQ ID NO: 55282 - DNA, 435 bp, Zea Mays
atcactcataaaacgcccacatcaagagaaacgagaacgtgaacaaaagcacacgtcgtccctcaccaactaacctagagtctagggagctagcctagccctaaggaataattactgcaccgggtagccctgcaatgtcagccccgccttaggcatccagtcagggccttaagtgctccaacatccacgccaaggtccaagacacgctctgcaaccctcaagtttcacgcgaccttgccaactaagtcaataaagctacaaacaccgacacattcgaaagactagactaacatacaagcatgctgactccttcaccaagatggcaactacacgacagaattgtaatccccctccctcttgttctataaaagggggagaaggccccctctaggagggaggaggaggcagcgatacacaccatacgagacacataga

SEQ ID NO: 55283 - DNA, 346 bp, Zea Mays
acagactatgggaggctgtggagatcgacgacatcgacatacgcgacgatcggatggcgctcgatgtcatatgcagcgccacgccaccggagatggtctccatgatggtcgtcaaaccgacgacaaaggaggcctgggaagccctgaagtcgctgtgaatcgacgatgaatgagtgcggaagtcggcggcacagaggctacgcctcaagtacgagatgttgtcgttctggggcagcgagtcggtggaggcgttcgcactttggctcaccgacgttgtcgcgcagctcgccatgctgggtggcccagagtctctagagaaggtggtggagaagtatcttcggatcgc

SEQ ID NO: 55284 - DNA, 567 bp, Zea Mays
gaacaatggtcttgttgccatgtaaaattaggaggaaatccgccccaaacatggtctctcaggctgattgaagaacaatcccatggtacaataacagatagaatcaggtcctaatcctctcgctgccgacgagccacgcgcagattcgtgctatcgccgtggtgattcgcgctcggatcagttggatagcaccgggcgtaagtaaatatcacgccgtggatacactccgaccactattttactccggccaccgtacccgagcagaccatggtcgatttggatgggttcgccagagatagatacttcacggccttgcaccacgttccttggcacattaacctcaccgccgtgactcacgttagctcgtccggtggtcgtcggggagctttccacggcagttgccaccaatcgagcgcgctagtaaccttcttcttctctagccgtcgtgcgtctctctcaaattcactggccactgctcaagcctgttataaattgtcgaccccgcctgctccgctaagtagttgtgcaaccagtaaagcaactcgtgcctcgaatcatccactagag

SEQ ID NO: 55285 - DNA, 499 bp, Zea Mays
cgcggggggagtgcccggtcctgttcttccaggaaggtgcattgcattgcagtgcacccacgacgcaaccagaaaatgctctcaccacgaaagctctcggtggcaccacctcggacgacgtgcgtcccaggatccatgcgaatagctcatgcgattcgacgtcttggatgtattttagccgtttctgtatcggcggcagcaggattgagataaagatcctctgcagtcggttcatgcatgcatggtccttgtccttcatcggtgggagtggagtgggactggactgatgccgctttatcggatccacatgccagcactgttatttcctctcttctcgaaaggatgccgccgggcgggcctctcgcaccaacacgatccacagcacgcagaaataaaatctgcagcgagcgatcgatctaaaaggaggccgaatagatgcgccgctgaagccccagggaaaaaagccacgatttgcgcaacccacgattctgcgagtttc

SEQ ID NO: 55286 - DNA, 799 bp, Zea Mays
tcaaccatgatctaatccaaagtaattagatattgtctagactaatctggtgataccaatctagatcccatctaatctaatatgatccaatctaaagtgagttatttaatagattagttagtactagtgaaatggattagacctcactcctataaaaatgatttaagctaaattggtgccctagattaacttgaccatatacaactatctgatcatatgcaactaccttacccatccgatagttgcataatccctctgtgttaacctaatagagcttctgacctacctacaccatataccccatcctatctcaaaagattctcacatatcctaacaagatatatcctaccctgataaatctatctaacttaaactagtctaatctagatcatatctaatttaatatggtctaatctagtgtgagttacttaatgctggtagaaaggataaggcatactcctaaatcaattaagcctaatttggagacatatatcaacttggccatacacaacaacttgacctatataacaagttacataacttacccaaccaatagagtcttaatggattgcataatctatcaaccaccacccgacatcaaaccagattttgacctacatcatgtagtctatctcacccatatatataataaagggtgcaaaaatctatcctacctttggatattcaccttctacgactagttaccccaattcggacataaaacaaagattaagcactgctaaaaaaaatcttcagatcgtaaccagttattggcctatatgtctgcctgccaaataat

SEQ ID NO: 55287 - DNA, 342 bp, Zea Mays
cttcattataggatttctcctatcagaaactagaattctctgatctgggaacaggtcttcacaaggcattgcggcatccacattgatgttttgactcccatcattaacggaagaccttcctgcaaatgcttcttccctttctcttggctccctatcatcctcatctgttaaacctaatctaccaaccataccaatctctaaaggaacttcttgttgtcgttcctcgtcccatcttggctcgatttctattgcatcccaatcaatttgaaactcctgtgtcacaaaattttttaaccaacttcgtctcagggacattgacagctacgaatgacacaaaatcca

SEQ ID NO: 55288 - DNA, 592 bp, Zea Mays
ggaattttatgatctacattctgattaatgcacacattttcctgtctatcatatatggaaactcacatcactttttgtagataggtggagacattatactccctccgtccacaaatgtttgtcgctatggtaggattcaccaaaacggttcccttccaaaaaccagtcgggaccgatatccgattaatcgcgataaactggtacaaactagccaaattcacatccaaaccaatttttgaattgaaacggcacaaaactgattaatcggccgataagaccgataaatcggtcattgaattgataaatcggcagcacgtgtgaagaaattgaaccattgtcatttggcaaataaagtatattgaggtcacaaagtttaaacaaaagatgacccaaatgtttatcacaagttaaaagatttgaagttaaaaggaagaaaatcctcaaacatagctactagaggccaccggtttatctctacctgggaccgatttatcagctagcaggggcggctaattggtaaaatcgatcgatttttattttttcgaaacttctttgatttttagtttgaaatccgtagcgtgttttcaaattt

SEQ ID NO: 55289 - DNA, 1126 bp, Zea Mays
cctcttttttccttgcttccgcgaaggataacaatagtctggatatacaaatccgatgacatcgaataccctgttcagcctctttttcccacgagccccgaaggcaattgtcatggcgtcatcttcggctttcgaatatgcttcaagcaattcatcactagtcgccagtcatcattcggctcatcaaactggctcttgtacctgaaggtatacttcaggtagactaaatcaccttggctagagccagcagcagcctccttcgacatttcccacccatttgcaagtggccacgctctataagcaatgtactcttgaaccaagtctcttgagccaatgtaggtgcacactgtgttgaaagctgtctggcatgcttgcacatcattcccaagtgtagtggttggcctcctaatcctgaagcgagaccatatagggcgttgaataatccctatcacatcctccctctgacttaggtcattctttacgtaaaaccattcttgcatccatgagcttggccacctcttccgaaatgtaggcactgggtggcttgcctcagatcgaggcacgaagctgtaacaaccaaagttgttgtgatactgctcctttccggtaaacttcgtctcataagataactcatgaatgttgcaaaagcatattgcatctggttccagtccttggctcctcatggcccatataaagatccccactttaatgatagcttcgggagtaagttgatgaaggtaaatttcaaagggttttagaatttcgaccaacattttgtccacaggaaaccgaagcctagctttcatgaagcttctaaaaaccaccacttcgtcagcttcaggaagaggaacattattctcccctccggccctcatgattgagatatcacgaaagtacctccccctcattgcatcgatctgtccttgtttaatagttgattttctagagacaacatgactcggtctccatggccgatcttcgccatcttcatttccgccttccacatcgaagctttcactatcgctagaattttcaaatatcccagctaacatctcattggtaatcttccccacgttggttttttccatggcttcgtaaaatccggccagcgctggatcaatgatct

SEQ ID NO: 55290 - DNA, 342 bp, Zea Mays
gaccaaaagttgatcttcggtgtgtggatgtgggaaaatggttgtgggccgttggaagttcggagtccgcagatgtgaagatctcatttaaatgatatcatttgagtattaatttgtctaaatcggggcatggatgggggatttggttgtgagtcgtcggtttcacatcaagggcatcgggggcatcgctccctcctcttctcaaaaactctagccgccccctttcttcccattgcagccgctcctctcctccccaaggtgctgcacccacttccctctaaaccctagccgcccccatggttcctcctttggtgtgctgcattctccattggtgggttggta

SEQ ID NO: 55291 - DNA, 326 bp, Zea Mays
cttagggaaggagtaggtcaagccaatgcaaggaagacgttgtggcacacatcatggtgctggtgggggtccctccaaagctctccgcgagagggaagcggccctccaacgagttggctacaaggcactcttgggctggatcatggctagccccacatgatggggagctaatgccaccttttgaccttgaaggaggacgtcatggaatgagttccatacggggtcaaccattcccacgatctcaacataagcgggttgtagtgcacatcgccgccagacacctccctgaagggagccaagtcggaggccaccaaggcttctagaaa

SEQ ID NO: 55292 - DNA, 358 bp, Zea Mays
gaccgggtaatccactgaaccatttctcgattccttgcgcgcatagcctctacatcacctagtggagctcctcgtgcaccttgattgaaccctaccgctgtggtttggccggagtgggtgccgccgacgacctccgccgcctgcgctcatggccagagcatctctagccacctccgacgccgacccgcacaccgtcgtgaccaccgtgacctccctgacgtcaccgaccacgccaccggagctctactgccgccggtaagcctcgccaccgtgatctttgccccggttactgttccagccagccaaggatcgcgggttagatataggataagtccagggggttatgcgtaaggtcagt

SEQ ID NO: 55293 - DNA, 602 bp, Zea Mays
ggaggtttagggtatgccacctggcttgacctacaacatagaagggggtgtcgatgttggtataccactttgcatatgcacaacaattactataactttaaattttgatcggataatggcgatcgacctgcactgttttccccaataagctccttgagtcgatggtcgtttcttttttgggtcatctattaatataacaataaatatgatcctgcactaaaaacggtcgacgatggaagtagaaactgcctaaagcatgcttgagtcggttgcttactctaaagcgatgtaggctatgtgcaatgcgaagatgggagcgacaggccagaggacaccattattaccccatcgttaaccaaatctaggtccagatagacaataatccatagaaacatcccagatttgatctattgcatgtatcataccgataaacctaggaacatccaccactgaaaactgctaaccatgcacatgaacatggattaggacctccaaagaagtccaaccagagtcaacaatgagactaaacaagtaagcatggtgctagatacgtattagactcccgagttgtcatgtgcacatgtacaactagcattttgtgg

SEQ ID NO: 55294 - DNA, 716 bp, Zea Mays
caagcattgactgtttaaacgggtcaaccttttagaggaccgcctaggccctaaactacacgttgttcctctgtttactgtttagacccgcttaaacggtcgtctaaaaccatttaggataacactgcttcctacaccgaggtcatcttgcatcttcgtggcttgtatctttgtcgtgcgtgcgttcagccggagtttctttgtgcactgcttcggttgtagtctacctttgtccatcctttgtttatatgcctgaaacacatttacttatactaaaggttggacgctttgagaaccttcggtaagataggcccccaacagtcatcaagctaggaaggaccttatagagtgacacagtaatctttggtaatgcgtacatgctgcggacattgcagggtgatgagttacctaaggtattgaatggtcgttttctgaagttatatcatcccagtgtgtggcaagatgcttagaaaactgatgttctcacatcgagttgataacagcatgtatcaggtgcttttggttcgttttgcttccccaaaagggaggggaatgtattgagcaccatattcggcacctagaaaggttggacggtccgcgattagatcatatcaggcgagatatctcctttttccgtgcgtgtttatccatctaaaaatgcggagtttgttggagaacacctaaaattggtccagacctccccctatgtatatgaa

SEQ ID NO: 55295 - DNA, 1130 bp, Zea Mays
tgcccaaagaaagcggcagcagtaatcagacagtgctgatagcttagtcacaatatgtctaccatcccttttttctaaattataatactccttccgttttaaattaaaattcgtttttagaaaatcgatagactcgtacaatacttgatatatatgtttttataccgttcatttgaatatagacataaaaaatccagtagctcagattcttgccgcgaacactgtatgatctgaaccgtcagtgaatgtcaacaacggcggcaaccagtgagcgtgagcgtgaggttgatattgccgacaaatacaaagcgttgtacagcggggtcccgactcccgaatcatgtccaaaaacaagcgttgtactggcatcacgagttgcgatttgcgaaatgaacctggtggctggtgtggtgtagggcttgcttgggatggcacgctactagctgactccttcgtactaccaagggacgagacagagagaaccaatgcccacgacgacgcacaaacaaaacaaagattttcccttgtcccattggttttacccttttgcgggacttagaaaatcctgcatagtaatcacagctctagccattgttcggtactccctcccccgtaccaacttttgggcttggttttggttagctaaggatcaaattagtgagtaatgatcatgcattagtcatattctgcgtgattggatgtctgcacctgtccatctgacctctctttatgcgttgactatggggcggctctagtttggttgcctgcttacacgacacgacgccaaggctgcatctacggctgcagctcaagccaaaaacatctctcctggttgcatacacagacgcgcaagaagcgtcctatttccagcggaccaggctcgcatgagccagacagactacgcttacacatcgaaccaatcagacagattgtatgcacgtttggtttggtgtgcaaaaatgtagcaacgtcagattaaatttagcatagtttaggttgagataaactcatttcaaggtaacggcgaaggtagactcatttcaaagagtagcaactaagaattatgttgttcttgacctaagtcacccaacatcattgattcattcggttgctggaatgttagaaactgc

SEQ ID NO: 55296 - DNA, 761 bp, Zea Mays
gcttgagcgggggcgtgaggacctcagggaggacctggtgaaggtgatcgagcgggagcaggaggctgctcgggaggagaggaggctgctcaagaagaaagagcacctggaccaacgggaggtggtcgtcatggaatatcatgagaagttgaaagcctacaatgtgatgcttgaggagcaatgggataagcagactgctactgaggcggcactgcaaaagctgcaacaggagcttggtgacaaggctggcaaaatctctcttgccgaggaaaacctcagggcgaagggtgtctccctggaggagcgagcatcggatctcacccgacaggagaaggagctcgcctggagggaggagatgtgggaaaggtgagataagctgctggccgagcatgagcacgaggcggaggagaaggagaagaaactggaggagcgggtctgctggttccaggcggcgcaggccgcgcatgtagcccagatgacacaggtggctccggtttcccaggcggcagagacgatgaagaagacgctagaggatctctgggcggagcaatgcatcggggtccagcatatcaccgcatgggccgacgaggcaagttcagctctggtgccgctgggggtgagcccgatcccagtgtcgaagcggccgatgtccatttccgacgcgctcccggtgttggatttcgctgctgacagcctccgacgcttggatcagatccttggcgcctgcttggaggctgagggcagcaggctctgccgggcgg

SEQ ID NO: 55297 - DNA, 425 bp, Zea Mays
acagaatccatctaacggccgaggtgctgcccctggtaaactaatctcgatcgtcgatcattagattaatgacccagggcccttcccctacctcctatggagaagcacggtggcgcacactatcccgcgacgaacgctgtcaccagactcatggattcggtaatttagcgccctaaactcaagtctgctgggtgctacacaatcgcaggggacaagtgaacatggtgtagggtttactcaccggagacgggaaccgaatgaggccacccacggcgcactgcggatcggagtcgaagtaagaactccgacgatcaattatcgtaattgtggtgccccgatgctccaacgatgaccacccgagcatccgcgatgaccagccgactgcccagagcgacgaagggaggcaacgcgacagcggcgaccca

SEQ ID NO: 55298 - DNA, 646 bp, Zea Mays
tgaaatcgggcaacccatttctcgcaccctttctaagaagactgtcatattcttatggagtggggtcccttgatcgacgctagaattcatgaagaaattgttccatgtatggcgtcacctcttcaaggttggtcaatacatatagcatgatatgccgccactcttcatatgttagggtcttggtggtcgagccacttgcgcttccgagttggcctcaaaatatgctaaggttcgattcattgtcgccatcattgtaacgagggggtggattatgcacgctcggcagtttgtcaccataataagttgttgtgaagtttgacacctcctctagaatgtatgcctctgcaatggaagcctcgattttgcatttatttctacatttctttcgaatagtatttagacatctctcgattggatagcaccaacgtccctgcatggcccccccattcgtgcctcataggggagatgaagaatcaaatgctgcattggattgaagccgggtggaaatatgttctcaagcttacacagtaacacaggtgccaatctttccaagtctgcaaccacggtccgagataactcttttgcacaaagctgatgtaaaaaatagctcaactctgaaagcgctagccagacatgctcaggggca

SEQ ID NO: 55299 - DNA, 751 bp, Zea Mays
gttttggtgttcgatttttatgccgaagcctcgcgattaaacatgcactagtgtatgcatatgcccagcttgacaacatagagagccacgacactggcgcctggtaccactacataggagtgaccaatcacatgactaggttgtgtgccgccttctccaacattgacaacaacgtcatggggaatgtacaattctgggcggatcactcgtcaacatcgaaagacacaacattggggctattcgtgtgcatctttggtcagcatcgtgaactcaatagagtctatttgatcccatggctagacatgaacctcatcagtgtgggtagctagacgaggatgacaatgacatctgaatcaagaagggcatcatgaccatgcgtgaccagcagaggtgctaccggcatgtgcccgacactctaccaataggttgtacaacgtccacctcaatatcacacgtgttatgtgcctcaccatgcggcgggtcgacaaggtgtggtgctggcatgggagatacgaccacatcagcttccccgcgctacggagctggctagcgagacatcaaccatgttgatcaggtttgagaagggtgccttgccagtaagcagtgacgtcatttgttcccgacacaagcacgggagggctgcgacaacacttgaattggtatcggagcttacgttggtccagtgcattcttagatacagctgaatgtgtgaagggagctcacagtgtgtgaggggtagattgttagaaat

SEQ ID NO: 55300 - DNA, 442 bp, Zea Mays
cgaggggggaaccatacaaaatcatctcatctcacccatctcacttgacacccaccctcatcgacaacacctgagcacccacaaagctcacttgtaatcttcatactccatagaaaacccaatacacaaccacaacaggaagtagggtgttacacattataaagtgttccaaacctgtataaacctttatgcaagatcaatgtgctcctacacataccattgagtcacaatcaatgacgttgtcctacccaaaagcatcacgtgggtaaccctgtggtgcgtagttgggtcacaaacatcgacagctgtcgcgccaggtagggggtgcaacgttgatctacgacgactccatggccatcaccttcaacatcctagtcaccctcagtgcaagagagatcttctgcttcagatccatctcctgcattgcagatcaggaaggcat

SEQ ID NO: 55301 - DNA, 449 bp, Zea Mays
gtgttttctggctaagggagattaaattcttgggtcacaccatttatgaggatggaatatcagttgatcctgagaaggtgcaggaggtgatggattggaagcctcctaccaccgtgcgacagcttcggagttttcttggattggcaggatactatcggcgattcattccggatttctctaggattgctaagccaatgacagaattgttgaagaagggagtaaagtacgaatggagtcagaaatgtgaggatgcctttcatgcactaaggcagcatctgacaacagcactcgtgctagcaaaatctgacaacaccaaatctttcgatgtgtattgcgatgcttcgggcactggattgggttatgttctgatgcaagacaacagagttattgcctacacatccagagcactcaggcctcatgagaagaactaccccacacatgatctagag

SEQ ID NO: 55302 - DNA, 749 bp, Zea Mays
gaccggccactacaccagctagggtgttgaggcgatcctcaccagcttcacctgggacgatgctggtctgacttcctccacacagacgctgaggaagatgcctgaacctcgtgttctgcagctgctgccggtaggtgtggctgagcgaccacagggtccgacgggcagcatcactgaccgaggcagcgtaggtggatagtggtgtcagggactcgtgagcagacagagtcctgaatcccctgtcacctgcatccatcaccctgacgtggatgcgagtgatgtaatagcaagcccggagaggctttctcactcgccttatttcgtataggggggcggatgtagggtgcctagcgcgcgcagcacttcttgcagcaggttggggaagtgtcccgtcttgaacagtgatgtataatgttcaacaactggaccaaaccccatgaagttgtcctgctgggcgtagtcagcttcctcgtggacgtgttcgtctccaccttcgtcatcgtcatcctcatcatcgtcgtctccggagtcgtcgggatcgtctcctctgggtgcaggtgcttggaaggctggtgcagacggtgctgacgtcgatgacccagctgcgaaggccagggactcggccaacggggtgggggtcagcagctgctcctccgagctgtcctccaggttgactacattctccactcggacgggagggagatccgctggaacttcctcgactaccactgggtagaccgagatccgcc

SEQ ID NO: 55303 - DNA, 566 bp, Zea Mays
ataaactggcaagataagtaccaagcagttatcagctgcgataagacgacagttaagttggtgtccccactgggagaagaagtggtgactgagctagtctcacccaagccaaagaaaggaggttgtcaccagatggttattgatagcaaagagatcaatccacttgaggctatcaaggttgtgtcagattttccggatgtgttccctaaagatctaccaggtatgccacctgagcggaaagttgagtttgccatagagcttattcctagaaccatccccatttctaaaagagccaacagggcatctggaccagaattggtggaactcatgaagcaaatagatgagctgtcagagaaaggttacatcagaccaattacctcaccttgggctgctcctgtactattcgtggagaagaaatatggcactaggaggatgtgcatcgattaccgagctctgaatgaagtcacaatcaagaacaagtaccccttgcctagaatagaagatcggttcgaccagctgagaggagccagcatgttctcgaagatagatctgaggtcaggttatca

SEQ ID NO: 55304 - DNA, 504 bp, Zea Mays
gtttgagcttggtatttgttgagggcctgtagggcgaagacacggtctccgtcgatgaggtccttggaagttggttcgtctacgtcggggacggctgaagtgcttgtctgcggtgacccatgttttatttcctatgggatcatggcctccgatccatatagcaggcggaagggagtgaacccagtcgcccggcactcggtggtgttgagcgcccagactgcttcaggtagcaagtcggcccatttacccttcttgtcgtcgagaagcattttcttgatggctgtgaaaattttgccgttggcgcgctccacgacgccgttagattgtgggtgatatactgaggcgagggcaagcttggtgccaatggagaagcagaagtccttgaagtcctggctgtcaaattgtttgccgttgtcaactgtgagctcggacgggactccgaatcggcaaacaatgttttgccagaaaaatttctgggcagtcttcgatgttattgtggatact

SEQ ID NO: 55305 - DNA, 650 bp, Zea Mays
tcgcgcgtggctgcagtgtttcttggtaaaagattgcttggcacctcactcaaaatctatgaggattatcagataaattgccccaccaaaaaaccaatggtagtttaaattcatatgtctaatgattgggtactaggcccaagcactaccacatcttgttaaaagggtgcagacacgaagcatggatgctaccaatgctttggattccaagttgaggttggtgatgactacaaatagccccacatggcacgacgtctgtaagcccggagaagaaatccaaggaacagctaaatcatggtatgaatttactctgccatgatgggtcatccttctctagccttagatcctccccatggtcaatctatacacctagttgtcacgaagcctgctggttcctgaacaatgagatgtgaagtcctcggcttggtattctaggaaattatttcattaggcatctaacaattaattaaaatgggaccacttgcatgatcattccagtagcgaacccgaggggtctctatcagcgcttgggaaaggccatacctccggcagccgcaaagacacatttaaagatcccaatataagagctactatcgggcccacctactaggatcactaccactatggtcctttgccctaggaacatctcc

SEQ ID NO: 55306 - DNA, 711 bp, Zea Mays
caaccaaagaaagcaggattttatctttttcaagcacctcattccaaagagttataatctccgagcgcaaattcccgaaggctattttcgtactcccatctttgcaatccttttgagcttttaaagctttgcttaaactaaaaccctaataataaaagaaatgtgtattaaaacgagcaaataatatacttgaaatgattaccaaaggattgagagggatagtaagcacaaaccttcagattattgtatgctaagttgtctgtcagatggtccttcggcattaaggatagcccaagctcaagcttcggataacccatcttgtccatcatctctcggtagacatcgatttccttactgtcaggaagactatatataaagtcgttttcttcatcacctttgtatactagagatcctcgatgatattttagttccttagcgtaatgttgggcctcggcaatttgcctccgtgtcagttgttttcccgaagcgtgatggataataaaatcaacatcttcggtcggcgccgcttcgggtattggcagtgataacttctctggcagaaccttgtttatttgctctgttggcctggttcccgaaggtccggctttagtgcaatcaggaacagcacttgcagcgacaacttcttccaattcttcaactttgtccttggaaaccctagtaggagtaggagtagccatcttcaaaggtttc

SEQ ID NO: 55307 - DNA, 1231 bp, Zea Mays
aggcgatagataatattaaaacaaaattattggaactgaaacggattaaaaaggagttaaaatggaatttctatgaattaaataagttctgggtatatttttatacacaaaaacacttttctaaataatttccctgaatttcctattcttccggattgggcacaaataacagagagacacaggggttattacgcaaaaattcatgagactcaggattcccacagacaggactgcgggttattttaacaagagtgcaggggttctttagtgaaaccgacatggcgaaggggtatgagtaatcactggtcgtcagattagcaacccacggccacgattagatctgactcccccaaaccgctggtcgttagatcaaagagcgacgatggagatttaaataacgaggaacgcttctcacccgcccgattgaccatcaacgacccacaatcaaccctgaggcgacacacccaggagctgatctaagccgcaccttcaccatcccatggcccacaacgcttcatccgaagcggtatcctgactctgatcttggacgcaccctttgagatcaatggtctaaaaggtcgttctcctacctcccgtgcacaggcagtggtgtgggctggcaacggcggcgctatggccgcagccacctagacccgagcaggggaccgccaactatgcttattgtcgagctacatgtggggaagacgaaggcgggcacaatagtatgtttcttacctaggtttggcgagccagggtacgcagtcgtcggagggaaccggccaggcggtggattttcaagtccgacgaggaatcgccccagcattgacgccatacttctcgaattgatggtcgccgtgtcttccatgcgctctagggaggctacccgaccacaattgaagccctggcgctagcgtggatgggaaatcagcccacggcggcagtccctttactctcccctccgcctatggttcaattggtgactaggtactcggcgagatggataggggagatggagcggtcgggttatatagcggcggggcgagtctgagctcaagaatcacgaggatccgcaacaactcccgccagcgcaggtcacggagcggtagctgcgggatcaacggagttcgtttcggcgtttggtggcgatatgcggaaggtgacgtgcctgacacccgaccccacatggcggtgattgagggggaaagcgagcgtgggcacaaagcggctggcc

SEQ ID NO: 55308 - DNA, 314 bp, Zea Mays
attgaaaagaacattaaactgagcgagacaatcacaaatctttgggatatatgcttcgtctttgctactcaatgcattgcccggttgaaggggatattcgattctgttggggccacgtctgaagaagttaccccttcttccgaagatattcccggagcccttgaacatattgagaaagaagttgaggccctcgacgaagtcataactgggcacaaagatttctgtgcattggtggcttctcgtggaatggctacagctttcatgaaggccggatgcaatcatgtgagatccatcaataggccaaactttggcct

SEQ ID NO: 55309 - DNA, 271 bp, Zea Mays
gacgatggggatcaagaggcagctcaagctaccatttgaacttgaagtgctacttcaggtccaatcgtgcgtaaggaaagcgagcgagggcgcctgcatcggtacgcccggtgacttctttcggtttcatgcttgacgcattgcatcggttgtacaggtggaagaaatctggcagggtccaagaaacaccgaatgtcttttttggttgttcgccgaagaacaccgtatggcacttctttcacggcaatggaagcatgtttctcaattgtta

SEQ ID NO: 55310 - DNA, 886 bp, Zea Mays
ccggcgagcttgtaccggccggaaaacgcaacgactaggcttcttacttggtcaacatcgaattccacgtcgggcgaccctaattcctctaccaattgcgaagttctagctcaaaatctctttgtccacggtgatggcgcaaactgaggacaactcgaggtgttcccaacgatctaacgtggtccagttcaattggctaggtcgataagcatctatagcacacaagagtcctgaaatgagggcaaggagggtatgaatgggcctggaaacgacggtccatgacgcgacggctcacggcggtgcggagaaccgatttggggaaagaaaagaattagagcgctgtggtggctaatcggaggcaagggcgggtgctatagcttcgtgacaacctaacggagctagtggaatacttaatttatagggtccgagggcggtggctccgaattttgaaggagaaagctggcggccagagagagaggtgagtcaccggagacgcgtaacgtggcgtttaccggggcagtgtctaaaacaatgaacaagctacccaaggtggtctactgcaacgtggtaaggctttgaggcatgtatcctggccgaataacggtgaactccggtgatgccagcgcgattgaccgcagcgggacacgacggccggtccgaccagcgacccgattcaccccgcactgaatattttcacctcgccccaacgttatctactcttcccgtggcacgaatctcccaggcgggcgcacggcaccggagatctttatggtcactgtaccttggcgatattcatcagacgttctgacatctcgatttggagagcttcgttctcccttttcaaataacaacttggtcacttgtctgcatcaatgttgtcgtctaa

SEQ ID NO: 55311 - DNA, 320 bp, Zea Mays
ttgttggaatcactccactcggcaagtgctaatcacaagcacttgaagaactagtttgctttctggtgaacacacacacgcacgagagaaactaacaggagagagttttctggtcgaacagattcactgccttgcctttttccattgatttatagacccaaagtacatacaaatgcccacccgacccagccaaaagactcggccagcactcaagccatgatcctaaactcacgccatgatcctaaactgacgccaccactaatgaccatgcacactaatcaggaaactaactgctgcacatgctaacagacgagtctcac

SEQ ID NO: 55312 - DNA, 647 bp, Zea Mays
ggtggtatgggtctattccatctttacaaacaattgtacatatctcacaaattacatgaagctaaaaagccagggaaattcttttctaagaagccttgggtttcccatgtagcttcatcttcagtatgttggttccattgtatcttatagaatttaagagttcttctttgggtgaccctgtccttttgatctaggactcgaatgggatgctctgaatatgttaagtctggttccaaggtaacatccaccatatcaatggttcgattaggaacccgaaggcacttcttcaattgggatacatggaacacatcgtgcactgcagacaatgtcttgggtagttggagtcggtacgccactggtccacatctttcaagaataggaaacagaccaatgtaccggggtgcaagctttccttttacaccgaaacgggttacacccttcaatggtgatacttttaggtacacatattctttgacttgaaagtacaagggttggcgttgtttgtctgtataactcttttgtcgagcttgtgcttcttttaagttatgtatgattcgttgaaccttttcttccatttctttaaccatatcaggcctgaaaagccatctttcccatggttcagaccaattcaatggagtacggcaccg

SEQ ID NO: 55313 - DNA, 729 bp, Zea Mays
atcaggtcctgtcgagctattgggtgcacctgcatgactgtctaaggtccttgggacaaggacatttgtaggtgggcctaatatcttgggaggttccgtgacaacagaattcaaaaatactccttttgagaccttttgtgattctttgggactcaagcatcagttttcctctccgtatttgcctcagcagaatggcattgttgaacgcaagaatccgacccctgttgagatggccaggacgatgcttgatgaccataggactcctaggcacttttaggccgaagcgatcaacactgcctgccatgtgtctaaccgcatctttcttcgagctttcttgaacaagacttcatatgggttctggtttggttggccacccaaggttagccattttagggtgtttggttgtagatgctttgtgctgaaacattgcagtttggacaaatttgtgtctcagtcttctaatgggggtttcctgggttatgcattacattctcatgcttatcatgttcttaaccaagagactaaccgcattatggagacttgtgaggttacattcgatgagactgcaccttgtccaccccctatctttgagcctgtaggtctagatcaggtgggacagaccatctttgtggaggaagagcacgacaacgtcgattagggtgatctaacccgactccactggctaccctagtcaagcctacttccactacttcggctgatggacctgac

SEQ ID NO: 55314 - DNA, 501 bp, Zea Mays
aatttatcacgacttagttatcgacttataatctatatcgagttacacttaagcatggtcacacaacagatgatgtggtggctacgtagtcatgccatcacttcaccacacaatccaaggtgacatgacaactctaaccgaactcgttaactactcgaaagaagtccaaatccatttctcctataaccttgcatctcacctaggcttcaccgaacaaggtcgatgcgtctacttcacctctacgaacataaccatacactatatatgaagtgtaattcaacgaacatataacgcgcattgatccgacttacaaacatagaggaagcgatgactaattcggcatgtcgccacttctctatacaagccaaatcactttctaaccacaccgaccaaaccttcttaattatcgagcaaaacctaaacttctctgtttcgaatacaaccatatcatagcatgcattcgaaacacttgatcgaacttaacacatccaccaaaataat

SEQ ID NO: 55315 - DNA, 984 bp, Zea Mays
ctcacacagaaggatggttgcaaagcccgttgatgctttggggtgatgattagtgctgcaatggaggattcgaccatctcatagttgtccacgtcgtatgatcctccacactcatcttcaataatcatattgtgaagaatgttatatgcatgcatgatcacgttgagtactctcgatggaaaaaggaatgaattgggatagcaataatatggaattgagcctagagcaccccaaaatgctctctttacgtctttctatgcaccttcctatagctagcatgcactaaacatttattgctttggagtctatgggaggggaatggtcttcacaaacactagctaccgagggtagattccattaccgaggtagtacccttggttgtacttacaaccattcaccatgaagtttacatttggtgcttcactcttgagcacgttagtgaacaatgatgactagtttagtatgttgacatcattgttcgaccctgtcaccccaaaaaggcatgccaaatccacaagtcatatgaggcaattgcctcaagcatgatggttagggatccaatgtcctctgttttaaaatgtcctctccatccaatggtacagttcatccatttccgatacatgcgatctatactccttatcataacaggaaaccctctttcctccctcttagctagcaatcgtctaagatcatcaacaatgggataacgattatacaccttgctaaaatattaaataacacctctacaaaatagtttgagacactctaaggcagaacttttccctattttgatgccctcgtcaatagagttagcaacattgccataggataggcaagcaagcataggacaatagtgcatttctggtgggggaaagaaactgttgtagttgagtgcatcaattctaagagtgaaataggggtaatgctcaaccaacctctccaaaatttgaagaaagagatttctccaaatgtggtacatttgaa

SEQ ID NO: 55316 - DNA, 566 bp, Zea Mays
ataataataataatacgatggaatggagtacgtagtgattaattaaggaatgtccgagacttaccattgcagtctgtagtgcgagggatgatggcattccactgcagcacattacttaagtctttacccccgcatgagacgtaagtcgtaggcagaccaaaggtagtgttccttcaaaccatgtacacacataggcagcaaaaacctttttccagttcatgaattggccagatgtcgatggaacagaggagggtgtcgcagcatgaggtagtagggttttgtggtaccgtctcctggtaggagagcagcgccagactggtgaagtcaagcctgcaacttagcgaggaacaagcaggtgacggcggcagcaacagaagcagcatgatggtgacgagcagcgaaacggaggaggaggccatcggctactctagtatatactaatgggtagggtagtggcgattgtgacccagccgtccctatcgattgaggtggtggtccattttatagcccatgcaaacatccgggcgttgttgcgtctgcgtgggccatccctctctcgtttgatc

SEQ ID NO: 55317 - DNA, 849 bp, Zea Mays
gattaaagtaaaagcgtgtgcgtgcggccactcaggcgctgagtacgtgtaaggaaagtggcgatggaacggatcgagcaacgaacaggactggcatacatcggaccaagatactacgacgtacacgtacgtacgtacatgatggtatggtatgaggcagctgcagtccacgtcgctgtagtagtcaccatcaggtttgcacacgccggtacgtacgccactggctggccagccatcagtttcctggcgcggcaacgtgatccagcgtccagcgagaagcgtgatgccttttgttttcccttcgtagtagtagttgggaaggaccgtacacctcgtaggtaggctcctaggctaccgtccgaccagcttagcctacgctttatatgccaaccaatcgtacgaccatagacagcagtcacacacaagcaataacgatcgttcaaactttttggcacgatattctcgctgattctgacagcgtcatcacgcatagatttatagtttacagcggatacgcttatcttgaccctggcagtagacagtagtaggtgtgccgacacgagtgctcgagtaagcaccaccaccagcacctggctctgcccggacttcctttgcaaacaactgcaacgaacaaacctcggccacgccacagatatatataaatctcgctgacggggtgaccaacatgctttattttatttttcttcagagaaaataacaaatactaccatacaggtgagaagaatcttgcagcaggtggcgaaggacgatagcagagaggagctactgagctagctagccatagattgctcaacacctgggcgaaaaaaacgcactaggaaaaaaaaa

SEQ ID NO: 55318 - DNA, 755 bp, Zea Mays
cgctaatagtgtcgtataaattgattgagagattggttgtctgtttgtttctggtttccctctagtagcctgcagtgatccaccggtggcattttcgggtggtttctcatgtaatttctagatgcaaccactggatccttttttgctttcttaaaagcagagtaataactcattcaaaaaaggtaaaatcggacttgagagatagaatgtatatgaatcctgccattgcaatcatgcaccagcgctgtagacattttagagcagagctttgtctatggctagggtgatctcctcgtaccctttctcacctcagccaagcctccgcttgtttcagcttaaatatggattttagccactagaagtcgttgtggattgccaaatatccaacttctcgtgggatgccagccgtccgatcggttgcacacggtcaggattagattccatctatctctaactggtacactacgcagactctaggatcaagatccaatggccacggttttaaatagcacagattgcaaggcgtccgtttgatcaccatccaacggaccagatccaatccacgaaacggtgtgctaacatctaatctagtgcgtccatgcaaatcgaactgtcatcgctccgtttgaacccgattgaatcatgcccgctaatatccgatccaacggccaccgccctcaaccttaccccgtacagactgcacgacagcgctccccggcgtacggtggcgccatggccggggatcaaccatccag

SEQ ID NO: 55319 - DNA, 760 bp, Zea Mays
tttgttggaaactaagcatctagaaaataggaatagaaccactccattctcatctactcaaccaaacacaccttttagttacgtggatccaaactccacctaacccgctctatttttgtgtcggcctatggattgtgcatcagtccgcggaaggtaatacgatctcatctttagagtggcaccagctagcttgaacaattcctggcataatttggtgagaaatatcttgtcacagtccgagacaatggagtcaggaagcccataaagtctgtaaacttgttgcatgaacgattgtgccactccaaaagcaacgaatagatgcttagactgtctccaatagatcgtacaaatggtcgtgcaaaacactgttttgcactgtagacttcacagtttatatagtgaagtttaaaatagaagataggataagagataggatggataacctgctggcgaccacgttaagtgacaggaattaagtaaaattagagaatctatccacaaccatcagaacatgattgtacgctcggacatttgtagagcttccacaaaatcgatggagatggactgctgagcgaaggaagtgccagtggtggtaacaaactcaggtatttggcacaattagctttgggattggtagcaggggggacaactggccacgaagatgtgctacttgaggttcgaccatgaaaagagacgatgcatcgggcattgctcaacttgtccaccaattgatataaacgtgcatgagagtagtgagaca

SEQ ID NO: 55320 - DNA, 562 bp, Zea Mays
tcgagaagcagatcgttcttggtctccgcaaaggtgggaaaaggcttcatgcgggtgaggatgggcgtcacacgatcgaagcgagggctcaagccgcggaggaggttgagcacgaggcactcgttggtgatgggggccccgagggtgcgaagagtgtctgccatcgtcttcatctgacggcagtactcgtccacagagagatcgccctgagcaagctgacgaaaggcggtctcgaggtacagaatccgagtctggcggtggccgaggaactgagcctcaagggcaccctagatccggtgagcagtgtcgttcggtacgcgaacgatgtcctgaagttcggccgtgagggtgccatgaatctaggagagcaccacctcgtccatcagaagccaatcctctgacgggtcagagaccgctgagaggacgtggtcggcgagggcgtaccggcggagggtctgcaagacctgatcgcgccaccggggtactgagtggagtctggcgcaaggacgtcggtgacggttgcctggatgttggtgagagccgccgcctgagcatgaagaga

SEQ ID NO: 55321 - DNA, 948 bp, Zea Mays
ctcatcagaggaaaaaggtaaggtggcctcctcgactgaggtggcgacgaactcagtgatgttggcctcatcctagacctacaagaatatcctctcgatgtgttgagtctcctcggtaaggttcgcgtccaggtcgagcttggtgatacatagttcctcgatctttgcatgagcaacaacgacaatgtaggacttggtggcggtgtggacactagtgaccccttattctttgcgtgtgggattgctagggaggcacgacctacaggtgggaagtcatgcggcgaccggtgggcacgacatacttcacggctaggggaggcgaacggggcacgtcgattacttccccttcctgcaagctccctcttcagcaaccacaccctaacgtgaggaagaagtggacaactcacttcgcatgtagatacggataatgcacgacacatgagtgaattgtggatattcatgggatgtggacgcttcctcaaaccactattctccaataatctcaatcttcccctcctttcaactgaagagagccactgccgccatacgtcgccctttcagcaacaggctcacctttgacttctccactagccatgaagacatggagagcaggtccaagctattatttcgctactctagcgagcaagcaaggctggaagcatctatttaccgaggatctaggggaccacaccacatcgggcatcgcggttcgccgggcttcgtcgatgacacctcttcatggtaagcaatgaggcaagtgcagatgaggtaagatgtattcccccctccttcaattttgggtataaaacactgaatttttgaacgttgtggtagcaatgcacatcagttgcaatagactagcctcactcggtgcccaaactccagttttgtttctagccctgcatttggttttcttcacctccatatttgacactgttttgcagtagg

SEQ ID NO: 55322 - DNA, 491 bp, Zea Mays
tttttttcctttgatataatgatagtaccagttgtctccttgtcaatgtaaaccctgtttttgtcatttgattttatactggacttagcattagtgttagtttgtttagttgatttgtgtgagctttcatctttgcctttgttggaaaaggtacttgtgttgtagacaaataatgttatgtgtagacttggtgttctctgagttaattagcttaaactgtcctgtacacaactactgaagagcaacaaaggcttattgttcaggtcccattgtttagcactttatgggctagttcttgatgtcaaatcatttgctgcatttgagacttagtgctccacagtttaaattaattggtgtagattttgttacctttttttagtgggcaatttttgtagtagtaagtgttatattgtgggagttatcattttgattactttattgttagatttaccatgaacttgatatttcttattttaagcggcaaacttgtg

SEQ ID NO: 55323 - DNA, 363 bp, Zea Mays
tgaagtctgaacactgacacacttgggttacaattgcacacagaggcatgggtgatgtagctgcagagaagcttaatgacaaccctgcaagcacaaggtgtcggtggatgcaaggccacaatattttctttatgacaaccctacaattgcatacaaggtcatatttactttcaatgaaaatatatgataccaataggacttcacaaaacttaagctggttcgaaacgactgcttcttgtttcgttgaatgaaatatatggggaagtgcatataacaatttacgtactgacatgaaagaattcatctacattaccaggttataacaaggatccaccgcaacatgatttcctaaccgaaccggct

SEQ ID NO: 55324 - DNA, 1390 bp, Zea Mays
aacaagtatcaccaccacttaggcacaggtggttaaaagcgtcaggtttctaaatggagacaagaagacgccgagaagaaggccacagggttgccgacgctttccgagcaacttggtgaaaggacggataattggatccgtgctagaaaacccagagaaactgaggctggtgtatcttttgatgatccaaatgtcgaagaagctccaaaaacatatatgcaatagcagctaagaagagccaaggatcatttaagccacaaagggagagagacatcctaatggttggtctcggtaaccttgagcatcctggtcgtgtacgaggaatctcgtctaaggaaggatggaaggaaggatttggaccacaatgggaaggtttgtacaagaaatgtgatcgatacaaagaatacttgtcggattattttaagcaggaggcaaagaaagagttcaaagacctgatgtctcagatgttatcaaatcctcctctagaattgatgcagcagttggcgagtgtgatgtctgttcaacagatgaccactccatagctgcaaataattctagcagctcaaccgcgggcttccactgattgtataaccatcccaagctctatcgcgtcaatgggaaataaggttcattatccagttgatgacatcacaaggcctatgacgtgcacactagttataagatatggtattaacaataatcacacgaagaaagtaggaacaggcattgtgatcctaggacgcaagtttcatgatagcgacattccagatgattattgcagggtagaagtgacgacggtcgtccaagggtccgaggacgacatgctagacatccctgggcccgaaggaatcgagacacttggacaagccatcaaaaatttcatcttttggccatgaagggatgtcgaattggttgatccaccaacgtcgtcgtcgtctcatccccaaccatctccgcctcctcaaactttagtacctattgtacatccatcatcacctcctcaatcttcacatgctgctcctcatcctctttctaacccaccgtctctgccacaagcatcaacatttaggacaccaccaccatctccacagccatcaagggattcacgacaatcaaagaaatctaaattccctataccaaaattggtgtccatgttcgagaaaaagaagagtaaagctactactgctggcacagctcgatttttgaaagggattgcacgggacctcacgtcacatactgttgatttggctgagcacgaggagtctgtagaaaaaggctgaggcaatggccgcaaagatatagatcccaactaaggcaaattataaaaatgtgcctaaacaatatgtgtcggacagacctctactaacttttgagaaactgaggaagggcc

SEQ ID NO: 55325 - DNA, 433 bp, Zea Mays
acttgcagtccgatttttttagttcttttcaaaaaaaatcacgtttagacttcagaacgatttatttcatattttggaccctttgctcgacgccatagcgccgagacaacatagctgcgggcgaggagacattcggaggtactgtacaacgcgtatgttgcgtcttttctgaggtaggtgttggttccataaaaactctcgtggtgtttttcatggtgttggttccataaaaattctcgcgacgcatacgttgcgtcttttctgaggtacaggtgcaggcgaggagacattcgaacattgctctggaccgtactagctataaacccgccgagatagcttcacgcgtacatcaccacaaatccccgaaaaatggcaccctgcttgccgcctcacacctcctgtttccagatccttgttgttatgtactgcctcc

SEQ ID NO: 55326 - DNA, 400 bp, Zea Mays
ctgacagcagcagggaatcatatacagttactaactacaaactgggttcaaaacaacaactgaataaacatatatgcaagctggtacaagatcatggtctggaccagaggtgagcatcacaagagacgatgggctggctgagtcgatgcacacaaagaaaaagtatctacctcacgtcctcacatagactagaggatggatagatggagtacatggtcactaactacaaactgagcccacaaagcctagccatgtagcatttcatttgctagaaattaaataggttcatagtcactaactgtttttagtgtgcatcacttgctgttttcacttttttgctgaatctgtagtttgatttcagatagtttgatagtcacttttttgctgaatctgtagtttg

SEQ ID NO: 55327 - DNA, 708 bp, Zea Mays
gtttgcagccaaccccggcccactttatcgcactcgcgacctggtctcaccggcgcggggggaccccgtgtcagctcgctttcccctcgccttgagtaacttacccgcgggcccgtatggtcaggcttatcttcgttcctgagccacatccttcctggtaacaaactgagcgcaccccgtggccgccccgccaccaacggagcatgttgttgcggaccgtatcgggttgttggaatcaaccgtgttccccgggcgcggactccgtggggcaggttgttacaaccacttgccgcaatcctcgtcctcaccgatgagctcgcagactgcttcaacggcccgtgaatccgccgccaatataggcttggccgtcggtataagtaccctatccgtggtcccgagctcaccaatcgccgccatgctcgggcaaagccaagagagagagagagccgaggaggaggattgaggagaaccaggattgaaattgggatttgagttccgccatcgacgtaattaccaccgacgagaggggtgaagcactcgggctcgtcacgggtgatcgctggcgctcgctagggtcatcggtggcatcgtggcagtggtttggcgacgggtgacctcggaattcgtcaccagagcgcacgcttctccgcctgtccaccgtgcaccgtggtcagcgaattccatgcctcggattgaggtatgataccc

SEQ ID NO: 55328 - DNA, 797 bp, Zea Mays
atttttattatgagactatcgcaacttgaacgggacaaatcggagtaaaaacgaagaagatatgaattttgcaagattatgagtttatttttctactaagaatcacttttctagatttaattaaatgatttactaaggtctaggggcatcgggtacaaaattcagagagagggtagggtttaaagcgtaaaactaaggacttggatgcaaggatacacttaccgatgtggacggagggttaaatacaaaaaagagcaggggctctttatgaaaatcacccgccgaagaggtatcggccaatcctagctgtccgatcatcatcaaaccgcatagatcttatcagccacgcgcctgaaccggtacgcccctcctgaccgcacgatcccagatgaacgcaccagattcaaagtgtgccaaatctaacctagcccgcccacacagcgatcagcggtcaggattgagcccagccgagccggtacgaagttcaaatccaggccacatgcacacggatcgacagtccgagtcgaccatgttcttccggtcgccagccccggtggtgcgcccgaccacggcggtggtgccatggccgcatgtaacgccctaaaaattaaaccatatttataatccaaatatggagtgtcctatggatgatcggaggccgtagatgtatagatctcatcaagatgattccgatcaatcactagtttgccttgtttggagtctggatgagtcttttcgagtgtcggttgatctgagccattggatattaggattgtagaagttttcttctatttata

SEQ ID NO: 55329 - DNA, 440 bp, Zea Mays
gcctactacttccagtcaaggccagatctgacagtgacctacatcgcctcccttggcggtgcgaggtgggagaactggcaaaatgactaggtgatcgccagtgctgaggtcagcgaccgccttggccttccgagtgacgggcccagactcgagcggaagcaatggagggtaaaaccatgcctcgtgccagagttcaagcccgtcctggacaggattagggaactggcggttggtggcctgacctcgatgcacgtactcagggatttcctgaagcgccgagtcatgctgctgcaggggaggccgcgtctgtgttgctggtttaccggccctagcgacattggtaggatccagcgcgagcctgggactgatctgacctgggagcagttagaaattttggtgagggggatcactggtgaggcttttatccccgaatccttgat

SEQ ID NO: 55330 - DNA, 535 bp, Zea Mays
cgctggtgtctggattccgatgcgatccgtgggcgactcctcgtagtccctaacttccggtaaacatcctccccgtgtgtaccctattgttcctgctactcgccgttgtcttcggttaggagttctagcgtgcagatcacattcatgtcggacgccggcgagagcgccacctcggccgcgtccacgccaccgtgccttaggcgaaaggtagaggaaggattcatggtcgttcatcgtgctttgacggctgtgattagatcttagggtaccccttcgcaatattagatccggcgtgtaggttcagtatcaagtggttgagatctgatcgcccttcatccgtcaaagctagatctaacggtcgtggaggtttataagttacacgtgtgagcgatttaatctgatccgtctgtgttgatcggatggccgagaacctgccatacccttcagcccaggaaacttgctaaagagtcccttgataatttaagaataaacccgccgtccacatatacgtaaagatcatcacgtctgggttctg

SEQ ID NO: 55331 - DNA, 631 bp, Zea Mays
aaattataggactacctcagaaactcctaatacatcaggagaaacaatagaagaaataacatgggctaaattacttggtagtgcattggtcactcttaggaggaggtggcgtagatgcagactgaagaactggattaattaggagcaaaccttctaagctggtttgcatatagggggtaaccagaatcaacttagacgattccaaaccaacttttttggaacaatagatgaagactgtcaatcatacagtaaccagaatcaacttagactattctaaacatagtactgatctaacatagtgcagtgtttgtggttattggattatgagtgataataacaaactattctgtttttattttggttaatcaaatctgtgccagtgatagttacaagttcattttctgcttcgtagatagcttccgagtaccatgatcttacttcatcagcctagcatagagggtaacaattcccatcctgtgtgactgttttggttgatcagtgactgttttggttcttacataaatagtttctttaaatgttaaactaaatattgttctcaggatcactgttgcccattgaagaaccactactagaattagaaaggccaccaattttttcagcaccattattt

SEQ ID NO: 55332 - DNA, 276 bp, Zea Mays
ttattgtttcagagttcatcagttcgtaaatttgcagtagtgaaatgacgcgcgatgattatgaaatttgtttgcgggatttagaagtcatctctgtatgagtaatcataattacgtcagatcgccttaagtcgctgctgacttaagtcgattatttttgttaatagggcgtagtggtcaccctgagttgagtaagcgtgagcatgttgcaccgccttaagtcattaccaacttaagtcgattgctccgataatagggcatagtggtcaccccgag

SEQ ID NO: 55333 - DNA, 784 bp, Zea Mays
gtgggaagaaaatgaagtaaaaaaaagacagaaaattcactttgctaggattcgaaccttggttggagcattggaatgcctagctacaccactctagccaactaaaccaaacttattttgtgtctaaactattaaagttgcttctaatatacaaataaatgctctgaaaaataaaataaaaaaaccgggccgtgctcgggccggcacggcgtgccacggcagcggcccaagcccggcccgactaacgggccgtgccggcccgagcccgtcaaccaccgggccgtgccgtgttcgtgacgggccaaaaccgtgccgtgccacgggccgcccgatgggcacggcccatttggacatcaactatgtgcgttacctaaatatgatcttaagtgtgtttagaatttcattcagattgagatgcttattatctataagcaaacatcaactatgtgtggtattaggctttgcaaattgcaaatgttgttggatttgctctttttggtgttacggcggcttgcgaaacaccaatactaagttgaccttggagtctcttggtatgcttttaattgaagggcaagcgaacatgatacccttggctacaccttcttttcttcccacagctaaatcatattagaaattcagcaaagctgatttcaggaaaatatagctcaactgctcaaccaataaaagcacaaaagaagttaaatactagttacaattactggaagatgattcaaggattaagaatcatggttttcacagtgagttgacaatttggtatatttgg

SEQ ID NO: 55334 - DNA, 434 bp, Zea Mays
tccgattcctgcaagataaccgagacgtattcgcatggtagcctgcggatatgccaggagtcccaagagaactggccgagcacaaactgaaggtctatccccaagcaaggccaatccgacaaaaactgcgtcgttgcacgcctgacaagagagaggctattcgcgccaagctagctcgcttagtcgcagcagggttcattagagaagtactgcatccagactggctagcaaatcctattcttgtactcaaaaagaataaagtggattggcgcatgtgcgtcgactatatggatctcaacaaacattgtctgaaggatcccttcggactccctagaatagactaggtggttgttcgaccgccggatgttctatgctgtccttcctagactgctattctagataccatcagatcagcttagcaaaagaagatgagg

SEQ ID NO: 55335 - DNA, 445 bp, Zea Mays
agcatctacaaccacatcgacgcactcacatgcttgcccaggagccagaggaaggcagtggaggaggagctcgagcactccctggtcctgctcgatctctgcagcgctgtgcaagagagctttgttgagcttaaggccagtgtccaggaggtgcagttggctctggaacgaggtgaccacacggctgcccataccaagattcagtgctatgtgcgctcggccaagaaggcacagaagctgttcaagaaggtcaacaagaagactgcctctgacatcgaaggatgctgggtgattaatctggttgctgaagcgagagagattgccgtgttgatccttgaatcgacattgcatctcatgttgaagcaaattgtgattccaagctctagcaagtggtcccttgtttccaagtcattccgaaagaagtgtgttgtatcatgcgatgcgg

SEQ ID NO: 55336 - DNA, 713 bp, Zea Mays
aggtctaggtacatcttggtagttcctgggtggatggagtaggttgagttgtgagcttcctcgagcaggacttcttgtgcctccccttttggtacacacagacgatttttgaaccaaagggctccttattcatctgtcctgaggtccgggagttgttccttgcgggctttctccacaagtcttgttgtctctgagtctaggcgttgagctttgcatatgaggtcttctagcattggtttgacttcgagactgccactgtttcccaaacatgtattcagttgagctgattctttcttccaatcttctaaaaagttggttccctttatttcgaatggttttcgactgagggtgtctgctaccacgttggcctttccggggtgataatgaatctcaaggtcataatccttgatcagctccaaccatcttcgttgacggagattgagatttggttgagtgaagatgtacctcagactcttgtgatcggtgaaaatgtgacatttgttcccgattaggtaatgcctccatatcttcaaagtatgcactatggctgccaattccaaatcgtgggtggggtaattctgctcatgcgacttaagtaggcatgatgcataagcaatgactttctcgttttgcatcagcacaccccctaagccttgcctcgaggcatcacagaagacgacaaaatcctgatgaatatctggtagtgtcaaaat

SEQ ID NO: 55337 - DNA, 655 bp, Zea Mays
agaaggggggcgtaaggacgttttcatacttcgtcaaggagagcccgaacttcgtttctagctagctctcggccacccttcgtccaaatttgggtaataaatctgttacccacgcttcgagcttcgctgggaatattctcaaggtcagccgaggaaatagtgaagctgggcttgttaacatttttcaaatgtttacacccggcttttgcaaaaatagtagcagttcctcggcggccactagagcgcaaaaatctccatgtccaaccataacttcgtaaaattcattgatttctttttcgacaaactcaagtgcctttggaatatcatcgatagaataattcgcttctcctgacattgtcccgaccaaattgaagatttcacgcagacgaagggagcaccgagttgcgaagccagagcaagtgtctcgaagcattttgagggcttcgtatagcgtagagcttttctcatcttcggctttgacttcatcttttagatctttaatttcatgctcgtagcggattgcagcatcttttaaatttgagttcactttttcaagctctgtgtttaaccttttcagctgtttgtcttgatcagagaattggataacttgattttcaatccgaaagtgagctttggcagttttaatcttagaatc

SEQ ID NO: 55338 - DNA, 420 bp, Zea Mays
aaggatgatatcaaacaaaagctcaacaaaggatgaagttaaggtaaggcaagacttgcaaagcgataaagggaaaggaaacgaacaagagtgggatagggaaaacaacactctcggattgaaatggaataagtgaggctaagaaaaataggtaaacatcatggtaaatatggagaggggttcaagggtcaaaggtgataataggcaaggatataaaggaagaggtaaatgtgcataaaaaaaccaggaatctaggtacaaccaagaatagagttaagataagtcttgcaagtggtaaagtataggatataaccacgggtgagataagtaagagaccacgcttgaactaaggtgggagattggaggttttaaataacgaacatagcgtgatcgccaaggtaagattgagagatgagaagg

SEQ ID NO: 55339 - DNA, 463 bp, Zea Mays
gtggaactgaaaattgctgctctgcgcttgacatcatgttgacagtgccctgcgaagaggaggaagtcactggctcccatctgagcttcccattgggattcctcctacacaccacatccttgtggtcctgactgcagatagaacaccttccactccattgacactcagcacgacgatgcgcatcaccacaacggaaacacaccagccccagcccgggcttaggaacaacccgatacctctgagtacttcctctcgaagtacctgattcagaggatttgccatggtaggggtggtggcgctggtgctgaggcttgcccctcttgtgggctggacccccagtgttgcccctcctcgcgttctggccacgaggctgatcaacacccgaagacttctgtgactccatggtgtactggtgttgcatctccacacctaatgactgctccactatagtacggaaatccac

SEQ ID NO: 55340 - DNA, 406 bp, Zea Mays
gtcgtgatccttaatagaggctaagtgttgtttgcaattcctcttccagtgaccaacttctttgaattaaaagcactctgcatctgcagcttgtccaaccttgggcttttagtttggcttggataatgtgtcctttgccttgcccttcttcttttgagatttactcttcttaaagttgggtttcttttggaccaccatcacatggctgctgctgctaacacttttgtttgtcaccctttgctgtttttagcatgccacatagttcattgaggcccttctctgtcccaagcatatggtagttcgtaatgaagtttccatagataggcggaagagatgctaaaacgaagtcaatggccaactcttggcttattgggtagcctacactacaacacttatgaccttctat

SEQ ID NO: 55341 - DNA, 533 bp, Zea Mays
ctatgctcgcatctcctttcatgtggttgcttgacctcttcttgctctcgacgtcaattgttgatgatgcgtcgggcgtcgtgcatgtctttgaggtggtccttgaggggaacacatgttcttgtggattgggaggattgtgtccacctactgctggatgaggtcgtgcacgggtcgtagctatccgcgccagtgggcaactgccggtcaattttgacttgttgcaccgcggctttttccactcattcacagaggtttcgatacatcacccttgcctctggttcgttaggctcgaggatggaacaaagcgtcatggctactgcaaccatgttctgtccgaggttaaggaagtactgcgccccgtcgtggctgtcagcgagctggtcacagaccatcctcgcctaaggcttctcgacctcaaggcgcttccgctcgatgttgccataaatctgatcgagtttacggatgaggatgcacgcctggtgttggcactcttcttctcggttaggggactcctcatcccctccaccatt

SEQ ID NO: 55342 - DNA, 364 bp, Zea Mays
gtagtagtggacaaaagcggggagacaatttataggatagtttggaaactcactaacgtctgttgttaggtatgtttagtctgatccatggtgaagaaaataataatatgtttatcacatttacatgtcactgcaaaacttgtccgtagtgtttattgacagtttttcattgcatgggaattcgattatctttgtctggataagcagcaactaatgatgcacagaagatcatggtaagatgttctatattctttacgcaattcttggtgcttgttcctaattgatatatgatgcatggtacacgtcacaacacttactttcgcattcaaaggaaacaaaaacaattgtgcttagcatttagtcc

SEQ ID NO: 55343 - DNA, 537 bp, Zea Mays
cggtgacgtgattgacccttcctctactctggttctgcggagttttgttctgtgcagatccacgagcgggggtgttctggtcattcctctggttattgcttttctgaggtgtctgctggttgcgctttgggcagttgttagcatagtggcccagctcaccgcacttgaaacacccattgggttggactggtgcattgttccttctagcctgcgtgttacttgcgccaccctgacgattctgtgaactcccaccagacctctggttagtctgggagttgctcctttgctggttctggctttgattgctcctctggccttgttgtccagagcgttgcacttgataattatttccaccctgatttccagagcggaactgtgaaccttgagcgttgttcggacgggtgttcctgctggactgaccttgaaattttcttttatggtcagatagttcccttcttttgctttcaaggccaattgtcttattcagcagtgtctggaaattaggaaatgtatgactctgaagttggtagtttagag

SEQ ID NO: 55344 - DNA, 549 bp, Zea Mays
aaggcaagaacatagctatgatcataatcaacgaaatttcaagattttcaatgaaattgcatagttccattctccatacctttgccttttcctgaattgccatgagagcactcgttgtcaccaatttagggctccttttgctcatgcacctcatagctcaagaaggtgcattagaggcataacatggatttggtatacacacaataccaaaatagggtaatcatgtaaacatggactaaacaaaatgtcatgctggcacataggttaatcattaaaaaccatataacatgacttacaaaaagatacaggtttatccacgaacacaaaaagagttaatcatggtgaatatatcaaatgaaaagctacccattgaatgattcaaaagatataacatatagaacacacaatcatgattaagcaagcatcattatgatctttgaaatcatgaaccattgattgaaaggtattcaacacaggcaatctcaaaagcataactactccaaggataggtagcacaacaatccaacttaagagcaatactgattggca

SEQ ID NO: 55345 - DNA, 661 bp, Zea Mays
ttggcattcaagacttgcacaatcgagggggaaggagaaaaaatttacttgggtagggtgggcacgcctgtgatctactcctacaccgatataggtaaggagattgtaggcataatatctgatggtcaggacgtccaaactgtcgagaggtaccactcctatgtccattacatcctctcctttgtttgtatattattgtgtgattaaaggtgttgttgattatgtatactgatgaaaggtgttgttgggttgcattctttttttatagggggtactactgcgccactttcaagtgttacgggcctgggatgtctcccatgttaacctcaactctgacctatgtgcaggcaatacgctttaccaggatacactacatctcaggggagtcgtggatcccgtccctaccacctgctgaagaataagctattgcaagaagcatttagagtcatatatgctactaggagcacccctaaagtcaaaacaagaaagttgttttgtcagacatgaattctgcagtactaattaaattatccacatttgttggccatgatttttaatttgtattacaccgcccacattatttatcaagggtttcgtctacatatataaattgtatatcgtctttgactttttcatgtgcatagtttttttaccgtgcacg

SEQ ID NO: 55346 - DNA, 684 bp, Zea Mays
caagctcggaaggaactaatccaaacttagcttcaataccacatttacagattactggatcagacttcaattcttcctcccactcattttttttcttttcctttgcctctggctctagccaatgggacataggaccatacaaccactctaagaaatgacacttacgccacccgtatggctgcaggagaataatttagtaaatttatgcaaaaaataacaaaagtttggacatttgttatgcactcacataatcaatgttcggacacacgaagtgcttcacagtgtcctcgtcgatgacagcacgatctccgcaatcgcatcgtggtggcaactccattcgtctttgtgttgctacctcctccacatccgtcattggtggaggattcgggggaggagaaacccaacgcttaaaacgctcatgactagtccttccacacaaccaattagcgaaaagaagatatcgagggtcaagtttatcaagactgtcgatccactggaaaaagaaaaacctcatgtgctcctacaaaagtggaacaaagcattagtacacatctagtaaacaatattaactcacaagtgataagctatgtacgttaaaaccgccacaaaggtagaagcagcgagcagtcgtgtcttgatgtttggattgacatacccaagccggtctgccacagtcacagttag

SEQ ID NO: 55347 - DNA, 347 bp, Zea Mays
ctcctccacaatatgatcatcttcgtgtgtttggatgtatatgttatgtcttgttaccaccacatgagcggaccaaattgactgctcaatctgtagaatgtgtattccttgtatacagtcctgaacacaaaggctatcgttgttatgatccttctactcatcgtattctaatttctagagatgtgagtttcaatgaaaatcgccccttctttcacaattagtctactcactcatcatattatcccacagaatctacttctttcatgtgtctttcttccattcctgcatctgcaccatcatcttctacatccacatctgatgttctcattccaataacacaaccttcc

SEQ ID NO: 55348 - DNA, 463 bp, Zea Mays
cgtggtcacattcggtagtgtttggttcagcaccaccagcggcaacgggaacgaagcatgtagtgtttggttcagcgccacctgcggcaacgagaacggagcgaaatgctgccagtgtttggttcagcgccaccagcgtcaacgggaacagagcgaaatgctgccagtagctgttgcagtgaaagtaatcacgtgatttgtttggttccattttgtatttgctaagctccgcatggaattggctaccactgacatgggagaggcaatgagatcctacagcccgctatcccatcgcgcacggattggtgtaaacaaacgtgaagcaacgggaagaaatagcggcgtgaatgaatgattacgggctgaaatagccccaaccaaacaaccccattctttgcttgtaggtttcgtgcgatggctgagttttctactccctgcattttaaattaaagacgttaagctt

SEQ ID NO: 55349 - DNA, 408 bp, Zea Mays
cttgattctctggcaggtgtcatattcggatatgtacttggcaatttccctcttcattctgctccaccagtataaggatctgagatcatgatacatcttattgctgcccgggtgcatggagaattttgaaaggtgagcctcatccaatatcttctttctgagctcagggtccttgggaacaaccaatcgatctccaaaccataggattcctttgctgtcatgccggaaacatttgtatttttctgctttctgcttgatcatttccttaatgacttgaacacccttgtcttcaatctgggccctgactatttgctcttgtaatgtgggctccaccgagatataatttaaagcacctgaagaaacaacttccaggttcagcttgcacaactcatcacacagggtggtgac

SEQ ID NO: 55350 - DNA, 398 bp, Zea Mays
gaaaaggtactatgacaactagttctagagaaaggcctatacatacatggtgctcggggctaggcactcatttttggccatttgaatcacttgtgaccacatttgaggcttctcttttctctctctcactcacattgcttagtggttgattcctagtgagattgtgagtatcctagtgcattgcataaattgtttgagctttggagcactagcgagatcatcaagcaaggtcagtgacttgttactcttagaagttctcatctcctaaatgtcttggtggtgcaacaccattgaactcttcaagaagattgtgaagaaggtgtttgattgtgagaggctttgtgcttgccttactagagtggtgaaaagtatctctagtggaatcgagatttggaaat

SEQ ID NO: 55351 - DNA, 603 bp, Zea Mays
cctcgatcttcgaaagctatattccaaactcaacaatgtcccaaattctaaggtagagtgaagataagtgacttctcatttcaacactccaccatgaataataatcaccatcaaattatggtggtttgactaatggatttgaaaataattaagtgcatttataaatgcaaggataatggaaggggatttggttaaccagtttgcgctcttggtgttttgaggaagtcgattcggcgtcggatgttgaaggcgatgaagagtcgatatcatagtacaccaccttcttcatcttcttattcttgacgctttcttcttgtgcgtcttggaggagccttgagtttctgatttcttctccttgtgcttctcccccgaaggcgctttgatttctttcgacgataacttgtctttgggcttggttgatgaagatttgatctttcctctaaagttattttctcttcgggcttctctcccgagggtgccttcccgttcttggtgacttttcccccatgtcactttgagttggtagactctaatgaagtgtcgggttccgataccaattgaaagttgccttgtgggggtgaataggtgaaacccaaaaattat

SEQ ID NO: 55352 - DNA, 807 bp, Zea Mays
tttaggcgaagtttggtttctctcacgttggcgaaggtctctgcgaggtctgcctagtggtccactttattcttgctcacgacaacgatgtcatcatcataagtgaatatgtttcagccaacctggtccttgagtattgactaggtgaggagggaaagtgtggatctagcgttcttcaggcattcaggcattctaacaaagcagtaggtgctgaagggtgtgatgaagttggcatttgctttgtcctgttcactgaggtatatcttgtgatagccaaaaaagcagtcgagtaaggacatgacctcgcagcctgatgcataatcaatgattttgtctatgcgagggagggggaactcacctttgggacaagccttgtttagactggtaaattctatacacatgcgccatttgttgttcttctttttgaccatggcaacattggccagccaggtggggtagtccattggttcgataaattttgcatccaggagccactagaccttggcttggccgcctctattttatcatccgacatcttgcaaagtatttgtttcttggggcatttcgagggatttatgtgtaagtagcactcagtgatactttgtcttactctaaccaagtctaatgacgaccaagcgaagacgtatttgttcctatgtaagcatttgagcaagctggccccctcttgcgtagctaggccttggtcgatcagtactacatgattggggagagcgatgttgaggggtactttcctgcccccttgtcgctttgaagagggttctgctgcttatcaaccttggatagtgg

SEQ ID NO: 55353 - DNA, 901 bp, Zea Mays
gtgaggacaggtcaagagctgatctgtatgcatgcggcggcgcttttagtggaactgatctggtaccgtgagatgcaaatgacgggcatggaggtcgatgcaatagaacgctgctcgatccaaacgggagggaaaggaactaacgaacgaacactgaaattcgctagtaatccaccttaaacctgatttaactagtggttgaactgctgctcttgactgcagtgcagatatgtgaactgatctggtaccgtgagatctccgcttgtggatctttgatcggtgcttggttggactctaaaatctaaatacgcatcgtgcacggtcaagtcggaaatggaaagcgaagttggcaccgaaatggaatttaagggtcgatctgctgtggcttgactatatgaacttgaatttttgctggatttgattttcttagtggagttctagttatattgctgtgagatctggtctggtggtctgagggtaggaagtacggatctgataactcgtagctttgatgcagtatcactgcctggttgacgttagatagtgaaattctacttggccttgtgaacagctaggtgaagctgataaatcagtagtgatggtaaaagcttcatgaatctctgatgtgattgcctgtcggagtaaacatcagtttgtgcagcagatgcagagttagttggccttctgaagaacaccttgcttgatctaagatgaacttggtgccttctctatggcaaacaggggtgtcatttggtacatctatgaatttggttttggggaatcaacctattctagatgaggtgatgatgagttcatttgtttaaatttagtggaatgttcccattcctcatcctagctatattactaattactccctcggtcctaaaatataattcgttag

SEQ ID NO: 55354 - DNA, 353 bp, Zea Mays
tgtgccttcattggcacaagggatttgattcaagagcatatatccttcagggtatggccacttgtggagagctgggaaatgctgaaggagaccaccgccgattctagtgagggtggtctggtccgactgaagtataccttcagatttagggagaagtttgatgagccaaacgacgattggctgaagtgtgtcgaagctaccaatgatgagctacttggagcatactccaaggcggaagataatgctctgtccgcagcctttggaggtcggggcaagaaaagattaaacagggtattcgatgctattggcttcatataccctgattacaattatccgttatgagggcaaaagaa

SEQ ID NO: 55355 - DNA, 300 bp, Zea Mays
gaattctgacttgggagcatttaagctggcacaaaaggtctgaccctggggtttgggtgaccaagggaatttctaggtgggtagagggaatgccatgcttttccacaaaactagtggctataaatgaatgggatgctcctgaatcaaaaagtacaatagcgggagtaaattcaacaaggaactcaccgagcactactcccggagcttgctgagcctcttgaacatcgacgtggtttactcgtgccctgccatgatactgggtcttgttctgctggctgatggaggagggtgccttggagg

SEQ ID NO: 55356 - DNA, 1154 bp, Zea Mays
ttcagaaaatgttagtggcgtagaggatgaattattaaaacatgagtatcggagttcatatattagtggtcacgccacattgattgaagtgtctcgagtgcacgccaccatatggttgtatgcgagacaaggttatgcgcatgatgagtttagtaaaaatccatcggggtcactagtgttaagttgaggatgatttgcgcgtggaaagtaacggtgtgtttaatacttagaactcttagtcgatagtagaaattgatttagcttatgtagagaggtgatgacatgccgtaagtagtcatcacttcctctataattataagtcgagtctttacgcgttaggcgttccttaaattgtgcttcgcaaataagtgtatgattgtgtttatgacttgaatagatgtcttcgagtgaactaataggttcctaaggcaattatgtgtaaggtgtttatagtgacgctttattccgaaaggtgttaagtctgcgcatcaataagagataagtgtattttgtgtagtgtggattgattttgagtgcatggtcgcaagaaacgaattagtgcgcatatagacgatgaatgagtgtgatgaaatagtgacatgccttcgtagtcatcatgtcgtctgttggtgaactaactgaaggtcgtagagaagggtcgattacctgtgtgttattattgtcaccttgcggttctgtatgaattgcaatgtgaagtagtaggctctctatgtgatgctagatgtctaggtagacttcatgaattgtggtgctcagaccgtcgagatgaaggttaagtcggtctatgccgattaggtagttaaaatggttaatggaataatcatggggttaaaactagaaactagtgttctcgcacccgtttgggatgttgtagcccaattgcgcatggttatgatcgcgggtaaaaattagtagtgctcatgtgatgtctaagctaaaatgcgaactagtgggtgaaaagcgctttgatatacatatatgtcggatatgatgattgtggtgaatgcattgattaattgtgtatggtagtcctaacacacgtaataacttgtataaaaattagtaagtcgacttgttgatcctaatttgattgttttaactctaacaaacggtaaagtgctagagtatttccg

SEQ ID NO: 55357 - DNA, 482 bp, Zea Mays
aaatttcaaaggtctttagcacttgaaccagaaatttacttaatgggaaccaaagccctgccttcatgaagctcctgtaaacaaccacttcatctacttcgggtgcaggggcagcgctatcctcttcaactctcacaatggaaatatctccctttcatagcatcaatttgactctgcttaatggatgattttccgaagatggtgtgactcggccgctagggccgattttcggcatctttgtcttcacttttcacatcaaagcttctgctatcatcagaatcttcagacaaactagctagcatttcatttgtaatcttctctgtgtttgtcttctccatggcctcgtaaaaaccagctagagcaggatcaacaaccttcttctcttcagccatttgatcagcacttgtgcaaatgccgaagctcacgaatcaagcgaaatctaacagagcaagaaaattcaagcttgaaaaaatagcacaagc

SEQ ID NO: 55358 - DNA, 460 bp, Zea Mays
agaaagtacacacacaagagcaatgagcagcaacacatgcaagaatcacaaagacaagagcgcaagatcacaaatcaacaagaacagctcaaaactggcgctcagatctcactaaagcagctagtgtgtgttgttgcagcgtgtcagagtgatgtatagctctcgaagtacttgggtgcagaatgtaggcgcctagggatcccttttatgggccaagtgggcctaggagtcgttgcctctttcctctacaggtgcaccggaccgggtcttgtagccccgcacctgggattctggttggctcctttccttatctgggtggcattgtatcagtccggtgtgccatcgaaacgtccggtgacgtcagtaagtcgttggtcatccacgcgctgttggaggtggtctggtggcacaccggaccgagtactatttatgatccagtgaattataaaaattaattctc

SEQ ID NO: 55359 - DNA, 434 bp, Zea Mays
ccatccaagggcggcccagagctgtcacgtggaagggcggtcccaatcactactgcccacataaggcaaggcccagtgctgccacgtgatctacattgcctttgcattaactgcgaacaagacgtgtacttgctcgccccagtggtaggtgtcacgtccacagtacgtaggccacatagtaattcacttgttacctggcaagaccattgactccctgcgctgcatgggctgctatcattatggctcccacagtagcatacgtgttatcgaggcaaagggaacaggcggagaataccggatgccaccacctaggcatccctacacatggtagtgcgtcggcctacgccgcaacctatgcctgcgtcctgctgcgattagacagggcacgaacatggcaagccagaagatttgcatggcaaccaagggaagatctc

SEQ ID NO: 55360 - DNA, 393 bp, Zea Mays
agtcgggcgctttcttggggtagcgcgcgattcgacagaccatttgggctcggatccatcgacttctcggatcggcccattccaccagtagcttttgctcggcccacgaagagatggccttgcagggtaacgagcccatggcccctatgcaaggacctttctccttctagtggacccgagggatatctgtcccccacacgcggagcttatttcaacccataaagtgacttatccaacttgcaaatataattagggtgggtcttatccacaaagcccgggggttgcttcatataaacgtcctcttcaagaaacccatgcaaaaaggcattttgaatatcaatttgtcgaagtgtccatcctctagaacaagccaatgacagcaacggacgaata

SEQ ID NO: 55361 - DNA, 510 bp, Zea Mays
aagccgtcagagatgctacctgggcagaattcgaagcagccttccgtgagcaccacgtaccccaggggatagttcaactcaaggaggatgaattacgggagctaactcaaggcgggagaacagttagtgagtatgtgcacaagttcacagagctggcccgctacgcgcctgaggatgtcagcaccgagtccagaaagatggcccatttcctgagaggattaagacccgagcttaagaccatcctcgccagccaagacttccacagcttcccgcacctctccaacaaagctatccaagtggaaagggcaaaagaggaagaaaaagggcacctcaagaggaaattccaagttctccgagttcagcaacaagaacgtcaccagagagctcgaccctttgggcttccacccaggggaccaagcttcaataaaccatctggacccaccccatcgtgctacagtcagcagagtcagagctcccttcaggcaccctccgttgcaagcaaccaaccgc

SEQ ID NO: 55362 - DNA, 718 bp, Zea Mays
ctcgagtcgacccaccaacattttggcctagaaccatgcctgcgcccaccctcgcgcatgtatctccctgacaggcgggccttgtctgtcggcgcgctccacacatgctcagctgaaccattgatgcctcgacccacatgtcagcctcaccggctctcctagatctaagtcgctaacacaagtactccacctaccatccctaatctagtgccccctctctactcccaggtgcacgatccccgctatcgatcctgtcgttcctcgcatgagcaccgacactaaccccatcacccgacaatagatgtgatggatattcaaggcagcaatttctcccctctttcctcccctaacactgtgcaattcaaggacgtggactcaccagtcattcaaccgaagcaccgtccgcgctgcacatgctgaagcccctgtcctcaattaaatggtgcatgggtataaatggagaccactgacaccctctgctccctcaactcaaaccccagccacccaagcaccctctcctcgccaccagtgctgccattgtcgcttagaagcctcagtgcccgtgttcaggtcacactagagtctccctaaccttcccaccgatgtcaccagacctgccagagctagaggagtctacaacacaacttcttcagagctctaccaacctcgatgatgagcaccatgatgacctgacccccgcagtgccccaccgccatcg

SEQ ID NO: 55363 - DNA, 388 bp, Zea Mays
ttcagacttaaagttgcatgacagcctgactttgaatctaattatctccaaattactcatgacacgaaggcttaatccctatagcagttgttctcctatagtagctctagattttttatgtgttgaccctagcaaattcctaatatttttagatctacagagctctaaagtcaactctgtccaactgtttttagacttggtcttataagaggaattgaatggctttttgcaattaagcccaattcacatcttttgacttgtaaatcttcaaacatgtgaaccattttacatgaggtaccctatttccatgatttttgcacttaggtccaaaagtgggcaacatttgcatataaccccctagggttttagtccagggttttctaggggt

SEQ ID NO: 55364 - DNA, 772 bp, Zea Mays
ggattgcgcgggcgcgcgggaggggaggcggtcgcgccatgggccggaattggcccaacagagggggggaaattcttttcctttttctttttaccttctcaactcatttcttatttgtttctttttctttttgcacaaaattatttggtggatattctatgtgttggaaaataaaatctaagtgaggtgcttgtgatcaaacaaagtgtatgcatatgatgaaagaaaatctaagggagttttggaattagaggatgaaaagaggggaggggtagattagggtttcaaacctaggttaggattttgggatgttacaggtgggtcccatgggtcgcatgagggtccacatggtccactgtgctgacctacaccctagctccctggctcatggagtagtcattatcggccgcccctcgagcccaatggcatgctgagcctccaccgtcgattgcatgaggggggtgtcagcatatgacccctgcgtatcggtggagcccaacaaacaagctagtaaaggctacatcttcgcaaacctcatcacactgacggtggtctaccggccatgggggtcactggggcccaccacacacatcagtggtgtttcaaggacagggcagcgcaaaagacctacgtgatccactgtgtcaacctactattgggctctgtggcgccaaggctcaacttgtagaccacggcacaagcccatggcatttggggtaggctacatcggccagcaacccgtgctccatgcgtttggggtagccgccgccag

SEQ ID NO: 55365 - DNA, 443 bp, Zea Mays
ggaatgtgtatctttcgctcactttgtggtcccagattggaatggaaaggtaacgccagcataccaatgggcctcgatatataagttgtcagatggtttgaaagtgcattttgttcggattcgtttgtgcacactgagaagtttttgctgtttttacttctgcagaacgtgggttttctcctggttatattgatatgcaatctgctataattgataaacaatttcccttttcctccattctaagtacacaatgcatccatatacaaacaaacaaataggtttccatcattcaaacttgcatcgtttgtttgtttgttgtgaactacagaataccatcggagctattagatgaaagatgaatcaacaacagacgctgagcgtactactgacacagcagttcagcttttttcagtctcctactagatgaggccttttggtacaca

SEQ ID NO: 55366 - DNA, 842 bp, Zea Mays
gtcgtggtcaaggtcgctgagggaggagaggaaggcacactccttgatctttgccttctgaaggtacttcttcttgagcgcctccttgtcgaatcctcccttggacttgtacttgccggaggtgtacttgcccttgcgtcgaccagagtgatggtcgcgcgggtcagactctgatttgcccttcttggggcagctggcaacgaagtggtcgggatcgccacagttgtagcatccgtccttggacccaccataccgctagctcatacggttgttgtggaaccacgtgaaccggctggccacaagtgtcagctcctcatccccaaggctctccacctgctcctttgtaatagacaacaaagaagatagagcaaacatagcaggtgaggagttagaagcagaaccacctccagagactagggccatggtgggtgcactacggttctcaatcttggcccgagtctggtggtcaatctatgtggacttgagcttgctgaagagctcgtccacggtgagagtctcatagttgggcgacttgatgatcgccgagatcttcacctcccaaacccttcgatctagatcatgtagtaatttcagcgctctctcatgatcactatagggtagctgtgccttgttggcatgcatcttgttcacaattgactggaacctagagaacatacaatcaatggtctctccagccaactgtgtgaagttcttgtactctcgcctgtatgtctcaaatagtctggtcttcacatgatcgtcgccctcatggaatctctcgagcgtagaccagatctgatgagccatagtcagatgtccaactcgctcaaactcaccaagcg

SEQ ID NO: 55367 - DNA, 500 bp, Zea Mays
gttgttttaggataattattgaaatactcggttcatatgataaacatgtatgcgttcataatttgggaagtaaatgcatggtgattgtggattggagattagtggtttacggttcatatgatttggtcgaagtgcgaatatacacgtaaatacgtatgtttataaaaatgttgtagtgtatgttgtgtctcggattgcgataataatgggctagccgacgtgtatgttgtttagcgggctatgtcgttgctccagttagccgacctgtcagatggtttggttaatcatgtaatagccataaattgcttgttgtagtccaaatacgcatggttatggtcgtgggtaaaattagtggtgctcatgtgatgtctaatttaaaatgcaaattattgtgtgaagagcgcatcgataaacacatttataccgggtttgattattatggtgaatacgttgttgatggtgtatggtaattctagtgcacgaaataactcgtataaaat

SEQ ID NO: 55368 - DNA, 496 bp, Zea Mays
atcccaatttcctaaattgtacttttgcgttaacttcaaattctaaactcaattagtatacttttatatgaaggtgccttatttaatttccttaaatattattatccccatgaaatgaggatttgatggcaacacaatcaagagagaccactcttatattatgttttacaattttgggtattacagaggctaaccagtaatagctgtacgcctttgtccagtgaacgccacggtagatcgccgcagtgacccatcccctcttttcggccgccagcgtgatttcttcaaattgggcgccaccgctgatggaccctataagtcaatgccctagtgagctccgttaggttgttacgtgtccagtgcaccagcccttgcctccgattagccactatagctcgcgaattccaaatttcccccaaatcgggtttccgcgccaccgtgaacacctcaccatggctagccctctgcaggttagttcaagcttctttgcttgatg

SEQ ID NO: 55369 - DNA, 619 bp, Zea Mays
ggttgttcctaactctgatgtggataatattgtccataatgagggagaggaaaatgcaataactaatttagaaaatgtgatggtgttaagaaaaggccgtaaaattcatcacagaagaaaatctgtgaggcaacaagtctcctaaacataggaacattcctataaaaaggaggggtttgcatgatgatctcgctcacaatttttcagaatgataggtttaatttggaattgtcaggggctgggtaaagatgtgaaaagtgaattcttaaaagaaattattaggaaagaaagaattgattttattggtctctaagaaactaataaaaaaactttgaggaatcttggctgaatactattggtggcaatagaaattttgcgtggttttggtttcctcctaatgggagatctggtggcttacttgtggggtttgacgctgttattttcgatgtgagagaaaaagaattgggagagttcatgatccgaatcttggtggttcataaagaaacatgtttttatttggaacttcataaacgtgtatggggctgctcaaactgaccagaagcaaaaattcctgagtgaattgtcttctgtctgttccaagttcattcacccaatgttg

SEQ ID NO: 55370 - DNA, 300 bp, Zea Mays
ctgaattccaggagatacataaataagagttacaaaataatgaaatatgttcgttataagaaagtaaattcactcaaactgttgaacacgtgcatttgccaaactaaaacaaagaaacttaaggacaatagccctacagactacaaaccctcacatcggtcatcatgtacacggatatttttctaggtacaaaaagacattcaaggttggatctataggaggtgcacaatttcaaatcacagcaagaacaagggcattcacaagagtggaatggacagattagatagttggccctagtaa

SEQ ID NO: 55371 - DNA, 368 bp, Zea Mays
tgacatgaaccatggcaagacttacgagaggctggatcgacgattgtcccagatcatcgacaggcttgctgtgttggagacgcaacaacaagcaccgccaccgccaccaccacctcctcgtccacgtcttcccgatgatgggtgtttgatgaagaaggtaattatgatgaagcggccactagagatttgcacctacattgccatcttcatcaaaacatagaaggtatgccacactgccagcaaggtaataacaatcgtgctcctgacgacccttatgctaagattaaattttctataccatcttttcgggtcattatgatgctgagggatatcttgattgggagatgacgatagaacagaaatttgct

SEQ ID NO: 55372 - DNA, 510 bp, Zea Mays
caaacaagcaatattgagctcttgcatttagatgaatttctttttatcactcattgtaggctttttgacattctttagatgtttcatcctatcatgagtgactctgcaaacatccaaataaggcctcaagatagtaagccagtctagcactcaaataatggaaattagtgtcatcaaagtgtggtaggatagaaaacacttttgggcataaggagtgaaaaagagctaagtagtaggttttacttgttgcaaaaaaattagattagctcagttcacccttctcttgggcatcttcatcttttactctagccccgatagatctccatgcccaagaaccatatacgatcatgtccttcaccatgtgacctcaacgtttgagctccacatcctaatgagttcgtgcaattggctaaatatgtgtgcccctgactcctaggctaggctataactgctcgatggctcccccaatgcctcactgaggttgtcccgactcgacgatgctccacttcg

SEQ ID NO: 55373 - DNA, 681 bp, Zea Mays
taactctccaaattcaaccatctctcccagtatgttatagagcaagttgacacggacctgaagaataagaattgcttcatgagaggtctaaatgatcgactacagcgaaagatggccactcgcctggacctcacttatagcagggtcgtgagcacagcgctttcggtggaagccaagaatttggggtagggaaagacaaagagatatgggcatgaaaggcgtgaaggatccgagaagcggtcgaggttggtgattcgtccttttaacccaaatcgctcttttcctcgtccatctgcttatcccttcaagcaactagtttttatccgtcccactcctacccccgctcaaaacaatcagatgagtgctcctggtattcgtttacccaccttacccaattcatctagtggctgcttcaactacgggaagtctggacacttcatcaaggattgtccctatccaaaacaagataaattcaattcccaacagacttctgggagcacatctcaaggcaagggaaatgtggccagctctcacgcgggcaaaaatacaaggaaaactaggcgatctactacacccaagtggctaccaccccggaaggagagcatgtgatgatgggtatgtttttcgttgccaaccatccctccatcatcctttttgattctagtgcatcacatactttcc

SEQ ID NO: 55374 - DNA, 1116 bp, Zea Mays
tgaaaaaatattctcgctaaaaacaatttaaatccacatcagactgctaataactaatccctaataattttgaaacagatcccgtaggtcatggcttgcctatttgggccaactcgtttgtgtcatgggctcgtatgtgctgcaggtcggtagtcatcgttgttcatagctcctgtgcatcgcttggtcatccctactaaacaaaactgaaattgaccacaagctggcactgactgaaactaacattaactgaaaaccaaatggtcaatttcagaaaatatacactgaaattgaccacaagctgacactgactaaaattaagtaacctgaagtattcatatcaaatcccaggtactatgcacaaactgaacaaggtattgcaatttggtaaacattatgagtgagcttcagttctcaaggcacaagtttcaattctgaaagcgccataacgaattaatgagcgagccgccatgtatggatggataataataagaactatgtagattcaacacaaaggcacatagactaagcaagagggtggggaaattaaaattgtcacattcttatctaaccaactgaactaaatagactaaccaactaaacttcatatatagacttaggctgagagatatgaagttgagaaggaaaagttcatcaagacaactgttgcatttaggaagcagtaataatttagttgctagtaaactccagtaattgacattgatagcaaactccaaaaatctataacgcacattatgcataatctctctacatagagatagaatgcacgattactaccaagtgcacaagtaaagtaacatatgtggtaaaattttagatggatttaccttgtctaatgaatcggacatgaatggatcaaaaaaagacagaaccattggacatgaaagcgaaacataaacctccgtgtttggagactgacacaaagcatcagcgatgctaatcatggattcctcctgcgaccccaatcagacacaaacacaagtagccacgttcctaccctaaacacccagtttcatgcctttagccgctagcttgaaggatgaacagaaggccacgtcgctgcatccgaaggggaatgaaaatggatctgcgatg

SEQ ID NO: 55375 - DNA, 307 bp, Zea Mays
gttccaccccctttgcacatcaccgaacgccagctcctagccatgtgccgctaaacgcctcgttcctggtcttgctgcgcgcccggttgtgcgctgtcgtcaatccggccagcgaattggcggcgagtggccgagcagcccaatggccaagcctagtcggacggtagagagcctcctcctttctatccccttgctgtggctgtgttggatggtccaagaaagtcaaaggaagaagagggaccgctggtgcaattcgttcgtccgggcagagccagaaaacgaagaaaccatgtggagaaatggctgg

SEQ ID NO: 55376 - DNA, 1142 bp, Zea Mays
gatcatgatctagtcattatttggctatgactgttataacaaaattatagcgggatcatcggacaacaactttgctactggcagatcaacatgttattatgtaaaaacctaagatctaagccctgcaaagtggtctgtcaggcgctctgtcaaatgtttccgatggtacagtgcactcaacatgaccgctggtgcagcgcacctgaccgccggcgaccgtgcgcctagatccatgccgctgttgcgattcgtgctcaccggtgaccgtataatgctcctaggtaaaaagatcttcgcttggggataactctggtggctggccgccgtacccccttgccttgcggccggcgcagataagctcaccagcgttggctgcctgccgatcttatgccacgtgcccaggcatcttaccacgtcgcggttagtcgtgttaggcatatccggtgatcgccggagggtccgccacggtgaaagccactaagcgcttgcgccagtgcccctcttcctctccgaccgccgcgcgtcttcgtccaattcaccggccaccactcacggactctataaattgggcatgccatcagctccgtagggtagtcaagcaccaaaccaccaagccgtgccctcaattgatctccagagctcgctaatttctcattctccccaaatctgttctccaccaccgtgaaagagccctcaccgtggtcagcgtattccaggtctgttcgtactccctgctctcttgttctagcatccttaagtcctcctgaagctccttgaccaattcaattgggttaggctgccctggatcactgggaacacgtttgttcctttgactgtccgcgctgtctccatggacaggatgatttagagtctcattagtgaaattgagtggggggaaatgattaggcggggtccgatttggtgtctgccgctcgggagcgccggtctttgcatgattcagtcggtataggctcgccggagatcggtgtgtcgccatccaccgtcgtggaccgagctctgtgaaggaatagagttcaggggtctaactgtaactgtcagcgactcataaaaatagtgcggtgaactctgttcgggttatttaaaacaacaggggtctctgtgcaaagtctgcacgcgggcgc

SEQ ID NO: 55377 - DNA, 509 bp, Zea Mays
gactttcaagtatctcctgctgcatatgagctagaataactgctctatccacagactgtggcaggtgacacattactcccccttgtaattctgccttcaatcccttcacaaattggttgacaaagaaaatctcatccatcccgggttgtgaacagaagtggcataccttgcttcttcaaactcttgagcgtattattcaactcccttcatctgatacaggttcagaagatgtctcatcaccttgggatattcttccacgccaaatttggctcgaacaactttgccaaattgcatccacttccctagtccctgcctcatcttgtacacttgaagccacatcgcaacatttccctccatgtgcatggatgctaagtttgcccatagagcttcaggaacctgatagatggtgaagtagtcctggcacttggctagccaaattccgggttccttcccttgaaatatgggaaacaagtatttgggcaaggatggatgtcctcgccctcccataa

SEQ ID NO: 55378 - DNA, 366 bp, Zea Mays
ggagaattcaaggtgatttttgtgattatctcttgtttatttgtgctgcaattccattgaatagatgttacgtatgcgcattggtagaggtggtgtccagaaatttagtgggtggacgaacaacagtagttctagtgatttttgggcatttttcgtgggtaattagtggggatcagtgggagaatcatgtagagctttgtcatacctttccaacgagtacttatgcactcgattcggagttatattttagtagatatcgctgtttgaatccgggtatgttgctgtccaaaaaaaaacagatttgcaggtgggcgaacagcagtagttctagtgatttctgggaaattttcgtgggtaagtagtggg

SEQ ID NO: 55379 - DNA, 1006 bp, Zea Mays
ccaagggcgatgcaacaagtgtcatatgttcatccagtgatgacatggtactttttaccagcctattcatcgtagatatgttgtcatgttcaaacatggagtagtcagtgatgaacctgtattatatgtataatccccttacttattcgggctaggacaccacaatgttgtgcctattgactaattgatcaagcagtcatggccgaaaaagatgcaatcctaaacgacctttatgcattagtactctattaaattgttatcctattagattgaaaaaactggtgacttgtatcaggcttaattcttacttcaagaacataatgacttgtaagatctattgtttctcgaagtgtgctggcagtatagattcttttgttcgtcaacctccaccaataggcagggggcatgtgttgagtaccaaaatgggaaggcggacgatccacgcgtggaaagaattagttagggttcttaatattttgcgagatttgttagcaaattccgcgggatttgtttgggaatcgacttgtaacgtgtctagacctcccccttatataaaatgaagggtacagtcgattgacgcccccacaatcgatcaaatcaaatctatttatcaaatttactttattttatttttcttcccattcattaggagtataagtaatctagccttagtctagccctattattagtttttctcgacatattacttcatctctaggtgactctaccccgtctagggacgctccaggtggcctgccgatcccggatcactccctaaaactctcctcccgacgaggtccctcctcgagggaatactagggttctttgcgaacaaaaagaccttatgtgcacgcgcggaacgtctaacccacgagcaaaggagacccgcttctacaacgaggtcgtggaccgtctgcatcatcgcagagagcaccgttaggtagttctttctagtgtttacttctaaatcaacgccaacaaggtttttaagttatattcattctct

SEQ ID NO: 55380 - DNA, 432 bp, Zea Mays
ccttgacgaatcacctttgccgctagggccctaggccctgcgtgggagccgcaagtcccactgtggacttcgcgcagaatttggacgccttcggtcttggtgacgcacttaagcatcggctgactgacccccttcttgtaaagttggccttcgatcagtgcgaagtcccggcttcgatgtttgaggcgcttggcctcattgttgtcggttggatgatagtacccctgcaggtacagggttattggtgcccgccagtcttcggtcatgatgaggttgactatgcggtgaccctcactgtcattggttatttggagcccctctgggctgcggacggctggtgtgccgatgacatggtagaacacgtccgagggcagggcctcgctcctggcggctgccttggccaatgcatcggcctcctcattcttggctcgg

SEQ ID NO: 55381 - DNA, 574 bp, Zea Mays
ggccatctgtttgaggatggtatgctgagcttcgtattacatgggtcccaagtgattcttgtagctgctcccaaaagcatgccacaaacattgctcctctaccagatacaatggtctttgaaataccatggaaacacactatttgatcaacatagatttctgcataatttttctgtcttatgggtggtatgcactggtaagaaatgagcggtcttggtcaatctgtccacaatgacccaaatggaatcatggtgccgagaggtattgggcattcccacgataaagtccatgcaaatgtcctcccatttccaagatggtatgggaaggggttgcaaagggcatactgccttcaaatgactagctttgattctctggcaggtgtcacactcggatatgtacttggcaaattccctcttcattctggtccaccagtataaggatctgagatcgtgatacatcttgttactgtcggggtgcatggagaattttgaaaggtgagcttcatccaatatctgctttctgagctcagggtccttgggaacaaccaatcaatctccaaaccatagaattcctt

SEQ ID NO: 55382 - DNA, 1314 bp, Zea Mays
cctccaatggaagctggctgcgagcatacagttcactgtcgcggggaagatgggtatttataacagacagttcactggcggttcctaagtcgggtccaccttgttttttttactggcgcgtgataactgaaaccgccagtgataatttatgggtgccgcaggctttgagctcttttctactagtgaatctggtttatataaactggagcataaactaatatatttaaaaccacttcgatttttataaaaccggatgctttccttgtttgccaattctttcgtcgctagctatactcgactggcatgatccccaccaccccacacacgtacacacaccactcccaatatattccatctgttgtttataattttcaggtatatgatatgactgatattttctgtcgcgcgcatagtgaatgctttttatggtggtctacatggatatcatatgcgacaaaacattagataccaccctttgacaatttcttttgtaccatttgttggttgttttagcatgaactaggaaccgtcaactttgtagtcctacatagaggccactagaataataagtggacgctgcttttccagtggaaaacaagtcatggatcagtgcaaattgtaccctggagctgctttcagatgtcatacgctgttttcagcaatagtgaaactaattcgcagtatctcgttccagaaattgattgcgacgactacggatcatacgttctgctttgcatctcagcttcgtactaacaatagcgactggtgccggacttgaaaagacattgcctgataaatgacacccgcccatctacctcaaataaaagaaaaactttgcatgcaccaacagatcagatgttgctatccaataatttggggaagtgaaatcatgctacgagagagtctgctgctaaggtacagtagcaagatatcttaacactgaagttgttctataccttactgttagcatccaaataaagttttgcccatgtttgtcatcaagatcctttgcagcctcctgctaaaaaaaatgagttcacaggttacgagtgttatttaatgtaactaaagtctaacagttgctttgtgtgttcacgagttcttatgatgcgaaggtcttaagcagcggcatgtcctgttgattggctggttgttggtttagctgatcggttacagtgtaacggtaacctttcttgtggttattataggtacctcggcaggagttaacaatcatgttgtgaacgatgtgatctgagttttcacttaagaccaacctgctgctccaacctagctaggatcctgcatgcagctttg

SEQ ID NO: 55383 - DNA, 468 bp, Zea Mays
cggaggacgcaaggtaggtggctggtattgttctgtttcttatttctttcgtaaaacccaagtctgcagttcacctccctttaacgatgcactcacgcaggccaacatgaccaggccgacacggccacccacacacacccacggcccacacggcccacgacacccagcaattcaacaaatgaaaaatactacttcctcccgtgtccactctcgacgcctgcatccatcacgcacgcaccaccgtgctgacatcttccccaccttcaagagttgattgcccccaatcaagtacttctggaaaacgagtcttgagcacatcaaagtcttcccaagtagtggcatcagatggcagacctgaccacaccacttggacctgaaccactggcttgttacccttcttcaccaagcgccgatctacaaactgcaccggcttgacctctactgcagacaagtccaccagctgtgaaa

SEQ ID NO: 55384 - DNA, 557 bp, Zea Mays
gagcgcaagggcaaaggacgcgccgccaaggagggaggccacgccgctagggagaagtgcaggaacgtaggttgggagtgtattaatataggagagtaggttgggccaaagcctaaccctaatgtgggttagtaatgtattaatataacagagtaggtgggctaaagcccattacaggagagaatacacacagttacgctaacaagcactgcaaaagtaaattagaacaattgcaccacactacaacgaccacatatacaagaacaagaggccctaaaaaaggttcacattgaagggtttccaccaccctctactgtcaccagaaaagtcacatggagtcatggacaaacacttgtccagaagaatcagaaaattaagatcctatcaactcaagtgtctcttgcagagatgaaaagaggatcgggatccaatagtctagtgtttgatgagaggcgaagtacctgatgttggattaccatggaaccaccaaacaaaagaagtgagtagggggaaacgacgctagtatcacgtaagaacaccttggttgtctcaacctg

SEQ ID NO: 55385 - DNA, 366 bp, Zea Mays
caacggggctggtagagtactactagtagtatccattcatacgcgcgtggccggtaggcgctgtaaccactttcttcttctcttccagaaggcccagccctccaccctccgggcaccagtgcgtgcgccgtcgacttcctctcaccttctcgctcctcgagaacgactccatagcgcaccacaccagcgcggcgacagacagcccgcgaggagaaaaggtagaagaggaggggcagggagagccatacatactcaccggttggattcggtccaatccaatccagccggccgcggcgtgaccagccgatccagagggcgccgaatcgatctgcgggggcggcgcggcgatgcggagggctaccgctg

SEQ ID NO: 55386 - DNA, 518 bp, Zea Mays
gtttctggcatttattttcacattaaaaatcattttctatttatttttactggattttctaattctctggactgggcacacaaaaccagaggagcacagggtttaatctataagatttcctagactcagaattcacccacgtggacggcgggttggtttcaaatggacggagggacttatttgcaatatggcgcaaccgaagaggtatgatgacatgtggaccgttagatcaatgatcgacgcccccgattagatccccctttaagtgaacctttacgcgacatggaccgcccgatctgaatccaagggtcagaaccgggatctggtcccacccctccatagccaatccaacggcttgggttgctccaaccgaagcggtacaatccaactaatctgggccacccattctacgatcaatggaccagggccgtcttctccaccacgccatccctatgaccaagcaggccgcgcggtggcacaatccaccgccccgtcggtgaagcccaccggcgatcctc

SEQ ID NO: 55387 - DNA, 920 bp, Zea Mays
gtgcggccaccgcgtcctttccgtctctgttgcacgccattgtgtgtcaccgcatgcaacacttgtctcgtcgaacccagtttctcttctcgcggcgcaggcaatgcccgcgcccccttttccttccctagtagcaccatcaatgttgccctagcccccctctgccgcatcgcaccctacctccaccatggttcttgagcctccctaccgtgtgcacgtctcccttcacaccgtccatctcctctaggccacattcatggcccttgatcgagtcatgaaccctattctccgtgactacatcgagctctaatcttaggcgagctgccacactaccgggccgtttgtgtttcccagcatcgtgattgtctacatgacgattgaggccttgtcctcttccccatccatgattgtcgtcagcatgctcaccgctaacgactacatcacccttccggtggctctaagggggtgacaccgctggctctctcatccttctccatatcattgccaccgcctcctcccactaattgggttgccgactaggcgcctcattccataccacttctgaccccgagttctgtctttacctcatcctcctagccccacattcccttcctccatcattgcggtaatgggtcgactctacctatcaccttagtaggtgacatggtccttcctagtcctttgtacctcaacaacattcttgtggcccccaacatcatccagaaccttctcttggtccatcacttcaccactgacaaccattgttctatgaagttcgatccatgggggctcaccatacgggatcttactactcgtgttgtggttgcccactacgatagctccggtcccttatattccatttgcttccctggcccaccttcgtcagtccatgtttccacactatatgcccgtgcctccac

SEQ ID NO: 55388 - DNA, 552 bp, Zea Mays
atggtcgagggaggagatctctatctgttgcaacatttaacactccatgttgtacatatttaatactagatcactaggtccacctgtcggggctcagtacccttttacatgcacccttagactataaaagggaggttacatgctatacaagacgacaagctctcacagacactctcagaatctcacaacctcacaagctcaacaacaatacaattctcaagtggatatagggtattatgcttagacgacctgaaccactctaaatcctcatgttttcttatgttccatcttctcattaggctaaccctaagcaacccccttgttcttaggattaggcaggtgtcagggaaaagatccccagtccatggggcccaccggtcaacgagggcgttgggaagggcctctggcaaccagggcccatcagtcagtaggaggaaggaaacgtctaccctagaagcaccccgccccgaacgaaccccaaggcaccgagcccgagatcgggcatggtggagctaaaaagggggaccgagtggacctaagggaaaccactcg

SEQ ID NO: 55389 - DNA, 754 bp, Zea Mays
ggagtagcgatattccttctccagctctgtctgctcttgttggtttgcaagaattatccatagcaaattttgatcaggctctcgaggatgttgtccctgaagatctgctatccgagcccattaatggtgatatgatggacgtttgctctaacattctagatgtgggattagaggtatcccgggcagcgtctcgtgcattgttgaccttggagggcggtcttcggagccaagaggttggtcaaggttgttcatatcccatggtggtgactgagagtccttcatccttagaggtggctgttgcagagaacccagttctcaaggatggtgctagtggttgcccagcccccgagggtgttgccggtaatgatccagctcgggtgggtagcgcaagctgcgacccagcccccaagggtgttgccggtggtgatccggctccgatgggcagtacgggctgcaacccagcccccgagggtgtccgagcgggctcctcttctcatacctccatggatgtccatgtcggatcttctccaccacattctggaggtgtactagcagtgcatgcttcaagtgaaggagtcaccttagaggtcggcgcactagatgctggagttctgatgcctgttggtggcgtcgaattgatccctggtgatgttccttcaccgagccatcatttagcttctcgtgacctaggatttccatcgttcttctctaatcttcaggtaacttggcttttcctattctggcgatactcctg

SEQ ID NO: 55390 - DNA, 334 bp, Zea Mays
ctttcgatgagactatgccttgtacaaaccctattttgagcatgcagataatggacagataggagagactattttatggaggaagggcaagatgacaacgatcgaggtgatcctgagccgtctccatcggttgtctcagtcgagcctgcttccactacttcagctgacagacctaacatcgcttcttccattacttggggtccacttgagccggaggttgctgagcctagaggcgatcaggttgctgttgagggggaggtgacctcttcgagagacgcatcacgacacattcaacattgtcgcccacctaaatagatgatcagtgagcttcacg

SEQ ID NO: 55391 - DNA, 528 bp, Zea Mays
aaagtgtagaacaccactttattggaatcagaccagagaaagtcaagtatttggtctagaaattctccaagaagcagaaaagcaagtacatattatcagaaagaatttgaaaacaacacagtcgagacagaaaagctatgctgacaatagaagaagagagttgatatttgaagtaggagacttcgtataccttaaagtttcaccgatgagaggcatgaaaagatttaaggttaagggtaaactatctcctcgctacattggcccgttcaaatttttggaaagaaaaggtgaagtagcgtaccagttagagctacccgatagtttgtcggatatgcatgacgtatttcatgtgtcacaacttaagaaatgcttaagagtacctgaagaacaattacctatggaagaactcaatgttaaggaagatttgacttattcagagtaccctatcagaattttggaaacatctcgtagaattactcggagtaaagttatcaacatgtgtaaagttcagtggagtcatcattcgga

SEQ ID NO: 55392 - DNA, 894 bp, Zea Mays
ctcttcttcgatgtgactttctggtacttgcaggcatttgcggagctgggacacatgaaacacattgtggatatcagacatggattttggtaattcaagacgatatgttgtgggtcccactcttccaatgatgggataggggccgacgaatcacggtgctagctttcctttcacttggaaccttttgacaccacgcatcgggtagaccttgaggtagacgaagtctccttcttcaaatctgagttctctccgcctgttgtccgcataacttttctgccttctctgagcttcaagtaatcttttgcggatcagggcaactttctcttcagcctctttaacaaaggcaggtccttccagtgtcttttcccctatgttggaccacatgagaggggtctggcactttcgtccatacaatgcttcgaacagtgacatcttgatactggtctgatggatattgttatacgagaactctacataaggcaaactggactcccagtttctgtcgaatgttaacacacatgctcttaataaatcttcgaggaccttgtttaccctttctgtctgaccatctgtcttggggtgataggcggtgctgaagtctagcttggtgcccatagcttgctgaaggctcatccaaaatttggaggtgaactgggttcccctgtctgacactatcttccttggaatgccatggagtccgactatctctttaagataaatccgggcaagggtggctcctccaaaggtagttttcactgggatgaagtgggctaccttggtgaggcggtctattattacccagatagagtcgttccctttttgcgtccggggtagtccggttacaaaatccatgcctatttcctcccacttccattcgggcactgggaggggttg

SEQ ID NO: 55393 - DNA, 288 bp, Zea Mays
ggcgtatgggctattctgcgcttggtgtgttcacggtaagttcccatgcccagttggcaaggaagctctcaggttcatttggttgaaaaagggtggcaaatattcgtccttcgataaacatcgacaatttctccctcctgaccatccattccgcctagacatcaagaactttacgaaaggtgtcgtagtgacagactgcccacctacaacgatgactgtgccgaaattcgtcaacagatagatgggctcgtggccaatatagaaggtggttttgtgggatatggtgag

SEQ ID NO: 55394 - DNA, 709 bp, Zea Mays
agttctagcatttatttttgtattaaaatcaatttctaaaattaaataactgaattctcaaagctatggactgggcacactatttacataaaactcgggggcctcggggctaaaatactaacacacaaagcaacccaggtacggacggcgggttgatttctgataagcgcagggattcttttgtaaaatgagcggctgaagcggtacgctgagttctcggccgttagattagatctgaacgaccacgattagatgggcattagcacgaatcggtatgcgctacccaccattgattccgagatctacggtatggatttaattaatgcgagatctaaacccgtctgtgcgatgaggatccaacggtgtggatcaatcgaccgaaacggtatccgatcacctaatcgtagtcgtcggttggggatcggacggtggctgcgggattagctgtttcctggccggaaccgagcggcgcacgcttcagggcacgacagcgtcatcaccggagcacgcaacacgacgattcccgcccataactctaattagaacgcggcagcacgaagcggtcacgactgggatttgcgcaggatgctactcaccgcgaattgaagacatgaaccaagctccccacggtacccggcggaaaccgaagtccggtgacgaattccagcggcgccagtggctaatcacgcgcaattcggtcgcagtcgcc

SEQ ID NO: 55395 - DNA, 742 bp, Zea Mays
cattagcccaagcgacatagggagtcaatggtcttgcctcggtaacacgcgagttactgtgcggcctatgtactgcagacgtgccgcctaccactagggcggggcaggtatacatctcatccgtagttaatgcagaggcactttaaacttagaggctgaggttaggctttccccgatggcttacgtcacgcgtcgtagaacacatggcagcactgggcctcgccttgtgtggggagtagtgactgggaccgcccttccccgtgacagcttcggaccgcccttggctatgagtccggatggtgtccgggggaggtcatgtctcctgcggtgttggccaacacgtgacaacaatggacccccttaggacagaggtctgggtggctcgccatgagggatggggctgttactagggttccggccctcgaacacgggtgtcgactgccctcgtgttcaagacatgcggtaaacccgaaccccctctgctagggttccagagcactgattataggtgttggccttcacccgagtccagtggcctaactaggcaaacctagccactgggttagaacgaacaaccattaacatggtgactaagggtagtcccggagggtccgacttgatccagcaatagtgagtaccccaatcttgaggtaccgacagtggcccccgggcccacctcgtgtgaggtggcaaatccgtaggtggggccataaccgtgctttgcttctaaaaaggtatcatg

SEQ ID NO: 55396 - DNA, 505 bp, Zea Mays
tcttcgataaaaatgaaaagttcgcaggaaaatggataagggaattgccctacgtcgtttggggcctaagaactcaacctagccgagctctgcatggaaacactcctttcttcatggtctatgggtcagaggcagtattacccgctgatctcaagtttggggcaccaaggttggtctttgaaagcatagcagaagccgaagctactaggctggaggatattgatgtactcgaagaagaacggctgaatgcagtaattcaatcgacacgataccagcagactctgagacgctatcatgacaaggccgtgcgacgacgatccttttcagtgggagatctcgtcctccgccgaattctaacgggggagggacggcacaagttatcgcccttatgggaaggaccattcatagtagcagaagtcactcggctgggatcatatcgtctcactcaaatggacgacacagaaattgggaactcctggaacatagaacacctcaggaagtttta

SEQ ID NO: 55397 - DNA, 930 bp, Zea Mays
gtgcagcccaaccacgcccttgcgccgacagacgggcccgacatctaagcctgtactcgcggcgcgcatggtgctcttacatgtgggacctgcacaccagcctcacaattcttgtctgcgcgcacgaaagagtcgtgagcgactgcctggcgggcccggccgccagtggctgcaggtgttttgcttctccactcgtctctgccctgtgggaccaggccgtcagatcaatcgcgcccacgccaacagaacccgcgccgcgtcctccgtgatctccggcgaactcatcccacgcccaggtttctcggctggtcgtgccattagtctataatacccgaccccacgaacccctacgcccattgtgcccctttaatctagcaaccgcggcgagaataggaggctttggcttggacagcggccagaaatcatccgccagcgccattgccatcttcgcctaaagaccgggcacacgggtcgtgtccgggagccttgcggggtgtctggtgaaggtttcgtgaccgtccaaggtggtggtgaccgcggtggtggccggaattcgtcgccgaacttcggtttctgccgtgcgccgggggaagcttggttcacctcatcgaatctcggtgagtagcatcctgcgtaatgccataccattaccgattcgtgctgctgcgttcggagtagagtttagggtcggcaatcgccggtggcgcgtgctccggccatgctactgccgtggtggacaggtccggtggtcggggttgggggcaatgatagtggccattggattccgtcgctacggcgcggatttaatcctggcagagcgctcgggtatgtggatctgaaccgtcatgatccgatcagacggatcagggctatctcgggtcagatatgatttgcgccgttagatagaaattcgaaggccacgatcgaatc

SEQ ID NO: 55398 - DNA, 609 bp, Zea Mays
attaggcacacatcaagtcgctagagtagctcctcttgaagaatcaaagacctcttcggtgctgatagcatcatcatcatgtcgaagcacctcagatgatgatggagtcaagagtcttgtagtcatcttgacgtgggccatcttcgtagcctaaaggatggacgaaggtgaagagtgttgtgaaatcaagatctcacaagaaagcttcgaaagtagagcacaacgaagcaggaagtgggctaaagagcaatgaatgccttacattggtaggcgggtactgtatacttatatagaaaaactagcacaacaaacgaggtggcatatcacttatactcactatcccatggtcctgactttgtattctgtgttttcaaccacaaaaagcatattcggtaagtagtcattttcgataataaactcaatggaaggtatttttcagaccttcggtgcaaagctctattggtcgagtttcatggcttgaccttttatagaaaccaaactaatttcacgaggggctactattggggagaagccttcgtcgaaggtcctcgaataatgaaatatattgatttaagtttgtttcaaaaggcaatttctagagacttcgga

SEQ ID NO: 55399 - DNA, 384 bp, Zea Mays
ttaccaaacctagtttaattaaggaaaattagtttttcttctgtactgaacctaagaaaatttataggtattcaaacctcatttagacactgtttaaaaatagtaggaaccccagcattagaaaatatgatgtagttattcatttaaaactattttgcccaaaacttaggaaaaatcagagaggcattagaatttggtgaacagtgagtaaaattatttttcctagtttgcttatgtaacagagaacctaggaaaaatacagagactattagttcagatcagttttaatttaaaatgttttatttagccttatttggactgaaaatcaattattagagttacaaaactataaccaaaatgagtaataaaaatccagtggactta

SEQ ID NO: 55400 - DNA, 339 bp, Zea Mays
ctgaccaaccacaaaaacaccttaatcttatgaggtagcgtggttttccacagaaaattcaagggaacatcaatcaaagaattcttcatctctttgtacaaggaattcactgaaaaacctttgctacccaacagccacaccgaagtatcatcttctccagaaagcaagacatcactgcaaagggtaatgaggtcattataagcctctcctaaatcgccaattagtcttcttctaaacgtaagcgactgaaagttggaggagatgacattatgaactgtgatatccttatcataagcgaactcaaacaagttaggatacttatcagccaatttttcagtg

SEQ ID NO: 55401 - DNA, 444 bp, Zea Mays
gagcgctgagcagagggcagatagtcagatacggagcggtggaggcgagcgccgagtagcatagggaggttgtggcggtgccgaacttgagcatgacaagaagcgagtatggccaacgctaaaaagtggcgctttagcgcttaaaacgagaacttttaagttgatttatgaaacgtacgacgctttactacctcagtagcgcttaaaaggcgctcaagcgcctttttaataacactgtttacaacacattttaaaagattatgttttctatatcttcttcatgtacagcaacgacctctaaattcggttttttaaatctaccatgataacaaaatacacaaactaccttatttattcattttttatattgcacttggattcaacgtactgcaatacaaaatgaagaaattaataattattcaataatagatattttggaacgta

SEQ ID NO: 55402 - DNA, 514 bp, Zea Mays
ccaagacacaccggggctgaaccaagacgaagacacaccggtaccgatcgatacaaccaccgagaggtcaaggaaaaggaagcagagtgaccggaaaagaggtgacaggggaccaaacaagtttcttgacaaaacatataaaatctcagatgtgagctcgaaaggtcagcccctagctccagaagaggcactccctaagttccggattgcacttgggttcttagttagggataatcttgacatcacaatccgacattggaaagatgtgtcagttaatgtcaagaatcaaatatggaataagctattaatgaggtttgttctacctcagggttcagaagaacttgtgaaggaatacacgatgaagcaacttgcaatcatttttcgaaactagaggtctgagatgaatataaaatttgcaaacaaaggcctagatccaacaaaaaatataaaatctcagaaggtcagtgggcagtatttctagagcagaggagcatccctgaattcatatctctaa

SEQ ID NO: 55403 - DNA, 663 bp, Zea Mays
ctagctctagcgatacaagttatgcttatttggatgactgcatttatagctcgacctggcttagatgatgcaaaactgataagcgagcctgactcgtaagatacgggatttatttgcgtttctctagagcctggctcacataaacctactgcagatcagccaagtcacgaagatacaagccaggatgcctccgtccgaaaaccaaacaggccgttcactgcgccgccgcagatcgcctgcgctaccatctagcaccgtcgggagggagcagatgggagtgtcgttgttggatcctgagccgatggccatgttagaagctaacttatcccttcgccacattaaaacagagccgcagatccattaaccgacggtgtagagtagattgagccaacataaattcttgagcgtagatctcgaatcctatggtcgttgtcgcgtactgagtcagtaatagatgagatctaatctagaccgcaggtgtttgatcggacgatttacatgtaaagataccccttcaccgagcaaaattgcaaaagagaccctagctctttagaaaatcatgcctgtcgttcattttctatgtgttaagattagtataaataattctggtatttgcagtttagcctctcgaagctatttttaagtataaatttaataatgaaa

SEQ ID NO: 55404 - DNA, 638 bp, Zea Mays
gactttgacctagaacttttactggacctttgggttctctttcgaatttcatgtaaaagtttgggttcaaatcaagtctttttgtccctattgagctctgattgtcctctggaacttggtaggagcagtcaatcgattcatggttgatctgttcttttgtgaagtgtttttgttgtccctggaggttggattgggtcaaggaatcaagtaacaagtactgttctcgcagttctagaattttgtagtggctctcattcaaccctctctggtcacctcactggtcctttagtacatttgttaagcaacttagtgtctgagagttgaacaagtcttcatcgtgtgacaaattttggatctttgtcgatggtggcaccgatgagtacgatagaagaagtaaggaagtcactagacaagtatattgatgtaataatatggggatgataattgatagcactattgaaacacgaagatagcgtgatggttcaatttcttctacatgcatttgcaatggttggcgaggaattgatgcaaaactaaattcatttgttgtgtaatcatccgtgaggagtcgaagacatgatgacaccaattgtcatttgatagttagggatatagacaagtgcacccatttaagtttg

SEQ ID NO: 55405 - DNA, 834 bp, Zea Mays
cccatgtcggaagtgacttgtactttgtatgcctcgaagtactgtcttagcttacgcgaagccatgatgactgtgtatgctattttctcaagctcagtcatgttgcactttgagcttgtgaggacttcggagacaaaatatactgggcattggtgagccttgccgtcttttgccttttcttggactaatgctacgctaactgcgctgggcgaggctgcaatgtatagtaggagggggagcgctaggtctggacttgttaatgttgttaggtcggatagatattgttttagagactcgaaggcagctgcttgttctgggtcccaaatgaagtcttttcgcaccgtgtaatgttttaagaaaagggaggcttcgctctgcggacctcgagataaatcttttcagtgccgccaatctgcatgttaaccgttagatgtccttggtggattatggcggtgccatatccatgatggcttgaattttattttggattagcttcgatttctctatatgacacgaggtaaccgaggatttttttcttgacgtaccccgaagatgcattctctaggttcactcagagtcttgcttcacacatgctggcaaatatttctgcgaggtctgaaatgtgatcttccttgctttttcacgcaacgacgatatcatcgacatatgtaaagacattacggcccatttggtcctcgagaaccttcatggtgaggcgggagaatgtcaagtcgacatttttattccttcgggcatccgtacgaagcagtacgtgccaaagggggtaatgaaactagtgctagcattgtcttcctctttcatgtagatctggtg

SEQ ID NO: 55406 - DNA, 871 bp, Zea Mays
acgaattggtcgtgccatgcatgggcctagtactaggcacgtcgggcggcccggcccgacacgattaagtaaatgggtctggcgtgcttgtgtctgtcgtgcagggcccaaatcaggctcaggtcgggtcaggccatgccgtccgtttggccatctataaggagcgatacccttgagcatcttgatccttcaacatatgtcgaaggacaagtctcccaacgcctaaggaggtgtctccactaagaatttcatactttagaaggagcatgaattaacacagggctagcatgagtagcaccatgtggaaccattagatggtgtcctcccatttgaggcaatgaagagcaagactcatctagatttgcagtgtcatctgtgtcataactcatgattggagttcgtggagctagttttagggctagttttagaagaaggggagccaagcatagggggaaacctcccattaaaaactaaatgtcttattcaaattgcaccttcgtggattactcgccttgaaaaaacagggatcccaaggggatttgagtttccaaactagaactataggtgatcgttctgtcaagtgggtgtgccggtgataccatgacaacacaacataacaaagcacaataaaaccctacttattaacatgccaaatgttttcgcctaatgacgctagggtgttgtaggcatttgagaagatcataaagttaagaacataaagagtgcataggcaggaggctcgctagatatgaggtattgctatgactagcaataaatgaattctttaaagatatgtggaccatgaaagtgtaatactctacatcctatttatgtatgatggattgataaaagtgaaagtgaagggaaccac

SEQ ID NO: 55407 - DNA, 621 bp, Zea Mays
gatgatcttcgtggctccttccccgtgagccttgtgatcattgagtagttggctaaattgctatttaatgtagccagatgcaattcagtgctatgctaatttctactttggtatggcgatcaggtttagattttggcgaaacaaaaacagtggagtggagtggagtacaagcggccagaaaagtgagagagctataagtctggagctaggaacggtgtgagcacggatcgaccaaaaaaactatgcaataatacaattcaactttgtagtggaatgtggagaaatttcaccgtttctggaaatgcataaaagaatagaaaaggtcaccttgaactggatctaggtctgctaaagcaatgctgaaaccctccacatcagagtccacgactcccctttcttcctgttcggtgacctccatatcctcctccatgacacgcctttccctctctctcgcctaccactcccgcgtacgcccataccaggttgggcggcggctggtgcgaagccattgcacggggcgagagcgaaggttggtcggcggctggtgcgaagccatcgcacggggcgagagcgaaggatgcggacgcccgcgtccgggtgaggcgggaggttcggtcgtcg

SEQ ID NO: 55408 - DNA, 332 bp, Zea Mays
cctgctcaacaggccaagggtcccagccatcatcagcattagcagcaacattttcctcagcattgattccttcctcaggaggaatattgaggtcgaactgaaaatggaagttgggcatcggttgccccataccaaaaaactcaacaaggagctggtgaccatcatgggggtagggaggcacggggtcctcatcttgaggttgggcgccaagcatgaactgttgcacaatgtcacattgaacagtccaagagacaccctgaaaaccttcaaccaccgagaagactatgaactgtggcacttcctgcaaagaagtcactcttgctcggaccaac

SEQ ID NO: 55409 - DNA, 704 bp, Zea Mays
taagaatcctctataaattaagttattctctgtagataaaatatttagagatattatctaacataactattaataaatttgaaataggaatatgaaaatgtgaaggaaactaagaaattgaaaatagaaaaaaaagaaaaagaaaagagaagagcaatcctgcgcttgggccagatcacctcccacccagcccaaggtattccgtagcccacatctcttcttttcttttatttaatcctcttgccgcacatgaggtcagcatgacacaagtgtgacatcaagcaagcaacacatgcagccgtatttccatgcacacgtccacttctacgtagtcgccgacatgtggacgatagaatcacgtacgaagctctgcacgggtaactagtttataggatctgatgtcaaccgcgtcttcctccccgtaacaaacccatgcatgccgtaaccacctctccgtaacagccggcccaggtggcttcctcctatagctattctcccgccgaggaccgctccagccgaataaagaatagtttcctgcgtgggtgacgtcggctgggcgtcataggtgacctcatccgtatacctttcaccatcactgacggctgggccaccatgcattggtgttcgcttgcttcctggtcttgggcgttgatcggaacggcttgccgtaatcccggcactagcgccctgctcgccctataaac

SEQ ID NO: 55410 - DNA, 1263 bp, Zea Mays
cgcgcgccagcgttggccatcttgcacagaggccctcggtcatttgaacaaacagtaaagaaccctcgacactatttcttgtctcactgacaatcacacttaaacccctcggtttctatttcttcgcaagatcaggtccccgacggtgaacgacggcgtgcgtgctgtccggcgaacttgcaccagccacaacactcaacaaaccatgctctaacttggtctatgtcgaattctatcctcgacaatctactgggaatcaccaatttgatccgaacaccattctagagcttagtccacgcacccccgcggaagtgaaggtttctcggtctgttctcggtgatatagcgaagtagcgtacaaattgggagcatggtaagctttagcaacttaccagggcttaagaatggtagctaggaaggcgggtggagggacaggacgacgcgtcgacggaggggtgtccacggtggcgcggagaaccaatttgggggaaaacggaattgcttgggctatggtggatgactggccgaggttagagttgcactgggtttgttatgagggggcgaatcaagggaggtgctcaatttatagaggttggccacggttactccgattttggaagggatttggagggcgacggtgacaagacattgtaccggcgagcacgatgtggcgctcgacggcatacaaacgtagggagagtaattctgagcatgccatggttacgactacatggtaaaggaccacgtcgtggcacaatcgagttcaccggtgacctatgacaaccatgaccgttcggccacgtcgcgcaacccccaaacccctctgataagctactgcccgcgacccaatccatctccccgccagatcttttactccccgcggttatccaccttgcgccgagcataaatcgtgacggccggcgtgaatctaggcacggggatcaccggcggcgaggtgcgatgtatctgaagatttttccttcaccactataccattgcgaccgttcatcagagcgcttgacagagcagattgagaagccaaattctccaactttcatgtggagagctaccaatttgactacatgaaaattgttgttcaacataccagctctgattttgttatagcaactataatcaaacacttactggatcctacttgaaatcgcccccaaagtttaccagagttcactgttagccaagttcagtcttcagtggtgactgacagtccaacttcatcctcacttttctccaatttttgtacaac

SEQ ID NO: 55411 - DNA, 771 bp, Zea Mays
cttgggatcacctgaatcggcgtcgtcatgcttctcctccacaaagatggtctgtcccatccgatctggacctgcaagctcaaagacaggggatggacaaggtgcaatctcatcgaatgttacctcataagtctccataatgcggttagtctccaggttaagaacacgataagcacgagaatgtaatacataacccaggaaaaccccatcagaagaccgagactcaaatttgtctgaattgccctgtttcagcacaaagcatatgcagccaaacaccctgaaatgactaacgttgggtggccatccaaaccacaactcatatgaagtcttgttcaagaaagttcaaagaaaaatgtggttcgacacatggcagataatgttgatctctttggcccaaaaatgcctaggagccctatgctcatcaagcatcgtcctagccatatcaacaagagtccgatttttgcgttcaacaatgtcattctgctgaggcacatacaaagatgaaaactaatactcaagtcccaaagaagcacaaaaggtctcaaaatgagtaatttttaattatgtatcccattgtcactacgtatagctctcatggcattcttgggaaactcattttgcaacctaataatcaaatcatgagcatgagtgaaagcatcatccttcgccttcatgaagaacacccaagaatagcgagaaaaatcgtcaacgaccacaagcacataccacatcccccccccgaaagagcaaacccgagctggaccaacagtg

SEQ ID NO: 55412 - DNA, 622 bp, Zea Mays
caactatagagctctggccacggtggccgagaacatggcggctagatcatcgcgttcccgacgattgggggcatcctagttcaaattgatggcttggcgagcatcacagagtaaccagagtgcttaaacaaggaagagggagcaatgaatcaacctggaaagagctggccgcggtgagattgggtttacggcggcggagagtggatttggggcgaatccaaaattcgcgagttctagcgaaggactgcgagcgattagcggtggctgaatgcgtgaggatgtggtgaagctcacagcggggtcaatttatagagccccgaggcggtggcgcttaatttgagcggatagcggaggcagccggagataagggagaacctgggtgcggtgaatccgtggctaacggcgtggcaacctccccggcgacgatgggatggcccaggggagtcatgacggcacggtggaaaagctaagccacgcggcgtacagcgagaggcggcgttcaccggcggttttatcggcccagccgcaaagaggaagagagagccacgggggtcaccggagtgatctccagctcaccgccggcgaggatcttttaccgtgtgtccttatctgcccatcccga

SEQ ID NO: 55413 - DNA, 682 bp, Zea Mays
aaaagttctaagactcaggttaacccgaggtggactacaggttaaatgctaataaatccagggtctctttagtaaagtggttgggccaaagaggtattttctgttgtgagccgctagatctacatcggacccctagggtcaaagtcagccatcatgtgaaccgatacccttttatgaccacaggatctgagatcaacggcctgggagttaaagtgctaagattgccccccatacacacgatttgaatcggacggcacagatctgaccatgaaagggtatgcgaaccttctaatcacaaccgttcatccattgatccacggcggaagggtcttcttcccccccgacacactgccgatgatggagagcacccacaacggcggcaccattgatggtgaatcccgcacgagcgctggcgagctctaaaccctacgcgattatgcgcaaaacggagaggggaaagtggtgggtaacaaggtcgtggccataccacggattatgcactcagacgacccgaccacggcacacggcggaaagcccagggttcctcgacgtcggcgagcaattgaggaacgaacggctggtttccgccctcccgaggtggtcgcgcacgcgcggcacaacaaggcgaaccttttgggcggtatctccaggtcacggctacagcgtagcacgcggtcgatgg

SEQ ID NO: 55414 - DNA, 412 bp, Zea Mays
gttcgatcgggaacccgacacttcttcaactgagacacgtggaacacattatgtacagcagacaagtttctgggtaactggagttggtacgccactggtccatatctttcaaggataagaaaaggaccaatgtatcaaggtgcaagcttccctttaatcccgaaacgtgttatacccttcattggggaaactttcaaatagacataatctcccaccagaaaatacaagggcatccgtcgtttgtctgcataacttttctgacgagcttgagctttcttcaaattatgaattattcactgaactttctcttcagtatcttttaccatatctggcctgaagaaactcctttcacctggttcagaccagtttaatggagtacgacaccgtcggccatacaaagcttcgaagggtg

SEQ ID NO: 55415 - DNA, 576 bp, Zea Mays
acgtttcgacgtgttctgttctgcctgcgaccttgccccgtgtcctcaccccaagtagtggccatacacacacgaccaaaaacaccagcaccaccactcactgacgcagcttagctaccctccacgcctcctccataaagaaacgagtaggttttccttggaccttttactccagagccttttgtgtccagcaagaacctacctgattctgcagacgtcttgcagatgcgggctaggtttcttcagaatctccagcccagtccagatttcagatcatcttcagtatacatcgtgtagatatatattgctgtctgatttcaggtccatcgatctgtcaatggttggttaggtcagtgaattggagcaagcaagtggcgatgcaatttgcagctgataatccctgtactgtgtgctagcactagcggtaaggaggggatgggatcttgatctgatttgtgaaatggtatctagggacagtattttagtgcataagaatctgactggaaatgagtcctctctctctctctgccctgcatacgagctgaccctgacctcggaagtaggaagtcagtggtc

SEQ ID NO: 55416 - DNA, 419 bp, Zea Mays
gtgtgattcgaccttagaccgtctcgtcggtacctccagtgatttttccatagtgtggtttgcaagggcagcccccgagcctttgcgcggggcgaaaggatggtcgagccgtcgaggggtaccttgacctttttatttatacgcttcttcgtcgcctcttcataaggaggaagagggaatgcgctatgccaccctcgatgggcaaagagcatggtgttttcattgagcttttatcgggtaatctgagcgggggtccgagctccgtttgataggggtcaactagcggtccagagacacgcccccaaaaagtacctgcgggggattcgcctggtcccgaacccgtctgatggggtccgagggctcgatgcctccctacgatgggacataatcacgaatcgctcctgggtcttggatgtctt

SEQ ID NO: 55417 - DNA, 435 bp, Zea Mays
gctatcagtcacaggcggatttgacacaaaaagggtgaaagctttgggaggaggcaggttccaagccgaatatgccactggagcaccaacatttgaaactttacccctgaggatcatttcaagtcggcttaccaagtcaacagaaggaattctcctattggtaacccaagttgagtcagccagccctcgatacagatatgccggataggccctatctttcagtggctgaatgttcttaaaaacaaagtcagtgaccaccgcttcagcagttagacctctctctttcagcagtccaatttcagccagcaacacacctgcctcagccacttcctgatctgtgggagactcagtccaactcggggtgcgaacgtctggctgtcttcccgaccgggaggggagagaatttccataattatcaactataaaccactccag

SEQ ID NO: 55418 - DNA, 614 bp, Zea Mays
ggcgcgtgtggtcattcatccgagcctgctctttccttggtcaatgcacaaaacctcttctcctccctataagctaccgatcttgtgtgggagtcataggattttgcctactggtttcaaagatttggagccctgaagtttggtctgtctccctgcccgagcccgaggcaaatcttgggttttgtcatgtctagtgctcgtgtcacaatgccatcttctagcatgtgacagagggattagttaggcacaatttcgtcaatggggtcattaggatttgagctagggatcaaggtgaacacgcttggtctttagctcaagggctgaaattcagaattctgaatttcagaaatccccattgaaccctcacttgagaagctttttttagagtttttattaaactattttggacaagctttcctaatctttattgttgcttatttagtatacttcaatgtttatatatggcctaagccttgattttatatttttcatagccttttgccccttttcttcaattctacttaaagagctcaattaggtttagtattagggtttcaacactatgctctttttgaaaatcttacttttttggaacaggattctttagatataca

SEQ ID NO: 55419 - DNA, 466 bp, Zea Mays
gtcgaatcctgagctggtgataacctgacctcagatctatctttgaaaacacgctggctccactcagctggttgaacagatcttctattctgggcaagggatacttgttcttgattgtgacctcattcagagctcgataatcgatgcacatcctcctagtgccatcctttttttccacgaacaggacaagggcggcccaaggtgaggcgcttggtctgatgtaacctttctttgatagctcatctatttgcttcttgagttcaaccaactcgagtccagataccctgttagctcttttaggaatgggggcggttccaggaagaagctctatggcaaactcaactttccgctcaggtggcataccgggtaaatcttttgggaacacatctgggaactctgacacaaccttgattgtaacaccccaggtgttacttagagttgtcactcaaggcgctacacaagcaaa

SEQ ID NO: 55420 - DNA, 335 bp, Zea Mays
cgaaccaccaatttggactgtgagctcaccaatcgccgggaacacactcccctgtccgcatggttctcggtcgccgtggccagagctagttagttagtcgttgatgaaattgggttgggggaatggatcggggagggttcaattgggtgttagtcgcttggagaccctagtcattgccccattcggccggtacaggtgctcgccggagcttccccgcgctcgacgccgtcgtggacttcaaaccgagaatggataggagtgcgggggtctttttgtaaacggtcagtgactctgttaaacagtgagagaacctattttcggttagtaaaaactcc

SEQ ID NO: 55421 - DNA, 319 bp, Zea Mays
gcgtcttttacagtattttgtctctatggattgcagctgcgacagttcgaatagctgcagcagctgcggtagctacacagttaggggagtttgtcaaagtaatatttggtcaattatcaatcacctcctgaacgctaccaatatgtatctcgcatacacgtgtgctaagatcgtcctactgtgctagctagtactgctgtctactgttgagcctactctgttgtatctcaatttcgtcagctttcagttatgtaagatgtgtgttcctattcttgtgtacagtatagtagtatgctgcagcgtttgcagcgattacttt

SEQ ID NO: 55422 - DNA, 274 bp, Zea Mays
gaaaactcagagaaaagaaaaacatagcgcagcgaaacgagattaaagacagtctaaatgcagatcctcatccatgatgtctaaaaatctgcatcaccacctcctccaatctacgacatgccttgattattagttcttgatcatcctgtctaagttgtagttgagcccagaagcggagcccgaacaatcacctgcaaagaagattttattggagtattaccaaacactgcatcattcctgctcaaccagattgcccaacatataaccaaaactg

SEQ ID NO: 55423 - DNA, 918 bp, Zea Mays
ggaaaattggtttcacaattttcccatttttctatcattttctataattattttagctctggaaataaaagaaaaggaaaaccggtgaatagtactgggccagaaatagcccatacggcccaatcttcagagaaaacagggcgcgcccgcgcctgcgttggtcattttgcagaagggccctcggggtttcgggctaaccgaaaacaggtcttgtcactgtttacagagtcactgaccgtttgcaaatagcccctttggtttctatttcttcacatggggccaggtccacgacggcgctccgcatggcagctgaaatccggcgagctataccggccggagggggtgaaggccgacgctaatctttagtttacaccagattctacccctaaggagtatttcccctcactcaatttctaatttggagctctatcgtgatctgtccatggggacagcggaaaaactcaaagagaccacatgttccaaacaattcacgatggtataacccaattggataggttgggaagcatcatggttacctgggaatgcttaaacggggaagtagaagacgtgagttaactcgaatcgcactggtcacggaaggattagcgcggcggagctaagaacagggaggaaagagctcgtgggttctccggtgtcaagtgtttagtcgcaaaggcgcgggatgtggagaagaagccaagcccgagcgcaatttataggccaacaaccggaattggatgaggaccgcggtctttagacggtgcaggtgagctcgccgcgcggcggaacccgatgatggcacggtggccgccgtttaaccggagcccgccaccgcagagagttactgccacgtaactgaggatatttaccgcggcctccagtccatcccgaccgccgtgacatccttatcaccggcgg

SEQ ID NO: 55424 - DNA, 401 bp, Zea Mays
ccggtgccagtgacctctgcgcggcaatcgtcggtataaatcacttgcgcatactcgttttcgttcctggtaggcgtagcacccaacagaagcgtgtttagggtgctaaatcaccgaaaccggaagtccggcaatggcgaccaccgtgggctcgcgcgcgccgccgtgcttctccaccggtgttggggagaagacgcctctgccgtttgatttgaacggacggtagagattagatgtggctcacccattcggcttgggcgactgctatccgtccgatcgagatcggatgatgcacatcactttaggattcattaaaccggggccaacagatcttgatcagagtgaccatgctacgtatcggttgatcatatgtaggatttaatcctggcgcttgatcatcg

SEQ ID NO: 55425 - DNA, 987 bp, Zea Mays
tttgatctatcatatacatgattatgtattgctaaacttatgtgtttgttggatggttggataattaatatcataagacgaactacccgacaattatcctgtacctacccgagtagtatctgttattcgtttcttacccgtccagattattacccggtcccgtcctatacccatcctaaatcttaactaactgtatctggtcccgtatccgagagaaatacattagcgtaggattcgggatgaccctgtatccggctgtatctgtcccgttttcatccctaaccctacgatctcccctcctcgacaaagcccctcccaggaccccaggaggcgagattcaggtttctgcgaaggacaagattctgcgtcattgcggaccgtccaaaaccaagcagggaggagccactcctgtagtgaggtcgcggaccatctggctctaagccattggtcgtccgcgctctcgcagagagcaccaataggtggttcattctagtgtttagtacctaatctgtgtcaacacatgttttggcaactccactggggacaagggtctttagatctactaaaaatcggcctccacatggtccattctaaagatcacaccgacgtctccaccaccagtatcatcaagctgaccatagaggcactctcggctgatgatcgacaacactttgaggacctcatgaggcatggagaggaagaagtgctgcgacaagtcatcgaacgaagagagaaggcaaagtaaaagtacctattgcacttcacggtggatcatcaacagaagatcatcctttaagggaagatcaataaagcatctctcctaccttcgcctcaagctcccgctataagtattccagatcaatcttttaaggctttcatagaatagtgggaggaccaattaaaacaatatatcgatgaatctattgaaggatggacgtgttcgtatgaaaaatctaatgtccctagttttccctcgtatgaacctaa

SEQ ID NO: 55426 - DNA, 376 bp, Zea Mays
cgggtgctccgaccatcggtacggagcgggaggaccggtggtcgccaccagtatttggcgatcgttgagcttttgctgtctcctgttctcctgcgatccgtgcccgccgaagatgacgttgacctctccgtcgacgcgcgggaaggctccacctccttcctcctcctgttgctggggttgtcgcggttctcttggtcctccccgcggcggaggaggaggtagaggttggaagggtcggccgtgcccgacggagtgcttgaagtctctacagttctgaagggtgtggcgcatgtccttgtggtacgggcactgggcgtcgaggatatcgtccagcgtgcgtttgccttcacgaggtcctcctcgggcgcgagaggcg

SEQ ID NO: 55427 - DNA, 358 bp, Zea Mays
gtatttctaacggtcggcaccggctagttctaataaagtaaccattgtaaggcattgaatcatgctcaatggtctaacagcgctaccatcggatggtttgacggtgcacatacttggttgttgaaggtgcaatgattatatcttttcttggagctataaataggacttcatactggccatttgagatatgtgggagctgagaaacatatgatgagactcataaacaatagctctagacattcaagtacttaaagaaccactcgaacgattagcataggtcctttatgaagtgtgtaggttagttagaccactattattagcgcttgcactatgtttagtcctactaattagaaatgag

SEQ ID NO: 55428 - DNA, 508 bp, Zea Mays
gttcagacttatccacggtgagctctatgcctgcttgcttcctgttagggtgtgccggatcaagtttattgctttgtcgtgcctgtgtgccagcgtggatcctgtgagtgaggccacgtgtccaagcccaaccagctgttggcaccctctgggttttcctcgccgtgataaagtcaagcttggccagcattccatctccttatcttgttgccttagcgtttagttcagtgaagtgcttgctatccctaacgcgctcagcttctaggcccgtacgtagctcctgttctttgtgctcaagtttcagaacgtcgacttcttgtcgtgcttcccgagccgagttcgcgtcacctggccgtggcgctcgccctcctgctccgatctccccattccgccccagttcttggtagcgctatctcgccctagcgccagctgtgctgctcgccaccacgtcgttgtccccgccgtctactgtcgtgccacgctctcggtggagctcgccagcggacgc

SEQ ID NO: 55429 - DNA, 1442 bp, Zea Mays
tactggaagaagagcgattgaatacagtaattcagtcagctagataccagcagaccctgaggcgctatcatgataagactatacgacatcgatccttcgtagtgggagacttggtccttcgccgaattctaacgggagaaggacggcacaaattatcgtcgctatgggaagggccattcatggtgtcggaggtcactcggccaggatcatatcggcttactcaaatggatggcacggaagtggggaattcatggaatatagagcacctcaggaagttttacccttagcgagaactatcggagcagcgttgtattctgtaaatggaaaatacatcgtcaataaaagatttctctctcaaaggcactcaaactattggttatccatcgacttcgacttgattaaacttggaatcaacacacttactcgacttagagtgaccactataccctactaacagagcaatcggcttaagtcgacaatgacataagacggtgcaacatgctcgcgcttactcgacttagggtgaccactataccctactaacggagcaatcggcttaagtcggcaatgacttaagacgatgcaacatgctcgcgcttactcgacttagggtgaccactataccctactaacggagcaatcggcttaagtcagcaatgacttaagacggtgcaacatgctcacacttactcgacttagggtgaccactataccctactaacggagcaattggcttaagttggcaatgacttaagacggtgcaacatgctcgcgcttactcgacttagggtgaccactataccctactaacggagcaatcaacttaagtcggtaatgacttaagacggtgcaacatgctcgcgcttactcgacttatggtgaccactataccctactaacggagcaatcggcttaagtcggcaatgacttaagatggtgcaacatgctcgcgcttactcaacttagggtgaccactataccctactaacagagcaatcgacctaagtcggcaatgacttaagacggtgcaacatgctcacgactactcgtcataaggcaaccgctatgccttaccagctgattaattggcataaattaagaaaagactccaaaaccagcacgccgcacttacttttgcaatcgttcatgacgactgttgaattctgacaacagaaacaaaatgttatagttttcagtaccaagaacacattctagtaccctatccaccgagtatccaagcacactgatcatgcaaccatataattcacgaatgcattcagtatcttctaaacacgtcgctacggcaaaacatctctatttggcaatgtctttcgcaggggcaatcgaggaggaagggcgactcgaggcatcaggcgcagccttgacatcagtaacaatgtcatcaggaacaactacaccgggccttctcatcaggattcgcc

SEQ ID NO: 55430 - DNA, 297 bp, Zea Mays
tcgggtggaagatgaggttgggcgtcgttggtccagtgatcaatggtgtagattagttcttacacgtacctgttcgcggagtgatccgtgtcattggtgaatgatcagatggatcagaggtgatcgcgattatttaaaacatggaccgtggatcttaaatccaacggcttggcatgcataccggttcgatgcagttccaatgtaatctgggtcctccatctcagatcgcacggcctggaacagcccataccccttcggtcgttgtcttttgataaagagcccaagtaatcaacccgc

SEQ ID NO: 55431 - DNA, 442 bp, Zea Mays
aaaggatagtcttcacacacacaaaacagcaaaggtcaacctgcttccaatcatttgacttccacgtgttcaaaacacaacctgtgcagatgtgctccgcgttcaactgctcctaacgaagtaacgagatgcacacatagcttcatcaaccatacaaattcactcaaaacagtggttgacataagctacgggcagacgatgttaattcttgcctaatatatgctctttctcgttgttttgaaaaaggaaagaaacaaaaacttacacgactggcactttatttctggggagatatgggcaataatactataatgtccatattagttttcatataaaacattactacaggactgtaagatttctccactgatggccacttgtgacttgtctattaagaatttgaatacgctaaaccaggcggaaaaataaataacttctgaga

SEQ ID NO: 55432 - DNA, 701 bp, Zea Mays
atgctctgtcaggtgctctgaatggctttctgatggtacagtaactgaatacgattttaggttcagcccccctcgtcagcggtgatctcgcgcccggattcacgccggcgtcgtgattcacgcctagttacacgaggataacgatcctcggatgaaaaatctggcgcttgggatgagtttgggacactatttcgccctggccgcataaaagtagttgtacacccagtgaaccagccctcacctccaatcgtcccccacagctccccaatttgggatttcccccaaatctgtcgagaacaccgcagtgtgtgagctcgtcgtggctagccctatataggtccgatcacgccctccttgctcttgttttagcactcttgtgtgctcttgatgcttctcgacccaaccaattgagctagaacatgtaggatcaccgggaacgccttggttcatccgtagttcgtgctatcaccatggccagagagattaggatctagaactttgcaattgattgaggggtaatgatcgttaggggttgaattagatgttagccatacttgagcgccgatcgttgcgttatccggccggtataggctcgccggagccacttctccgccatccatggtcgggggtctcgacttgtgaagaaatagaaaagggaaggacctatctgcgaatgtcagtgacacagagaaatagtgcaa

SEQ ID NO: 55433 - DNA, 617 bp, Zea Mays
gaagactgtacacgtagaagctgtcaatcgaatgagagcgcagctccgcgaaaattgtctatataaacaggaaaaacatgtataagtgctcatgtaattaactaaggtataacgcattgtcaaatagaaagtcccaaatgctagttcatcgacaggaaacagaagtccatacagagcttgtttgtaagactgtttagttagtctaacttttttctaacttggtatgtttattattgatgtatgacgtgcgtaaataggagatttacatcgcaaataacagtgtttgtggtgtgaaatttgaaatagtggatgagatagaatagatgttagaaggttccacaaaagtgagaaatcttagggagatctctagcacaaggttccacaaggcctttcactgatcacgggttcgacctctgtccttgcataaaaaaaattctcttgctatttcttgctcgctcttggtttacagcttggctgtacgccaccttcgagcggccctttaaaagttggcaacgtatcgtgtgcaaccagctacaccattgcagctgtgcaaacgactgatgtatcgtgtgcaacgtatcttttgctgctaaccccctccaatctatacacatgag

SEQ ID NO: 55434 - DNA, 403 bp, Zea Mays
gacccaaccccactacttccaccacttggggtccgctcgagccagctcctactgagactggaggagttgaagctgctattgagggggaggccacttcctcaagggaggctccacaacatattcagcgctgtcacccacctcagcagatgatcggggtgcttcacgagcgagtcactcgctctaggtcacaacacatttctcattttgctcactcagcttttgttgctacttttgagccccgagatgttggacatgctttatttgatcctaactgggttaatgctatgcatcaggagcttgaaaattttgaaagaaatcaggtttgggttttggtgccacctccttctaactgtcatcccatcggtacaaaatgggttttcaaaaacaaacagagtgaggatgg

SEQ ID NO: 55435 - DNA, 1819 bp, Zea Mays
tagtgtcatgccaactggggtttcgtatgctttgtgataagccagcgagcatcgggtagcttggatactattgccgtcccaaaatcaccggtgagagacgataggcaacacgaggagtcggaaagcctctagagcggttggtgggctccgatccctcggtcaatagcccagacactagtacatgacctagctttagagttcacaaggtgtgccacctaacctatacccaattaggaaggtgttgatgttattcgaattggttctcttgcataaacagacacgtgaaaacgttagtccgagtcgtattcggtttcccgggctgtatcgactagaaatagccgattgtctctcggcatcggatcatatctatgcgtcaaggacacacagagatgaaacatgtggaacactgctccactctcatcgagccgatccaatctactgtaattaaagctttcactgcataatcataacatcctacgcgtagccgggcctaacgagcatgaagggtgagaggacgacgaccagatcaaaggtctaagaactagccggagccgattccaggaacaatccctgttcaagtcgatgtgaaacacctaacacgtcataagaacatccgacccatgtgcagggcatagttatacggatataaagcagatccttggtggacaaggactaaccgcaacaggttagatctactcgacagaacggagcaaggcgtcacccacacgctcgagaatgtgcatgaggacgactagacgcttatgattggcaaacaacatgcatacatatgaaactgtcgatgctactccatgaatgctacgataactagtgcttctcgccataaaaatgattcaatatgagaaaacacaaagataaatgagtaagaacaacaccaccttgattgtgagatgcgatcagggtggcattacacttacccatggaaaaccctggaaacaggggcgacggtacgccaaaagcttatggtcgcaaaacgtgtgaagatttacgatcaccccaatgagtgaactagagtacatatttatagtccagagacttgcactctctactaaccctatgcatccatgtcagacgctatcttccaatctctatgcttatgctcgaaactaacctactagatacatgaccgatttggctgggaaatacccacgcaggggcctattttcaaactttccttaattgctccttgaagcccatttaggttatggcccacttccagtatagttaaattacggtgataacagatacccaatcctttcccatggttgagtctatcctttgtaggatgttcatgatttgcttgtttgacatcttagcttggccacttgtttgtggatggtaaggggtggcaacacgtgatccacaacatggtccacgagacatctttggaaacatttatcgatgaagtgtgtccctccatcactgatgattatccgtggtacgccaaatcaaggaaaatggtctcatagaacatcttaatggcatgtttagaatctatggttgcacatggcaacgcttctacccattttgagacatagtaaactgcgaatagaatgtactccttgtctccattattgggaaaaggtcccatgaaatctatgccccactcatcaaagatgtttatcttaagattgctagtgagtggcatatcatctcttaggtttatattcacttggcgctggtaccttgcacaccttactaacttttttgaatcttcatacgaagtgggccaaaagacttacttagccaaactttcacatgattttgataagccccataatgtccccatatgaagatgagt

SEQ ID NO: 55436 - DNA, 288 bp, Zea Mays
ttagtaatgtcgagcttcaaaaggattcttgcttgtctttgctgatggagaagtctggcagtttgttgcacaatcataaaattgtcttggatgaatcgacctttgatgaaagcattctgcctttgggagaccatagattgcagcttattccccagtctgttagctaggattttagtgactagcttggccatgctatgcactaaactaataggccgaaagtccttgacttggtcagcaccctccttttttggaataagggtgatgagagctgaatttaatttgtaaaag

SEQ ID NO: 55437 - DNA, 622 bp, Zea Mays
atctcagaacaagtatatgtgtacgtgccatacaagaacccatggcctgcatcggtaccatcactcggatttcagggcagaatattgcatcccgttttgtcaacacaaccatgatgaaccacaaccacacaagtacgtacttgtatcatatatataatcgcctcggtcttcgggataccctgccacagtaaaataaaccacctagacagcgtggatcaaaacgggttcgtgggccacgcttaaatctagaaacggtaagccagcgtacccttaacatgtttgcctcctctcctatgtaacgttatgaacatgtcgtgtcaggtttttagcaaagttaactgggcatccattccctccgtcttaaaatagtatttattttagcatttgtttttttatgtctgtatttttcaaatagaacctggattcggtgcgatactgtcatcaatgtccctttcaaaaagatactgtcatcaatgtgccacacgtgcagtgtcgtctagctatgtactgtaaaccaagatgctcacaggatcccaggaggcaggagctgagccatcttgtcagatttccaagaatcgtacatgagccgctgtcctggaaggcaaaaggccaaaaaggagag

SEQ ID NO: 55438 - DNA, 1108 bp, Zea Mays
gacataacatactattgaaccaaatgaggataatatgattgcattcatttcattgttcacaaaagttttccccgggttacaacaatttagggatccacccttaagcctagtccaaaatctgataccaaaactaagctcgtgtgggttcctgtcctcctaatatgtcaaattaacttgtcaaccctgagtggtagaggcaacgttggatgcgggtgaaggggccttccagagggagtcgcatttgggcctagagctggctctaattcctcgggatcctccgcaccctcgcttcctgcctcgtttgcctccatgtcctggtggtgcatctctaggtggttgttggcttcttcaagttcctcctgcacatcatggagctggatctccaggatatcgatggtgttatcccggatttccacctgcttctctagagtcgcgatgcattggcttaattgttccacctataggtctttctccaccaattccgaagacaagtcgaccacgaagtcctctcgactgtcgagagtgatcttagtagtctgagcgagatcagtgaggtgtgccatggcgtcgctctgcagggcctgtaagcggtttggctcatacactgaatagtgatcctcctaacctggtcgggatgcatggcccacatgtccttcacgtggctcactttgttgcaccacatggggtcatccctcttctcggcaaggaagattcccagtgggtgcatcatcatctccaggggatgatacccacagaaggttgtcagggcttttagcgctgcagccttggtggtgtcgtctgccctgaacctgacagtcttggaatcaagggaacgccatcccgactgtagagggtgagactccagggtcagccaaatcctgcaacgtggcacccgatgctcctcgtatagctacaccgtatgcagaggaggtgtagggtaaccggcggagtagagcacctcccacaagatggagggaaaaccctcgtgggaaaggtagtcaaaactgaagcgagtgtctcgtccattgatgggggtgggtgaagtcatatgtgaaagagggttagatgtgagtgccatagtagtggaaaggagaaacgtgtgcccggg

SEQ ID NO: 55439 - DNA, 662 bp, Zea Mays
aaaaaaaacccaagaccaacaatgatttttcgctcaggatttcctatcttcggatttaaacctcaaagggacatattaaagaacgcattaaactcactggacggagcaaccagttgtccagttgggcgatccaatcagttgtcccgcgcggttcatgtgatggatatgttaaatgaatgcaccgagtaataacagtagtactactttcttctgaaacagttgacattttaagatttaaattttattctaaaatactcctttctaatacacttgaagtagttgtaattctcaccttctaatacacctttcttttctttcaatgcacatttttttaataaaacatccctatctctatttgccgtataatttctgataatgtacagttcccaatacaaaatctatgcatgacaaggataagaccgctcaactgcacatcactcattgcgaccttgacacatcaatgcacctaatttttgccagcagatcactccttgcgaccttgacacatcaatacaccaaattaactatttttttttccgccagcgagctactagcttgcgacaaagtaactttttttacctgtttcattgggaaccagagtccatcacatttgcaagtttatcatccatatggctgtattaatacatttctgaaagatattt

SEQ ID NO: 55440 - DNA, 306 bp, Zea Mays
attggaaccagccttagccgtgaccaataacaatagctacgtgacagcgagaaattcttcaaaagctcaaatgtgcatgggtgtctaaggtagtgtttggttcaccgaaatgtaatgtaaatagattatgcagggaaatggagactgacatgattgttgtttggttaagctctctctaagactatctcgagcatactctctatcacactccttatctcactacctattttaaactcctctctgcaaactgtgtatgtacagtacaaaacagtgttatacacgtccgcatacgcgttgctggagttg

SEQ ID NO: 55441 - DNA, 596 bp, Zea Mays
gtggctcttcttctggatcttgccctagccatggaggtgggttcggatttgtccctcgtgccgcccgcttgacgcaccctccaaaactgatttcccctcaaccagcccctctgccacacatctcatcgcctcgattagagctcaaggctctcctctcgtgagcaggcactggcacggggagagaagagggggagatgagcaaaacagcagcgcgaaggggaagaataggacctagtgcaacgtctaccggtggttgtgggaggaagaagtggggagggggatagagcgtgatctggggtctaggcactcgggcggcggtgtctagatcggagtcggcggttgcaggaggaagagtggtgaggggaggccgatggttggttggcgagggctgcgcgaagcgtgcatgtgggggttgtgtcgtgctgggatgcggaaggcggtagttactgtttcagaagccgcagtggggaggagagaggtgggggcatgagtgtggtctacactaatgtcttaatagttagtagagatacttctatcgcacccaggttagaacaactgaacaactggtggacaaccctgttagaacatgagatttc

SEQ ID NO: 55442 - DNA, 695 bp, Zea Mays
gatgaatcgcaagttaattctctaattcccatggggttcttatgaaaatgtgtttacgaaggggtactggccaaatctggccgttggattgaggatgtgtgacaccgattatatcggtcccttgtcgaaccgatacggcacaacagccgtcggattctatatctacggctacgatcagacctaccagagatcgaaccgttacgtcatgcgagtcgttagatacaggatccacggcccacgcgagcgcaccctctcttttacccctgcccctcggatcaccagttaacggtctagattacttggatcaaaacgctacgcccatatgatcccgaccattcatctgacatcgacggccatcacgccatcgcccagctcacggcccctccgcatggtggcgccgcccccaaacatggcgcagggtccgccggagaaatgtgtcacctcgctattgtaccccaaacttcgatccaaggcactccacacgtagagaaccaaatagcaaacacaagggagggatcattaccgataatcatgtcgcgaaacgcttctgactgcagagaagtgcggcctgcggaagatttcaatctctagtgagaaattatggcgctttgggtcccaacgagccccgaagaaggtgtcgactaccctcccacagactccacggatccaccgaggcggttgccaagaacttggcg

SEQ ID NO: 55443 - DNA, 422 bp, Zea Mays
agctgcaacaccaaattcttctttggataaaccaagttcagcccttaaattgtttgcagcaatagcttcatcaatgtctaatgcctttcctcccccagcatttggtaaccctaaaataaggtgcaccgtctcctttgtaatttttagctccttccctgggccgactcgaattgtcatatcattatggtcaagcttttccatcagccaagctaaatgagatctactaccaagcgcatcaactctcatatcaagtatactggagaaccccctccgtgcaatagcttgacgttgcctgtcatttaaaatctgaatgcttactataacatcttggggattgcatctcacattaagcctctgctgaaataatgtaaacaatgaataacgtaaacatttacatctgcataatcgcaactcaatgttta

SEQ ID NO: 55444 - DNA, 396 bp, Zea Mays
ctagaacatggcaataatagaataattaatgtagaaacatgccatgagaacttgcaataatttaaaaacatgtagattgtcataatttagaatttgataaatacacaatctaccatatgagaggaatttcttcaaagaatgatgacataactttaaaacatatgcttaagtgctttctatttctatgtgactacacaaggcacatgaaacattaagataattgcacttaagaatataaatgttaccatccctcgactttcctccatgttgtaggctttgatgatgattctttatttcctacaacattaatatcttcccgagatgatatgagttttgaatacaataaattgaagtgaccttgggtcaatcttggatatgtagatcattcgaagattg

SEQ ID NO: 55445 - DNA, 665 bp, Zea Mays
tcggtggaggacaagatctcccactgcgaaggatcgatgtcgtatggccttatcatgatagcgcctcagagtttgctggtacctggctgactgaatcactgtattcaatcgttcttcttccagtatatcaacatcctccagtctagttgcttcagcttcagctatgttttcgaagatcaaccttggtgccccaaacctaagatcagcaggtagtactgcctccgaaccatagaccatgaagaagggagtatttccatgcaaagctcggctaggttgagttcttaagctccagaccacatatgacaactctctgatccacttccctgcgaacttttcattcttgtcgaaaactttcttcctgagtgcttccaatatcattccattagccctttctacctgaccgttggctcttgagtgtgctactgatgcatatttgatctggatgcttctttgttcgcagaaatcaaagaattctgagctagtgaaattggatcccaggtcagttataatgctatttggtattccgaacctgaatattatatcttgtatgaattccactgccttagctgaagtcagagaagcaataggtttgtactctatccatttagtgaatttgtcaatggcaaccagcacgtgagtgtaacctccttgagctttcttgaatg

SEQ ID NO: 55446 - DNA, 738 bp, Zea Mays
atcaagggattatccaacgtcccatatggtctcacttcggcattagaagaccatcccttgcccttggaaacgatttgcaagcatgtcaagctgcttttaacacgatatgcacctacataggcaccagggacttagtccaggaccatattgcttacaaagtgtggccactcggaagtgggtgggagatgccgaaggaggctgctgctgggtctagcaaagatggcctagtctatttgaagtatacattcaaatatagaagccaatttgatgagccaaacaacgactggctagatgccatcgaagccaccagcgatgaattacttggtgcctattcaagggccaaagatgacgctatgactgcagccttcggaggccgaggcaagaaaaggctaaatagggtttttgatgttattggttttgtatacccagactactgctacccttcgcgaaagtcagggaagaaaagaagagtcgatgcttcggtgatctctaatacaccgaagccaaaaaaggttaaggttttgacacatcgccccaagcgcgatgaaacagcggaagagccgaggcctgctgaaaggtcttctgctcttgagtcaagtcatcccgctcccgccgaagctaagatggaacctgctgaagagccaaaaccgaagatagcagcggaacaattaaaggtttcgagtccgtttcaagggacggaggtaccaaagatagcaaaaattgcttcagtaactccaa

SEQ ID NO: 55447 - DNA, 874 bp, Zea Mays
gcgaggtctctcctacggtgttcttgcgcggatttgggggaagttcaaaattcgcacaccctggtgaacgatcgaggctaatttttggtggctggatgcttgactaccttacggagctcgcggcggggtcaatttatactaagggagggtggtggccgggaattttagcggtgacgcgcggcggtcggaggagtaagagttcactggcgcgcgtgaatctgtggcatctaccgtggcagtcactccgacgagccacggagagtcacaagggttcacggcgatgcggtggaggtgcccaagtacatggcacaaggccggaaggcggctgtcgccgatgaacttatctgccacagccgcaaagcacggggggtacggcggtgagtcaccggagttatctccaggcgcatggcttttacctggcggccttatcgggtcatcggcgacgtgaatcacaacagcggtggcgcgaatcgtggcgaagatcggtcgtcggcggtgaagctgctacgctggcggtctgatcccctttgatctactgtaccatcgtgagctgccatcagtgcacctgacagtgcgacttcagggcaatttttctctcagatttctatagcaactcataccaagttctgtagaaaagttggagagctacaaatcagctacatctttgtcatagcaactatgggcagattctggcttgatcatacctgaattcatgctcaaagtttctgtggttgcactgtctgtctgaaattcagaccttatcagactgacagcccgactttaggcttaattatctcccatatcttctcaacaactatgcttacactcttaagcaaagtttctctcctttgtttggtctacaagtttgatgtgg

SEQ ID NO: 55448 - DNA, 690 bp, Zea Mays
gtttatttataaacaccaagatacgtgtggtggttagctccaaatttccggagctagggtgtggattcgagtgctcgctcgcacttttttgcgcggtgtggtaggctggtagctgcgtgggtagggttggatgctgagcaacgcagtagttggctgcgtgggcgctggggtccacaaagttgtggtagcatcaggtgcccacattaagttcttaatatagcaatatagataaataggtatgagatatgtattcaaatataattattgtttatttataaacactaaggtaagtgtaagtgtggcctagtggttaccctcaaatggttggaggaatgggctgtgggtttgagtgctcactttgaactattttttgcgcggtgtggtagcacggatggtgaagtagcaccaggtgcccggcccatattaaattgttaatagattattatagtatagatatagatagaggacaatatacgtcatagaaatccccttaaaaacaaacaagaaatatcgttgtcagtgaaaaaatccataccatcgcatattggcaaacgagactatgtagaagacgaacccagcttggcttggtgttagcctgacattcctgggggcctacactcgaggccaagctccataccggctaaggctgtcggcagtgtgaactgtgaagcatacgctataaggattcag

SEQ ID NO: 55449 - DNA, 302 bp, Zea Mays
gtcgcgctaggccttggtttgagcttggtatttgttgagggcctgcagggcgaggacgcggtctccgtcgatgaggtctttagacgttggttcatcgacgtaggggaccgctgatgtgcttgttcggggcgacccatgctttatctcctgcggcgtcatggcctctgatccatataatagacggaaaggtgtgaatccagttgcccggcattcggtcatgtttaggacccagaccacttcaggtagttggtcggcccatttacccttcttgtcgttgagaagtcttttcttgatggtcgtga

SEQ ID NO: 55450 - DNA, 557 bp, Zea Mays
tcgatagcagcagacgtgcacgatcgcgaacacacaaacgtacgtcatgcacatgctcggacaccggagacacgacatcgacatgtagcttgagtactcaatccaccggcactaactaactgccgttgcacatacgttgagaacgctcattttttgatagtctgatttcctcacggacgcgtgcgcgcaaccgggagctgcgagactgaacttttagatggctagtgtgagactgatcctgcatagtacagtaccgagtccctcatccaccgatggcagctgcaactaggaaacatgaagcgtttttttgagagggcgatgcggataccgctttgtgtacaaaataaaataaaaaaaagatgaccaaacctcttggacttacacggtagacaacgagtctaaaaagatctggtaatttattctgaatgataagtaaacaacatgtctagaaagatccgacgatttattccagataacaaagcttatgggacttgtgttgtaaacagcggctcattaagattcgatgatttattttatatgacttgcgttgtaaacaa

SEQ ID NO: 55451 - DNA, 855 bp, Zea Mays
agtaagcgcgagcatgttgcaccggcttaggtcattgacgactttagccgattgctccgttagcagggcatagtggtcaccctgagctaagtaagcgcgagcatgttgcaccggcttaagtcgttgccgacttaagccgattgctccgttagcagggcatagtggtcaccccgagttaagtaagaatgcaagtcgaccatgaacaaactgagtattcttgaagccttttttattgatgacatatttcccactttacagagtacattattgtcctgatagcttttgaaatacagctagggataaaatttcctgaggtgttctatattccaggagttcccgatttctgtgtcgtccatctgagtgagacgatatgattctggccgagtgacttatgctactatgaagggtccttcccataagggcgataacttgtgctgtccctcccccattagaattcggcggaggacgagatctcctactgagaaggatcgctattgcacagccttgtcgtgatagcgccttagaatctgctggtatcatgctgattggattactgcgttcagccgttcttcctcgagtacatcaatgtcctccatcctagtggcttcggcttctgctatgcttttgaagatcagccttggcgccccgaacttgagatcggcgggtaacactgcctctgacccatagaccatgaagaaaggagtgtttccatgcagagctcggctaggctgggttcttaggctccaaacgacgtagggcaattcccttatccactttcctgcaaacttttcattcttatcgaagacctttttcctgagtgcctccagtatcatcccgttggctcgctcaacctgc

SEQ ID NO: 55452 - DNA, 942 bp, Zea Mays
cggactaccacaacaagtacatgatacgaagtctctcgcttaaaggagaccaacagtccacattgcaatacaagttgcagttacatacactcagcgaagggtcactagacccaccgcacaaataaacacaactatgccctccaacaaacgcgtcaatcgaagtcttttactaaaaagacactctgtgcaaaagtcgcccaagggtgcagccggactaccacaacaagtacacgatacgaagtctttcgcttaaaggagaccaacagtccacattgcaatacaagttgcagttacatacactcagcgaagggtcactagacccaccgcacaaataaacacaactatgccctccgttaccgccgcgcaacgcgagggcaccatacattacattggctcgactttcggaatgatgcccgcctccctataattgaacaacattattctcaattcctcaccctcaaaaagcttccgcagatccccctcgccaatgcttgtcccaatcggtgaagacagtagctctcgtttcccaaaccgatctactcgaagacggtcccactccatccccatccgacggcgcctaccacttcgcataaactcgccaatgctatgcttcgacaccacccttcgtcgccgacactaggtcctcgcaccaggaagattagacaccttgccaacctccacctgccgcaaggactccgccgtggccgcatctaacgcaacaaaataatccaaatcttcaccagacgactctttgctccaggacaacggactcccaaactcatcatcaaacaaaaaagactcagattcagaaccaggcacattataatcagtaggcactacggtagcgaccgccacaaaatttgtaacaccagccgaggttgtctatgcaggcccacacgttggaacctacgcagcaaccgagtttcagtatcacaaaaataa

SEQ ID NO: 55453 - DNA, 403 bp, Zea Mays
gtagtaatacctggtgagtatttacccattgccatctctaatttccgcattgctaacgcgctacatccgcaaccagaaccagttcccgcaggatgtatcattttggaaacgcaacgagacgggtagcggccggttcaacggtgacggggaccagttgcttgctagctagcttatagcttgggtgatccaagtcggctatcctattcctaccctggcaaggccacgcacgttctcaagtgatggcactcgcttttatcaccaaaggagatcgcaggtgacgaagagatcgtagcacggtggcagttaggtccggaggatagcgtcaaccatgtagtaccagctaaatataccgcaattaattaaattgcaaaagaaaagaaactaaaaacaaaaggaggaaaat

SEQ ID NO: 55454 - DNA, 663 bp, Zea Mays
gcgcctcagagtttgctgatatcgggctgactgaatcaccatattcaatcgttcttcttctagtacatcaacatcctccagcctagtagcctcagcttcttctatgttttcaaagattaaccttggtgccccaaacttgagatcagcgggtagcactgcctccgaactatagaccataaagaaaggtgtgtttccatgcagagctcgactaggttgagttcacaggctccaaacaacatacggcagctctctgatccactttcctgcgaacttttcattcttgtcaaagactttctttctgagcgcttccaatatcatcccgttggctctttccacttgcccgttggctcttgggtgcaccaccgaggcatatttgatctgaacgctattttgttcgcagaaatcaaaaaaatctgagcttgtgaaattggatcccaggtcggttatgatgctattcggtattccaaatctgaatattatgtcttgtatgaattccactaccttagctgaggttagagaagcaatgggtttgaactctatccatttagtgaatttgtcgatagcaacaagtacatgagtgtatcctccttgagctttcttgaaaggtccaatcatatccaatccccagcatgcgaatggccaggttacaggtatggtttgcag

SEQ ID NO: 55455 - DNA, 407 bp, Zea Mays
gtgttgaggcgatcttcattagctccacctgaaacaatgccggtctggctttctccatgaatacgcagaggaagatgcatgtacttcatgttgtgcagctgctaccggtaggtgtgactgagggaccacagagttcgcctagcagcatcgctgaccgaagcagcgaaggtggatagcggcgtcaaagacccatgagctgacggagtcctgaaccctctatcacatgcatccatcaccctgacatgaatgtgattgatgtagtagcaagccagaggaggctcgtacactctccttgtctcatacaggggtcggacgtaggttcccaatacatgcagaacatcctgcagcaagttagggaagtgccctgtctcgaacattaaggtataaccataaccccacgttgtggt

SEQ ID NO: 55456 - DNA, 282 bp, Zea Mays
aaaaaatccaagttgttagttagatggggcgaggcagagaagggaaaatccgcctcattaaaggtgacgtgacgagaaatgataatacgatttgcggagagatcaagacagtggtagcctttgtggttggaagaaaccaaggaagacaaacttggtagagcagggggataatttatgtggtgcagtagcagtgatgttagggtagcaatcacatccaaaaacccgaagatgatcataagagggaatagtgccaaagagagcagcataaggacatatggcttg

SEQ ID NO: 55457 - DNA, 565 bp, Zea Mays
acataaaggtgagctatgctaaaaaatagctttgctttcttgtatcattagccatttggccaataaactacaactacgctcatgaccatgatgttaactaacatgtacgcctacgtaggcttgatcgctggtcattaggtcaagtgatggaggtgggtgcggtgctgtcctctaccggcctctacttggtgacgtagacctggatgttctagctgttgtgcatggcagacctaggcatgttctcatgctcttcgtggcacgtgccccatcttacgcatgccctgggtcaacatcatggccatcagtgccatcatcctgggcacaaacggtttagagaattggtaaaaccaaaacatctaaatgccaaaccagtaaaactggcgaagtagctaagcaaaagcatcagaatgcaacgtgggttctcaggctggcagtagtctcatttcttgaatgaacactgcttcaaatgccaaaggacagctcaggatcatgccacaattatcttctgagctactgcacagatagactagatgtcatcttcaaggattgctttcttcttgagatt

SEQ ID NO: 55458 - DNA, 339 bp, Zea Mays
gccagccctcgcgcgacgcctaggatgatgcggtagcgcgtgggccagtcgcccgcgggctttctgctgtcttccgtcatggcttccattgcgtcgatgcatatgtcctccgtgtccatgctgcccactggcagctcgtgcagccaccggtgcaggtcgcccttctccatgtactcgtagagcacaagcttttggtcccctaaaaatccaaattttcaggattaagatcgtaataaggaccaaagtatataataatatatgttcagctccatctgctaatcagcgtggttacttttttgttcagacattcttgtttccagaagccagtttataaatgac

SEQ ID NO: 55459 - DNA, 696 bp, Zea Mays
ggcaggagccaacttagcagactttcgtttcttgggagccgaatccttcggctccgctgaaattttctattttttaccagccctctgatctttttcaatggactgcatggcttgccttttcaaaatacttacaaccctctttttatttgctcctccagccccttcgtcaagtctttcgtaatctggatattcgaagttaagagcatccatcacttgatttagtcttcgtttttcctaggtttcgaaggtcgttgtcttccttcttcgtataattcccaagaatctcattgaacattgtttctattaattccaaccattcgacaaagggcctgccgaagtttttttgaaatttaaactggtagggaagtcatacaagttcatatttattcccttcttcctttttcttcgacatcccccaccgaccagacgttggaaatgttttgttggctaggtattcttgcaccaaatcatgagtactaatatgctccgccacaactgtaaattccactttagccaactggtagggggaccgagttgcatgttgcacaatggtcgtgtcatgccaatgctcattctcaggggactcatcaccatagtcataagcttctctctcttcttctcatcagccttcacataaaaccattcatttgtctcgccaatcaggcacttggtgcgatagccaatcacaggtgcttt

SEQ ID NO: 55460 - DNA, 319 bp, Zea Mays
ctagaggatggcgggttcaatctgcgaaacaacaaaggcttttcgacaaagtagccacagcgaagggttatcccgaatttcaaccgttgcgtcccatccggacgacccagattagatcaaatctatatgaaccggtatgatgttcaagacactcggatctcgatccgatggccacagttttatgatgccagacatacgctctcaccccttagatccagatcgaatggctctcaagcacccccgcgaacgagtatgaacacttctaatctgagccgttcgtctaggtccaacagccagtggccaccccaccccaccaacc

SEQ ID NO: 55461 - DNA, 485 bp, Zea Mays
cgaagactgttatacttcgactttaatctatctacatgtatgctatcagagatcagggcacttatctctgtacctattcttttttactgtaaacaccgagcaggagtttgtaccataaccttttgaggtagaacaaccaagcactgcaacagaagttctacttccaatgtaaatcccctgcaagttccattatcttctaccggatcgggatcagtaacgctgtagtactcagaacagctcatttaccgatgggaatttggagaggcaggtaggtagatctagatgcgtgtgcctgcaaaatttcctgcccttttgccagtacatatatatttttgatctgccggatggcggcttgcactacattaacaccaagtacaagggggcagtaattaacaaagcacttgacagtggaaaggcaagattagatctaacccagggccagcatgtgacagcaactccattgaattgaggggtttggatccaat

SEQ ID NO: 55462 - DNA, 498 bp, Zea Mays
atcatcaacccgagccacaagggacaattcaaccttgtgttctcaacaatggactatggtggccggatgacctggaggtttggtgtgatgtctcttgagaaccccgatgagaggttaaagccaccagcatgaccttgataaggcgtaaaaggctatgattatagattcttgtcagggagcgacgcacaacgaggtctagcgcgacttcggcgaggctaaatcgatggggacgcaaggatgcggcccacagaggctctaagtctgcatagggaaaaggggataagagagggtggagtagagggaagggggaataaaggtgttgctcacctcctctaattcctaaaggggaccaaaacaaggcaacacaattagaaacaacaaaccttcattccttcgatctatataatggatacattgaaggaggaagttatcataatcaaagactgttaaataataaaataggaatgctagaaggaaatcattactgctatgtatcct

SEQ ID NO: 55463 - DNA, 738 bp, Zea Mays
cacagggtcgacgagcagagggtacttgctagggtgattgaagttgagccactagtcagctcggctaaacgtgatggcaggttctgaccatcgatacgaggtcggggcactgttggttgccaccaggacctgccaatcagtgagcttctgttgccttttgttctcctaggacccatggcccccaaacatgccattgacctccctatcaatgcgcaggaaagctctgccaccacccccacctgctattatggttgatcttgctcgacaggttctcctcgtggtggggacggcagcggatggaacggtcgaccgtggccgatagagtttttggattccttgcaattccgtagggtgtggcacatttccttatggtacgggcactgggagtcgatgatctcgtccagtgttcgtatgttgcctcgtggcacgctgcggggctgagtcgtcgagggcccagcggcgtgcacttcttctctgagcctcttgtcctagtgcttgtcctactgctagttcctacccttctttggtgccgagggtgcaggcttcatgtggccgatgaggtcatgagctcgttcgtctatggtgatgtagatgtctgcctcccagaacaactgttctgaggtgatgggagccttctggaggatggcccggacaaaggatgagtcgttagacttatggtagaagtccttgatcacgacagcctcatggtttggaagcacccatgaatgagcagatggt

SEQ ID NO: 55464 - DNA, 585 bp, Zea Mays
aaatcaactccatgatgtgcaagaggaacttgaggaggccaaccctcacatagaaatgcatcatcaagacatggatgctatggaggcagacaatgaagaggaggaggttcccgaggagattgagccagcttccagcttggacacggcctactccggagtaccccctacacctagggctagtgttgcctctaccactcaaggttagatgggttagaattaaacatgttaggagaatgggaagaccacttaagcttggcttttggtaccaaattttgaactaggctatagggtggatctcctaatatgttgtaacccagaaagacctgtatgaagaatgcaatgaatgaataattatctttgtttggttcaatatacttttgtgtcattatactcctcatgatatgaagtcactacttgaaatcttgggtcgacgtaacaacaacagaatttatgtttttagatggcagctagatctcatcgcggacaaaacgagcaagttcccccaccacctcccctagccccaacaatgcaggaactaatggctcaacagaatgagatcctgcgacaactggtgcaacgccagcc

SEQ ID NO: 55465 - DNA, 415 bp, Zea Mays
gtccgattcttggatttggagacggctaataacaacagctcacgcatgcaacgtgtcaccgagacaatgggctggaatacaatatgatcggatgacttttcttgcatgtggagcaagcattgttacaaatcatctgggaaaatatggttattggctacttgattgattggcagtctacaactcagtctgctaggtttcatcctcaagtgttctcaagttgagaattcttctcgctctcgtgtcctgtctttgcttgccctacactgcactcccatctccgtcgtcaccacgaccatgtaactaacagctcatggtgcacgtcacaacatttcaacttccttgctcaacgaaaactaactatatattttctttgcggagtacagtcccgtcttcaacagagaaatacaatacaaag

SEQ ID NO: 55466 - DNA, 384 bp, Zea Mays
gcaccgatcccatgcctttgatctcgaccaaggaaccatcaccaaaacaaactgtgcctcccactgaagtgtccagcgacttgagcactgcacgacacccagtcatgtgattgcttgcacctatgtcgagcacccatgtttcatcatcgcgatccactggaaacgtcttctcctcattgagatgcaccacatgatgtggaacatgtaccccaactcgttcagcctcgtgccatggcgcgacagtacgcaccgtattgaccgtggcgagcataagcactggctgttcatcatcagccttcacatgatgggcttcctcacgacgctccttcgttgggcgtttgcagtcctgcttccagtgcccgtaaattccacaattacgacacc

SEQ ID NO: 55467 - DNA, 390 bp, Zea Mays
agctgctgcaaccttgtgaattgtgattttatattttgattatggtcttatggttatgaagttataagcagtgtctttgaggtggggtgagttatctggaagtgatcattttttggtactgtacatgagaaattgatgagtcatgagagtaccatggaattgtactatatagttgtggattatgccaatatcttcatttccgggtttagaaatttctgcactgagtaccaggaaatgccagtatagtgtgatgtggataccactgaattgctgggtttgaggatttgacatcaacaccttgtcatctcatcaaaatcaattattggaaggcatccatagttgtgtttgcaaagcctctttggtatcagtgatgtgtgtgatctatccaac

SEQ ID NO: 55468 - DNA, 485 bp, Zea Mays
tcccgaaccgctctctgcagcccattttgagtcagggccgatctctggaccgactaaaatctagtgataacacatacgtaccatttcgtagaatacagaatagccagtgcaccagtacaaacataggggccttcagaatgaaggccaagattatgatgatcttctgtatgaagccttcaaccataatgactttatttatgatgacgcctcccctggatgtagaactataggcaatgacttggtcaccttcatacaaaccaccccagctaccattgtacgatggccactccaacccgaagaaattcttgatgagttatgaagccacaatatcctcatatgggggcaacacagcaatgatgtccaagtccttcatcatggtggtcaataatgttgcctagacatggtattcttcgcttctaccagggacagtaacctcttggcaaaagctgagggatatgttgatcacaagctttcaaggtttccaa

SEQ ID NO: 55469 - DNA, 372 bp, Zea Mays
gcgtacttgaccagtaaactattctcctcgtagaaatcaaagaattctacccctgtaaagttagaccccaaatgtgcgaggatgttgttaggtaccccaaacctgtatatatttttgaatgaactccaccgccttggccactgtcaataacataattggcttgtactctatccacttggtgaacttgtcaacgactgctagtacatgtgtgcatccttcttgagctctcttaaatggcccagtcatatctagcccccagcacacaaagggccagaatactgggatagtttacaattgttgtgctagaaggtgttgttgcttgactaggaactgacatgcttcacacctcttgactaagccggttgcatcttg

SEQ ID NO: 55470 - DNA, 768 bp, Zea Mays
tagaaaggcattatattctatgattgttttgcatgaataccctctatccattgtggatcatcatggcttccgtaaatttgttagttcgttgcaacctttgttcaaattgggaactaggaacactgttaggaaagatataatgagcttttactggttggagagaagaaaagctaggaatttcttgcaaaagattagatgtcgtgttgctattacaactgatctgtggacagccgataaccaaaagagaggatatatggcaatcactggacattttattgatgacacgtggacacttagaagctgcattttgaggtgaataactaaatctgcttgctgcaatattgtagtctatatgaactaaaatggtgcatttttgtaggtttgtgtatgtgccatgtccccatactggtgaggctatttgtgatgctctctacaagtgtctccagagttggaatcttgattgcagggtatcaactgtgacccttgataattgcagcagtaatgacaccatgattggtcttatggaaagcagattgggccaggcaatttgttattagatggcaacgtgttgcatatgcgatgttgtgcacatatcctgaatcttattgtcaaagatggattggaaataattggtccttctgttgtgaaaatcagggacagtgttgcttattggattgctacacctaaaaggtatgaaaaatttatgaaaacagcccaactacaaaaagtttggttgaataggaagttgtgcttagattgcaaaacaag

SEQ ID NO: 55471 - DNA, 336 bp, Zea Mays
cgcgaatatgctccaagtagttcatcacttgttgcctctatagtgtctagccaatcatcatttcgctcatcgaattggcttctaaactgaaaggtatacttaagataaaccaagccactctggctggagccagcggcggcttccttcggcatttcccattcatttgaaagaggccatactttataagcaatgtgctattgaactaaatctctcatgtcaatgtaggtgcatatggtgatgaaagcaatttggtacgcctgcacttcattcccaagtgtgatggatggccttctaatgctgaagcgtgaccatataggacgttggataacgcctctc

SEQ ID NO: 55472 - DNA, 563 bp, Zea Mays
cacgaacccgaatgcgaaggtggccttcaatgaagtccctgtgacatgactaatgttgccaaaattcatagcattcactagcacgggcgcaaccatgatgatagtgagtttttcaaatgcgaaatagcccaagccataacaagtaggaacatcaccgatgaagggtggaagctgcgtgggaggaacggggctaggtcggcatgatcataggacatggtaatagtgtcagaggttaatagcgagacaactagttgatcatgccctaactatagtgcaagcattaaaaaccaaagggacattttttggatgctgaagagaagcacgaccaaagatagcaaatgagtgataaaatggtgggtcaaccgtcgatgcccccaacaaaagtatactgtctcaaaacaatctatagacattaagatgtcaccagttatcctcattgattccattaaaggtatcaaatggacatagtggccgggttgtccaatatatgggcttcctacctaagcaagcataaggcgaagtgatatggcccacttgcagataggcatgacactggattaggc

SEQ ID NO: 55473 - DNA, 626 bp, Zea Mays
gatgctgatgaagacggtgagcccgtggactagaaggagtacaagagcatgattggctccctcctatacttttctgtgatgaggccggatatacactttgcagtgtgtctatgcgctcgcttgcaagcttccccatgcagttctcatagagaggctgtgaaatggattatgaggtacctgcacttcacttctaagtttggtttatgatactcttcttctttcgttctgtctttgtgtggttattctgatgctgattttgtgggatgtcgcttggagcgcaagtctacttctaggacttgtcagttttagggacttcattggtttcctggtattcgctaaacattctagcattacccagtataccatagaggctaagtatgtcactgccgctagctattgctcgcagttgtggatgatggctactttacaggattttggcttggattttcatcatgtgcctcttttgtgtgatagcacgagtgccataagtgttgccaagaatcttgtgctgcattcaaagaccaatcaaattgatgtttgcttttagtttcttcgtgaccattctgagaaaggcgacatcgatttgcgccacattgatacccatcgacagctggctgacattttca

SEQ ID NO: 55474 - DNA, 658 bp, Zea Mays
cataattcttaattttcattcggtttcatcagtttcagagcagcagtgagacttgtttgtctcaaaatcagcttctattggtcagcttgaggttagatcacatacccactctgttctttgtgtgtctgtttctttaccatacttattctatcattattatattttttacttctgtctacaatgaggccagaaacagttgaggcagacccaaatgaacatggtcgacttcccaacataaacatccaactgcctcttatgcaagacctgatggcaactaagatctagatgtttcttgtacattagcgctccaagttccaagctaagttgattgattatgactcagaggttggcaaaatagttgccactatgaagcaatgtctgaataatattggtacgaagcagtccaagctagctgctacatttggaaagttgattgacgaggttcttcggggtgagtcatatagttcagacattgaacataatgtgacacaatcttgcaagaaatctgttccaagtcagctatcattttcatcatatatgtatacttcatgcaaatatattatgcactaatccatagttttcaatgtgttgaacgagcctcccaatttggtgaccaacttgtatctgaaccattgatgacacccacccagatggagtc

SEQ ID NO: 55475 - DNA, 362 bp, Zea Mays
gaaagtttggactttggattgtgccagaaagaagggaggaacgaggaacgggtgggtctaggtgagctcactttattttggcggtttgtttggctctaatccatatcggtttctacttttaatacatttttttgtctctataaattacataaattgcaactgcagcaatctggctttaatttaaaacgaaatataagacagatcgtgtcttgggctgggcggcccccattttaaaagtgaagagcccagaaaggaagaagaaacgtacacaggcacattccgcattgcctttttgccggaatggtatatatgatgtgaatccatttccattggaatcacttgaacagcagcttcgttgtgtt

SEQ ID NO: 55476 - DNA, 910 bp, Zea Mays
cgccgagagccgccttggggaagacttccgccgccgccgactagaaccataccacgggggtggccgaccatagtaaagcatcaggggtggtcgtgggcaaccaccgaagctgaccgtgacacttcctagcaggataatccaacgaagcaccaccaatttctcgccgacgttcaaactccgccgcgggtgccggaaccaccatgggctgaggactacgcaaaccgaatctatgtaaggttccattatccgcaatcgatcccacctctgtatcacgtagaactatatggattaggagctggagcgctagaatcgtggacatgccccgccggggaatcctccgccgtgtactgtgaccgcgccgtcgccgccgttcgcgaagagggatgcgggtggccggtgtccgttcatcggatcttggacgaccaagattagggcctaggaatctaatcggtatgattgaatcctaaccgttggatctgtgggtagcggccaggattagatcttgagatatcctttcggcttaatcaatcacaaccatcgatcaatgatcgtgcgaccagtgtggggaaaagatgatagtgtgccatggatcgtaggattcggatccgacgagtgaggacaaactcaggtttataagtgtctcggtctaatctggaccgacgattttggatccggcgactcatgtacctcggtaccccttcggagggccggttttacatatgagaccctaggaattttgggattcaacccgcggtccagtcccgtgatagcctgagtcttagtttcttttgcgctagagtccctaaactttcctgtatttgacgagcagtccagataatagagaaaaccagataaataatattagaaattgattttaatacaaaaataattccagaaacttgtataattc

SEQ ID NO: 55477 - DNA, 293 bp, Zea Mays
gctggtgcgggggcattagaagtcacagaacgcggcggagtggcccaacggcggcgcaaactcactctggtgatcaattacgcggacactagggcagtaacggacgaaataagggcatgggaaggttgctcacctcgagtgcaaacttaggggagcttgagcgatggtggggacgcagtgaagcctggggtcgatggtggcgaggctccgactgcatggggaggaatcttgtgagcgcggaccaaacgaactagaggggttggggacaaaccgaggggtgtcccgggttgctg

SEQ ID NO: 55478 - DNA, 400 bp, Zea Mays
gaagaaataagcaccaaattcaagtcaaaaaggccttcaacctagggtgtggtgtggtggggggctatatgcacaaaccttctaccaacgaaattagtttcagttgctaacactcgaacaaacacgacctaagcatgattacatttctatttacatgcaatgttgtgttcgttgttctactaattagtgtgcatatcttaatatcttaagcttttagattacatagggcatcactatttgctacctcaagatgtttaattaccacattaccttggtgcttcaagatatctggcgcagttttgtatgaaacttgtgcaatgcatgatacataaaataattacataatttgagcagtttgttagaggttattttttaggttgccatatgttgttgtggcggt

SEQ ID NO: 55479 - DNA, 2849 bp, Zea Mays
tacaaaaatattgatataatttttataatccaaaaaaatgtttaacatgtagcttggccaataaaccataggtttctctaacctgaggtctgataaactcaagttgtcttcaatcttgcatcagagatttgtttcagcaacattatagccaaaacatagtaacagtattaaattcttgatgcgttacaaaaatactgatacattttttttataatccaaaaaaatgtttaacatgtagcttggccaataaaccacaggtttctctaacctgaggtctgataaactcaagctgtcttcaatcttgcatcagagatttgtttcagcaacgttatagccaaaacatagtaacagtgttaaattcatgatgcgttacaaaaatattgatacaattttttataatccaaaaaaaattgtttaacatgtagcttggccaataaaccataggtttctctaacctgaggtctgataaactcaagctgtcttcaatcttgcatcagagatttgtttcagcaacattatagccaaaacatagtaacagtattaaattcttgatgcgttacaaaaatactgatacatttttttataatccaaaaaaatgtttaacatgtagcttggccaataaaccacaggtttctctaacctgaggtctgataaactcaagttgtcttcaatcttgcatcagagatttgtttcagcaacgttatagccaaaacatagtaacagtgttaaattcatgatgcgttacaaaaatattgatacaatttttttataatccaaaaaaaattgtttaacatgtagcttggccaataaaccacaggtttctctaatctgagatctgataaacccaagttgtcttcaatcttgtatcagagatatgtttcagcaatgttatagccaaaacatggtaacagtgttaaattcttgacgagttacaaaaatattgatataatttttataatccaaaaaaatgtttaacatgtagcttggccaataaaccataggtttctctaacctgaggtctgataaactcaagctgtcttcaatcttgcattagagatttgtttcagcaacattatagccaaaacatagtaacagtattaaattcttgatgcgttacaaaaatactgatacatttttttataatccaaaaaaaatgtttaacatgtagcttggccaataaaccacaggtttctctaacctgaggtctgataaactcaagttgtctttaatcttgcatcagagatttgtttcagcaacgttgtagccaaaacacagtaagtgttaaattcatgatgcgttacaaaaatattgatacattttttataatccaaaaaaatagcatgtagcttggccaataaaccacaggtttctctgatctgagatctgataaactcaagctgtcttcaatcttgcatcagagatatgtttcagcaatgttatagctaaaacatggtaacagtgttaccttcttgatgcgttaaatgacacgtagcttagccaataaaccacaggtcattcaaacctgaggtttgataaacccaatatgtctttaatactgcatcacaggcatgttttgactttgtttcaacagccaaaacatatgttacattcttgatgcgttaaagaaatgtcaatacaatttttatgatccaagaataacatgtagtctgaccaatgaaccacatgtttctccaacctgatatcagataaaactcaaactttgtttaatcttgcatcagatatatgcttcagcaatgtttccgcacccaaaacatggtaacagtgttatattctcaacacgttacagagatgtcaccctaatttcaaccaaagtgaatagtatctaaaaaagaaacatgcctctaaaaacaaaatcatgggtgtgagtacaaaatacataaccataacatccaaaaaaaatatcatgtatatttgcaaggttaacaaatcagagtatcaacaattttaataaacacataagcttgtaccttgttaaacaaaaccatatagagcataaagaaaattggtaagttagatccataagaagttttcagtatgataatgtcaatcctagtagttagatccataagttctcataccatgaagaattacaaggtgtcatatctgaattggaccgtatctgattacagctcttactaatatgctccaggtaatgacagatggcataatacctgttgcaagcacctcattcaataacaggactccttcaggtgtcctattacaagagcacaggcccttaattcttgtattgtaagtaacaatatctggtttcaaaccattatctaaaatggcagcccaaagagatgctgctgtatcaatagaaccaatctcataaaatccatccatcaatgtgttataggtcactagatttggggaacaattcttttctttcatctccaaatatatacaaaaggcatcatttactttcccagcagaacaaagaccatgaattaagatgttgtgcacaattacatcaacctgaatacccgcatcaagaatttcattccaaatacaaagggcagcatcaatcttcttgactcgacaaaggccacgaatcaaagaaccataagttctgatatctggtttaaaacctctctctaacatttcctttgttaagcttgaagcttcttggtatttttcagccttacacaaaccatctatcagagtgttatatgtgatgatggttgggcaacaaccattgccggtcatttcaatgtaaattttaacggcatcactaatcttgcatgctcggcagaaaccatttattagtgcattgtaaacatgagaattcggtttgcaaccatccttcatcatattcttatatacct

SEQ ID NO: 55480 - DNA, 375 bp, Zea Mays
caagtggtattcaaagactcaggtattaccgtcaggcttaccctagtttagtttaggtttttcatcctataactccagataattgccatacaaaaaaatatattccgctgtcatataaccttgtttagccttgcaatttcgttttagattgctttgttgaatttgtgtctgtgttcgagtcttgttgctggtttaggtcgtgtcgtaatcgtagttcaaccactccatcgctgttatttgtttccgtcgctagcccatccaccttacccagattacaagtcgagacaccacattactcgatttgccctcgctagccgccttgtgtgaattctcgccacgctagctctagattaggttgcaagcagcattgcattg

SEQ ID NO: 55481 - DNA, 596 bp, Zea Mays
tcaagatgggtaaaagatatcaaccatgcccatcttgttacatattgactcgttctcacttgggcctaaaccttttgtgaggcaatcaactaattggttacaagaattgatgtgctctaatcttaataccccactatatatcttctccttgataaagaacttgtcaatctccacatgcttagtgcgctcaaactgaactgtattgtttgcaatatttattgcagcaacattaccacagtggagtctcatagttccattcctcaaaactttcaactcccctaataaacgctttagccacatcatttcacatattcttaatgccatttccctatattcagcttctgaagttgacctagccacaactgcttgcttcttgcttcgccatgagacaaggttacctccaacaaacacacaatatccagatgtagatcttcggtcatttctactacttgcccaatcggtatcacaatacccttccaagttcatgtgcttgttccttttaaaccacaatcctctcccaggaattcccttcaagtatctcaagatgcgataaacaacatccatatgtcctgtcctaggatcatgcatatacctgc

SEQ ID NO: 55482 - DNA, 439 bp, Zea Mays
ctcaccatcgctagtccactgaccctgcctatcagccactcccctcttccctaacctctcgcccacgctctccgtcgtggatgcgccaacgaccccgcgttttccggccacgaccccctcgcccgagcccttttctgcagcccacgcccactcactcacttccctcgccctgttgtgccctcagctgaactccctcgccctctctctcactctgcgcatgcgtccgtggaacttcgccgaaggttcaccgctgttccatggccgttgtcgagcgtctatcgcatccgttgccttggtgagcttcgccccttcgccgtcaacctgggacaccctccggtttgcccccagcctctctaattcgcctggtccatgctcataggcgttcttcccatgtagctgaagtctgccgtcatcgactcgtggaatccttgcatcccca

SEQ ID NO: 55483 - DNA, 418 bp, Zea Mays
cattaacacaaggctgactaactcgccgaccaatgaggatgagaaattagaagaccacatgaaaaggttagacgaggaattccaacgacaacaggctcagataagcaaggtggcgaaaaagtggtacctctcgcacttcgaggtagatcaccaccagaaggtcgtcaagaagagggaagtaaagtacgattcactgtcagccttgctgcatcagcttcccattgtaagtaacaccacgccattagccgatattcaatctgttaaaatttcttttgataattagattaaaattataatggaggatatagagaatatgacgcatgcattagaaaatactcatacacctgattttttgtcacataaattgggcactaaaataactgcgtcaaaaacatcggcgacaaatgaggcttctcag

SEQ ID NO: 55484 - DNA, 302 bp, Zea Mays
ttgatatttgtcgaggacctgcagggcgaagacacagtctccgtcaatgaggtctttggaagttggctcgtcgacgtcgggtactgctaaagcgcttgtccgcggggacccatgtttgattttttgcggtgtcatggcctccgatccagggggtgaaatcggtcgcccgacactcggtcgtgttcagtgcccagactgcttcaggtagcaggtcggcccatttgcgcttcttgtcgtcgaggagcattttcttgatcaccgtgaaaatcttgccattggcgcgctccacgacgccgttggat

SEQ ID NO: 55485 - DNA, 384 bp, Zea Mays
cagaaattggagcaaaatggcctggaagttgggctgtcagtcgtgtgttggcctgaaggttagattgacagtggcattagatcaactttagaactgaattgtgcttgatcgagtggaggtatgagcaagaaccttataacaaaattgaagctagcatgatggacaacaactttgctatagtcggcatggtagtttgttgaatgaaaatcgaatagaaatgactctcaaattactctgtcaggcactcgaaattcagtttgacatgaatagtaaactgaacaagatcaagttcagtgcatccgccgccgacgttcctccaccgcgattcgagctcgcgccacgattggtgctgttgagacgtggatcgatgaagtggtaaaagat

SEQ ID NO: 55486 - DNA, 348 bp, Zea Mays
tgtcccttatccttcccttccattcaattaatggaattttgaaaccttgaaattgcaccagctcgctcaattgtacttcagatagcatcttctttgattgtcctcttctgcatactcttgttgatggtgctatcatattcttgaaaaccttccgtgctgtctatctggcattcttctgtctctgtacttgtcctttaacagtcacttgcttcgaggttccattttccatgtggatacccatggctgaatccactttgagattattacataccttttgttctagctgtttctgttgtttttctttctatccatacattatcacttggctcccccaatattattggttca

SEQ ID NO: 55487 - DNA, 339 bp, Zea Mays
accgacttaaggcgtttccgacttaagccgattgctccgttagtagggtatagtgatcacccttagtcatgtaagcatgagcatgtcgcaccgacttaagtcgattgctccgttagtagggtataatgatcacccttagtcgtggaagcgtgagcatgtcgcaccgacttaaggcgtttccgacttaagccgattgctccgttagtagggtatagtaatcaccctaagtcatgtaagcatgagcatgtcgcaccgacttaaggcgcttccgacttaagccgattgctctgttagtagggtatagttatcacccctagtcctgtaagcgtgagcatgtcg

SEQ ID NO: 55488 - DNA, 741 bp, Zea Mays
agtttggcacatatatgcatgaatatccatgtgggatgtggttaggtggctcgttgaagaactagcaatccttaggacctccactcgtcttatacacaacgtacgccggtgaagcggtcgattgtgtttctgtggcagcaactgaatacggtagagatggcctggtctggaaaggaatctcccctttgtgacttcctagcactgggcttgttggagagtagtgattcttcatgatctcttggacaatgagaacaaccacgcgttcgaatgcattcatcaggctcttagagtgacgatagagtgtatgaaccaccatgtagttgacttcttgacgtaacaccctagtgcgctcttttgaaggtaacgagaggtcaacctcgtcaagagtgccctcgggcgagaaccccttccatcggatgccatggttgcgggtcctctcgaaagagccgatgaggtcggcttcaaaaacagttttgatttcatcatacttcacttggtgttctggagacagctcttcgtacgtgatgggtcggtcttgcaccggtccagacatgtttgtctaagtgttcaccatctaggcagctgatgtcgtagatggtttcaacgggcatgccagaatgtgtcaccgcccggaacccaccgacgggagacttctcgccgacaggcaacataaggagccaaaaggctcctaggactactggtgggtcctaatgcctcggtcaacggtccatatcctgacgt

SEQ ID NO: 55489 - DNA, 447 bp, Zea Mays
ctaggagataaccccccccccccacaacaaggccacggtggcaacacgactaggggtagaggtaggagctggggacctcaacaacagagaatattctattgtcttttccacggcgatgactcaacacacccgaccatggactgcccagagactaaaccaacaaaggactgaatggccagggcgatgccagctgacaaccaaagagttgtcgctcacacctaccaaccccatcaatacaaccagcatcaattttaaaacgaacataacgtttacccccagcagcaaaaccacaatctttttccatatcaacaacgccttcaacaccaagaaatcctagcgctgccacctccaccacctcaacatccaaaccaacccctaccacctcccccaccactaccaaagcaagaagacttcgctgatcaaccattcaggggagtaatccacatg

SEQ ID NO: 55490 - DNA, 391 bp, Zea Mays
ggaaaatgggcaacaaaatatcggtgagagcggcgttacggttgttagtaggggtccactagtcacttgggcaaaggacttattggcagacgatcggttcactgatttcgttaaaaccatggttatttgtggtgcctggtccttatggtctagaaggaatgctagaaggtttgggcatgaccgttggaatccaaacgctacggtgagtcatgtggcgaaaatgctagaggatcgggtttgtttaaaaatgatagggtcgcaagcctcgcagagctaccgggttaaatagaaagggccatcgaaaagttggtgacatttaactcggatgttggttttgttgctgagacgggcaaaggggctgggagcattgtgatgaggaactcgcagggag

SEQ ID NO: 55491 - DNA, 563 bp, Zea Mays
gcaaatggtacaacactggggttaggatactgataaggaaaccagtgctatggcatatgcccatgaaaagttttaggaaaaacaccaatcatcaccagtccaatggggggatagcgatcaccacaataaggaaactttggtcttctagggaaggggtaactaaaaccactatcatggggtcctcagccatatggcacacgaccagcacgtcgtcgaccaccatgtggtctcactgtctaaggcctagcagcaagaggcaaaggcctataggcctcataggacatctctaagctggctgagcatgaacaccatgagaagggtggttcatgttcatcctgctcaactcagaaatccgccgctcatctctcttccccctaaagcaaaaatcagctagatgcccatccctctcacaatactcacaatggaacctcacctctctcttgggtggattttgcttgtgggaggggactttctttttgggtggctgaagagctctaagaaggggatcactagagatgtcgggaagggtgtcaagtgtgttcctacgatggttaggtttttga

SEQ ID NO: 55492 - DNA, 572 bp, Zea Mays
ccgttttcaacccttcctccaccactataagagaaaaaagcttggtgcatgctcttggcacatagaaactacgactagacatcgaccatgagaaagttaatggcttgatacaataacccactctcttaatgcatcctagggaaaagaggatccctcatgccacctcactccaagctaacatgcctcgatcctagcgtttgatggcaacattcgagcattaggtccaagaaagctaacaaccaggtaagtagtttgcacttgctatcattaacaaatgcaacgtcactacctagggagagagaagaacctccatgcctcagccagtttacctcaactcttgcacccaaagagtaaaagcagtgactaggatgcgacactaggaaaagagactccctaactccccacttccacaactccacaatagaagatgcttcgaccttcgcatatggtaccatcaatcaaattgctgataaaggagcggaatgggctaatagataactagcattctccacgaacacattaagggtttccatacacaattccataaggaccaacaacatccacaaaaaatc

SEQ ID NO: 55493 - DNA, 375 bp, Zea Mays
tggcatcttgtccaaagatctgcatcaaagttatagagccacaatccagctataactttgctacacaggattcctacaaaaagccactggatcctacatagaattaagcttgaagttaatgccatctatctgtcagtctgaatttcagacttaatcagcctgacaccctgactttaggcttatttatctcccatttctccttaacaactatgcttatgctcttaagcaaagttgttcttctatgttaggtctataactttgatgtggtagcctagggcaaaaaccctagtatttgaaagttacaaagctcaaaagttgagcccataacactgtttttcagacttagagtggaatcacaattggggtcctttttgc

SEQ ID NO: 55494 - DNA, 473 bp, Zea Mays
ccctactccactctgtgtagtattgagagcttgtatgaacttgtgagtctgagtgtctgagtgagtgtgtgagcgtgtgtaagtatgccttgtaacgtcgtgtgccctcccttttatagctcaagggaggcacgtacaaggatactgagcctcgacatgtgggcccaggggcaaaatggaaggaaatgactaatgcctgtaacgcctgggcaatctccgagcgccataatgtctgtagttcatacagtattgatatgtcgcggctgcttcctcggtaacgcgcgagtcatgatgagtgtagtacacgcgacagcatgggcgtactgcctgccaacggaatggataggcacgccacctgcgggatggcctggtcgccgcccgtcagtggagtggacatgactcattaaatgctgaggcggcacatcgcctgccagtggaatggacaaagctcattaaatgccgaggcggcacat

SEQ ID NO: 55495 - DNA, 381 bp, Zea Mays
tatgttgctgtaatatatttctttatgaagcgtggaacttccgtacataccatttttgagctggcggcgaaaaaacaccttctcttcttttcacgcttcagaaagaaatccctcttcttggccgaagccactgtatgattcttgccataatcgttgcataagaatgcccttgtcgaaagcgtaaactccatatgacagtacttctgtcacaagcatggatcatgccttattaatacgccttcatgagtctttgccgaagctataggaggaatttcccttgtttttttcactgcttttgctgatgccaaaatgatgtatgatgcgatgctatgcaatatgatatgatggtatgatgcaaatggtgtttatgcataaatcact

SEQ ID NO: 55496 - DNA, 420 bp, Zea Mays
cgacgagttgacaaggagacaaggtggtgcttgcagtgggcgggttaggtcactcactaaacgaccactcgatgattgaaggagtgagtaagccgcgagtgagctagtgctagtggatggaatcaaacgagtcaagtgggagtgaactgagcagtggagtgtggagaaaaagttagatcaaaacatgcttttcgttagatttagttcctgtttattttaatttaggtataagaggttataaagctgaggtgtggccataacccatcgcttgtgtccgtcctgagctcataccaaagtttggttgacctctttcagagactatgtgagacaaccatcatcttccaatacacagaatgacagtaaacatggaatgtgacataagctaaacttgagcgaggagaaccaaacacctccttcgtg

SEQ ID NO: 55497 - DNA, 440 bp, Zea Mays
ctcctttggttggtgatatgtactcttcaatttgaataggtacacctcgaacattgaacttgctaatcaatttctccactccttttattatcttggtttttcttcatcaacatcaaaggaggagaggtggatatttggccattgattttgctcaacattattatcatcatcttcattgatgaacttaagcttgagattgagtcaaacaatggctcatgatcatcggactaatgtgtcgtggtctggtgctacataacgactgtcatgttagaactagtcgttactaaccattgggcacatcttaatagcatatggtctgacaccctcttgtagactaatccgatgccttaatctcctctctagaactaggactctagctccaatggttcgatgccttcctttgttgcttgattcaatgtggtctcctctatgaataatgt

SEQ ID NO: 55498 - DNA, 370 bp, Zea Mays
atttggtggcggtggagctgcacccgggccacacagtggaatttggtgtttcgaggatctcctcggctcgcgtgcaagacatgcatcagttggggtattttgggagtggagttggacgagttccgggggcagaagagattccggagctggagggtgagatagtggtgtttgaggcattttttactgtcggccttcggttacctgcacatcgttttgtggtggaggtgttgcagaggtatgaagtgcagattcatcagttgacacctaacgttgttgtggctttggcgaagtatgtgtgggcagtgacttcgtatggaggtcagccttccgtagaggtcttcgccaagaattattgtttacactggcagaa

SEQ ID NO: 55499 - DNA, 1067 bp, Zea Mays
gtttagattagggttccaaacctgggttaaaaattgggatgttacaaacctaccccacttaaaggaatctcgccctcgagattcagatggggctcgagaaaaggtaagggtgttccctcctcagagagtcctcactttcccaggtagcttcctcctctcctctgctccactgaaccttacagagtctcacttctgagttgtgggtctttcggactgctgagtcgagaatctttattggcttttcccggtactggagatctttttgaatctgaattgtctctgcctcgatgtggttctctggtacttgcaggcatttacggagctgggacacatgaaacacattgtgaatatctgacatggattctggtagctcaaggcggtatgctgcgggtcccactctgctaatgacgggataggggccgacgaaatgcggtgctagctttcctttcatttggaaccttttgacaccacgcatcgggagaccatgaggtatacgaaatctgcttcctcaaatctgagttctctccgtctgttgtcggcataacttttctgtcgactctgagcttcaagtaacctcttgcggatcagggcaactttctcttcggcttctttaacaaagtcgggtccttctagtatcctttcccctacattggaccacattaggggggtctggcactttcgtccatacaatgcttcgaacggtgacatcttgatactggcctcccaattcttgttgaacgtcaacacacaagctcttagtaaatcttcgaggaccttgttgaccctctccgtttgaccatctgactgagggtgataagcggtgctgaaatctaacttggtgcccatagcttgctgaaggctcttccaaaattttgaggtgaactgcgtccctctatctgacactatcttccgaggaataccatggatcctgactatctctttaagatatatccgggcaagggtggctcctccaaaagtggtttttactggaatgaagtgggccaccttggtgagacggtcgattattacccagatagagtcattccctttttgtgtctggggcagtc

SEQ ID NO: 55500 - DNA, 352 bp, Zea Mays
aatacagtcaatgaatccctgcatgaaaaagttctcaagacatttattagggccaaaagattggacaacatccaagacagaaccaccatatcctccaaaatcaatgatagacctgaaaaaattgcaacttgaaattcaaataacaaatgatacttaattgaaggtagaataatgaaagcatacatgctcgggtctagttgtcctgaacaaatgaacttaaataattggcgagcacattcttcacgtgatacatggggaggttcagcaactgcagatttagtggaaatattccttgcaaccagttcaggagttgcctaatatatatatttgttagtaatcaatggcataaatg

SEQ ID NO: 55501 - DNA, 739 bp, Zea Mays
ctaagacccacatctgatgcatctgtctcgactgtgaaaggaagatcaaacttgggtagggcaagaaccggtgttgaagccatatcctgtttcaactcctgaaaagcaacctgagcgtcttcagaccactgaaacacttgttgtttttgcaacaacctagtaagaggtctagccataataccataatctttcacaaatttcctgtaatagcctgttaaacctaagaatcccctcaactctatcacattcataggttgtttccaggacaacatagcttcagttttactagagtctgtggccaccccatctcttgaaatcacatgccccaaatatttgagttcatgcttcacaaaagtgcatttcttcatcttaaagaaaaactagtgctctctcagcttggccaacaccatcctgatatgctgataatgcacttccaaactagggatgtagatgagaatatcatccaagaaaaccataacaaattttctaagaaaagtctccaacactgagttcatggcacactggaagctagctggtgcattagtgagatcaaaaggcatcactcaaaacttataatggccatgatgtgttttaaaagcagtcatgtattcatcctcaggtcccatccgaatttggtgatatcctgctgtcatgtcaagactagtgaaatactgggcaccaactaattcatctagtatctcatccaccataagcataggaaatatgttctttatagtca

SEQ ID NO: 55502 - DNA, 1031 bp, Zea Mays
ctggtgatcaaccatcaaaattcttgatctccattcccatatagttcttgaagttgttcaattgacccaagggctccggtgctttctttgaggaaacaaccttgggttgcaagtcaggactcgtacacgggtcaggatgccccctactgttcggatgttggggtccttccgtttcatcccacacgttgatttcaccctagatggttgtcaaaccctccactgggccaccctttgaacccttggtttgttaatgggccatcggggcgtatatagccccgtgtcccttcttacctagagaggcgagcaacccatagaagggtaccgttacttcgatccattttttgaggaacggtgggttgcttcatcgttggtccctatagtgtggagattcgtgctttccaaggcagtcaattcatccaacgggagtgacgacacatttcatcgaggtagtcaattcatctggtgggagtcagagttgggatggcgtacgcttatcagggagttctaactcgttcgaggtggttgactctatgtttgcctgccctatctcgcatccccttaaaacatcgttccactcctcttcagctgcacacttcaatttgtctcattcccttcaccttccttctctcgaccatccaaaaccctgcttttctgaaaaagaactttttacctggctagcacaaaatcccttagggccgttgatggcattctagtaccatttcgatgtcatcgacgctcacatcgcatccctggcattgcatggcctaatccatgagagaacgaaggagatagagtggatggtgcctggtgatgaagatgtcccaaggcctctgaatggttacgttgtctcctttctccccttccacgagcgtggcatcacctcgcctccacattgcttcctccaccgtctccttcagtattacaacatcgagcttcaacactccactcccaatgggatccagcatacatggccctttgtgagggatttttttgggattaaactccattttaagttatggcaacatctcttc

SEQ ID NO: 55503 - DNA, 647 bp, Zea Mays
actcttcctttcatatccttgccccttggtgtggtagattaatattggtattctttccacccctaatcatttctaggatttcatcaactagttcttctgaattgagctaggtttatttgagttatcctgtatcgacagtgtatacattcaaatcccactgtgaagaattaaggataccatgtagattgaaatatcacagtacatggagaaaagatgttcttctgcatggtcttagaaaacggcaggcactgatggcaaacatagtaatcatttaagcacaaagttgattccagacccttgcagtgaaacaattaactacttcagaaggaatgccttatagatattaatgtggttagtgcttcgtggtagcattgatttatgtgatatccatgggatgttaattctccaaactgttgactcttcacaggttgaataagactgtatctaaatttttttctgacacatcagtgggccttgaaatgagtttgctatttgcatatgtgatatattttcttaagaactgaagttttcagttgctttcctctgataaatgattatccgaaattgttcagttttaattacgcaggtcactggacgattatgtgtatttatacctgaacatgcggttattatttgttcgtggctca

SEQ ID NO: 55504 - DNA, 731 bp, Zea Mays
caatcatcccctcggtattcttctcaggcgctacgttagcaataagtctatcaatctctcataaagttgttccgaggggaccaccactgcttttggcttgttgaggcacttcgtcagccatagagggggcagtcttcttttgaattgctggtggcggggtatcaagaacagccctcatcacattcatcatacgatgctttttctgcgcattccccccaccgggtgccaaaggccctttgtctgcctctacttcggtagttttcctagcatctttcttctgtggttgtaataagcttgttagctctgatcctagaggacttagcatcgtgaaaggcaaaggttcaatcattacctctgaaatttctgtcatgccaatagaagttgtcgaaggggtctctgcagaatgattcggcggagaagatctttcttcttcttcacagcttgatgatgtaatctttcttttcttagatgttgaaggttctagtgttaacttcgatctctttgttaaccttttcttcttgtccttctcgataaatctttgcgcttgtcttttcagaatactcagaacccttttctctttcactcccccggcctcttcatcaagtctatcatagtcgagatactcgaagccaagggcatccatcactcgatttagccttcgtttctctcatgtgccgaaggcagcagtcattagctggtcctctttcttagtataatttccaaggatttca

SEQ ID NO: 55505 - DNA, 1223 bp, Zea Mays
atgtgacagagataatgagcatacgtcagctaccgacgagcacggtgaccatccaatactgtatcctcgatctcacaaataaggaagtcaaccacgtcaaactctgaatgtgagaccaaggcaccaagtagccatagctgaatatgagtggtagcctctctgtagcccatcctgggtagtagtgtccgtctcatcagctcatataagaacttcgctgcagtagtgaagtcagtaggagatcgtcgcgacccatctgtgaaaggaggtctgaacatggccacaacatgagttgtagctggtgcaactccgccgtgagggcgacgaggaggatccaaggtgccataacacagactatggagccgagtcgacgactctggaaatccaaagagctagcaaatttggctgcatgtaaagtgacatcctctctctcgaagcggaatcacatccattgatggtcagggtcaatccacactgtagcatagaacactttgacccactcaatatatctgccactcgcggacgacagagaaaggagtcctggcagataggtgagatgtccctctgagtcggcaccgacggctaatagaaaagcaggcagatccagaagccggtgcgctcgcaaagcgatctaagctgacagttgtgcccgaaagaaggattcttgagtcctggtactgaagagaggcacaactgttgggtccctctgagatatcaaccaggactccatgggtacgtgtctgaaccgacgtacccgagccgcagtgactcgctgaaggtcgagcagacagggatcagcagctaggggtcgcacctcagtctcgtcacgctccctgaagcgaggtggtggaatgggagcgggagggggaacagtggaagctggagtggtggaggtggtgggtatagcggaagtggtggatggctctggagcgataggagctggtgaagtgggaggtggagaagacattgtggcggaaggtgtggagggagcagtggagcgaggccgagatgcgaggcgacgaactctgtaggctatctgatcagaagagatctgcaactgtcctccccgctctgcctgctctgatgccgctgccgctgcaaatgctgcacgagctgctctgtccatacatcgcttcttcctgccctcctgctgctcaagataaattgtctttcccttgactcgcctgaaggggcgaggagggtcctcgtcgtctcctcccctgatg

SEQ ID NO: 55506 - DNA, 576 bp, Zea Mays
gtggcctccgtgtcgcgccgcttgtaggcccgggccaggttcatggctgtttgtagatgggatggggcctgcagctccacgtccgtgcgtaaaggctcgcacagacctgctgtgaataaattaccttggtgctgcatagatagatcagcacaatgacataatgccaaggaaaattgatgtatgtagtcatccactgtgctcgtgcgacacagatccttcagctcagcgagaccgtttgtcctcaacggcggtccgaaccgcatgttgacgaaatcggcgaagcgaggccagtgaggatgccataatcccgctccaaagcgtagtaccactctgcagcaatgccttcgaggtgcatcattgccatccaaaccttcttctcctccatggtacgcatgccacgaaaataggccacacactttgtcagccacgggagagggtctgatgtaccgtcgaaggagggaaagttgagcttgggacggtcgcggtggggaaagccgccgtcgaagccattccgaccgccgccagcacagtgaccgcggccgtagaagtcgccgtcgtcaacgcggccgtagggac

SEQ ID NO: 55507 - DNA, 404 bp, Zea Mays
tgacgttcctggtgctacctaacctggtcacacccgccattcactctctaccattggatccgagatccgtggccgagattcgatcacgtgcacatctctactgaaccctccgatcaaatctaacggccctgatttaacgtactgaagcggtacgccacacctaatcctagtcgttcttgcccaaaccgacggcgcacgcagatctacccgacccgagtcctcaccggcgacgagaacacccgcacgacggcgcgccatggccagaattctcactttaacccacggtgcactattgctaggtatactaggtgcgaaatgaaattgggaaggaggcaaacatggggagcgggtccttacactaactccggcgttggctcggtcagtccacggcgagctgcggatgc

SEQ ID NO: 55508 - DNA, 379 bp, Zea Mays
gatcaccttcgagtgtttggatgtgtgtgttatgtcttgttaccaccatatgagcggattaaattgactgctcagtctgttaagtgtgtttttcttgaatacaatcctaaacacaaagactgttgttatgatccatctactcgccgtatttatattcctagagatgtgagttttaatgaaaatcactccttttacaacaagttcactcactcctcatattgtcccacagagtccacctcattcatgtgtcttccttctattcctgattttacatctacaccataatgaaatctacacctgatgtcctcattcctataacaccgccttccaccttcatgttatctccaccttactattccaaaccacctgtcatctagac

SEQ ID NO: 55509 - DNA, 711 bp, Zea Mays
agacaatcctattagaaaatctccaaccaaaattaacacaaaattgcaagaccaccgattccaggcgacgacaaacattctttattaaaacaccatcagcttcatccttttgtagttgagcccagaatttaagccaatgtgtacatctgaaaagaacctgcagataagtaaaacttgaaatattattaaaaactaaggcattcctacttatccaaatagcccggcaaaacactgaggcacttgtaataataagacacttagttcttaaatcaataccggtgagccacgtactaaaaatatgacgaacagacatatggtgtaagctttgtgtccagctttaatatatagaaattccaatttattttggttaggttatccttagttagaataatccctttaaccaaacaccacaaaaagattttaatctttaggggtaaattcaatttccaaatcagcttgtgattaaacatttgaccgtaattaattagaacctgatatattgattgcaccgtgaagatgttaccctttacttaaagacatatgtattatagctcatcggggtgagcaccacccgattaacaagatcataccacatagctatgttctgacccagaacatcctacgaaacgaaacattgagggggtcgtactcaagatagatgcaactgtctcacttttctgtctcacaatatgatatagtgaaggatattgc

SEQ ID NO: 55510 - DNA, 1440 bp, Zea Mays
tgcatatgaacttcatgtaaatcaccatgaaggcatttttaacatccatctgagagatagtccacaaagaagtagcaactattgcaatcaaagtacgaacaatagtcatatgtgcaacaagggcaaatgtgtcattataatcttgcattcttgtccttggctctgctgaatacctctggtgacaagacgagctttacatatcacaatggaaccatctcaatggaactatgtaacttggtcttaattttgaaaccccacttagatgtgatatgcattgtgtgtgacggtaatggaacaagataccaagttcatgtacgatcaagagcaacaggctccttagacatagccaactaccattctggaatgctagaggcttccttataagtggatggctcatcaacaacattcactttaggaaagccatacctgtcatcaggacgaatagtgctacaatctcgaagattatacggtggaccaacttgtggctcatcagaaatagtaggtggcttatcagtaatattatttgaagcatcaccattgggctcattaggattggctaatgtgggagggctaaatggaaggtcaccggtggttttgggactacgatggaagacacacacacacgtgataggtggtttggaaaacgagtgaggtggcagaggtagaggtgaaggtggcatggtggaagtagggccatgaatcacaggagtggacggaggtgtggtgacaccaacattggtttaaaaaggatgccggcacatagtgaggtggcagaggtagagatgaaggtggcatggtggaagtagggccatgaatcacaggagtggacggaggtgtggtgacatcagcgttggtttaaaaaggatgaaggcacaaaaaggatgtgggctccataggttagtatgggggcttagtagaggggttataaaagaaaggaaaatccttaggtcacatcatgcgaaatacatattcgacgagatagttgaggcattagacaaactagatagcacaacataggcagagtggcatcacgctgatgccagatagctagacatggcagaagaccttgagaggtgcagtgtagagtgggctagagctattggatctgatgaccacgttccaggaagcgagatccttcacagaaacatcgaaagggttaaactccattgaacacgaattgtcagtagtaaagcggtcaaccgaaaggagattttgaatcatattaggtgtcaaaaaaatattgtttgggtagaatggtctggaaagaaccgagtcacctactgaggtgacggggaggatggagccattaccgacaacaatagatagattagttgaatgggagggcagaagagggggatgttgccgtcgttgttagtagtgtggttggaggcgctggagtcgaccacccagtcggtaaccacatcgggtggattcaaagcc

SEQ ID NO: 55511 - DNA, 695 bp, Zea Mays
tagagatactataggagcataactttgtttaactcacaaggcatgagtgttgtacaaaaattggagttaaatggactcaaagtatggctgtcagtcaccatggcagtctgatattggtctgacactgagttttgatgaactttggactcgatttaagctcgatggggtaagtaaatgatcaaggttactatagtcgaattgtagatgtattagctcaacaactttgatgcagatgaatgatcatgttgtcgcaaaaaatttggagtaaatcgcactcaaacttgctctgtcaggcacactgaagacacttccgatggtacagtgactgaatatgatcagatgtgctgaagctcgccaccggtgatccccgcgtctggattcgtgccggtcgtcgtgattcgtgcttggcgtgtatggataaccgtggggagtaaaagatcttggtgcctcgataagctcagacccggtcaccggtaaagccaccgtacccacttgcttattggccagtcgagttgtgcctcgccggcattggccgcttgccgactgtgcgccatgtgcccaagtgcaataccacgtcacagtgaatcgccttagcatgtccggtcatcgctggtggccttgccacggtgaaagccacgatatcacctacgccagtgactacccctctctccgccgccagcgcgccatctcaaaat

SEQ ID NO: 55512 - DNA, 554 bp, Zea Mays
catgaaggacctcactgacgtagtagactggtctttgaatggttcagacccctgcagtcggtcccgagcccccaggttcctggctttctggtgccggtctctcgacgaccagcaccatgctcactgcttctgcgaccgccgcgatgtataaatatagcggttcctctggttccggagctaccaatattggtaaggacaccaagtgctgcttcagctcctagaaggttgttccgcctcttcggtccaagagaaagacccggacttccgtagcagcttaaagaaaggcagcgctctctcagccaaccttgaaatgaagcggctaagggcagctagcgatcctgtaagcttctggacatccttgactcggcctgggggcctcattgcctcgattgctctgatcttctccgggttcgcttcaatgcctcggtacaaaaccaggaatccaagcaacttcccggcggaaatgccaaaaacgcatttgtccgggttcagcttcgtgcgggttgcccgcagcttgtcgaagaccagggttaagtcttccactagggtcgacc

SEQ ID NO: 55513 - DNA, 475 bp, Zea Mays
atttttttatagtcaataggggttgattaggagagcctaggtatctagttacctattatatagggtataagctggacatgttgaggtaagaaagattatgacagggaaaagacttcaccagcaatgtttaagtcttgattcatctcgaaattcactttgactgttttatccttccttgtcgaggtcgatcttctcttttctggtcttggtctcattgattcgaggttagtgtatatcatcggggttggggaatatggttaagatagatatggatgagatagactacatgatgtaggtcaaattcttgtttgatgttaggtggggatagacagattggatataactagattagactagtttaggttagataggtctaacagggtagaatatgtattattaagatatgttagaatcttttgagattagttagatatgttatgataggatagaatctcttcaagataagatgaattta

SEQ ID NO: 55514 - DNA, 1168 bp, Zea Mays
cttgggccaaatctagtggtagttccggaggtgcggggaggtgggtctcactcccttctttgccagcttctccttctgctcctaggggaaaccctgctccaatcccggaggtggtagacgtgattttatccgaagccatctgccagggaaaagagttactaccatgcacatgctaattttttttcaatcaagtcattttattcattacacaagttcattacagcatacaactaccacaagttcattacacgcgagtgctatctaaggtactcccgaactccttctctaaagtgtccccaaattccttgaggaggtcatcaaggctagctagggacatttcctcggtgtcagccgagttctctatcctggtaggaggtagggctggaggggcttcttccttctgctcagtctggcatccttggcttctggtcttcttgcagattttcttagcgggggcgagcttctttagcttcttgtcgtaatccatcttcagggtttggtaggcttcacgggtgttggtttcctcgctttttgctatctcgagactctcttggagggacgccttttcccttgtaagttccctgacttgttgctccaggctttccacccaggagtttaggtgagtgcagtgggaggcaaggtcatcatattggttatcgagagtgtggaggtatccagccatgtagacgatggtggggtcatcctcggtaggatctcttcctgacagggcctgaagtcttttcctccaggcgggggtatttttgttgttgggtggaaagtagcgaaggggggtttcaaagactactctgttgtagttctggcatagctgtcggagggcttttcgggcaacattttggcaagtatctgggaagcggtgtgcggtgaaagtgacttggaaagaagggtggttcgagtagtttcggctttctcccaggtagactgccatagagcacttctccattccattctcgagatactccttccagacatattctggcttcatgcggatccccatgcgaagcgcacaacttcgcaacagatgtgggaacccctccacttctgagtagtaggatgtcctaatgaccagagagtcttccatctggaataggaaaagaagggtctgttaatatcgggggaaaggagagaagatttttcttggggtaagagg

SEQ ID NO: 55515 - DNA, 409 bp, Zea Mays
gagaagttccacagaatcggaccaagggagcgcaaccactgcacccctaagacgtaagaccatgtcgaagccgccgtccagaggtaggggatagcaggttgcagtgaagattgtcccctcgattgatagagtagccttgtcacaaattccattgcttgccacctgatcaccatttgctatcttgactgtgagacctggcctaggcgtcacttggagcccaagtcgcgatgtgatggatctgcggatgaaagtgtgggtggaccctgtgtctaccaatgccaccaaggactgtccattgatggtaacctgaagcttcattgtgtcggccacatcaatcccggtaatggcgtgcagtgagatgcccaattcagttgtttcttctagttcctcatcgtcaaccatctccaac

SEQ ID NO: 55516 - DNA, 429 bp, Zea Mays
ctgatagatagctactatccactggattatcatcatctgcatcaatgacatgcaactgattgtttgaaagatccaacatggtgagctcatgtagtctccacaactgtgtaaggtctaaggaacccacaaggttgtttgagctaatgtctaaagctaccagttttgttagttgaaagaaggacttgggaataaaacctgacaatgcattgttgctcaagtacactctctccaactgtgaagttgtcatgttagaatcttgtacacagccagaaagttggttgttagaaagatctaggtaacgtaatacaggaagactgaaaatagatgatggaatctgccctgcgaggtcaaggaaaaatatgagttagaaagtctttcttcttctaaacatgaattcagaaaatatatgatgcctcctttgtttacaat

SEQ ID NO: 55517 - DNA, 333 bp, Zea Mays
ccgacgttgatttcaatgaaacttattcaccagttatgagtgcaataacattccgatatttaatatctttgatggtacaaaatcgtttatctttgtagttgatggacgtagtgtctgcatatctctatgggtcactggattctgatatatacatgtaagttctagatggaatagatgtaccgaatccaaaggcaaaaggcaacatgtattgagtaaagttgcagaagtcattatatggcttaaaacaatcgggcagaatgtggtacaaccaattgagtgaattccttttacgtaagggatacacgaaaaatgatgattgcccgtgcatcttca

SEQ ID NO: 55518 - DNA, 570 bp, Zea Mays
ttgggttttcagttaactagaggaagccctagtccattgatacctttcagtttagttgcaccacctcaattagtggtggacccaggccctaggcgcccataaaacctactctactgcccgtgacgccgccaattgccctcaaccctagccgtctcgcccaatcacccaccttttgtaccgctccaccacaacaagggaatgatcgattaatgctgctgcaaagacacaacgacctcctttgctgcaggtgtagtgccagagccacaactgtggccattagtggttgtgttccgagagacgatggtgccatcaatggctagttgctcgacgccaagatcatgactggtacaagtactagtgtctttgccaccatcgtcgcgacagcaagcacaaggtagcttttgtggccgcacatgtaggccacgaccggggcttcacttcgactatcatcggtgagggtggcttcaggaccatctacctcgcctgcctcactggctccctcaaagttgtaaatgtccaccacaacaacgagcacctccaccacgtgttccgctagtagcttgtaaggcc

SEQ ID NO: 55519 - DNA, 470 bp, Zea Mays
gtctgaagctgacgtgcccatgatgatgaagctgggctactttggagaagctgaaaggaaacttgtctgatttgccacagaagaaaccaccccagcgccgaaggatgatgaagtagttgttttcaagagtttttttagaaaccaccctagcgccgaacgagatgataggagaagtcttgaaaatttttgaaatttatcttcatcagctgacccctaacgccattgttaggattagcgtcttcatttgggccctctgaagccaagggatgagcctagatgccgaagcgttctgtcgagtgcatgaactgcactaccagacgaaggccaaggcagacggtttacatgaaaattttggttgttacaactttgcgtatcgcaaggatatgaaggctccagttctcagttatcgcaccaagtggccaaccggctggaaaggtgaatggttttatatcaaggttgatgagaagaag

SEQ ID NO: 55520 - DNA, 780 bp, Zea Mays
ccatccccagtcctaattcaccaggtacaggccgattagcatattatcaggcccacacacaacccatcaccgctaaaccctttctttacaaccaacacagcagacgatatatcacacacacacctatgcttctgacatcatcccgtcgcctggagtttgattgtcccattcaaaagcatcagcaaatttgttcttgagcacatcatagtcttcccaggtaacttcatcagcgaaatgcgaccaaaccaccttcacttggaccactggatggctgcccgggcgcaccaatcttgtttccagtatattcacaggtctcacatcagcaccagagaggtccactatctgagacaaatctgagtacacaggggtagaagaaggagtaaaagcattgagttgcgaaacatgaaacactgagtggatctgggatgatggtggaagttccaatttgtaagccaccagtccaatcttctgaagaatcttgaaaggaccaaaaatatttcagagccagtttaggacatggcctgctgacaactgtagtctgcacatatggctgtagcttcaccaacacaaactcacctacttgaaattcccttttagtcctgtgtttgtcagcctgcagtttcatcctattttgagctgaggccaatttttgcttgagcaattcagaataggactgcctttcagtaacccagtcattaaccgactattccccatcaccagcaacaacaggtgcagcagaaaacacaggctcatacccatataaagccttaaaaagtgaac

SEQ ID NO: 55521 - DNA, 385 bp, Zea Mays
gtgttagcaccaaacctctgcctcattgaggggcagacatggtgacactgtcttcccaattttttatggaccaagggctcaacccacaccagcaggggcctaggtgcctatcgcccctacccggatgcgtggtgactcgggacctcacctagcctgaggtccgaatggtgtcttccatgcccaaagtctttctgaaggattggtgttgttaactagagagctccttctcctttggggcttaatgttctcttcggatacctttgactggggatttgatgagtcacaaggaggtccaggtccttattgtaggatccttggcctatagccaaagatgttaattcctcccctcatggggctagatggaggcagcggtcctatacatgcg

SEQ ID NO: 55522 - DNA, 448 bp, Zea Mays
tttccagcatgcatgcattataaaacatgaagaaattagaaactaaggaaaagtgcatctaatcatgaacttatcaggcagtgttaataatgaataatgacatgagttggagtagacaaacctaatctaacccacctcctttttaacaatctaggcacacatttttcccttccattgccataacacttacatctaaccctctttcacagatgacttcacccacccctgccaatggaggagacacccgtttcagtttcgactaccttgcccacgagggttttccctctatcttgtggaggtgctctgctccgccggttaccctacaccccctctctacacagtgcagttgtacgaggagcatcgggtgccacgttgtcgggtttggctaactctgaaagctcaccctctacagcctggatggcgttcccttgattccgagactatcggg

SEQ ID NO: 55523 - DNA, 573 bp, Zea Mays
cttcggtataatatccctctatcatgaatgcatcaggacgagcacgggttggtacatagccattcgatattgacatgaaatgctgatatgtccatattccaggcaagtacatgggacccaattcctctatttgtggcaccaagtgcaccataaggtgcaccatagtatcaaaaaaagatggagggaaacacatctcaaactgtgacattgtctccactggcctgctcatcatatcaagcaattcattaaaattgatatcatgttgaagaaattcaccatttagaggaatattgtcaggaatgtggagggaaacttcaacttcctcctctctctcgccctctccctactctctctctctccctcctctctctccctctccctcctctctctcctctctccctcctctctctctgtatctcttgcatctccctcctctcctctctctacctctctccctctccctcccgtctctcctatctcctctctctctctcctctctctcctctctccctctctctctcctttctctccctgtagcatcccttactttgttgggcagcgtgaactttcttc

SEQ ID NO: 55524 - DNA, 724 bp, Zea Mays
ttccttgattcttagctggtgatatccagaccttaggtctaccttggagaaatatttggctccttgtagctggtcgaagagatcatagatccgagggagtggatacttgtttttgattgtaacttcattcaaggatcagtaatcaatacacatcctcatacttccatcctttttggtgacgaaaaggacgggtgctccccaaggagacgagctaggacgaatgtatcctttttgttgcaactctgtgatctggagttttaattctgctaactctgtgggagccatgcggtatggtctctttgcgatgggtgcagtgccagggattagatctatgtagaactccactcctctttcaggcgtcattcctggcaactcttctgggaatacatccacgaattcttctattacggatacactttctgcttctagattaaacaccattggatcattggcgggtggttgagcctgacaagaaactgattttccttggcggtcagtgagaaggacggtcttgcttgcgcaacttatgatgcccttgtgcttagttagccaatccattcctaagatcacatcaattccttgggatgacaagacggttaagtctgccaagaacactaccccacttaaaagaattctgacttgggagcatttgagctggcatagaaggtctgaccctggggttcaggtgcccaatgggatttctaggtgtgtagaggggatgcca

SEQ ID NO: 55525 - DNA, 833 bp, Zea Mays
gtaaccttcttgtctttcgggatttattcctcttccatcattagatttccaccatttggcaatctctattcctttggtattgacatactcgtatccctgtatcctcaatactcttgtctcaaatacttacctctgaaaactatgtcgcatatttaaacattccagtttatatgttcacaaccttcttgtcttttgagatctcttcctattccgttgttaagtcattatctttcggcaatttctattcccttggtcttaggatgctcaagtccttggagccgtgtatactcctatatccttatatatgcttatcttcatacccctaatgtctatgtaagacatttcagttaacatgcccttaaccatacttgtttcttgacgatccatgagcaatcattttatttcgcaaatccttggtgatctcgttgttcccttataacatcccttggtaatgaatttttttaattcaaccatcctattggaaccttacatgtcttacccttgattgttttctccactttgccactttgcgagtcttgccttaactctatcctatgttatacttttcgttattatcatctttaccgttgactcctctatatcctacattgatgtttatctcatacctgccctttaaaatcgcccctcttccgtctcattctgagagttgtactttatctttccttcccttggtcgtatcctcttctttggcttgcgagtttgtaactccgtcctttgttgtgcttttgcttgttattgcctttacctttctcatctctcgatctttccttggtgattaccctatgcccgttatctaaattcttcgatctccc

SEQ ID NO: 55526 - DNA, 1046 bp, Zea Mays
gttagaatgcctcactaaagatctagagacaacttaatcatccaatttggactattttgtgagctgtgagcagcaggatcctagtttgttttgttcactgcctgcaggttggacagcagggatattagtggcttcacccccaagcagagaatatcaagtatgggatcatttgagcctatcccgtgggagtccttatctgctctcctccatgactagttcctggagaaagagatatttgtgctgaaaccagaccaagtgcagtgtcttggaggtatctgtgaaggtgcgtggagctagtgcttgggagccacataagtgagctcatgctgtgttggcatcccttttattcttgcgctgagttgtggatgagctcagtgaccaccaccacccccttgcctatttgctcggtgcctaaaggctttgttcagtggagtactccccctgtcttcgagatccagccagtgtcctcgcgtggtcttgtagttcttgtgctcaagacaaggttagctctctccacagctcatgccctactaacggagcaatcggcttaagtcagaaacgccataagtcggtgcgacatgctcatgctaacatgacttaggttgatcactataccctactaacggagcaatcgacttaagtcggaaacgccttaagtcggtccgacatgctcacgctcacatgattcagtgtgatcactataccctaatagcaaaatagtcaactcaaatcgggaatacttcgaaaaaagaaatattacgcttatagtgccaggggtgtttttcaacaccctacccacggaacaatcggtacaaacataactgttgtgctcatacaagaactcacattacaccttttctctaaaagatgctaactcggtaaacaagtgtttttcaggaaaatcattgcgctgaagtatccctgcaggcatcatcttttgcaggagcaagaggaagatggacggcttgcggtgtcaggcgcgaccatgacattagcgacgatatcaacaggcaccacgacaccgggtctcctcatcaggatccgcc

SEQ ID NO: 55527 - DNA, 1642 bp, Zea Mays
catttatcttctaaaaatccagaactattgctttaaactactttaaatgccttaaaattccttatttatcctaaaaatcataaaactatttttattaaattctatggaaaataagaagtctaggaaaattggtttgacaattttaggatttttctacaattttctataattgttggagttctgctggaaaaagaaaaagataaagaatgaacagttcctgggccgatttcagcccaggcagcccaacaccagagggaaaacgcgcgcacgcgcgcccgcggggaagactttgcagaagagcccacagggttttggctaattgtacatgggttcggtcactgttgcactgagccgctgactgtttgcagaaaagacccccggtttctatttcttctcaggggaaggtccccgacgacggtgaacgcggccgagctccggtgagctagcagaccggccaaatggggcaacgactggcgttcccgagcggcggacatcaaatcagacctaccccgagtatttcccctaagttaattgcacagttggtgagctatcaagctctgtccacgtgaaccgagggggtggcggacagatgagtgcgttcccggtgatccctggcggtccagttcaattagaggggtcgaggggcatcaccagcatgcaaagatgctagaacaggggcggggagggtatgaacagacctgtggagggctggccacggcgagcttggttctatggtggcagaaacttgatttgggggaaacaagaaattcgggcacactggtgatcgattgctagcaattcttggtggctgggtagttaatgaccttgcggaactggtggagggctcagtttatagggagagcgagcggtggtgatcaattcggtcgagccgtgctggctgccggagatgaagaagaaccttggcgcagtgaattcgtgtccaccgtcgtggcaacctccccggcgacgatgggacagctctagggagtcacggcgacgcggtggaaaggcagagccacgcggcacacggccgagaggcggcggtcaccggtgaagttatcggattccgctgcggtgaacctggtacggtggccggagttgtttaatggccggagtttatccacggcgaggatatctacgcgaccccaagtgctatccggttaccagtgagtgctaatcttaacggtggcgacgatcccggcgcgaagtcatcggcggtgaagggagcaattgatctgatctgtccaggcactgtaccatggcgatgcttattcagtgtgtctgacagccaagatttagggccagattcctcccaattttctatggaaacatccccaagtctctgcatcaaagttgtagtgctacataccagctacaaatttcttatgggaatcatgctcaaactggtgctggatcatgtttaaatccgagccctaactccatgccattccaatgttaatctgaatttcagatttcaagcagtctgacagtccaacttcaggctcatttatctcaaaattcttcatggtaccaaggcatgagttctatagcaaagttattcttcttccatagatctacaatattgatgtggttacctagggcaaaatccctagaatttgaaagatgcaaagctcaaaagttg

SEQ ID NO: 55528 - DNA, 326 bp, Zea Mays
aaaagttgtagcatccgaagttcttatggaggttatccgaaggcctgaccttggtctgaaaatgtaaatcatgaaccctgtagaatgcatcagcttcggtgtgacctccttgacttcacactgcccaaataaaaatgacaagctgaactatagcattcaacgtcagttgatgcatgtataactggtacttttgaagaatcttcgcaatcaactgatacatcttcgcccagctttgaagaagctcttgttgtaacacccaaaatcttgattttagggactagtaacaaaaatcaaagtaaagtgtcccggactaatagtaatacttt

SEQ ID NO: 55529 - DNA, 724 bp, Zea Mays
gccgccttcaaatcatgcatcagcggtccagagaatcttgagaggcatcctaatcgccaaccacaagaatatttgaatcttgagatgcatcctaatcgccaaatgtattcttgacccagcatctgcgttgaaccacaatttaacatctcagcctgattttgcgctacacccacttatcacttatggtgtcacgattttgccttccaaagtggtccataaggtgagacattatttagctatcaccggcaacgacaaaatcgacaaccccctgtgatccaggcgctatcttgcaaactttgtgcaatgctaaacggctctttactagcattagtacttcacttgaggttacttggagcctctcaccaaaagcacataacagcatgggccatccaacacagcggaatgttacattggacttctttgacattttattttttatgtattcatatacggccagcccggcacgtctttcaagtctgaaccttgagatccaaaggccaaggcccagtggctagacgtgcgcagagacttttctcctgttatcgccgtcaagcttgatgcccttgtaccacatggcgcaggcgatgtagacggcgaggtccacgagcgagagcgcggcgaggaggaagtagaacctgtcaaggtggccggagttgagagggatccaccccggacgcttctccccggcggtgaggcttatgaccacactcaccagcatgatgct

SEQ ID NO: 55530 - DNA, 657 bp, Zea Mays
tgcagcgagccaacctattagtcagaactttggtaataattttgtaacagacgttgagcaagcagataggtcgaaaggctttaatatcagtcgcatcaggaacttttgggataagtgtgactttcccaaaattaagtctctcaatattaagggaaccatcatgaaaggaattaaagagattaaacaaatcacttttaatagtgtcccagaagtcctgaaaaaattcagaagggaaaccatcagggcccggagcactgttgtgtttcagagaaaacaccacctctttgatctcctccaaagagaaaggacttataagaaggtctttgtcctcctcctcaagctgtttcatgtccaaattatcaaacgaaatacttgaatcttgagaagggccaaagaggtctttatagaaggatgtcgcaagctggttaatgccattatcatcatgcgccaaactatcaccatgagaaagagttaagatcttgagtttcctctttttatgcttggctagcaaatggaagtatttagagttctcatcaccatctaacatgaacttatctctagctttctgcttgaggctaatgttttcctcatcaacaatcttcttgaggttagattccaggtcaagtttcacaaatctatcagtatctaataatcccg

SEQ ID NO: 55531 - DNA, 894 bp, Zea Mays
agcaaaaccctagggggttttctgcagagtcatagactcagattaatagtgaaccgaggacctgtctgtaatacacttagaacctttcgccagggacccagatgcaaaaccattttcctttaaaccatttctgtttatgctttttaacataagcagagaacttagaaaatttgtatcttgagaaatgttcaaccaaatttagtcaaaccaattttactggattcaaaatattatgaactatcaaataaaaatactgaaccttgtgctttctgttctaaattttagagtttggaattaaataaggaaactgcccaaatcttattaaaatgaagaaaaattgttatgcttctatgctggacttaagaaaatttgtagaagtccaaacccaacttagatattgtttaaaatactaagcaccccagtattgaaaatttaaacagggttatctattaaaagccataattgcccaaaacttaggaaaatatgaaaggcactagaaaatagtgaacaatggatgcaaatatttttcctagtccacttaagtaatgaagaacctaggaaaaataaaaggaaccatagtccaaaacaaattcaaggtgaaatgttttattaggcactaacaaaactagaaaggccattattaaaaatataagaacaatttcaaaattggtaagaaaaattcagtagactcctagctactaggacaccactgcaaaaatgataaacaccccagcccatcattttaagtgggttgaacaaataaaacttggtattgagccatattccaattaaatcataagcaagccaaaaagtgtgcaacaatgggcaaataaatttttaccagattattgatgaagtaggccaccagagaataatgcaaaacctattcaaaac

SEQ ID NO: 55532 - DNA, 1501 bp, Zea Mays
cgcacatgcaatgcttgcttgccgggatagctgcgcacttaaagaagggaagtgcatacatagtttagttttgtgctccggcgagggtatgaccaccaccacatacatgtgcggagctctgttgtagacatgtatgccaagtgcggcgacattgatgcagcacaaaggctcttcaacctggccccaaagaaggatgtggtgatgtccacttcggttgtgtcagggtagagttggctgtttgtgggaggatcgctgatgcaaaactggtgtttgatggcatggaacaacacaatttggtgtcctggaatgctatgttgactggttatgtcaagcccatggatctggccggtgctttagatttgttccagcagatgaggcagaggagacgaaggagcttgatgtagttacactggcttctgtactcaatgcctgtacagggctgcttgaccttgggaaaggtgaggagctccatgcacttgtgaggttgtattccaaatgtggatgcctgaggactgcagaacgtcttcttctatttgaaatgggatcagagagagagagagagagagagagatactcctggaactcgatcatctcaggttacgaacgccactccatgagtgcggacgctctcagcatgccctacccctacgtgagatgcaatccgaggcaaaacctagccagtcaacgtttttcagctctgcccttgcagcctgtgcgaacatatttctgcttaagcatgggaagcacattcatgcatacatgatcagaaacaggaacgacattgacgatatactgcgaagtgcgctggttgatatgtattccaagtgtaggctgtttgattattccgcccgggtctttgagttagggtcatctaatgatgtcgtcctgtggaattctatgatctttgcatgcgcgtaccatagtgaaggtgactctggtttcgtgtatctgtgaggggcatgtcaggttgggaaggagttacttcactctgatgagtacaacagcatcgttccacggatcgaacaccatgaatgcatgatcgagctgttgggaaagcatatggatacatggttgagctagaggatttcgtggaccacatgccctttgagccaacaaccgccatgtggctcaggatctttgactgctgcagggaatatgggagcagaaaattaggggagagggctgcgcagcgcatcaatgatagcaaaccgtcatatttgttcagtccgctcctgtctacgaatgcagtggctgtgacgatgcagagcccatgtcattcttgctgaggctgacaaaactggtgatgattgattgagattcttgctgaactgtgaggggttttaggtggctgagaagctgaatgggctgtctgagatgccacaaacttgaatttgatcttttagctgcctatgaacgggtacaatcagcacttacgatagtgataccctgctaagacaagaattcaggctgaaaacagctcatgttccctcgccactccctc

SEQ ID NO: 55533 - DNA, 380 bp, Zea Mays
ctagggtcgaccctctcttagtcttgaccgcgatgtcatcgacatagacttccactttgtccctaatcaggtccccgaaagtcttactcatcgcccgcacaaatgtaggcaaggcatttttcagaccgtacggcataacaacatagcagtaaagtccgtccaccgttacaaaagcagtatgcttcctatcctccctagacatctggatttgatggaaaccagagtaagcatctaagaatgacaataggttgcacccggaggtagaatccacgatttggtctatacgtggcagtggatacgggtccttggggcaggccttattcaggctggtgtagtcgatgcacatccgaagcttcccattcgccttggggacgatgact

SEQ ID NO: 55534 - DNA, 467 bp, Zea Mays
tcggtagacaacaactagccaagctgagaaacttcatcctgagatgcctacagctcgtggcaatgatggtctaagtcagacacggtgaagcggtgactcctctccagaatggttaaggaattactaatgtcacggtacagctgtccagattgtcgcgagaagcaacaagtgctcgtttttcttcctgcgagcagaaaacaacattcagcattaaagcaagaatagcaaggaagggtcggccaaggaagtctacctcatgtgccatcctctcggaatcaagctgagcattaagagaagaatttaggtaacatgcactatccagaaaggcagaagtctaggctaagtcggtctgactctgagagtacttctcctcaaagtcaaagcaccgccgagccatatctgataaagcagctaaaagagaacgcgtgattaaagataagctaagcaattagagcaactagagaaac

SEQ ID NO: 55535 - DNA, 410 bp, Zea Mays
cttctgttcctgatgagtctacgtgcatcgcctcatcccacgtccggatcccttatcggactgacgcgattcatggattcgagcggcgaggtctacatcgtccacaaaagtatatcaccgctcctcccctctccttgtccttgctctggcggcgcaaccatgaacgtcttcgacattagtcgccggtctccatttgctgaatcgcaggtatacacatgtctatatcatgttccctttgttttccttcaaagtttaaagttaatttaattaacgattttgtaccctcagtttcaaactttagactttggacaattaggaattgatcaggaatccaggtcaaacaagtataagtgacagtctgaacctgattgaacttgatattataatcacactaatcctctctgtcctca

SEQ ID NO: 55536 - DNA, 1120 bp, Zea Mays
caagagagggtgaacttcttctttgcgtcccctctgcctccgactggtctgagtctagactcgagtaggggaagtagggagtagagtgcgccatgtcggagatgtcatgacgttagctcatggaggagggacaagcgttggcctatgttcggtcagtgcgacagctattcatcatggttgaatagttgattgggacatttgaacccattgttgggtgggtgtagctcgtgccaacggtgtttgatactatggcttcactgtggatgtcgctagagttattgcggacctggacgatggacccttacaaatcacaacagttgataacggtcttttgattttctccttcacatcgacgatgcgatgcacgagatggatccaaaatggaacatctcacccggagcgaagttgatgatggtggcaaaggtaacagccatggagctatccattatcgatgttgcactcgctacctggcacacaagttgttggtgtttagcatcagtaacatactatgggatgtaccacgtagtgtttttgtgttcaccgaagtcgatgatagctcaatggttcgtgtgaggcacgatgggacttaaatatctaaacaagttttggacgctgagatgcataataccctatgtcatgtgttctactgagatggtattgctcttttattggaggttaaaaagtagattagaactaatcttttgctgtgtctatcagtggatccaatcgtttggtaggggtccctaaccaaccttatagatttgatgagattagggttacatggttcaatagatcactattgctatgcttacaactatggagccaactacgactagcacgcaagcgtgtgattctatgttggcttatcttcgcctctacatgtgcggaaattggttatgacgccttcatgcccacgtcttcgagttccatatcatcctctagtcggggctggctgattagtccacgaagcccatttgtccgacccattgaagtcctttaatcgacccatagtctgaatttgtgtcacggggccctagcggatatctatcccccacaccaaagaacttgagcagaacatgataaagaatttataatattagtttgctcaactgaatagctt

SEQ ID NO: 55537 - DNA, 573 bp, Zea Mays
aaatcctgggcccgccactggaggtgcagctagcgagcctatatcaagccaagtcaaagtcttatttaagagctcgttgagtaagcgagccgagccgagctcgttaagtaagccgcaccgagctttcgactcgtttctagccctagcatgggttgtagaggtttgctaacgtgacataggtgtggctattgcctttataacttccgtcatcactatggcaattggcaatagtatagtttgtagcgttctcgccttttcccgtagttcgtagcgttctcgccttttcccacagcgaggctaccaatctgccactataacacggtgctttgttttcttgctttacacagatattataaaatacataagaatgagtggtgccttattttcttgcttacatattgtgtacgcatatatataaaatacataagaaagagcaaaataacgcatctgacataggtacaattgttaaaccattattagtagcatgattggttggatgtatgagtatacactggctggtatgagtaaaccctgctgagcaaggctaggctaaactcatgcgatgggtttttg

SEQ ID NO: 55538 - DNA, 403 bp, Zea Mays
attaactaagcctaatcaagtgttttacctttatcagctaggttttacagttttaccacattcctatatattaaaccaaggaccctagcttgcaaactaactagaccacgttattcacaattcctttgccatccgattgcttctccacaatacaaatcctgccatccagctgttgttcactgctccgtcttatttgcctgcccggcagaggctggctggtaacgcctcaaacgtgatccttggtctgtcgttcttgggagcctcgcgttctctaaaatgttgctcagctgatgaacacgacaggcagcctcagcatcttcgctttcttcctggcggtcgttctgaaggtaatactcattcttttctcccctttttcactcccttgatcccttcccaatgtcgc

SEQ ID NO: 55539 - DNA, 981 bp, Zea Mays
catggcaccaccccttccctccgtctcccgtggttcgcgggcgctcgtccaagcatccaaccccagctccgtgcgtcgcggcgcgaccaccggacctataagtacggaacgctcatgtccgcctcttgctttcctacctctccgcccccgttgcctcccaccgccgagacgacgcggacttcgtaccctctcaccgacgtgtgcgccgctgtcttccccggcactcactgctgctggttcggctcccgaaccttcgtcgactccgcatttctgaacagggtttgtgatcctcttcacctttttgtttagcggttgattcaattcctggccagctgaggatttgagatgcttgggttactttgtaattttctaaaaatgatcttaggttctgtattcaccacctgattattcaagcgttgcggttgaaatcttgtttgcagatttttcatacattccaataacctcctaattgtccgaaggtgtcatatgtgacgagagagcacagatgtctctagaagttgagaagccaccagaaacgaccaagcagctcaagcgacaggattcactctatggtgatgcagaaaaggtctccggcttcaagcaccatggctctgaggtctgcttcccaggcaacttggttaccgtgttgcaaagatgcaccgtcactgacagaaaaaatttactacaataaaacttatggtgacacagggaggctggccgcggttgctgcagcttgcatttcagagcattggcatcatctatggggacgtcgggacatcaccactctatgcgatatccagcaccttccctgatggcatcaaggaccaggatgacctacttggcgtcctctccctcatcctctacaccctaatcctgataccaatggtcaagtacgtcttcattgtgctttatgcagatgacaatggagatggtaagctcataagacaggaaatttcaacctgtcaacctgctgtagtcacc

SEQ ID NO: 55540 - DNA, 431 bp, Zea Mays
aaaatcaggtgatgggtgaactttgatctacttgatttcatatatatatatatattaagtaattaataatttaatgtcttatttatgagtgcaggaggtgggtttatttgctggagggtatgggatcaggcggccaaactgaacaagctgatcaaaatgtaagaaaattatgtgttacatcactaattggaataaattttggttgtaacaatgctggtaatgcttattgtattagaataagtctgtgttgcaggtggttggtgataaaaacgtgggtgataaagctaggtgtgagcatggtgtatcaaatgctttagtaagagttgaacatgtaagaatgtatgcattataagaattgtattatgttaaatacaataataaattatgaatctctaatatgttgacaggatgtcgttggcataagaaaaatg

SEQ ID NO: 55541 - DNA, 410 bp, Zea Mays
gtctgaatctagttagcatcgctaaaagtcataaatcttgtggtcctgggtttgaagctgttccgctgagctaaactaaaggctgctgtacagtgttttgctgagtggcaggtgctgcccaggttaaactaacagctgcagctgcaggtcaagcgatattacttgggccctgccctgcttagcatcttgctagtatcgtatctaccgtgagacgtgacgcttgctaatatttcaaccgccgaaaaggtaaaacgaaatgaaggaccaggtcatcagttcgagccttgtatactactagtaccaatataacatttgtcagggtcaagcctaatactccttataaactaaactacacgattttccatcggacaacggtcggtccatttgaattcaattttccaatctctctc

SEQ ID NO: 55542 - DNA, 867 bp, Zea Mays
ctgacttcctccacgcagacgctgaggaagatgcctgaacctcgtgttctgcagctgctgccggtaggtgtggctgagcgaccatagggtccgatgggcagcatcgctgaccgaggcagcgtaggtggacagtggtgtcagggactcgtgagcagacagagtcttgaatcccctgtcccttgcatccatcaccctgacgtggatgcgagtgatgtaatagcaagcccgggaggctcgctcactcgccttgtttcgtacagggggtggacgtaggtgcctagcgcgtgcagcacttcttgcagcaggttggggaagtgccccgtctcgaacattgatgtataatgttcgacaacaggaccaaaccccatgaagtagtcatgctgggcgtagtcagcttcctcgtggacgtgttcgtctccaccttcttcgtcctcgtcatcgtcgtctccggagtcgtcggggtcgtcgcctccgggtgcaggtgcttggaaggctggtgcaggcggtgctgacgtcgatgacctagctgcgaaggccagggactctgccaatggggtgggcgtcggcagctgtttctccgagttgtcctccagattgactacattctccactcggatgggagggagatccgccggaacttcctcgactaccgctgggtagaccgggatctgccggggctgaggggcgtagctggtgttggtgcgggtagtttggagagtacgaaccatctacaagagaagagtcaactcagttgaaatttcaaagaggtaaggctgataaaataatttataagagtgaaattagcaagttttgaagaaactaggctttccatttctaactaatctaacgacctagggtcagcatagc

SEQ ID NO: 55543 - DNA, 606 bp, Zea Mays
gttaggtccggcaaaccaacataaaaaccggccaaatcttatggagatgaaaccacaaagaaaattgttggggcgtaaccctcttagtgacacgccatatcagaacccgggtatattaaatgagcaagggccgagccgtcacaccttaagtgacgcgccgtctcttgatctggagccggtgataagtgagcaaggatcgtgtcgtcgcatccttagtggcgcgctacatcggcgcccgggtgtagtggaaaatgagcaagggtctttgcatcttcctcggtgggtgtgaagggtaaggaagctagtcgagccaacaagggtccgtgtaggtagttggaacgtaggttccttaacaggtaaattacgagaaatagtcaatgttgtggtgaggagacaagtaaatattttatgtgttcaagagaccaagtgcaaaggatagaaggcgaaggaagtggaaggtacaggcttcaagttgtggtacacggggactgcaggaaacaagaatggagtaggtgtcttaatcgataagagccttaaagatggggtagtagatgttaagaggcatcctagtcaaactggtcactaggacttggttctcaatgttat

SEQ ID NO: 55544 - DNA, 1509 bp, Zea Mays
gtgaaaccttacattttgggcatgaatccaaattttcattgtccttccaatagagaatgcaatcattttgacatgaatgaatactgttgtacccaattcctatagatttcaccaatttcttagcttcataaaagcttttagggagtgttgaaccctcaggaagggcatcattaagtagatctagtagcaggttcatagatctatcggtccatcctccaaggagtttgatgtggagtaatctaattaggaaacgcaattgtgtatatttctggcaactgggatataactctttgctattttctgcgaccaatttttggatggaaactagctcttcacaaggctcaataacagaactattgtcctcaaaatcacctctatcatctaaaccggcaactaaatctctaagcaaatctgatatgtcatcatcttcgttagactcctccgtagcctcaatcccttgattaacagaagaggagctagcttctccatgtaagttccatattttgtacccttttataaacccatcacatatcaagtgttcacgtacttcacttgcctctctccaaaatgagttaaaacaccttttacaagggcataatattttgttgcctatagctgaattcctaaatgcaaaagctaagaaaccattcactccttgttgatataccttggtgtgcctacatgcaaatttatgttaaattctatgttacttgacaattaacagcacattcaatgtttgtgaagtaattaatttgtacctagcctcggcatcgatccaggttttatccatgctcctctgtgtaggacatcagcaaacttttgaaattagctcctctgtgtatccatgcttatctatattagtttttaattaagacctatatttgtctatattatttgtaaaattgcatgtgcttcctataaaaatcgaaaccggattcacctcatgtaaaaaggggggtttctttttacctatagcagagtgacctaattaacttctctgcctcaaaaatgagcttgtcacattacagtaaaatgaatcgatagaaatatattaattcgatagaaaattttgggggaaattgagatcgtcatcttctcacacacaggcttgtgctcacaaggctgacctcaatgaatcgatgtaaaatactcaattcttagccattcaccttaatccccaatttctcacctcaatctctcggtcctcattgtagcactgcagcaacagcacctaataatgggtagcagagtagtagtggtttggtttttgatcaaacaacaagtgattcttagccgcacttgagtcgtagcaccagtaaagaacacttataaaaggatggcctgaaatcccagtccccaaccgtccgcaccaatggctagcacacagcacttcgagtctgtagcagctctgctgcatgccgaggcacagagcgaccgcgtccatagtagacaacgacaccgtccagctcgcatgctgcccttactcctggtggctggcatcgctcgccc

SEQ ID NO: 55545 - DNA, 492 bp, Zea Mays
atgagctacttggagcatattccaagtctggagataatgcactatctgcggccttcgggagccgaaaaaagaaaagattaaatagggtttttgatgctattggatttgtgtaccctaactatcgctacccgccacaggggcagaaaagaaagggtgcaacctctggaaaggttgccgcttcggctgctccaagcgagcctgcgccgaaaagtaaatagttgaaagtcctcacccaccgaccccgctatattgaaccggccatagtgcctgagtttagcggggaaacttcttcagctattgaagcaaaaggacctgctcctacgcagaagattgaagagttggctgcaatgccgaaggcaccttcggccaagttagctgagccgaagactgataaaattgaggagccaagaatcaaagggacaaaaacattagaagttttaagtccttcggcagaagtggcggtgctggaggcacaaaaaggtcttacgacga

SEQ ID NO: 55546 - DNA, 543 bp, Zea Mays
aaaaggaaaagaaatgaacagtgttggatctgaactggcccaagccgacccaacctgaaaagaaaatggggacgcgtccacgcgcgcacgctcccatgttggcggttttgcgcagagagccctgacgttttgaaattccttaaagagtccctcccactattcctctgtctcgctgacacttgcacaaacaccccttcgcttttctctcttcacaacctccagtccatgacgacgaacgacggggtaccgagctctggtgagcttgtaccggccgatttactcgatgactggcgttctactttggcagagactgaattcaagccctaatgagagtttccccccaactaatttcactaatgacgcactaacacgccctatccacggtgacagtggacactacgggcaatcaagcgcgttcccggtgatctaaggggtcctagtccaattggcagggtcggggagtatcaggagaacctaaggatgctgaaataagaaagcagagggcaagatcggacttgaatcgagctggccacggcgagacct

SEQ ID NO: 55547 - DNA, 521 bp, Zea Mays
agaggatccaacatggacatccatggaggtatgagaaggggaacccgcctggacaccctcgggggctgggtcgcagcccacactgcccatcggagccagatcaccaccggcaacaccctcgggggctgggttgcagctcgcgctacccactcgagccggatcattaccggcaacaccctcgggggctgggtaaccacctgcaccatccttgaggaccgggttctctgcagcagccacctctgaggctgaaggattctcactcacctccatgggaattgagcaaccttgaccagcttcttggctccgaagaccgcactccaaggttgatgaggaaagagacgctgctcaggataactcctatcccacatctggaatgtcagagcaaacgtccatcataccaccatctattggcttggatagcagatcttcaggaaccacatcctcgagagcccgatcaaaatttgctatggacaactcctgcagaccaacgagagcagacaaagctggagaaggaatatcac

SEQ ID NO: 55548 - DNA, 910 bp, Zea Mays
taaatctttagtctcatgtgtttgcacatctcttgctcaacctttgcttgttgcattatttgtatagaatgtatgtttatcttgaagagactcttaaggattgactcttgaatgcaaaactctttgatgtgactaaaaacactaggtaaaccataattgctcatttatatataaaatgtttgcttattttggtgagcgatatttgaagaagatcctaaattagttttaagtgacctaatttatccctccctatctttggccatacaacaaacacacacgtttgtcccaccagctcgacgaatatcaattgtctcgtagctaggatcatgcagcagggatgtgtgggttgtatttggagttggtggctaaaaatgggagataaaagggagacagagatgtggtggtagttgaatggcgctacggaagatgcgcatgatgccttcttccctccctcattctcgctcgcccccattccaccttcgacgacccctttctccttctccctcctcaatcacctgcagcgaaaaggaaaaggtacacacaatattgagtccatatgcatgcattcgtgatttcaaatggttcttcgttctaacttgtttgagatccgtttggagttttgcgcagcagatctttgacatgcatagggcgtgctacacccactttgtggtttaatttctttcttgaatattaattttctcattaagagcgtattagtgatttccttatctgatctgatctctctttgttcatgtcctttacttgtttgagatccgagagtatttatgattgtaatatttgcctatgacaacacgtacggccgaggcattacaaattgttatttgaacgacgaattgtaggttgtgtgtatttacctaatagtcagtttcatgagtgcacatgcatgtac

SEQ ID NO: 55549 - DNA, 531 bp, Zea Mays
ctcagggaaagaccaatcgccccaaaagactagtccgatggggaagggtgactctcccttttaaggtgatttcctcctccgaagttaagcaaggtggggtaattctgagactcacacagtcgtcgtccgattacaattggatcaactaggtcaattgtgtctttatcaacgggtagtattggagtatgtcctcatcattcctaccttcttaaaatggtccataactttgataccagatgatacacctagctaaggtggggttggccgagacccaacaaattaggtttgcttggagcccaatagttcattaaagcacacccaactcataggaaggtccaatcgccccaaaagactattccgatggggaagggtggctcctccttacttaagcgaggtgagataattctaaggctcacatggtcgtcgtccgactataattagaccaactaggccaattgcgtctttgctaacgggtaatagtggaggatgtcatcatcaccatcttcacggaagtttttccttccatttatg

SEQ ID NO: 55550 - DNA, 605 bp, Zea Mays
gaaaagatgagctaaaggtatgaacctatgacttagactaggttgacatactctaataaagtttgtctaagtcatagaataactcccaagaccaactgaatcgaattggatgagatttggctaaaaagacatctggttagctgcttgaggctcaccagaccgattcggtgatgcaccaaaccgagttcacaaagcgccctgcagagtggtttcggtggcctggcacattggatgcactggacctctccatataagaactgctcagtcttgggaattttggctaaaaatgatcagaccccaggttcggtgcacatgaccgcctgggtccaacggctactttgggtttcaacgggccatgcaacaactaactaatgtggtggatggttctgtggtgtgtcgaactagtttggtgccaccctagttaggaaggcgccaatcaagatcatggaggaccagctactagacccagtccggtggggcatcggactagtctgttgtgccactgcgtagagcagttttccagcaatcaagcaacgactagttggggtttggactataaatagcccccataaccaatctcctcgactcacaaagttactcaagag

SEQ ID NO: 55551 - DNA, 592 bp, Zea Mays
aggagatggctctttaggcaaaatggcatttagacaacttgatgtgccagtgatcctgctgcaagagtaacaacacctctctcaagtgacacagatgttcctcaaaagttcgattgtaaaccaatatatcatcgaaaaagactaacacacacttcctcaataataatgtagacagtgtggtgttcatagctccctggaatgtccctggagcgctagacaatccaaatggcatgaccacaaattcataatgccccctatgtgtctgaaaggtcgtcttaaattcttcacccggtcttaaacgcacctggtgatatccagagaccaaatccaatgtggagaacccactagaccctgctaactcgtccattagttgatcaaaaacatgtatagggaacttgccctttacagttaatgcatttaaatatcgataatccacgcaaaaacgataagatccatctttctttctaaccaacaagataggagatctgaaaggagaagagctgggtcgaatgagaccttgtagcagcataacaactacctgtgcttcgatctcttctttaagagctggaggatatctttagggacgaatgtt

SEQ ID NO: 55552 - DNA, 443 bp, Zea Mays
gatgatcattctcccgaagttggcagtggagcgggagtagccaaggatgaagataactagagtagtatagtagtaggtggtttccttatgtaaattaaataagaaaagttgagttgtaccagtgagtatgtataattaataccagttcggaataatgtaacaaaggtggtgtacttgtggcatgtaataatcaagtatgtttttcttcttcagatgccatcaagaactcgtgctcaaaacggggcgggaacttcccgtggtggggaggaaactccaaatctgccgcctgtacctcccacgttggctgaggctatcgctgccctagttaatgccactgctgataacactcgttttctgcgagaaatggctaggcatcagtttcatcaacagggaggcagaggtcaaccccaaggccctcgagacaccatgtatttggagttttc

SEQ ID NO: 55553 - DNA, 648 bp, Zea Mays
gggaggtcgacgaccgtgcacgcggttctagatgttgtgtgctctggaacctcctcctaggaccgtgggtttcagtacgcttagccacgtttctaggctaacagcacaattttgtcgactagttctgcaaagtgcagtcacggcggcgtcgtattttgtttgtaaaatgcgctaccatgttgtcctaagattgttatcacaccacatttgatgctttggtcatgttgtttggagaattttctgaattccttttggatggctaaccgatgtgatatatgaggttatgagtgccaccagtgccccattgattttaattcctggagcaacatggcttacgaatgttctactgttctactcctatatatgtgatggtagtgtcgtaacaggcttgcacatcacttgaaatgggcgtattatacgagcctcgcaagaaactgctcagttccatgcctaatagttagctctgtaccggcgtatagggcacttctgtcttatggttgtgtcgttgcatcctttgtctaatcctcaatgtgaatctggttatgctcttgttaactgggatttttaatctcattgctattgcagtacacttaatgtgaatgttatttgtcttttgtttaattagcctttgaaatggacggtgatcgg

SEQ ID NO: 55554 - DNA, 350 bp, Zea Mays
ggagttcccaacttctgtgccatccatctgagtgaggcgatacgatccaggccgagtgacttctgctactatgaagggtccttcccataagggtgataacttgtgccgtccctctcccgttagaattcggcggaggacgaggtctcctactgaaaagaaccgttgccgcacagccttgtcgtgatagcgccttagagtctgctggtaccgtgctgattggattaccgcattcagtcgttcttcctcaagtacatcaacgtcctccagcctggtggtctcagcttctgctatgctttcgaagatcaaccttggcgccccaaacttgagatcagcaggtagcactgcctccg

SEQ ID NO: 55555 - DNA, 309 bp, Zea Mays
aatttatttgatctgcgactgattggacgttcagtagatggcctttggctagtcttcatatcacttcatgcttcaatgcttctgttgattagacttgtacctcatcggctatatttggctttcctctgatctcttgttgatatcttccttctgtcttgaggtattcattgcgtatactgtatggatgtgactgcttgggaaaatctattgaaaattcctggacgtcccccccaatgggtgtaggcaagggacggcttggtgcgctgagcgtttagcaaactgctcctgagtagtaacttgacgtgaccg

SEQ ID NO: 55556 - DNA, 592 bp, Zea Mays
gcccgcgaagccggcacggtagagcgcgtacgcctggcatgggtacgtgcggttggcggtgtagttgaacccctcgacggacgccggcgaggccgtggccatggtcgtgttctgcaaccgcgccggggcagggaacgcgcacaggcaaaggagcagcagcagcgcgttcagcctcagtgcatgcaacaagacaacgacgatcgcagagcctcaaaggaaacacgatgggtggcgcctcgctaggttcctcccgcccagccccgtctgtgcttgcatagtgtttcttagtacatagtggttgatgacctaaattaaaaagtatatatggctaattgtttttgtgcgagtacatattagattttgttggatttgtggtttttgtctagctgattttattctcgaactggaaattgtagattgtacgatgctaccagcggctgcgtccagcgggtaagagtaagattgcgaaccgagcctcgagtccatagggctagccggctagccctgcccgggtaggggaaccgatcgagccgataacagctgagcagcactacaggcttgcagcagagggacagacggacagcagccagcc

SEQ ID NO: 55557 - DNA, 347 bp, Zea Mays
atttctgagcactttcccctgtaatatctgcaagcaatctgctcaaccaaactccctggcaggttccaagtgcagcagctacatactctgcctcacatgaggatagggcaaccactttctgcttctgagatgaccaagtcaccacattcctccctaagaaaaacataatgcctgaagtactttttctatgaactaaatcacctaagcaatcactatcagtgaaacccagtagagacaacttggttcctcctcctttcttgagcttcactccatactcgagtgtaccagcaatatacttgatgattttcttcacagcacaccagtgttctttgtttggtgcctccatg

SEQ ID NO: 55558 - DNA, 634 bp, Zea Mays
aaactgtgcaatcttgctcccaatttttctcttctgtcagtgcagacaataattcttggtgaagacctctacggagggctgatcaccatacgaagtcaccgcctagacatacttcgccagggccaccatggcattaggtgtcaattggtggatctgcacgtcatacctctgcaagacctccgccacaaaacgatgcgcaggtaggcgaaggccagcgataaaaaatgcctcgaacacaactatctcaccctccgactcaggaatctcttccgcccctggaactcatccaactccattcccaaaataccccaactgctgcatatcttgcacgtgaaccgaggagatcctcgaaacgccgaactccactgtgtggcttgggtgtaactccactgccgccaaatcgctcaaggtatcctcggacgacgattggcccgacggcgcattcgcaacggacgaagaagaagaagacattgctacgtacagtcagcagcggcatgcggtttgcttgacgcgggccagatctccgatgaagaggaacaaggagggcaggcgagcgggcgaacggtttcaaaatgttagggttttgtggcgcacagaaaggtaagagagcccgagccacgctgcccccttttta

SEQ ID NO: 55559 - DNA, 495 bp, Zea Mays
agagcttgtatttgtccttggtagacatgacccttcataacaccaagtagctgatgttgaacgatctgctacaaacttgttagtcgtggtaccttcataggttctgctagtacttggcgaagtggatgaccactacatcatgtgcctcatcgataaggtcagaagtgagttgggcattcgttgttccttgctcatcattgtaggcttggacccttggtgatacgtactccatctttgtggggagtaccgcctctacgctgaatgctaggaagaatggtgtgcatcctattgctctaaaggaagtcctacataaactctagagaacggttggcagctctgtgacccattgtctggtggacatcttcaatctgtcaaagatccacagcttgaagcctacaagactaggttgttagcatgttcaatctgtccattagttcataggtatgccatagcggcccagtcaacgtgaatgttgaaatcatcgcagaattgaag

SEQ ID NO: 55560 - DNA, 580 bp, Zea Mays
ggacaccaaatagtcctgtgcctctctgaaatctttctggtgccctctatgtgctctttggtctctggcgctctctgtctgctctcaggaacgactgtccatggtaccgccagtcagtatggtgcccccagagcagcaacactactatttcttccttgggtttttctaaatcattttcgactccaattttgcgtgaaacatacgatgacacctagcactagttttaagtgtgtgaatgcaccaacactacattagatatctcttggtcaaactactcatccacaacccttctttatagtacagctaaagtaaaaataaaagtccaaactctataccaagtgtcccacaactccttcgaaacttaggatatgaagaccttcatcttttgattcacctttttcagccgtcacttcaagtttcatctgaggattgttttcacctattggagctcaacttcctgcattgtgacttaacttacctgttggagtgaaggctgcccgccccctcggttagagttctttaacatcaattgaacatgttttgtcgcatatatatgaagcgaagggtaccatgatcggta

SEQ ID NO: 55561 - DNA, 404 bp, Zea Mays
aaccgtccagccctatgtcgtggaccgttcacacctccacaatccacaggtggttcgtagtgtttgacattcagatcgacaacaacaagttctaaattgggagcacgttatcgaaacaaaccttgccatctcgagcggccaacataaatgaaccgtaggacgttccagaaacaaatatatttacaaagatgtacggaaattagagaccgttggcaacgaggaatttggcaaaatgggtcgctctatcttgccgctctttataatacaccgcttcgagccagggtcgtcaaaaaggatcgcttgagtctgcgcgctggccaaaagaggtcagtgttgtttttggcgtacctagcaggtgggtctgcgttgcaatctgcctattttgcccttacggccgctcatag

SEQ ID NO: 55562 - DNA, 488 bp, Zea Mays
ctttcatgaagccattaggactgcatataggaccttttccatctttgtgtatttttttggacaggcccaatacttcggacacaaagtagacaagcatttgctttttcacaccttcatctatgacttcttgaaataaaccagcactcacagtcggctgcaaagctgaaacatagagcaaaagaggagcccctggcgaaggtggggagagtgttgttagctttatcaagtagtttttttaattattcaaaggtttgctactgagatactcaccattgaaggacatgtgctgatttgagaactttgaagaatggcaagcttcgttcagtagattttgagatgaacctgttcaaagtagcaagtctgcctgcgagcctttgagccccttttcttaacttcagtggctccatccgtagtatcactttgattttgttaggctttgcttctatcccttttgttaacacaaggcatcccaaaaatttacccttttt

SEQ ID NO: 55563 - DNA, 707 bp, Zea Mays
ttacaatgctaccttcggaatattcaaaggtgactcgaagacgtttgtgccttacaactttggacgttgagtgatccgtgcgtgagtgaatacgtgaacaacgaaatgtcttccatgcatgggcattgtaccactatttacagtggtggggtgacgtacaacttcgtgtgaaattacatttatgtccttaggttctatacatgtgacctatagaaaatattgagggtgtcgttgtcttcccactcgaaatgtgtcatgcatgctgtttgaatcccctttcgtctcctaattatgtgcttcagatactccaaagggcttcatctaaatattggcgctgaagttatcacatgtttccttaattagtggagatcgccacgatgaaggtcattccgctattccttcaacaaactcgaagatagttgagattcattagtttgaggaccttcggcacatccccaacagtagtccctcgtgggataagttcgttttctataatgggcccaaactgcgaaaaatacaaaaggagggccttacaccgaaggtccaaaaaataccttccttgagcgcgttatcgaaaacggaattgctcaaatacatatttatcagttagaaggtggacaccatgatggtccacagaccagcgagtgtgtaaagcttggctcctcgactactgcgctttttacctatacgacaccatcggccccacc

SEQ ID NO: 55564 - DNA, 744 bp, Zea Mays
gcaggtgttgaaggagtctcttcctctatctcagttgtttttgtcttcggagccgcagccttcctcttcttcggagcagccaccttcagctcagggctggattttctcttttttataatttcttcatcttctttcaccatcctagcagcttgcttgctcagaacactaacaatcctctttctcttttggccttcggcacccttgttcaagcactcatagttaggatattcaaaattccatgcatccatcacccgattcaaccttcgcttcggtcgggtgccgaaggccgcagtcatcagctgatcttcctttttagtgtaattatccaaattttcgttgcacatggtttctatcatttctaaccattcttggcatggccctttaaattgtttctcaaatttgaactgataaggcagtcgcacaagttcattcttctcctttgtcccctttagcttcggcatgttccattcactcagcgtcgggaacaccttataggccagatattcttggactagatctctggtgctgatctgctcggctaccacccggaattctgccatagcttcttggcacggtgaccccgtcgacatgcggcacaggggcctagtcaactcgaagcttaagctcaacgggctcagtactagcgtcttgagcttctccctcttcttctctttggccctaacataaaaccactcatttttccaaccggttggccacttggtgcgatagctaaccaccggagac

SEQ ID NO: 55565 - DNA, 1905 bp, Zea Mays
tcaccatacttgtattgaacaaaacctccatatggaccaatcattaacatcacttcaggccagtagatggatacactatcgagtccactccaaactatttgctttgatgacaacaccgagtctacaagaagcttgccaatgattgcaactgccatcttctgtccaagtccaatctccagctcttcaccggtcctctcttctgtagggtaagccgtaactacaagctttaaaagcctaaaagaatttgaccgagcagggctgaaatcatgctgcaaataagggtctgatgaaccaaatactttctccttcccctcgtcatcttcatcagcatcagcatcagattcatcaaatatgatctgcccaacactgctactgatgaactctcgagagatactaccattagagaagcattctgcccactccttcaagatctacttcacagcgtcagagctccctgcaccattaaattcaatgattgattccaaagccaaaacttgagagaaaataccgccaactccaatcgcatcagcattttcagtcgttgtgccaacctcttccactttactaacagcatcctgattttcagcattctgctccttctctaggctatcctctagcacactgccaaccctagcaggaagaagctcctccatgcttccaccattcttaaccactgcagttgcctcactcggtgagtcaggcctactagcttcatcttcaacatgagcatccttgctagccgattcttctaagtattctccacctcgagaaggctgcttcaataaaccttcatgcatgtgagttttagattgcatctcctcatcccatgccacttttagacccacttaaccgaacactaaggaatatgaatctttagggaacaagacaaccaccgcctcgttgttgttgtgagacatttcatcaaacaccagaggggccatacctccaacacctggtgcaacaagccacactgacatcctcgttcaccagactgtggatccaaccaaccctattcctcaggccacatctccatatccctagccttggtttccttcatttgatgtgccaacatagtccattctgttgccacctctgctgctaacctcgactgaatcaggattgtttgctggacgtcatccaccacttccaacttctgaattaaacgatccaaccggttcatcaccctatcccaacgccctgcatcctccttcctccactcttccatcacgaacagaatgaatcgagttggttgtttgtacctcgcacacctcccgtcaaggatcgccccggtcctgtttcgatcccgacagcaagagaaggagttctgcgtcaagaagcacaaccgcgtcgtgggatgatgttggcgccgaggtagacgagtgagctgggaaggaggggaaacgccaatgaagaaccgaagaaggtggagccgacggagaagaaatgcttgcaccacgagaacctatgttgctagaacggaatcgccgccaaagaggacgcgaccctcacgcaccctgccaaggatcagagagctttgataccactgtgatggcccctggacaccgtcgtgcgcaaacgcaagaacgtgagctctgatcgtcgccaggacttagcaaaggaagcgggtatgaggcaatttccttctattaatatttcgatgcttctctatcaagtctactacatacttatatggcatcccaaataggtcaacccaacaccatcactcacacaagtccaacacagctcacacgatttacaacaaaaaaacacacacctaatcatcgcacgataatggctcctcttcagacttcagcttctactacctctgtcactgcttcatcaagtgtgacagaggggaacaataacgtcttgttatgtgtgtctcgtccagatataggacaaggg

SEQ ID NO: 55566 - DNA, 504 bp, Zea Mays
cccgaatccaccaatactaacacttccttattctgaataaatctagtgaacttcatggtgtgcattgttcaatgccgtgaaccgctgctatagaaacagccacaaacacttgatcttcaggctgttgttcaccgttaggaatatgagttgtctcttcatcctgtagctaataaaggtcccacaattcttgcaatgcatgtaactgaactgtgggaggacactgatgatccttagaccacttttcagcacaccgatagtagagacctcgagctcgcctataagcgtgcaacgccgccaacttgtcctccatgacacgaggacggaactgctcccccttgcgaccatcatcttctagaataggttgtttctcccctctcggtggtaagggcagagggaaagggcccttggctggccctttgcctcaccacgacgattcctgccgatgagcaacccagcatttaacaggtaccgccacttcctcctgtaatagagcgagcacacaag

SEQ ID NO: 55567 - DNA, 549 bp, Zea Mays
agtagttggtcatgacatgaagcaggtggtggcgcttgggtggacgtgaaggaaagagagaaaatttgggaattggaatgaatggaagctgctgaaatccaggaccacatcgtagtcatagtaatgaggaaaaggagagaaaataaaaagaagaaaacaattaaaatagggaggcaacctaaaaaactagagggtaaccgtattaatgtatcctatcctcatccctcaatcctaacactcgaaaggatatttccatcccatgttattcctctaatctatcaaaacacagggatcatccctagggatgaaattggtttccgaatttttcggttttccgaaaaaacttttcgatttttttgaccggatccaacgtaatggtattttccgaaaacggaattggttatcaaaattttatatcggaatcaatatgccgttttaccgattgttccctacagttaccgattttaatcggaatttaccgaatttagatctcagaattttctgaaaataataaaaaagtaggcagcccaagtgtggaatttaccgaga

SEQ ID NO: 55568 - DNA, 535 bp, Zea Mays
aaagctccttggattgtgcgaagaagctaaaagatagctttgtgaaggtgggggcgtattcctcagaacaaaaatttattcacgttgatcccgaaggagttatccaatggataggtgaagaagtcgaagctttcgatgagatccttagcgatcgcagagatttttgtgctttttctggtgcccgaggggttgcggcaagtctagaaaaggctgggtgtgaacatgtcaaggtcgcggcccagccagaatctattctctcagctgacaatactaaggacccttcaattgaggcttcaacattgggcggcaaattctactctgatgtgtggatgaagggtggtcgtgagatggctgatgaagctataaagaagagtgaaaaagaatctcacgatgcacaagtggaggcaaaggaggctgaagaagctgctgaatgcgcattgattataggtattctttaaaaactttttgtctcgttgtttgtttgtagctttgaaaatttatcattatgatttttactacagtcggcctttcgcca

SEQ ID NO: 55569 - DNA, 400 bp, Zea Mays
ggagggagatagagaagtagaggaggggagggagagggaagagagagaggagagaagggagatgaggagatgatttatttatattgtagaaacattagaaatcacacatttcgacatgaatttgtatatcaaatatacttgatgttgttttattttttcgtgaaattagtttgaggcacaatcagatttatatgagtgtcatataaatgcatatacgttctacacgttctatataactctaactttttatatgactttgtacattctatacaactctacatgttctacacgactctagacattctatatacatgttctatacgtttatccgttctatacacacattctatatgactctgtacgttctatatgactctacacgttctatatgactctatgt

SEQ ID NO: 55570 - DNA, 415 bp, Zea Mays
gagctcagcagcaggataggcaccatagggttcgatcttttgggttcccttccaaggggtcaaacctcaacaagccagcaggatccgctccgtcacgtttcaaccagcctggtcaaagttccttccacacccagtctattgcaagcagccaacctccagctaatacttgttggcactgtggagaccccggtcacttcaagaataattgtccgcacctgaagacatccgtacctgcctactccaactcggtgaatggccccaagaatgtttcggcacccgcctccaaggcaccctccaccaacagccagttaagcaagactcagttccatggcagggctcgagtgaaccacgtcgacgcccaagaatctcaacaagcccctggagtagtactcggtgagttcctagtcgaatttac

SEQ ID NO: 55571 - DNA, 484 bp, Zea Mays
gaaaatccctgaataaagtcataagttcagtcttgattaggtcccaaaaggcttggaaaaactcggtcgggaagccatcagggcccggtgccttattatgctgcatttgggaaatcgctttcctaatttcatcttcactgaactcagaagtaaggtaagaattttcctccactgagacctgaggaatatcatgaaccaggctctcgtctagagtaatctcagaagtcggcgccggtccaaacaaccccttgtagtaagaagtgatatacctctttagttcggcatcaccttcaaccacgtcattcccgttcctgagctggaaaattctagactttctatgccttccacttgcgaccaaatgaaaatatcttgtgttagcatcaccctgaagcaaatgagtcgattttgctcgttgataccacttaatctcttcctccctcaacaactcagctaatctattttgaaggcactgctttaaatctaa

SEQ ID NO: 55572 - DNA, 1056 bp, Zea Mays
gtctcatggtcactgtggacccacgaaagcgacgctgactctttttttagaccctttctcaaggccgtttcaagccggcttctactgtggagaaaatagtttgcctgagaatctgatgcatccgaacaggaattttctggggaaagaatctatcttaagaagcaatcgaaggtattatactgttgaaagctgaaacaacacagtatcaaatcttaaaggtactattcaaattggagtgtgaaatgacacggtatcaaatctcaaggcatataaatacagttgaagcagtatggtatcgaattctcccaccaatagtgagcctacatttgatggcgtcatgaaatttcgtcttcatagtatgacaggatcattccctataaattatccctgtgtgttcacagatccaaacaagagatttgcgaagtagtacatctggcgagttcaagtcgattataacaacttaacatccacatatccaacaaaacaatcaacataaggacaggctgaacagcagtaaaaaccaacagacagttgaagacaaagtgtgcctgaaaagagcagggaggttacacttgagtacaaaatacgtgtggatggttagatgatctgctccagtagttaatgtttaaagaacaaagaacatgttgtttctaactcctagtttggctcatttgaagccgtccaagtagaggagtgctccagtaatctacttcatattttacacgggcccattgtacattattaaaccatgcgtatagagttgccacgtttgacatttgtctatctctcctctgctttgttgcaaatgtattgattactaaatagaaagggtgaaaactaatggatctccactaacccaacaacacaccaatccaagtccatctgtacatgtacaatcatacttgacactgctgacgttggattcagaatttctgatcaatacccccaaacaaattatgggatataatatttttttagtgcttttggcttcttctatgcggctatgccttgaccggcaatggttagtcattaacactttaattacgggatatgatt

SEQ ID NO: 55573 - DNA, 477 bp, Zea Mays
gccggaagacggtggttcaccggcgagcttatctgctcaagccgcaaagcagggggagtacggcggtgagtcaccggagtggcgtctagcgcatggggtgatgatcttttaccccacgatgctatccagcaactccaggcacgaatccagtcgccagtgacacgaatcgcggcgaaggatcggtcgtcgtcggcgggggactgtcgcgctggcgttctgatcttcatcaggcactgtaccatgggatgctccattcaattaacctgacagccatagtttagggccagatttcttccaaatttctatgacaacacatccagatctctgcagcaaagttgttcctctataatggctctacaactttgttatatcaaccctaggtaaattctcattggatcatagtcggaatggctctcaaactgggatctaggtcactgtcaatctgaagttcagactatatcagcctgacagcctgac

SEQ ID NO: 55574 - DNA, 772 bp, Zea Mays
aagaacatatagcattcagagtatggccggttgtagaaagatgggaaatgccgaaggagaccatcactaactctagcgaaggtggtttggtccagctgaagtatacattcaggtttggggataagtttgatgaaccaaatgacgactgcttgaagtgtatcgaacctacaagtgatgaactgcttggagcgtattccaaaaccgaggacaatgccttgtccgcagccttcaggggtcggaataagaaaagattgaacatggtatttgatgctattggttttgtataccctgactattgttacccgctgtgaggacaaggggtaaaaagaaagattgctgtttctggaaaggttgccgcttcggccatcacagctgagccgaagggcaagaagttgaaggttctaactcaccggccacgttacattgaaccggccgtgatacctgaatttggcgaaggggcctcttcggctgccaaaacaaaagaaattgttcctcctgcacagaggactgaagagtcggctataatgccaaagttacctttagctgagctagttgagatgacggctgataaggataaggctgaagggtcaaaaattgaagaaataacaaaaatgccagagattttgagcccttcgacagaggtaacagtgccgaaggcacaaaagggtttgccgcaactgctaagaggagaaggatggcaaatgtgctagatgttgtgttagaaacagcaaaaaccttgagtcctgctccttcaagaaaaattgccaaagct

SEQ ID NO: 55575 - DNA, 327 bp, Zea Mays
ctggaactccccgggttctgctgattattggagttgttccgactcggatatgggcaatctttgatgaaatgtccagacttcccacagttgaagcagccagttgatgagctcgggagtgtaggtaaacgagcaccaggggcactcgactgagttgtggaagtgggggcagtggcagggcagataaatacaggttgtttaaaggggttggagggtggacgaggtgaagaacgattttgattgaaaggtcggatcaccaacctttgtcgcttttcaggcccctggttggacctgtcacctccaaagccctttgacttccgtgagcctgca

SEQ ID NO: 55576 - DNA, 364 bp, Zea Mays
aatagtggaggatgtcctcatcattcccaccttcttaaaatgggccctagctctgataccagatgatacacccagcccaggtggggttggccgaggcccaacaaattagggttgcccggagcccaacagttcattaagcacacccaactcaggaaaggcccaatcgccccaaaagactagtccaatgggggaagggtggctctcccttttaaagtggcttcctcctcccaagttaagcgaggtgggataattctgaggctcacacggtcgccgtccgactacaattgggccaactgggccaattgcgtctttgccaacgggtaatagtggaggatgtcctcatcacaagggcatggtctaagat

SEQ ID NO: 55577 - DNA, 620 bp, Zea Mays
atgaggacaattgtatttggtttatggctcagctgcaaaaggccataggaagtcctcacaccttgctatttgaacagatgcttgcaaaggattgctaaatgcagttaaacttgtgtttcctcatgccaatgaaagagaatgcttttggcatctaatgcagaatttcaagaaacattaccatggtgatgttgatggtctaatgcggtctgcagcaagagcatataggactgaggtgttcaacaagcatatgtctacaattattagtagttgttctggtatatatgactatctaaaagagaatcacaacctgcattggatgagatgtgccttcactccagcaataaagtgtgactttatcaccaataatctatcagaatcattcaattattggatcaaggacatcaaggatttgcctatggtagacctggttgacaagctgagggagatgataatgacattatggcataggagaagaaggatttcagagaggttgcaaggaaggatactaccagcaatcaaattgcaattgcatgcaagaactagaggattaggtaacctaaaggttgtcaaatcaaatgactcgagtgcagaggtcaaagactataataacaatgagagac

SEQ ID NO: 55578 - DNA, 699 bp, Zea Mays
gtactttgctgttgaaccgaaaatgttcaaatcggcctcgtgaccgatggcttcacaccttttggtcaaatggcatcatcatactcatgttggcccatcttttctattccatacaacctttcaccttctctttgtatgaagtatgaatttatgtttctttgcttaatcaatctggcccggaccatcctggaaagaaacttaatgtcatgttacaacccttaattgaagagttgaaggagctttggaaaggtgtcgaagcatatgatgttttcaaaatacaaaaattcaaccttcgagtcgtgtatttgtggttggtgcatgacttcatggcgtatggtatttttgtcggttggagtacacatggtagattggcatgtccgtattgtggttcaaatacagattgcttccttcttgctcatggtgggaagatcacttactttgattgtcatcgacgctggttgcctaggaaacacgccttcagaagtgataagaaaaacttcataaagaatattgtggtcacgaaaggaccgccaaaacgtctgaacgcaacagaaatttatgctcagtggaacaacattgtcctaaatgaaaaaggggacaagaaccaaggatttggagtggatgagaaccagacacataaatgtggcctatgggagctcccttatgcacaatcattgattctaatgcacaacattgatg

SEQ ID NO: 55579 - DNA, 932 bp, Zea Mays
cgccactgcagtggcccgagcccatccaggctgccctgccgcctaggttatcaatttaactgatgatttatgttgtttggctaccacggcatagatagaacactagattctaatctaactgatgatttattttgacatgcagtgcgtaaggtcaaattgtccccatttgtaaacatggattccaatcttagtgatactgtgtcaatgtaagttctctgtcccttctatttacactatagtttgcaggtaagatgtattagatcagttgcagctaacttcatctaactactaactttgttgcgttaaaatttgttattaggctcgatggagagcctgagcttactttagctgttgttgacccaattgttgctattgacgatatgccacaagcacaacatattgattggaacacactgcaaatagtagaaagacaagatgaagagggaaggctggaagtaatagatgaggatcagctgtataatctattgggcttgactgttgatgtagagactccttctatagatggtatgggtaatgatggtgatgctggtagggttgatagtgaggcagggagggttgatggtgaggctcctcatcttttggatgatagttttggcgcagagattccagttgatgatgatgtgcctgaggagagagtgtttgtgcatgacccagataagcccagcatgagtattggcacagtgtatcctgacatgaaagagtttagattggctatgcgtcaatttgccataaatgaggaatttgagcttcacattgcaaaaactgaccgagctaggtacattgggtattgcaaaggagatggatgtccttggcatattgttggacggagacaaccagatgggaaaactgttatggtattttttggtgcaactattagtctattatgtttcttgtacatagcatgtatttta

SEQ ID NO: 55580 - DNA, 675 bp, Zea Mays
gcggagtcgacgactacgcgccccttgattgctcgtcggtgtgcgcatcagggcagaattaccacctcttcgtgggtggctctccgagcatcgttcctgtctctagtaagtgtttcatcgcatacgccttgttctcctttgcgcgaaatcctagcgggattggtgaatcatccggtggccggccagggtcggatgtcgccggcgggttccgccgcgtccaggtgtatagcgccgccgcgtttggactcaggtggaagaaggctctaggggcgttgatctgttgaggaacggctaggattataagcggcgtactgcttcggtacgttaaatcagagccgttagattatatcggatggttctgaggagatgtgagcatgatcggatctcagccgtggaatctcagatccgacggtcacggggagcgcgggtgtgtaactcgcgtagatctaatctggcgcgatagttcggatcggacggcctggatttaccgataccttttcgctggtttatttgcataggaaccccgcgaaagttaagaaacaacccgccatccagggaccctgttctctgtgtctgggatatcttgcgcatagccccctgtttttcccagaaaatgaggcccagtccagagagcatataaaataggtaaataaatacagaaattgatttttaata

SEQ ID NO: 55581 - DNA, 622 bp, Zea Mays
atctgattagtacgaagcaaatttgctacatttttatccttgtctttgtaccactgtagcaactctaaaaagtttcccttatttcttgaagtagaggattcatcatgtccacgaaaagcaagtgcttgcaataaaaggaatcttacaactcccaatataacaagcaaacgacctttatattcctcttccatctttttaccccctcgattcatcacatgagacacactttgcctctgatttttgtagtcctcataggaccttctagacttattgtgatctatgccattaccatgagctccaatggtttcacgtccatctttccatcgaagaaacccaacaaccgtgaatcaacaccataattttcagctcttggttgtttaaaaatgtagcaataaaaacaaaaggccgcttcttagcaatgctatactccaaccatggattatttacataccattcatcatgaaaagacctattgcaattgcctatcattcttttaggatacttatgaccttttggttggcatgcacccttcgcaatatatgctcttctgacagcatccctaatgtttgcatcaatttgctcaattggcatgcgaagaccaggatcggctataacttgatcg

SEQ ID NO: 55582 - DNA, 525 bp, Zea Mays
cgagcgtatgcctatgtatgagggatagtgatgtggggctcatgacaataggcgaagcgacgccacacacgaccgcatcatgaggctgacccacgggacccacctacacactactatgaagatattagcggtggactcgctacagggacctgtatgacggacagacaggacaacacgccatactaggagtatggctacgcacgaccctacggacgacatcgagcacactacctcaacctggggcaacagaatgccttctgaccaatagagaacaagtctccattgtaaggtcttacccttgagctataaaaggacagtccctcctccttctcacacgtgcacaagctgtaacacaattctcaagcaatattacgatcatcactacactaaactagggcacaagtctgaacctgtatatcccaccgtctcacaccccctttttcaaatccctgcgattcaccattcatagtgagtccgcgctagcatccctcaccgaacacaaattctattgtccctatgtttccg

SEQ ID NO: 55583 - DNA, 515 bp, Zea Mays
gttgtcatgacatttggtctaaaaaatgtcggtgctacttatcagagagctatgaatttgatctttcacgaactgttgggaaacactgtggaagtctacattgatgatattatagtaaaatcggctgagtttagttctcatttagctgatttgcgcaaagcctttgataagatgcgtcggtatggtttgaaaatgaacccacgttaatgtgcttttggagtgtcggctggtaagtttttaggatttgtcatccatgaacatggtatagagatagaccccgaccgaatcaagtctattcggaatgtgggaccttcgacctgtaagttcgaagtgcagaagtttctcagcatggtgaattatttacaaaggtttatttctaacctagccgggaagattgatgccttcacccctatccttcgacttgagaatgatgccgaattcgcttgggggcagagcagcaggaagcatttgttctcattaaaaaaatacttgtcttcggctcccgtattaaaagc

SEQ ID NO: 55584 - DNA, 605 bp, Zea Mays
gtcaaaccttctatgccagctcaaatgctcccaagtcagaattcttttaagtggggtagtgttcttggcagacttaaccgtcttgccatcctaaggaattgatgtgatcttaggaatggattggttaaccaagcataaaggcatcataagttgcgcaaacaagacagtccttctcatagaccaccaaggaaagtcagtctcttgtcaggctcagccacccgccaatgatccaatgatgtttaatctagcaacagaaagcatatcagtggtagaagaattcatggatgtattcccagaagagttgctaggaatgtcgccagaaagagaagtggagttctacatagatctgatccctggcacgacacccatcacaaagagaccatatcgcatggctcctaccgagttagtagaattaaagctccaaatcgcagatcttcaacaaaaagggtacatctgtcccagctcatccccttggggagcaccagtccttttcgtcactaagaaggatggaagtatgaggatacgtattgattaccgatctttaaatgaagttacaataaaaaacaagtacccactccctcgaatcgatgacctcttcgaccagc

SEQ ID NO: 55585 - DNA, 466 bp, Zea Mays
tttgcttgtgtagcgccttgagtgacaactctaagtaacacctggggtgttacaatcaaggttgtgtcagagttcccagatgtgttcccaaaagatttacccggtatgccacctgagcggaaagttgagtttgccatagagcttcttcctggaaccgcccccattcctaaaagagctaacagggtatctggactcgagttggttgaactcaagaagcaaatagatgagctatcaaagaaaggttacatcagaccaagcgcctcaccttgggccgcccttgtcctgttcgtggaaaaaaaggatggcactaggaggatgtgcatcgattatcgagctctgaatgaggtcacaatcaagaacaagtatcccttgcccagaatagaagatctgttcaaccagctgagtggagccagcgtgttttcaaagatagatctgaggtcaggttatcaccagctcaggattcgac

SEQ ID NO: 55586 - DNA, 478 bp, Zea Mays
attttaagatgggttcatcgagatcagctaaaagtgacatgggtacccaaatagcacttgtgctaattctaggtgaactaatcactgttctagcacacgtctagtatttgtgtctcctaaacgaataagaatgaagtgaattactcgactttggaattttaccaatagaacaaacctttcttagatgacctcattcaccacatgtgtagcagaagcgacactcagtctggcatgatgcttgttgttcattcttcttggtgatggtcatctttggagttgtacgttctttattcttcatgtgaggacatgaagtgatcttcgtcgttgcatccaaaacatctcctcactcctatgtgtggacatgaggcaataaaatgtcgtatctccttacatctgaagcatctccttttatcgtttgtgggagacatggagacattgttagcgcaaaaagcaagaacaattgagtttttaccttttt

SEQ ID NO: 55587 - DNA, 431 bp, Zea Mays
caggagggtccatattagtggtggggcgatgtgtgaatcaatctcttccttactaaagggtgccatcaacatttagtaggtgaaaattgcaatggcccattaaaatctttaatctcaacatcaacatgcattaccccatactgaagaataaactcaaaccattctaaaagttgttcatcagtttaaatctcagttgcaacataatccaaaatagaacgccacaaatttatgtactattttgaactccacatgcattttgtgcctatgtaatataccaaattcagcaacacacaattgcttctctcaataacaagtggttggaaagtgtaacttcgatagtagcgctttggttcccctccaacaaagcaaaataagagccaactttaataacaacttgcaaatcattgagttcagacctacaaatccacaac

SEQ ID NO: 55588 - DNA, 642 bp, Zea Mays
ggtagatttcaaatggaaagatcagagagcatctcggacacatggtgatcacggaacatacacgtattgaccgagggatacctcgagatgagccggcctcgatgagggggtcaaaagggccagcgtggtcaattactttcagaaagaagttcgtgttcaggccttaacaaagcaacaagaggactggccggtgaggctgatggtttaacctaggagtagaggaaaggttaggcacggtgagcagaccatgggagcaacgggaacatagcaaggctcagtttttgcttcaaacagccatggcaaggcaccataaagtagcaggctacctgtggctttgctgggacttaacacaggtgaaaacacaagctagcacgttccacaactctaccgcatgaccaccacgtaagggcaaagcacaaggaggcagcaggggtgaccaatatcactgggtcagcacaccatcaagtagggcaggcagctgaatcacaggatccccagtcctatccttgggctgtgaacaatctcaggttaccccctccccaaggtagagctgtgcttatcggcaatttacccagaaccacctggaaaaagggtagtggactgagatctttctcagatatttgccactcagttttcaacttc

SEQ ID NO: 55589 - DNA, 892 bp, Zea Mays
cactaagcctcttatacaatgaggaagtacagaaaacataaatatacatctaacagcgagaacgacacttattttgagacggagggagtaagtgttgtttgggttttgtgtaggtcaaattttattatacttaactagctgaaaccctaaccctgattagggtgggttgttgtatatagagaacaatacatgggctaggtcaaagcccaatacatcagccaaaacatactaataatctaacacccccacagccaaaactctagctacagcagacgttgagactagagtgaaacttcgagaacggcgaggagggaagacctagagatgtcagcaaactaagagcacatcgggacgtgattggacatccccgacaacaacacgctcacggaggtcgatttcaacatgtttcgtgcgctgatgctggataagtggatagggttgacagagagagagagagagacaacgttgacgttgtcacagtagatcatggtgctccgggtgagggggctgtgaagcacctagagaagctagcgcatctagctcgcctcggccaccccatcaacaacaggctggtactaagcctcagcaatggagttggagaccacaggctgacgcttggaggaccaagagatcagattagccccaaaaatcgcatagccagaggtcgcctggagggtgttcgggcacccaacccagacgatgtcagtgtagacaataagctcatgggtggaggagcgccgaaggtggaggtcatagccaacagtgccacaaatatagtgaaggatccgcttgactgcacccaagtgcggctcacggggatcatgcttataaaggcagaccttaggcaatgttgggcttggtgaatgtgagatactgaagagcaccacaaggc

SEQ ID NO: 55590 - DNA, 339 bp, Zea Mays
cgctgttgcttcaagcaaaaggcatgcacgtgcgtggcgcgtggctagtaattccggcattgcgcagcttacagaaagcagcacactagctggttgatgtaatatgtgcgcatgtaggtacacgtagtaataatagccagctaacgtaaccggccctagccaatttgactctagcttactgcctgtctatgaacggaagcacatataaaactggagagctttacagctacttcaaggacgtgaagacggatggattccaagcggcttttaggtggatcaaatcggcatgcccatgcatgcatatgcccgtcaggaataatccagaatagtccgcggtag

SEQ ID NO: 55591 - DNA, 971 bp, Zea Mays
gatggtataggagttgttgatgcaggagtaggcgcggccaggtactgagggaaacctggcataggcatgaactaaggagtccctggcatatagaactgctgctgagggggtggtacagaaaattgctgctcagcgcatgacatcatgttgacagtgccctacgaagaggaagaagtcactggctcccatttgagtttaccattgggattcctcctacacaccgcatccttgtgatcctggctacagatagagcacatgccactccactaacacttggcacggtgatgcgcttcaccacaacggaaacacaccaaccctagcccgggattaggaacaacccgatacctttgagtacttcctcctgaagtacccgattcagagggtttgccatgatagagtggtggcactagtgttgtgacttcccctcttgtgggctagacccccagtgttgcccctcctcacgtcctagccatgaggctgatcaacacccgaagacttctgagattccatggtgtactgatgttgcatctccacgcccaatgcttgctccaccgcagtacaaaaatccactagcgaaaaggcacctagagcatgcctgatagagggtttcaggccctgacggaactggcttgccttctccaattcattgtaagccacatgaggaacaaagcagaccatcttgttaaagcccacttcatactctatgactgacttcttctcctgcttgaaagactgtaaatcaatcttcattttctctagaaagtgaccgggtagaacctcctttcaaactgcctgataaaaacgtcccaggtcaggactcctggtgaagaggagtgagctgcctgcatgcctctccaccaaatttgtgcctcctccttcaacaactgcgtgccaaaacgaacacgatccctaaacacaatctaaaaaacatccatcttatcctccacataagtcagccaatccgtcgcctc

SEQ ID NO: 55592 - DNA, 375 bp, Zea Mays
tttgatgttgccaaagcaaagcaagaaataagtgaatggacaagcttaatattgcaaaagaatgtggatgagcttcatgaattcaaagagagatgttatgagaaatccttggattgcgcaaagaaactgaaagacagttttgcaaaggtgggtgcatactcatcagagcaaaagtttattcaaggcgatcccgaaggtgtcattgaatggatcagtgaagaagctaaagcttttgacgaaatacttagcgatcgtggggatttttgcgccctcaccggtgcccgaggggctgcagaagttttggagaaaactggttgtgaacatgttaaagctgcagcccaggcagaagttatcttctccatagacgatacaagg

SEQ ID NO: 55593 - DNA, 1182 bp, Zea Mays
gaataatctcttgccaaatcatatcaaagacattcaagctctcagtgctatttggcttcatgaaggagagcagaactttactttctcccagcatgttcatctgatttcccccttggggatgagagtcatcctgaagagagagttgaggtacctgtaatacttgtgcagatttgttgatttctagtattcatcagtctcacaaatgtgaagatctttggctttagccctggtgggagggcgaaagtcatggatcttgatcttgtctccagaaatatcctcatcagtaaatcccaatatgtgagaaaatctcctgtagctcactttgtaccagcttccttcaataaaaaattttagataaggaaagttgtatggactttcctcatcagcaggcttgatccacagagtagagtagaactgagcaatgatctcatcattccaatcatattggaatgtcatgatagtcttcattctcttttgctcacaagccctcaatgccaatgtcatctttggatccccaatagcttcgcacccactccagttgataaagcgctgatggagaatgggctggtgcttctttgaaagaatgatagaattgtagaagtctacgtgaagtagaatccagaagtgattaccttcaattctgacatcacgtactcggagggtaggattctgaaagcgcatgtcttgtagaagagcagatcctccgctggcattgaaatcaataacctcttcgtttgaggaacgacgagcttgagctttgtgcagcaccaatccttggatgatgggggcatgagcaggaggaaggtccacaacgtcatctttgcctccatcgtcatcacttgtggactcccaggcctgagggtttgtcgcaggactagaacaaatagaagggtttcgagtcgtccatccgcgagtaccctgagacccagatgcctcaccacccatcataacattgccagatactcgcccacgcttggatcaggaccgagggggagtctcgtcctgaacttctggcgaactgtcatcggaatcggattcaacgacagatggatttcgatgacgaaccattcttaagatcaaacaaaatacatatggtgagagtgatattgatattcaaggagtttaacgaacatgtttgaggaatgacaagtataatattgggcatgcacttcaacctttcat

SEQ ID NO: 55594 - DNA, 426 bp, Zea Mays
gaggtcgtatttgtggtttaggcttaggaccaaatcaacaagatgtaggcacccctggaactcaaatgaaaatatcaacaaagattcaaatggcattgcaagctcgcagtcagtctgagcaagaggttagagccttaagagaggatatgaatcagatgaaagaaaaaatggatcatatttatcaaatgatggtaccagctcaaggggtgcaacatatagaaagcccttcacaacattggtctaattctcaacaggtgatataatattgcatatgtttagtcgtttatctcacaacatgggtctaattctcgacaggtccttatctcactaacactttattgttatttctgtagaactcaagggtgcaccaaactaatgagatggcacatgagaacaatggtaatgaccattcacaaaatatggtcg

SEQ ID NO: 55595 - DNA, 432 bp, Zea Mays
cgataaacggtaagggtgctgaatcccgacaggggcggaagaaccaccatccagatagtggcgtgctgcgcactcagtacgcaatttcgcaacctccgccggaaccttgcccaactcgtcaaggtgtggtccaacgctgtgttgagcacggcagccaagttgaccatgttgttcaacctgggattgccctcaccaactggcgagacaatcacacctccagcactgtcggtcgaacggcgagggtagtacttcaggtcgaggccatcagctaccccgctgaacaacgagcaatactgagaaagtgcccgccgtgatgcatcttgcatggctgcctcggcagtatccctctcaataatataatagtgctctgagaaggcctctgcacctcggagatcatcgtccggatgacgcaccaagcaagtagcctcccac

SEQ ID NO: 55596 - DNA, 800 bp, Zea Mays
gtacgatatggtctaatctctatggtccacaccagataggacggatggcgggcatcatcccatccggtgttagcaaacggcgcctatgcgccataaccggcggtggatcactggagccgcaccccccctcctaccgtgccctaaattgaaccccgaaaggtgcttcgcgaagccacggtcaaaacgtatggcaggaaggggtatttaccccagtggtcgcagtggggaaggctaatccgcggtgaggaaggattcttgggttcctgcgaagtccgacaagcaattgcgccacgcctagtggccgtccctccttgtggacgacgtagaacccttccagaacacttggaatcgcttctagaccgatcaccaaggacccgacatcggtgactacccgttttgaacacggcgacgcccttttctcccgacgtgctcatggcgtgtgggtggcccgattcttttgagttcctaatgacgggagatggtcgagtgctacgtaagatggggatgtggcttaaaacgtggaggtgcgcggcagtcccacgaattccgagtccaccggcgagcatctcgtgtgatagttgtgactcgtacagggagctctggttcgtctctgacggatgggcccgagcgcgaagtggcactgactagtggggccatcggccagagagagcagggagaggtcgcggcgcggacgcgggacaaagtgggtcgagcgacgcaggaggtcaagttgggctgaggacttggtttgggcccagtcgtcggggttcctttttctttttattttctgtttccctttt

SEQ ID NO: 55597 - DNA, 978 bp, Zea Mays
gggagttataaaatttatgtggggcttgtcttcttctttcatatagatttggtggtacctggagaagtaatctaggagagacatgacctcacaacctgctacataatcgatgattttgtcgatcctgggtagggggaatgtccttggggcaagctttattgagagtatcaatgcacatcctctatatgccatttttcttccttagcattaccatgttggcaagccatgttgagctattttgcatttgatgaccatggcatcggtgtgcggagcactttgcaggtctacgtcccgagcattgaaagttaggggaatgtgggaccacattgtctggatgatgggtccagtgaccgcgacatgattgatctgctagaagtagttctccattttatttttgagttaaagtcttgactggaccctccaaagatcatgcggatgaccccaaacgggtggttgggagaaatcttcttctagtttaggttgttgtggttgaatctagtggattgggggatgttttgtgggggtgggggtggcggcagtagttgtagtatttctcagtttggtaactgtgggtggaatcattgttagttgtaattttgattttggcggggatagggttgtggcatgttttggtagtgtaggggggtattatggctcataggtgtgggctatagctcaggggttgttgtctggggccactccagccttgcgttctttggcttccttcatgattggatagtctcttgtggagtgactagtgtcttcaccatggaaaacacagtagagcctacattgctgcagagaccctatgccttgtcctcttactgtgtcgcccccagccttgttgcagagggtagtcacgatgaggggtgggggacttgaccttgttgctgttgatttgctatgttgtgaacttggagctgttgcttgttattctcctggcgtgtgtggtcagactgttgtcctctcgtccatgat

SEQ ID NO: 55598 - DNA, 478 bp, Zea Mays
ctgctttctaccctatctatcttatgtagtagctgaggcgtttcgtggcagggttaaggagttgtctaatccccaagttgggtttgtcttactgaccgaaatcaagaacaaatcactgttttgttatgtcgaatggtggcgccttgggttcaaactttaccagatgctagattaggtaattgaaagttgcctagagggggtgaataggcaagtggaaactttttcaacaaaaactagaaatgaactgggtaaaaccggttcaaccggtttgcacgagctcaactaaagaatgagatataaaactgaattgatctcgaaatccacccagttaactttggaaatgagatgttctagttgatccacagggttcaaagtagtagatctgagaagggcacttctcaaaatccacacaccaaaaagatataaacaaatcttccacgaaatggtgagagaacgaagaacacaaacacacaatgag

SEQ ID NO: 55599 - DNA, 1898 bp, Zea Mays
cagcgagccccaagaaacttcgaatttcagagacactagagggtctcttccactccaccacagccgcaacattcttgggatcaaccgcagtgccctgctcataatcacatgccccaggaaagccacttcggacagccaaaatgcacacttcttcaacttgccatagaactgattctcccttagggcacctagaacgagacggagatgctgctcatgctcagcctcgatcttagaataaatcagaatgtcatccaggaacacgaccacaaagtcgtccaagaactcatgcaacatcctattcattgcttccataaaagcagcaggagcattagttaagccaaaagacatgactatgaactcataatgcccatacctggtgcaaaaagtgatcttctcaatatcctcctcacgaatcctcaattaatgataaccagagttcaaagcaattttggagaacacctgggcacccctcaactgttcaaagagaacctcaatacggggaagcggatatttattcttgattgtcacttgattcaaagcgtgataatccacatatagccgcttgcttttatccttcttctcaacaaacaatactggggaagcccatggagacctgctaggcctagtgaaaccgttagccagcagatcatccaattgccgcttcaattcaacctgctcctttggggccattcgatatggggccttatgaatgggctacgtactcggaatcagcttaatcttaaaagctgcatcgcgctccggaggaatgcctggaagctctgccggaaacacgtcagcaaagtcacacaccacccggatgtcctgcacccgcaaggcagcctcaccctccaccaccatggagaaaaagattcccgacttccttgaccggcgatccggaagcaattgcgccaacaaggataacgtgaacttaggagaacttcccaagaataccaactccctacccgacggcgtctgcaataaaattgtcttccaaaaataggatataactgcgtgatactgggataaccaatccatacccaagataacatcgaatgcccccaaggaaatcacaaccagattggccgaaaagacctcatcagcaagaatgacgaaacacccctgacaaactgaacagctactaatggagccattagcagaactaaccaaaattgggtgacccaacctctgcaccaaaagaccagcccgcgacacaaagtcctccgaaacaaacgaatagctagcgccagagtcaaaaagagcatgggccacaaacgaatcaactgaaatcgtacctgtcaccacgtctccttgctctctgccatccgcagtgggtagcacataagctccggaaatacccgcagaagaggaagctcctggagtgaaatttacaaaagaaccccactgagccgccgggtgaggcagacgcggagctccaaactgagatggcataggggtagtcggtgcaggagtaggcgcagccagatactgaggaaaaccctgcaccagcacgaactaagaagtcccaggcacataaaactgctgcggaggaagtggaactgaaaattgctgctcagtgcttgacatcatgttgacagtgccctgagaagaggaggaagtcactggctccgatctgagcttcccattgggattcctcctacacaccacatccttgtggtcttgactgcagattgaacacctgccattccactggcactctgcacggcgatgcgcatcaccacaacggaaacacaccagccccagcccgggcttaggaacagcctgaaacctctgagtacttcctcccgatgtaccccgagtcagaggatttgccacgatagggatggtggcgctgatgctgagacttgcccctcttgtgggctggacctccagtgttgccc

SEQ ID NO: 55600 - DNA, 757 bp, Zea Mays
gccacttggtgtgatagctgaggaccggagcctttgtatccttgcgatacgcgaagttataacaaccaaaattttcatgtagcccgtcttctctagccttcgtttggtaatgcggctcatgcactcggcagaaagcttcagcatttgggtccatcccttggcttcgaagggcctagatgaagatgctgagcctaacgatagcgttaggagtcagctgatgaagaaaaatttcaaaattatcaaaaacttctccaatcatctcgttcaagggaaaccgtaatcctgccctgaaaaagcttttgaaaaccactacttcatcattcttcggcgttggagtggtttcttctccggcaaaacaaataagcttcttttcagcttctccgaagtagcccagtttcatcatcatgggcatgtcggcttcagacacagtagatttttcaaaatccaagtgactgggttttgatgggattagaatgctagtcttcctgttcttcatcagcatttacttcctctatatcagcctgctcagcttcggcagcagaagtaccttcgtcaatgactccctctgtcacaactaagcccgattgtctcatgactttgaagattggagctgtctcggtagcctcagtctcctctccttcatgagtcaccctcgcagtcgagcgtactctggccatctgatagatcttttgtggtttttacgaagctgatgttttttacagtttttgacgaagctctctcttttgacgaagctaat

SEQ ID NO: 55601 - DNA, 1434 bp, Zea Mays
actaagccttcgtgctgtatgaaaatgggagataaatggacctagagtcaggctgtcagtcacccctgaagcagaaattcgactgacaatgaaatgggacgaactttgagagcaattttgaataagatccagtgtatgtttgatcgaggttgctataacaaaatcaaagttggttggtaggagaacaactttgctacagacagattagtgggttgttacagaaaaatttgagaaaacagctcctaaacttgctatgtcagaacaagctgaatgtgatcgcaatggtacagtaaactgaataggatcgcgggttcagtgtatctgtcgccgcaggtgatctccgcatcgcgatcctcgccggcgatgcgattcgtgcgctctagtgtgcggataacggctgacggtgaaaagatctcgcacgaggatgaactttaggcactatactgccctgtcgccgtacccacttgcaccggcgatgtggctgcgaccgccgccatcgtgtcgtcgtttatctcggttacgacatgccttaagtcgtttcaccacgtcgtcgcaggccgtgaagacttggcaatgaccgtcgtagatcgttaaccagtgaatgccacggtagcgaactcgagtgactcatttccttatcacagcgagcacttctctgttcaaattcgtcctactcgcgatcgccctccataaattgatgcctcggcctgttctgttagtatgttacgaacacagcgcaccgctcctcaccgtcgattagccaccatagcgcttgaatttggtttttcctccaaatcagtttaccgcgccgctgttagacaccgcaccgtggccagccacccacaggtccgtcctcgcccttcttgaccatgtttctacaccctcgtacgcttgtgatgctcattggctccgctgattgagctatatcgcactagatcctcgggaacgcatcgggaaagcctcaaatccgcaggtgtacttggaccgagctctaggatagcgtttgggctaaattgatgatccccaatggagcgcaagggtaaaattaggtgtagaccaaactcgagcagggatcattgggtatcatggccaatacaagttggccgaagcaacccacaccgtcgtccatggtcggggacgcggtcctgcgaagaagtaagaagagagggacttaagtgcacatgtcagagacaggtgaatagggtataaggattctttaccaatttttcaaatagccgagagcctctacgcaagcctccaacgcgggcgcgcgggtttctcttgttcgtgggccgattcgggctagattgagcctagtactattcatagtttttctttttcttttttctgccagacttggaaatttgtagtaaatactagaaaaatggtaaaaatacgagaccaattttattagacttctaaaatcctctagta

SEQ ID NO: 55602 - DNA, 623 bp, Zea Mays
cttttttccaacttttcaatcatggggcaccagagattcttattaatctttttcttatctattggcacaccaagatatttcataggtagattacctataggacaagtaaaaatatcagcatacaaaaagtctatctctttagcatcaccaaaacataatatttcacttttgtgaaagttaattttcaaacctgacatgctttcaaacaaacataaaatgaatttaagatttctggcgccttctaagcaatcttgaataaggaaaatggtatcatcagcatactgtaaacaacagcaaccattttgaatgatgtgagggatcaacccttcaatcagaccttcctcctgagcttttttgatcaaacaagctaaaccatcagccaccagattgaacaaaaggggagaaaaaggatccccttgcctcacccctttgtgagtagtgaaataagggcccagagtgaatcgactcgatcgtatataccgacatatcgtcgcttcgctgcttcgattcccacaccacaccgtgtctcgttccgtagcatccgaccattccccaatattgcagcaatttgggcaggtcgccttgccgctgcgcgcctatgcccgagctcgacgccgcgtcgc

SEQ ID NO: 55603 - DNA, 576 bp, Zea Mays
cggtgggattggggtctcctccccactaccccgagaagtccctgccccatcataaccacatgtcatggttggcatctgaagaagaaaacatgctttattattacacaatatagttacaccacgtttgttacattattccaagctcctacttaatacacatactaagttcatacaaacccacttcccttattaaggctaagcaaaagaaacaacccactactacactagtctagtcctccacattcttggttgctctagatccgctactagcttcaggagggcgatcatccacgatgttcatagaaggaggggccctaaagatatctagctctccatagggtcctccttcacctgctcccgttgcgctagcacccatctcttcatcttcacgtggtacatttgggtgtaactggtcatacaacacatgcacatcctcatgtaggatattgttgtatgcttgtaggttttccaaggccaggctcatctcttccactcgggctcgggcagtcgcctcacaatcccaggctatggatcacgaattcacagcccagtccatagcctgatcatgctctacaa

SEQ ID NO: 55604 - DNA, 707 bp, Zea Mays
aaaattttgcaaaacttctgcaatcatctcatgcagagggaaaaaagtccttccatgaagaagcttttaaaaactacgagttcatcgtattttggatttggaatcacctcttcctcagcaaattggacaagtttgctctcggcctccccaaagtagcccaatttcttcatcataaccatgtcgtctgtcgtcatagtagatttaccaaattcaatgtggctgggtttcgctgggctcagaatagtgtaatcctcttcatcttcgttctcactccctccttcaaatgcgatctgttcagcttcagcaatcgaggtaccttcggcaatagcctcctctggtacaataagacccaattgcctcatcacttctgatattggtgccgtctcagttacttcggcctcgtcaccctcacgagacactctagcagtggatcgtattctggccatttcagtgtttacccttttttgagatgaagctaatcaaaagtggcgaagcgttgctcaaaaatgcaatacagaaagcttctgctatggttagattttttaatagcgcaacagtgcgatggcaatgaatgttgtggtaactcctcaccaacccatctgtttatatagtgctgcagggggagaaggcgaaccgccataccgctcgcactggctgagcggtggaccatccgacgtccagaatattattatcgtttctcggcaacg

SEQ ID NO: 55605 - DNA, 445 bp, Zea Mays
gcccgctcgttagtggtgatgtagaggtctgcctctcgaaatagttgttctgaggtggtcggcgctttctgtggtatggctcggacgaaggccgagtcattggatccccggtagaaatcttcaatcaccgctgcctcggtgactttggggatgcggtttctcatggtctgaaacctcttgaggtatgaccgaagtgtttcatcgccctggcgcctgatggatttgaggtcccatggttgtgtcggtttgtcagagagggactggaagttggcgatgaaccaccgactgaagtcgctccaatcatcgatgtagtgtcgtggcagatgtcgtagccactgcagtgcatcttgccctaggacgatgggcaaatatgctgtcattacgtcttccattgccccggcggcccgagcagcggtcgtgtagatggccaaccagcccccaggtc

SEQ ID NO: 55606 - DNA, 688 bp, Zea Mays
tgcttgctggactttttgtgggggctttttggcggtatattacatggctccgcctcgttaaaaacctcaccccctggaggaaaagagtgcgggcctgaatgacattgtttgaggaattacaaagacgcttgggccttggatcttaaataaaaaatttttaaaaaaattcagaggttatcgatgttccatgagtgctctaagtcttcgccagatgaacttgttagcctgtaagcacttggggatgccttcgtcttgactatgtacgacccttcccacttcggctctagcttgccccgggactctgtcctggtggtcctcacgagtactagattcccttcgttgaattctcttgggacgacattgttgtcaagccatgccttggtctggacctgatacttgtttagggcctgcagggcgaggacacggtctccatcaatgagatctttggaggttggttcgtcgacgttggggatggctgattggtttgtttggggggcccatgctttaactcttgtggtgtcattgcttaggatccatacatcaggcggaagggtgtgaacccggttgctcgacattctgtcgtattcagcgcccatatgacttcgggtaattggtctgcccatttgccatttttgtcgtcaaggagccttttcttaatgtcactgaaaatcttgccattggcatgttc

SEQ ID NO: 55607 - DNA, 429 bp, Zea Mays
catactcctttgcagcggggaataaccaatggggtgtgttgccatctccaaggggtgaaatgcgtagaaggtagtcagcgtgtgcatggttgcggcctcggtggtgtcgtgggctcggaaaccaagggtctcagaatccaacgaatgccacccaagctgcaaggggtggggctccaaggctagccacaccttacagcgaggcactccatgctcctcgaacaactacaccgtgtactgtggaggtgcgtggtatcctgcctcttctagcacttcccactagatgaggggaaagccctcctgagcaagacaatcagtgtgataaggtgcatctcctccctcaataggtgtaggtgatgtcatctgtgcaaaggtgaatgtaagtaaagtggaaaacaaaactcaaagtgaaaaataaatgccaaaaactcc

SEQ ID NO: 55608 - DNA, 361 bp, Zea Mays
cttggatattttagattagtccaatcttgaaactaagtacttatagccgatctaaagtcatccatattctctgcctgaaaaaggaagaaactatggctcaatacatggcgttttctgcatatactttccaacatgattcttttgtaacttaaagcctagcattgattctgtattaataacattgcaggacagccaataataatcctcctgtaacatttgcaattgcggcatgtgaaaatcaaaatgtaaatgtcacagtattgcctgtttttgggctttctggagaaagttctgttactgctaggggaatgtggggcacaatggttcaggtgattttacttctttcctttctttgtttttc

SEQ ID NO: 55609 - DNA, 480 bp, Zea Mays
taagtcctccactagggtcgaccttctcttagtcttgactacaatgtcatcgacgtagacttctactttgtccctaatcaggtccccgaaggtcttactcatcgcccgtacaaatgtaggcaaagcgtttttcagaccgtacggcataacaacatagcagtaaagcccatccactgttacaaaagcggtatgcttcctatcttatctagacatctggatttgatggaaaccagagtaagtgtctaataatgacaataggtcgcacccggaggtagaatccacgatttgatctatacgtggtagtgggtacgagtccttgggacaagccttattcaggctggtgtagtcgatgcacatccgaagcttcccattcgccttggggacgatgactgggttgtccagccatattgggtgatgaacctcttcgatgaagccagcgtctagcagcttccggacctcttttcggatgaagtcctgccg

SEQ ID NO: 55610 - DNA, 972 bp, Zea Mays
aattttctaagaattaaataagtttctgcaattaattttgtattgaaaatcatttctaaaatgaattcatctgtctctagtccacgcacactaataaacggaaatccaggggcctcagcgcaagtgtcaccaagaaacagaacccaactacgtggaccgcgggttgaatccgagatgctacgagggctcttacgcaaaactcccatggcgaaggggtatctagcatccagggctgttggatcaccaaccgatggttaggattagatctttactgtaatgaaacggtacgccataacggccgtaggatccgaaatgcacggcccagatcaacactcgaatcgttatgcgctcgtgtaatcccgcacgttggccgaagatccaacgatccacgatcgctatagccaaaacgcttctgcacatctaatcgccaccgtacgacataaatcggacggccagaggatcatcttccacccccgcgacccaactgcggcgcgcagtccgcacggtggcgccatagtcgcggtgcccagatcacgtggcccgcaacaactaacttggatctcgacggtgctacacgtagcgggggttggggtgagtccagggagcaaggtcttaccggtgattttacacgacagcgagcagtccacggaacgaaggttgttccgccccagatttgaactccggcgagcacacacctgacccccggtcgccaaaccaccacagagagatcccagatactatactcagggcgcgacggggcatccacacgacgtgatgacgacgcattggcggattaacggcggcttccgctgcgctctctctcccgcgggtaacagcgatggcggcgagctggatgaggtgagaagaaaaggtcgcggggcccgatttatagcccggggggtgcgccgaagtcgggagggtagttccttcggttacggacttcgccggccgagcgcgccgcgaggatctcgg

SEQ ID NO: 55611 - DNA, 399 bp, Zea Mays
ccccttcgcctggatgaagagtcaaccattgaaatctggccgtcgattcggaatcgaacgattagagtagtgtaccggttgggataagagcgatttaatcgtgaccgtgaatctggatcttgcggtcaggattgcgtacagtttggatgttatttaagtctaatattggccgtctgctacggatccaatggctcaggcgggcagatacccctttagccgaagattttacataagagaccccatgacttttgcaaatgaactcgtcatccatgtgcggtttaaaacagttacaaataggcccctgaaaattgtaaagaagccctgactttataaagaaattctagaatccaatttataatataaaaataaatatagattgtttagaaaaatcatatctcc

SEQ ID NO: 55612 - DNA, 713 bp, Zea Mays
aaataagctcaaatcgaccccctttttccagcacacactagccactaccagtacctctcatgcaagatctcatacccatccaatattccagactttatttgtgcatccaattcactttttgatgaaccttttggagtcgagtgtcaaatatagtttccctcagccaaatttcgaaccaagcacttcatgcacttattcacatgcctagctatgtggcagcgaagtctttgctcatattcatgttaaatcgtgtgccattttcaattccaaacattctatgtgccaattcaaaactcaaacatgttttcgcgccttttgacctcagccttctcaattctcatgctaatctctcagaattcatgtattctctctttgtgtatgtatttactcacatttcataaatttctgactatttgactaatatgtgctcacctcttctgtcatttcagtgtgactgtgtgtccgctcgcgagacttctctcctgcttggcttttctctcaagagacatgcccaggtagtgaatcttttctatttctatacctatctactgctttactgctcttgcttatcttctctaattctcgtgcagcgtgtcagtggttagtgggcagttttagcagtcaggatggtgcggacgaagaatgtcaccccataaggggaggagctaactaggatcctcctcgctcgttcagacaggataagggcaaggatg

SEQ ID NO: 55613 - DNA, 520 bp, Zea Mays
tgtataggttggtacgagagccgtgttttattgtcatgctttgcacatgttgtttcatgcatgggttctgatgtccttgctctcatgttttttcttcctgttttaccttgtagatgggagacgtgttgatcccagagctccagcgtgggaacacttctgtgaccatatgcgctcgtgtttctcgtttatgggatttctgtgatcctcaggatgaagcaaagttgctccattctgatatggtgctgcttgacgaagaggtacaacatctgcacgcttatctatttggtaaagggaaggtggcattggtatgagattaattgttattatgttgctgtttcctccatcgctgctttgtgcagggaaacggtatccatgctgcaatattcccactagtcatacaaaagttcaagcctctgataaaagaaggagtcgtctacaacatcacatacttccgggtcagagcctcaaacaatttgtacaagcctgttttcaatgagaacatgattacctttacaaactg

SEQ ID NO: 55614 - DNA, 582 bp, Zea Mays
cttggaacacagaatcatattgatctttgctttcctttgcactgctcaacatcatactcatttactgtaccatttttttcagcttgcagtcatactgatcagaattgttattgttctttttcagattcagattgtagagcagctctgtctgtgtttgtcaccttggaacacagaatccatactactctccccccataaggtgtgtggactccctaacaacaatatgttgtgaaattacactgatttttgcccgtgcgttaggaccaaatgattgccccatctgttaggaccaaatgattgacccatgtttttgttattgtagtatattacaacctctcgctaaataacttgttttctactagacacattggatgtgtacatacttatgtttggaaaaattggcagcctactaaaaaatacaatggatgtgtacataaggaataaagtataaacttcttgctttctcttttaatttgatcatatgaggtagtctgggaggggaattacttgatgttccttgtctcgacgcttttacacttacccacagaccatcattctgctccactttatcgcagtcgtctt

SEQ ID NO: 55615 - DNA, 383 bp, Zea Mays
attgaacaaagataggtagcacattgacactagataaacaggcgcattcagtaaataagtacattaaaggacgtaaacctgttctattatatgtatatacaatatcagatttttgcataatcaatacaaggaaaaactgaaaatattgtaaataactgaacaaagataggcagcacaatgacactggatcaacaggtgcatacagtaaataagtatataaaaaacgtaaacctgttcagttatatgcataaacagtatcagttttttgcataatcaatacagagaataagtgaaaatattgtacataaatgaacttagaaaggcagcgcattggcactggataatcaggcgcatatagtagataaaggaataaaacatccgat

SEQ ID NO: 55616 - DNA, 792 bp, Zea Mays
ttgacttctatagcggtaggtgtatcttaagtaaactagaccaccttcactggagccggcagcaatctccttcgacatctcccaaacgctcacaagtggccacaccttgtaagcaatatgctcctgtaccaaatccctggtaccaatgtaagtgcacacaatattgaaaaccaccaaacacgcttgcacttcgtttccacttgcagttaacgaccttctaatgccgaagcgtgaccgtacgacgttggataatacccttcacatcttcccgttcactcagatcattcttgaactagaaccattgtttcatccaagaacccggccacgtctttcggaatgtcggcacgggatacctcgctttagagcggtgcacaaagttgtatcacccaaagttgttgtgataatgttctttcctagttgccttcatctggtaagacaattcatgaatgttttagaagcacttggcatctggctttagcccttggctcctcatggcccaaatgaaaaccccactttaattaaagcttcgggagtaagctaatgaaggtatatctcaaatgtcttcaatacttcaaccaacatcttgtgcaatagaaaacaaagtccaaccttcataaaacttttaaatactaccatttcatatacttcaggaagtggaacagtgttttctcccccatccctcactatggatatgtcgtggaaatattttcccttcatcgcttaaatttgcccttgcttaacagttcatttcccgaaaacaacacggcttggcctctatggccgatcttcagc

SEQ ID NO: 55617 - DNA, 360 bp, Zea Mays
caacccatcaccaaaagtagtaactagtggaactaacctctacaatctaacaaggatatgcaaagatcagactccactagcacccaaccagaaagctccacagtttttaagccaagcttatttacaaaggccacaggccaaaggcagtaacccagctaaaaccaacctagatgcaactaacccaccaacataacatccaaaagaacttgagctacgatgaccaccagaaggagcatgaagtgccaaaaggagtcttcaaacagtaatgcgacggtccctcggacaccatccaaaggccctgctcatcgcctcacttgctatccttctgataagttgacttccttgtaccaccatcttttt

SEQ ID NO: 55618 - DNA, 553 bp, Zea Mays
cccgaagctgatgaggtggtggtctttaagagcttcatgaaagctgggcttcgcttcccactacacaagatgttggttgaagttttgaagacattcgaaaaataccttcatcaacttacgcccgaagcctttatcaaagtggggatttttatatgggctatgaggagtaaagagttagagccagatgctaggtgtttctacaatattcgcgagttatcctaccagacgaaggcaaccggaaaggaacaataccataacaagttcggctgctacagcttcgtgccccgctctgaggcaaactatctctggccaacattttaaaagaagtggccgggctcttggatgaagcaacccttctacgtaaagaatgatctgaatcagagggaggatgtgaggggcatcattcaacatcccatatggccgcatttcggcattagaaggccatcaatcacaattgggaatgaagtgcaagtgtgcctaatagctttcaacactgtatgtacttacatcggtaccggggatttagttcaagaacacattgctttcaaattat

SEQ ID NO: 55619 - DNA, 468 bp, Zea Mays
gtaatgaatgctgttttttcctcatcctcttttgccaggctgatctgatggtatccagagtagcagtccaggaaggacaacatagaacatccggcggtcgaatctaccacctgatctattctaggaagtctgaagggatcctttggacaatgtttgttgagatctgtatagtcgacgcacatgcaccaatccactttattcttttttagtacaagaacaggatttgctaaccactcaggatgcggtacttctctaatgaaccctgctgaaactaagcgagctagctcggtgcgaatagcttctctcttgtcaggcgtgaaacgacgcaacttttgtcggatcggccttgcctggggatagaccttcagtttgtgctcgaccagttctctctggactcccagcatatccacaggctgccatgcgaatacgtctcggttatcttgcagaaactagatgagcgtgccttcg

SEQ ID NO: 55620 - DNA, 442 bp, Zea Mays
gagggaaattgccaagtacatatccgagtgcgacacctgccagagaatcaaggccagtcatttgaaggcagcgggccctttgcaaccccttcccataccatcttggaaatgggaggacgtttgcatggatttcatcgtgggattgcccaatacctcccggcaccatgattccatttgggtcattgtggacagattgaccaagtcagctcatttcttgccagtacacactacccacaagacggagaagtatgcggaaatctacattgaccagatagttcgtttgcatggaataccaaggactatagtatcggacagaggagcaccctttgtggcacgattttgggagcaattacaagaatcacttgggacccatgtaatacgaagctcagcataccatcctcaaatagatggccaaacagaaagggtaaatcagattttggaa

SEQ ID NO: 55621 - DNA, 712 bp, Zea Mays
cgtataaattttcaatatctgacacatgcacgtgtgacttatagaatgcaacatgatcaacaggagatcctttacggtaccaagccggtgctagtgccggtaaaaggattgggtatctcaacccaatactgatatgcgaggagagacacacttttagaatcgagaaagacaacaaagagttaaagggaaagatggatgaagaagttgaggagcgtctaaagactatgaagaaggagtctgaaacaagattcaccacctacatagcaaacgcaatgcttaaatttcaagacagggaagccataatggccccgtacaacattaagtaagtgtgattttgcataaataagattaataatttcaatgcacatgcatcacaaatttgattcgtataaggaccactggatatgcttcctcatttatcctaaggttggaaaggtgctggtgctcgactccttgaactacgaccctttgacctatgcaaaattcctcagtatcttagagctataagccttttctatgcatgcataattatatcgatgagaattttaaaataacatggagattctatttgagatcacagagcatttaggttctataagtttaaaggtggaaagtacgacaagtccaaaaaatgcatgccactagacattcatcatcactggccggtaagtatgtgaatttatgaatacatatcatacacaatgttgcaact

SEQ ID NO: 55622 - DNA, 731 bp, Zea Mays
ccacccccacctcaacagcaatattcgcctccttaggagacttcgcctgggctttccttatttttatcgcgtcgccaggttcaccaccccatatgtcgaagtagaggacttccccttcgggtccattgctgcagcaatgacatatgggatgttatgcgagtaagggaaggtaagcaactccctcgccatgcaagctagcacaatgtcttcgaagtcgcaagccgtagtcgcgtccctaacaacccaacgcttcgcgctacctgaaccaaccctcatcggaactaagtctcgccccaagttacccccgataactctctcagcgaagtcctccatggacccagcctccgcgtcttccattgaaccagtcggctcgcacatcgccgcgagttccacaacaaaagctttggaataggcccctgcatctacttcccctgagcaattcgatggaatcccggtcaacgtgcgtcattgagcagggccccagttgacgttttctttcccctcttcgggtgggccttgtgctcctcatacttgagacccatctagctaaatatgcaattacgtgaaatgtggcctctgcgcagagcaacacccttctcaacttcaacctccatcacaagaccaacaaggtcctccgcctccttttcgatctcagcaacaaaaagatctcgagaacaatcgcccaactcgaccgcggatgcgggactctaaatctgcttgtcaaacccttc

SEQ ID NO: 55623 - DNA, 476 bp, Zea Mays
tgtctcctgtggcctctctatcccacctctatacattcactatttccaactccacgttataaaaagtgtagtttaatattatatacgtctatatatacgctctactaagtatggcattggaaatgagaaaaatcagactttgactatctacaatggtccttctaaattaacctcctatatcctaatttcgtgccaccttatatcatcatgtcttcctctatatctgtattctctacagtagttttccctatattatcccctacagctcatcattccagtcaaatatacatttcctttcaactaattagtcgtacaaaaacaactattaattaatatcagataatcacaataaaataaataatcttctgcacagtcagcgagtccagtcttctaaaacaacagcggcaactagttgtcttctaactagcttgtgagttttcttggcttcttattatcccacgctttcccattcttga

SEQ ID NO: 55624 - DNA, 419 bp, Zea Mays
actctacagtattgggttgaaacccgcccgagtcagcccaaacataggcgaaagcgcgcccgccgcgcgcccgcgctgtcggttttacacagaagaccttggcggttttaaaatctagtaaggaacccacacactatttgtttgtctcactgacacttgcaaatacacccccgcgcttctattccttcacatcccgaggtccacgacgtcgcacggcggagaaccgaactctggcgagcatgcactggccaggatacgcgatgaccggtgctcccacatggctgacacctaattcaacccttaactaccatttcccctcaatcaatttcagtagcggtgctctatttcgtccagtccacgaggacaacgcagacaacaagtgaacaagtgtgttcccggtgatctagggtagtctagct

SEQ ID NO: 55625 - DNA, 284 bp, Zea Mays
ctaaggtaggtcaccggaccatccacatgtggtccagaccatatggcaataggggctggactatctaccatacactggataggagggtcagattgattatccgatcgtgcatacccccagtactctaagtcttgatgatgatagttaatgtctccttcccatcaggagtcttttgtgcaatcacctccctggaaataatttgtttgttctcattgatcacacgagggtcaccgatgacaacacttctccctttgtatttatcagccacatatggtcgaaccaag

SEQ ID NO: 55626 - DNA, 915 bp, Zea Mays
caaagttgctctgtcagacttgtatcaagtcactagaactgaacctgaagaaagaaatggtcacagtgatatgggaccaaattgagcatgccatatccttgaattcatttggttttaacccaagaatcctatagtaagtttgtagactgatgtttagtgaatgaattttattaagggaggctgctctgttcttaacaaaaatccagagatatggtgggtagaaggttgctggttcagataagtcctgaagatccaatacgctgaaaatctgaagaacaccaaaagatctacgacactgttgatttggatgaacttggatgaatcggtgaggatttgatcgcctgggattaactcggtacgtggcatcgttccgcgagccgagccacgcgtggccggagtgggtcaccggcgaccacggtgactcgattaacttttgtcgcggtgtcacccatgcctcgatctccctcactgtgtctcttaccgacgtagtagtcatgcgctaacgaagctatctgtggccggagatcgctagccgagccaccgtggctataaatagcaccatgatccacggcggggtatgcacacctccacccagtttgatgatccaagcccaaattcgcacagcctccgcccccttctctcaaattgagtaggcactgtgaaactacagttcctaacggccgtgtagccccaatctccactgccaatttcgcccagagccgccgcgataccattttcccccaacttgggtctctaaaccgccatggatagctcgaccgtggccagcccactctggtaaggttctacgcctctcaagtgccgttttcgcaacttggtatgcactggatgctcatcgtggccaccgtttggtcaattcggccagggttgaacgggaacgcgagctcgtggtcacgg

SEQ ID NO: 55627 - DNA, 519 bp, Zea Mays
aagaggcggccaaaaagccagagctagaaaaagcaatagtgctgccagaaatcttgagcccaccggcagaagcagaattgccgaaggttgcaaaggctcccgcaacaactcccaagaggagaagaatggctagcgtactagacgctatcatggaaacaacaagggcattaactcctgctcctgcaagaaaggttgccaaagctgcggcgactcatgctgaaaccaaagctgagccctactgagagagctgagcaaaaatctccaggtaccaccatggctctagagaaggaaaatgtgcctaacaaagctagatctcctactcacgaagcaccgtccaaagattctgactttattattcgacatgcttcgggaaaaaagctatctgaaaaagaaatcatggaagccaaacactacgcccgggaactgaaatacctgaagggggccctggtgtacaatggcatagacgaagatgatttcctatactgtcttccaaacaataaggaaatatccgtctgccgg

SEQ ID NO: 55628 - DNA, 538 bp, Zea Mays
atagacttcactagacttagcaaggcctgcccaaggatgactttccatttctaagaatagacaagattatggacttagtcgtgggttgcgaagtcatgtccctccacgatggtttctctagttaccatcaaatctacatgagggaggatgacaaggataaaacaagctttattacacacttcggtacttactgcttcgttcacatgcccgaaggcctcaagaatgtggctcaacttttttagaatgatgaagaccatcttggagaatcaaattacccgcaatatattcacatacgttgacgatataatcatcgccggtaagaagaaataagaccacctagaagacctcacagaaacattcacaaacatgcgagaagccaaattactcttaaaccataaaaatgcatcttcggagtctgcaaaggaaaattttctgggatacgtggtatcacgcaggggcatcgagaccaatcctaataaaataaggcaataataggcatgaagaccccctacatacagtgagggacgttcaaatgtta

SEQ ID NO: 55629 - DNA, 609 bp, Zea Mays
actagaaatcatagatcagcaaggggactgatgactagcgagggagagcaagagaaccaaatcgaggagctcaccaggcttgggagacctcaccgaaaagaaggatgtcggcaacgagggaggctgtggtggcgctgggagggcacaacgatggtggtggtgcagagagctagcttgggagcacgtgcgagaaagcaacaaaaagagagcaggtgactagcaagcagacccgagtgagaagaggaatttgaatttgtagttatgggaacatctggaagtgaatagaacactgtctggtgcacaccaaacatcttacatagaggcggtgtcaaatagccgccaagcccaagcaccggacaatgcacaatgcattgtctactgcacaccaaactgtccggtgagctcagacaaagaaaagttttgaaaaaaaatcagattgcgcaccataccaaatcccaacttataagcacacataagaacacctattgggacaggtcttagcaccctcacatattccctcgtatttttcaaagtgttttcccataggctatgtagtttttagcaaaataggcaaatggggagaatttgcatctgagagttacactaggg

SEQ ID NO: 55630 - DNA, 943 bp, Zea Mays
ttatgaggcttgatctgctctgaactgcacgatcaagatctaaaggcacagatctcgccgacccaacaagtatgcgtgaccaattccatgcgttggcggttgaatcaacggtccagacacctcctatgccctgatctaatcctatccacttaaccacgatccaacggtccacggtgaagcactgctcccacgacggcgccatgtttgctggtggcaagctcccaatctacaaacggcccaatatctacccaaatcggcgctacatattgcaggcatggagaagaaagcttggaggggtttctcaccgatgtcagaggtgcgaaggatgttgcccacgcgcgtaggtcgaaccatggcgggtatgctattctagcgagcaattcagtcggatcagggagcccaatccgcccgtagacgccacagtaatctccgccaggataggatgggtcacctagacccctcacaggaccccgaatggtggtacataccgccggccacgatagcggcatgggtctcccctctgtggcactgcttttctcaatttcctgcgcttggtggctcttggtgctcggtccacggctgactagtggatgggcgatagtttaggggcaacaacctcggattttataccccagtgttgagggtagccgcccacacggggtcgttgagccggccgcgcgaattgtggaccacgaagtctgttgcaaggcgcagggaaaggaggcaacattgcacagggcccacacggtggtgagttgaggcgcgagcaggggtgaggagaggcgccagcacggaggatcccaacgaatttcatcactggatcgagctccgtggagatctccccaggaagagaaacagcgcccaacagaaaagtggatacgggagggagaaggagttcctgatgtccgggccccatgcgtcagccaagagggtccgcacgtgc

SEQ ID NO: 55631 - DNA, 393 bp, Zea Mays
ccttggtccaaaaggaatccctataatgatggtcaactatcttgataacgattttgtgaagccctatggccgacgtgtagtggagagcaagggcactaagcatcaaaacaaggatgagacaccctgccctattgagaatggtgatccaccacccggataggttacagtcataggaagcaatcacctgtcgacaatagagaatggagagcttttagcgggagagtagaaggccaagatagacttacgggaaagagggggcatatatcatgggaaagagggaacatattatccttccattgactatgtgccattagctattcctgatacaagaggactaatataggatgtttagtggacctctaaaaaggatgtcccataattatctagttaacc

SEQ ID NO: 55632 - DNA, 596 bp, Zea Mays
tcttctggtgaaattgagtcgattgctcaagtgcttgtgtgcgtgatgtggtgaagaagcaggatctgagctcaatttataggctgatggccggaattggatgagaatcacggagctgtaaccgcgctggcgagctcacccgcgcgggcagagccacggcgatggtccggtgaccgccgattaaccgggcagtgccaccgcaacattttaacgccacgtcgtggatgatctttaccgtggccgcagacccatccccatccgcgatggcgttcttatcgccggtgagatctttctgaagttcgatgaacagtgtgccagtttcagttacaaatcgcctgacaacccatctttggatcatattatctccaaattcctcatggcaccaagacttaatacatgtagcaaagttgttcttctacaatggctctacaactttgttgcattgacccggggcaaattctttgaatttctcgatctacagagctccaaagttagccctgatcaactgttttcagacttagctatatggtcacaaaagtggttttttgcaaataggcccaaaacctagggtttcatttgcaaatccccaagtatgt

SEQ ID NO: 55633 - DNA, 580 bp, Zea Mays
atcagtcgtctttatgacgatcatgcacaacccgtaggttgagtcagcatagaacatattctagggtggaaaaatcatcctcaccgcagcaccggtgaagaccatctccactagaggcaaactggaccagctgctaaaaaaccgaaggcttgcctttctagctcatatggtcggcatctgattcgaagcaaatggtgcctccactacttgctcgccgatagttcaatgatttcattgactctgtgatcacgttatcgagacgatcgaatgtgtcgctcaataggatagtccacaatgacccagagtccacgactatctgtgaaggtgccaaccctaggttctggccgttggccacgatcccttctaccgtcagtgaataggtcggtttagaggtggtctggaacagcggggtgtaaagaacatctgcgccctggccacggtagtcaccaagattcatgtatcttatgaccatctcattgctgggcagacagtagctgaaagctttatagttgatctgacttgaaacttgcttgaagaatgagatgcctgaggagccaaaaccaacaatcctcgcttcttc

SEQ ID NO: 55634 - DNA, 822 bp, Zea Mays
cttaaatcgtcgccgacttaagccgattgctctgttagtagggtatagtggtcacccaaagtcgagtaagcgtgtgcatgtcgcaccgacttaagtcattgccgacttaaaccgattcttccgttagtagggtatagtggtcagcctaagtcgaataagtgtgttgatttcaagtccaatccaatcgaagtcagctgaaagtcaagagtctgaatgcctttgaaaacgaaaactttattgatgatgaagtccccaaattacagagtacaatgtttcttcaagaatttttgaggcgtcgctagggatagaactttctgaggtgctttatgttccatgagttccccacttctgtgccatccatttgagtaagccggtatgatcctggccgagtgacctctgatatgatgaatggcccttcccatagtggtgacagctggtgtcgtccttcccccgctagaattcggcaaaggaccaagtctcccactacaaaggaccggtgtcgcacgactttatcatgatagcgcctcaaggtctgctagtacctagccgactgaattactgtgttcaatcgttcttcctccagcacatcaatatcttctagcctggtagcttctgcttcagctatgctattgaaagtcaacctcggcgccccaaatattaggtcggcgggcagcactgcctctgacccataaaccatgaagaacagggtatttccatgtagagctcaactgggttgagttcttaggctccaaaccacgtatggcagctctctgatccactttcctgcaagcttttcattcttgtcaaatactttcttcctga

SEQ ID NO: 55635 - DNA, 595 bp, Zea Mays
aaatttttcatttctggaacaatagtatcattaaggagtgacatcataacgatcaagttgagtagtagcacaattactaagcatagtatttgtaacacccctagtcttacttagggttctctctcagcaccccccacctgtgacatgttatcgcatgtgaattggactgagaaaaatacaccaaaacttaggagccaagccctaactaggtttcatcaccctaagaaagcacacattaaccatggcaagcctaagaaagaagggaagtgccaaaaccctagaattcccctctttggaacattagagcaccaaagagaagactcagtgaaaagaccaggtaaatcacattgtcatgacttgggccaattataaaagtaatacactaaataacctacaaaaaaagtaagagagttgtcccagaagggttttgcaaaatcaccaaacaagccactcatgtggggggcttcctatagaaatcagaaattcagatttctgaaattcagcccccctcaccaacctcaaacacgttcaccatgttctttaacacaaaaccacttggcccaattgacaaaatggcaccaaaatacccttagaa

SEQ ID NO: 55636 - DNA, 439 bp, Zea Mays
cgagctctccctcctccaatttctcccctgcacgtaggttggacgcgagccgagttttcccctaccggtcgccgtttcttcctgcgagctctctgctcctcccatggcgagcgtcctctgggcaagcccctgctccatggccggcgcccagcagctcgactcctctactctccttcccatggcgcccccattccttccatggaaaaccagcagccgccccccagctctgttccaccctcagctcccaaatggcgcccggagtttccaggcgtcttccaaggacgacacccactgttcctccattcctgtttccccatggcagcagcaggaaaccatgggtgacgccctccctacacctccccctgtttcccccactcgatgccttccatggatgaagtagcactgctgcgaggtttgcctcgtcgcactcgtcgtcggg

SEQ ID NO: 55637 - DNA, 1146 bp, Zea Mays
tgctacaggatgtaacaaataaaaacattgatgatcaggtgatgtcttgtaattgtcttgttagatatatgctattttcctatttctttggtcaacttcacaattttccactctaggtgttgcggtgtgcagacatggttgaggaaaatggtcgtcatttcaagaactacaagtacaacattattcccctcaattttcctggttcttccgaggaaattatggaacttccggaggtctagcactcatcttttataatactattttacttgtttctgaaaggctgaagtaagtttgatttttgttaccctgtaaatgatgtagataagaggtgccattgatgcaataagtgacatagatggccttccaatgccagacatgtcttctatccaaaggcatgaggataaatctatccaagatctaattgaatatctttcactagcatttggatttcaggtaatttcgtttcttatccatccataatctggcatcggtatgttcaagggaggtcttcattcttaccctgcatttgtttgccaaaaatcattatattggaaccgaatggtgtgtttatatgtcttttgtgcagaaatcaaatgtagaaaatcaaagagaaaatatggttttgcttctcgcaaatattagtacaagaactgctgcccaggaagggcatcctttggtaagctcaatgctacttggaagacattgtttgagacatttttttatatttcaagtaatgtttatgcaaaagtcactacacctttaaagtgggtgtttggtcgcgcgtcgtccccctccccacgcgcctagcgagtgtcgtccgctccccgcacgcgcccgcgaaaaatccaaaaatggagcgcactcgctggggttcaaacaatggtcgcaaggaacgagcgttcgcctcctaactactgcagctcgtgttggtttgtgccatataaggatagatattgtaaatatcacatttaagcaatgtctacctatatgatatatagaaactgtagtgatgcacaacaactaactagtaatgtttttgcactggtgaactacacattttgatataaacaaatatgatactgatctagcatgttattttcaggttgatacagtgaatgaattgtggaaaaaaatatttggaaatta

SEQ ID NO: 55638 - DNA, 1037 bp, Zea Mays
gcacaatggccctccgacttctattactttaccgcgccaagtccacgatggtgaacggcaacgagcacaccctccggcgaacttgtatcggccgggatgcacaatgactggttccctaactcggctaacacgaaatcctaccccaggcaaccctaatccctccattaattgcacgaatccggtccagagttcgtgtgcccatgacggcggtgaatactagagacaaaccgaggtgttcctggtgattccgtgcggtctagttcaattaaatggatctacaagaaataggaggcttaatggatgctagaacatcaagcattgaagcttgaactaacctgtagatggttggccacggtgagaagctcacggcggcgcagaaaacggaattgggggaaaagcgaaattggggcacggtggtgcacgatagtagctagctggtgatgggttggacgcgtaacaaagaggcggagcagagggtatcctcaatttatagatcctgattgaactaggcacgaattttggattgggatcacagttaccacgaccaagatatttcacagtggcttgctcgccgtggcgcgcgagaggggactggtccgcggatgataatcggctgcttgccacgacccttacgatgcggaggagtggtcattacgtgtcatggccggaaaaatggtgagctcaggtgatgccagcgtgactgaccgcggtgggacacgacgaccggtctggccagcgactggattcacccctcctcggatactttcaccctgccccgacattatcttcctctcccgcagcatgaatctcccaggcgggcgctaattgcggcagtagatcaccagcgtcaagttcacggcaccggagatttttctggtcactgtaccatggtgatcttcatcagaagctctaacagcacgatttggagaactgcgttctccatttttcatgtgacaactcgctcacttgcctgcatcaatattgtgatccaaggtaccaactacaattttgttacaaagatcttactcagctatcca

SEQ ID NO: 55639 - DNA, 440 bp, Zea Mays
acttaataaaccattttagacactacactcaaaacatgggtaggagcagattaattagcttctcttaactattcctcaacttaaattggataacacacaagtcacataaaacaccacattttatgagatctaacatgtcgagcattaattctacaacataagcgattcaacctctaccatgcttgaccgaacctaatggctaacctttccgaaacaccctatccgttcttcacatttctaatcatattgcacgacataaacaaatttcactacgcattcaccacataaacaacattatcacacataaccccaacttaaccgtagaggaaacgatgactacttcggcatgtcaccacctctctacagaccaaatcaatattaactacattgatcaaacctcatatagtgcaacacttctaatttactatctcaaatacaac

SEQ ID NO: 55640 - DNA, 409 bp, Zea Mays
gtgaaataatgattacagccctcttgcttctgttgatgatggctactgtaacaaaatcctcaatggtttcttcgatagatagataaataaatcccaatggtgtttgaaagttcaaacctcacctaaagtgataactgttaatgtttataggctgacttattggtgatcaactggagccaggcaaggcatagctgagcaaaacctgcagatactgccatgctgttcctttctttcactttaccatgttccaatctcctattatgcatccttggtattgtgctgtaattaaagttaatgtaagagattatgtcctgagcttagttggcgtgcagctggctagttgcttttagttaatattcaacctgtaggttgggtctatgcattccgatatctcgccttgatgccagca

SEQ ID NO: 55641 - DNA, 527 bp, Zea Mays
cgagatcgacgatagggaacccctcttctacccctagccagagttgaacggcggcacagagctccccatggtgaagatctcgccggcacaccgccaacaagcgaccccgcgcccaaatctcaaaatcaatagttgttatacgacgccgaggacaaagcgacaccgttcagggtgcacttacccgagacagaggtgctggacttgctgctcgcttcgtgtcgcgccctggtcgtgaatcccttgctccagcgaggaattttgttcacaattcacgccaaccgaacctagcgataccacgtgcatgcgaggagtaagcagtcgagtccccccgacccaactacagagactctacgatgccccatggtggccaccctcttcttccctctcgacggccatggcggctgcttctctatggcaccaggtgtcttgctctcggctctctctgcgcggttttggttttggagggccaatgggggcggttgacttatatgtacgcggggcgagggtctgatgagagggggatccgg

SEQ ID NO: 55642 - DNA, 1588 bp, Zea Mays
aacttccatagcagttttgttagatgaggcattatcaagcacaatagcaaagattttatcagtaattccataatcagtagcaaccatttcaacacgctcagcaatgttaagacctgtatgagctacctcaattggtctaagaccgagcaacctcttttctaaacaccaatcagagttcacaaaatgagcaacaacactgatgtaatcctcttttgcctttccagaccaaatgtctgatgtaagtgcaacagatgaaacagatttgagtacattaataagttgtttagcacgattattaaaaagcctaatcaagtctctaacagtgctttgcctagaggacttaacaaaccgaggattatgagcccgagtaatgtattcttgaaatgcactagattcaccaaaacaaagaggtaggtctagtctagcaatcatacgacacagttcagttcttgcaacagatggagagtactcccaatgcacaacagatccatcatcgttaaacttaagcatggattgagatctaccagttctttctttttctttcttagcagggcaaagttctaggtgacggatcaaatgtccagtcctagaagtagatttagcagacaatgtgtgcttgcagtgaaggcaaatggcggaaatccttacctccttacctccctgcttctcagtaacttcctcaaaatgcaaccaaaccttggaggtcggtcccctcctcctggagcgcttaccagaggcaagcgcagatgtgctagcatcggccgtcgccgttgggctggtggatccgatgcgtgtatctgccatgcccgttgttccagcagcggcaccggtgccatcaacctcaatggcagcagctgaactgctaccaaggaggaaacatcgggcatcatcttgctcattctgagcttcaagtagccgttcctcagcctctgcggctttgacaaactcgtcatccatggaattatcatccatggacattggaacacccacgcagtcggcgtctccggctccctcacggcaagcgctgacctaagatcttcatccaaaaacaatgtatacaaatgagagggacaccactacaccagatctacctagtacggttcagtgaatcgaattaataccaccttacctgcgctaccggagcaccagatccaccgactatgtggttgagagttgagacttgggagccggaaggggacgtcggtaccggaagacgaggggagcagagacgtgacgatggagatggagcagagaccggaagactacaggagccgagagggagacggggtggatgtgggtgaaatacctgagacacggcgagcccgtggagcagcgagccagcaacacggcgttggcgatggaacatagaccagaagacgaggggagccgggaccgggagggagacaaggtgaaatacctgaggcccgtggaagaggagcacagacgaggcgatggagcagagactagaagccgaggggaaccaggagcgagagggagacgcgcagatggagcagagaccaggcggcggcgatgtactcttgggttttctagaatcgccgtgagcgccaggcgatggagcatagaacag

SEQ ID NO: 55643 - DNA, 423 bp, Zea Mays
attttatgggtggcatttgttcaaccatcgacgacgctctacattccgatgtgtcccgggctgtcgcgtcttctggagcaagagcaacgggacttcttttgtccaggtgcctacgagtcgacggtgcatggaccatcggctgtcacaaacattgatgaccctttgagggcactgtgacttcacttaccgtcgggagggggcctaagtatgtctttactgagttgactcccgcacaatggtatgaacactgctcctactcctttctcatgttccacccgtttgtcgtgatcatgcatagacaattctgcatgacaacattgggggtcaatcacaagggagtcagtcatctcgctttctagataggctacccaaagtgcattttccgggggtcgatgatgataatcctaagttaagttgtggcag

SEQ ID NO: 55644 - DNA, 512 bp, Zea Mays
tccctaatattgctatataacccttgacttcttatacttttgttgtcttgccattgtatttccacccttgtgcaatatctaccttgatatattaaacttttgcctctcctcgataatgctttctccctattgaattcttatacttttgctttcatgccattgtattgccacccttgcgcaatacctaccttgatgtatgaaacctttgactctctactccttgataatgctttctccttaactcacttcaaatccttggttgtatcatttatcctcactttaatagttcatggttatcttatctcactcttggccaccaacaaatatgtcttgtctaactccttgataattcttacccaactccttgactttataatatctttcttattccaaaccttgtctcaccttttgttttggttgaatgagtagaattggattgtgttgtgctggtatgtttgaattcattgtccccttgtgttcatgtttgatttgcttctttgaaatgatttttg

SEQ ID NO: 55645 - DNA, 509 bp, Zea Mays
cgagctttaaatttgccaaaattccttgctgcactatccccagattcaacttctccatttcttgacatatcgtggtgtcaggtgctcttactgtaagacaatgacaaaaagtcttgtgacttaaagcatctgccaccacattggcttttcctaggtgataataaattttcaaatcataatccttgattagctcaagccatcttctctacctcaagttcagttctgagcgggtaaagatatatttcagacttttgtgatccgtatacaaatggcagatatttcccagcagataatgacgccaaatcttgagggcatgaacgactgcagctagttctaggtcatgagttgggtagtgctcctcatgccagcgcaattgccttgaagcatatgctatgactcgcccttcttgcatcaagacacatccgagtccactgcctgacgcgtcacaatatacatcgaaaggcttttcaatatacggttgagccaacaccggggcagtggttaacaac

SEQ ID NO: 55646 - DNA, 409 bp, Zea Mays
atgacaggtaaaggggattctcaccggttcatgaaagggggggtcgaccagtccggtcatcacgtggggcggacagcagcgtttcggcgaggaattcatcctccccgatcgacccgcatcaaccaaccgagctccgcatgatccccacagcactgtgaagcttctattcccgcgcccgacggttggtgtgatcgacgatgtgcggctgctccttgctctcagcatctctgatgacatgcggctattggctagggtggctacggctagagtcttggcgacaacgtgcgcgacctcttcttttataggccagaaaggataaggatcgtctcttcattgttgcatgcacgcgttggccggataaggactgtatatacatgcgcatggacatatgtttgcatttggaccctcg

SEQ ID NO: 55647 - DNA, 583 bp, Zea Mays
gccattcgcgctgggcggatcttgatgaggaggcccggcgtagtggtgcctgacgatattgtcgctgatgtcaaggctgcgcctgatgcttcgagtcgtccctcctctttcattgctcctacgaaagacattgctggcaaagacgtttcgatgcagtgatgtcctgcaaaacacttgatgtaatatgaattctatgtgcgtgtgatggttgtgttcgaatattttgtggacagggcgccagaacatgcccctggtgctgacaagtaaaacgttcttttttcctggagtgctaattgttttgctgttagggtataacggtcaccctgaacaattgtgaaagtaaatgtgccatgctggttttaaggcgttttccgacttaagccaatcgcgtggctggtagggcatagtggtcgccctaagataagtagacgcgatcatatcgcaccgacttaagtcattgccgacttgggttgattgctccgttagtagggtatagtggtcaccctaagccgagttagcttgagcatgttgcactgtcttaagtcgtcaccgacttaagccgattgctccgttagtagggtat

SEQ ID NO: 55648 - DNA, 729 bp, Zea Mays
tttgctagagcttcagttgtggtgtccgacgagactgaatgtgatgggtgtgcccttcacacgtcgaacatcgccactttgcagaccaagtatgccaccctgctagatgagcgtgatgagttgagatctagatctagcttgttggatgcgtacactgcttgtactagcttgcatactgagctagcgcagagaaacgctaggatagcctcacttgagaaggctagctcagtgagtgcccctacacctgcgcggtgtgcactttgtgaaggtttgaagtctactcttgagtcctgcagacacgacaagacaaggatcaaggaagaaaacacatacctttgatatgtcttgagctgggtgtcatgtagtgagccccatttgggcatgatgttcagctagttcaagaggggagctggtggatcgggaataggctttagttctaggtataggagtgacgctccgcttggcaaggttggtgagtggagtggattgaaaccatcagagaaaccttcatccactcccaagcttatcaaaatcacccacctaagcctatcacccctatgagagatagtgtgattgaggagcctgtgagaacaactcctcagaaacaagtgtgggttccaaaacctaaccacctcaggaacacacttgatgcccttcccgacatctccaatgttacttctacaaaagcctaactacctaaaaaaagccccctcccacaaacaaaattca

SEQ ID NO: 55649 - DNA, 425 bp, Zea Mays
gtcgactccatgcttccgcgtgaggaatctccgccaccgctggaggttgatcggatggagcctcgggtgattcctcggcctcactgtgtgcggcccatggtctgtcgtgggtagcgtccttgtcaccacagcgttcggtaagaaaggcgtccgccaggcgatctcctctctgcgtaggttgtgcctaggttcaaattcatttagctggttgggcaggatgggtggctcaccggcgttgtctggcggccgcgcctctgctcggggtcggtggggaagaaaaccagtggtcattgatggggttaatcaacagtggggattggtggctggattccggacagcgggggtcgtagatttcgaatctagcggtggtgggttgattgggtttcataaaatctgggccgcagatctggggatcagcggtgctc

SEQ ID NO: 55650 - DNA, 981 bp, Zea Mays
aatcagtgaggtcatctgctaagaaattgaatgcatagtctcatacacactaaacatgcattcaagttatgtcgactttcatcccacatgaagacctatgatccacatcaagaacctaaataaaaactaaaacacaaaaccatgcattcaaattcctgaacttcatcccacatgaagacccatgaaccacgtcaagaaccaaaattaaaattaaaacccacaccctcaagtaattataaggttagaaaagaaagtgggtgagcatgtcctgtaagaacatagaattcaagcaactgaatacctaatgggctataaatattgtcaccccaaggttctgacaaggaaaagaactcacaggcatacacgttactgtaaccaatgcccattatgcataaacaccagtagagcttttacctgtgaaattgcctcaaaaatttaggcagaaaatcaccctctccagtaaaagttcactatgaaccctagatgaatcacgcgggatactccagttccctacaccagctatagagagctgttctaattcaagcctagataagctacagaccaaaagctcaccactctgctactctactcctaatgcaaccctagacacttcaaaaaaaacgacagaagactactgaatcgaactaaacaacggaggtgagccccgcgctcaaatcactgccacacgcctgatccgacccccagatgtaccattcccacgcgcaatacaccgaatcgagacgtactagcctcgttaaggaacatggataaaagggggctacctcggaggggaactgtgcgcagaggcgctcgcagaggaatatggcgttgcggtacatgaagaggcggaggctactgtggacgcggtctaccattagggtttccatcgccgcccagcggcggcggcgagcgcgggtgggcgatatcaaggggattggggaagtagtgcggtggccgaaacgcaggcggcaggcgcagcag

SEQ ID NO: 55651 - DNA, 609 bp, Zea Mays
aggttcatcatcaaattggttctcttttaccaagtgatggctcatctctcaaatttttataactttaaatataagatactgcaaatgaggtagaaaatagattgaaatgcctcagttcatctccttttctctgtaatgtatcagaatttgttctctaaggcaacttcacaagggaaattattggtctcctttcaccatgaggtccacttctgaaagactgaaaggtatgttgcaccatgttaatctgacacaagaaaaattgttaatgaaagaaagggatgggcaagagttctagatcttcaattatttctggttgattgaaaacagatacttgttgaacctcataacaatagtaagtttttttgttgcaatgaatgctatgaaacttgcaaattgcatatccctatttaaaatactatttatttctaaactataaattatgcatttcttatatgcgcgcgctagcacgcgcgcaattgactagtaacattctaaggtcactcaatagtgtgaatcacaaatgttttatatatgtgaacataagcttcagatacgaatgaacgttaaagtattatcattcacaaatacatgctttggcattattgatat

SEQ ID NO: 55652 - DNA, 428 bp, Zea Mays
gatgcaaccaatctgtcattagctacaagtcgggtctccttagcctctcctgtgaccacagagacctgagtccggtccccttcccatggcagagacgggcgaccacggcactgtgcgcgacgactccagcacagcatgcacgtactggtttcggatgcgtacatacgtgcacgcattgacgcacgcacgccaatcgacagacaggtgtggtccggctcttattgtgccatgcacacctgtgattcttggcagttcgcattaggtgcgactaataaaggtcccgtttggatagttttaccgtcgtagaaactgatttcttaaggaacaaaattatttctcgacgaatcagacccgcggttttgtgaaaaatgattgattggcaatcgtcatatgcgtggttgggagagaaacaaggagttgtaaaaggc

SEQ ID NO: 55653 - DNA, 284 bp, Zea Mays
cacagtagcaaaagcaaaccacggaggcttacttagctcaggcagctggtcatcttctctggaaattcagaaccttgatagaagtcgcgtagacggcgaagaagaaaagggagaagccaatgagcaccgcaaccgtgacaccagccatcccctgttggaaccccaggctttcctcaaggaactcctgcacggtcccatcgaaaccagggccgactatcctggcctgcacatcgcccagctgagatgtaatgatgcctcgcagggtccaggccactggacagatg

SEQ ID NO: 55654 - DNA, 516 bp, Zea Mays
aacaaatatggtatgccattcgtacttccccgcgtccaacaatatggtggaatacgaagccccataaacggtttacgcatcccattgagctaggaaaccgatgcctagacatttggggcgacactcaactagttgttgggcaagtaatgaaagattcgaagtgttgggaccccaatatggcagcatacttcaaggaagtacaccgcctcgaggacaagtttgatggtttcaagctaaaccatatcctctaatgggataacaaagcggctaacgctctactgaagatagcctccggacggggagccatcctaataggagtctttgctaatgacctctttgagccaaccgtgtggtgtggtgaaactcgatgcgaaaacgaccaactgggaacactagtccaccgacccgaaaagctttgtgacctccatcagggattgatcctcgaccgcttgctgaagcattcactatcataggggtgaggccacctcattgggtcctactgcctcgcaaatgatc

SEQ ID NO: 55655 - DNA, 493 bp, Zea Mays
gagtgccctactcagctgattcactcaacctgttttcaaatattgcccggaaaggctataagaacacttagcaaatgtgacgtgagtaattttaatgataaaaacaggatttctcatgacatattgagcatgcaatcattttaaattcatcaatcatgtgatcaaaattttagttttaagacacgtttcgagaatccaagatgtttagctcactcctaagaaagcaaaacctagtctcatcaaggggttttgtgaagataccggctagttgattttcggtgctcacatgaaacaattcgatatctcctttggcttcgtggtctctcaagaaatgatgtctaatgtcaatatgtttggttctagagtgttgcactggattgtttgcaagttttatggcactctcattgtcacacaatagtggaatcttgttaaactcacaaccaaaatctctcagggtttgcttcatccataacaactgtgcacaacatgcccc

SEQ ID NO: 55656 - DNA, 289 bp, Zea Mays
attctgtagaagaccagggtctaatctgtaaattttaggacctaatcgtgatgtttcttcactagatgtggactgtgggttgacttaataaaaatgcagggggtcttttgtaaaacgggtcggctgaaggggtatgggccatctgtaaccgttggattacaatccgagtgttcggattagatttacctcacttgtgaacctgtattgaatacgggccactggatccgagatccatggttaacaatcgtccacgccaatgatgcactctttcccgtccgatctcgcgcca

SEQ ID NO: 55657 - DNA, 747 bp, Zea Mays
cgacaaaattcttttcagtgtgcatcatgtcaatgttgtgtggaaggagcatgtcgtcataataggggagccgagtcaagccagacttatgtgtccacatatgctgctcaccatatcccacaaaaccaccttctgtattagccacgagcccatctatctattgatgaatttcggcaccagtcatcgttgcaggtgggcggtctgtcactatgacacctttcgtaaagttcttgatgtttaggtagaatggatggtcaggagggagaaattgtcgatgtttatcgaaggacgaatatttgccaccctttttcaaccaaatgaacctaagagcttccttgcaaactgggcatgggaacttaccgtgaacacactaggcgcagaatagcccatacaccggtaagtcatgcatggagtactggtaccaaacatgcattctgaagtttgtcttcatagctcggtcatacgtccataccccttcctcccaggcacgtaccaattcatcgatcaaaggctccatgtacacgtccattttattccccgggtgtccaggaattatcaacgacacgaatatattctgcctttgaaagcacacaccggggggagattgattgggataacaaacacgggccaacatgtgtatggggcagcgctcattccatagggattgaacccatctatggtcagcgcaacacgtacattacgagcttcttcggctttctcacggggaatgtgaaagggaaatgtgcc

SEQ ID NO: 55658 - DNA, 404 bp, Zea Mays
tctactccagtagccttgaaatataatggattctatgttgtcctaagtccaaccattctgagtttcaccaagtttctggactaaactaaaaacatgtaccacattagaggtaaattataaaaatacatttcataatttatctaacgaagatcatttgatatcgtaaatgtgattgctctttactataagatttgttaaacttagaatggaaaatccactgtggttttgtacaggatatgcactagacattctcagcttgctaggtatgtaacccttatgtttcttctgaattacactgtttagtagcttctctcgatcctttttatagtgcagattcaccggcagcactgtcatcaccccaatagataggcattagctgctagataaattagccctttatccca

SEQ ID NO: 55659 - DNA, 377 bp, Zea Mays
gacgggaatgcggcttcgttcaggattactgcagcggtgacaggccttccaaaggtgcttaaagtctttcaaaactgaccacatccagttgtgcacttgtgttgggctgcgtgccttgatctgcccaactgggcacacacgctccgcctcccctactccctgcggctcggtgctggtgctgtagcctgtaggagaactgacacaagcggcaccgacagtctgggcattttactcatggactcacgcaggatgataattcatgtggcaaacaacaccatacgataaaatcaaacaagatcataaaaaactaatatgcatagaattcaaattctatatgaatacatgatacaagttcaatgaagaaaaactccatggac

SEQ ID NO: 55660 - DNA, 666 bp, Zea Mays
gcgagccttgactacgtctcccgccagaggttggcctcaggcgagtcgtggcagcgtatcctgcccgaggttggcctcgggtgagtcgtgaattaggtcactcgtgccttggtaaggttgggagcgtgtttgcttatgaccctatcttactcaagcgcctaggcactttagggttgtgatctgggtacccataattatggcacccgacattcggtggggacttagtcgtttgccccatcttgtagacttgcttggcggggactcagtaaatgggccagagtgaggtaagtgggccttcccttgtgtaccctgttcatgggtacccgatagtggtattccttcctttgagcttatgcttcttctgaatcatctcgtcctgtcataggtatatagtctgaactaacctattttgtctttcttgagaacaagcgatcaagatgattggttttgatacacttagggtcgtgttacctagttagttacttggtgtcgatgttttgatccgagggtcctaaccaactgtgaattagagcttcgtgtcctggtccagatggctgatgcaagaagacacaaggcttatcctagttcgggcaatagaagaccctacttccagtagagggggatgagacttatattatcttgcacctaagtgcttgtagtagaggg

SEQ ID NO: 55661 - DNA, 585 bp, Zea Mays
ggcccttctcctttcttcatggcaaatcttccaagttcaccttcgatgagctccatcttggtgattcttgtcatggaaaatcttccaagttcatcttacaaatgcttggagtgaactctttatgctcttgggtgagttggtgtgttgaggttggccgattttggtgtctatttatagctctaagcccacagctagccgttgcaaggagcatgcacatatctgatcttgactggcacactggactcccaacagtaatgtcgtctctgggatcctgaccgagacttttcactttgagctggcaccgaatcagtatggtccaccaccagaccaccacgtgtgagccgcccatgaggtagccattggagataaagtagcggttggagcccaaggcccggtgcactacctgaccatggtccattggtttttagctaaaaatatgagagttgctccttagctataattcaaggtctggtgcattggacacgagtctggttctctaggcatccgaggccctctatagttgtctccggtaaagtggtccgccagactagtccggtgtagctcatataatagctcttgtctttt

SEQ ID NO: 55662 - DNA, 542 bp, Zea Mays
gtcaacaagagcaagtataataataacagaccgtaagaaggctaaataataaattgaaagagagaaagagataactattatagagatgggctaaaagattggttgtaacagttcttgcagccggctatatatattattagccttgctctaattacattcgggagtacacaccaaacaaaacctcgtggtcaagagcctgatccaggatatctgaagtccttgatgctgctttagtgcacatccgtccgtgtgttccattcggaggcggtcaaatgctacattcgcctagctaggacggtgagggcgacagggaatatacacgctccagctccactgcactcatcccaccggtggccttttctggcgtcgatatccatcggagaaagagcccctactacacgtctacgtgatcgcggatggataccctcggacctcagcccagccggatcgagcgttttgctcccggtttgtcctcccgggatcgctgcacggatgtcgctgacgagaattaggtccacgcctagtcgtagggcacgcgccgg

SEQ ID NO: 55663 - DNA, 550 bp, Zea Mays
ctacaatccaaggggtgccttgaagggctgagatcatttctcaacagactggttgtcttttatgtgctcattgatggtgagtgaggattcttcgcgggagctggtgggattggatcagcgaaggtgacattggatttcttggcattgttgatggcaactgccttcgccgcctcatcctagggagagctgttagacttagtgttctctttcttgggagcaatcatgggattagtcttcatagtagacatggtggatgccagatgttgggacctaacacataggcccaaacacttggtagtgggtgagaacaacagtgcggcaaaatgggaagctagatagctataatgtcttgtcaagcgtgtctgttcgggaggcggacggaggtatttatagggtaacgaaggatgctaggcctaaaatacatgcataccctcggttacctactacattctcggaatatattttacaactagataattacaaaaaatgacaccttttttgttagtcttaatttgtgttaagtctagggggtctacgtggaagattgttt

SEQ ID NO: 55664 - DNA, 530 bp, Zea Mays
ttggagctaatatgagggagttatgaatttctcaagtcctttatttatttttatgcttaaaaatcgattctcatatttagtttgaacttaaataatagtcctggactgcaactcctatttcaaaagtctgtggagactaaaccgagaaaaacttggcaagtttgtgatgatctatacataggccgagactgcgggttgttttccaggttatagaggggctcttttgttattctgcaccgaccgaaggggtacaaccatttcctagctgcacgattagaattccgtggcccagattagatccgagccccagtaggcacgcgaactgcaggatccacgatctatgacccaactttgattttaggtgacatcacatcgcgtcccatagatcagcgatcaacggaccacaaaaacccaagtcaagtcgctacccgtaacctaatcctggtcgttccggcttgatcccacggccatgggttctcttccacccccgacgcctatctccggtggtgcccaaacccgacggcggcgcc

SEQ ID NO: 55665 - DNA, 343 bp, Zea Mays
ctcacacatcacatgacagtgagaatccagtcattaaggagggtgacacctttgtagacaagattgcttttgtccacactattaagcaatatgccatcaaaaatgagtttgagactaggattgaacatagtgacaaagaaaggtacagggcaaggtgtgtagatgaaaattgtgattggagagtatatgcaaagaagctacatggtggcaacacatttatggttactattcctttctttgctgacttgttgacttctattgtttctatcttgtgttggatctttttgctcacttcgttgcttctttaggtagtcaaactatcagaattggatgtgcacacttg

SEQ ID NO: 55666 - DNA, 514 bp, Zea Mays
agaggagtggaggggagtgtctacgtctgggaagcgacgaggcgaggtgaacgggatctcgatgagtcaagggtgggaggtggcggcgtgtgggacgtggatgcagcggagagcgaggcaagcgagagcgcttcgaaggtggttgagaggcgagaaggggagcgattgctggggagcaagcatcgcggtattgtggaggggggaggagaatgggacgctgatacagggagcacctgtgagagtagcggagtgggcagaatgaagaggaggcagaaccgagaaggcagcctaccccttaccttcttcatagtagtaaatataacttgtaatactgtcatgcacctcttgtcgttgaaacaataggaaaattcttgcacgacgaagccgttgtcgacaccgtctcccgcatgcgctctccgtttcgtacccagcgtccacgtcgttaattgaaactcaagattctatatttaaaccaatatatttgtaatggtaatgttgtgtgtacccattgttc

SEQ ID NO: 55667 - DNA, 791 bp, Zea Mays
aaaatcatgctcaacaattttgaactagcaaaaataaaagttctagtcttcctttaggaccttctcggcagcttcgtttagcagcttgttgatagcttcgtcaacagctccatcggcaattttgatggtctcgagtgcctcttttaggaatgggccagcttctggattgtatggctccggagacagagatagttcagctgcaccaaagtatatgtttgttagttctgaagctaaaacatattaccaagctaaaatataacagatgtacctataatcctagcccgctcgacagcctcttcagccattctcgccgcttctgaagcatcatgtgactccttttcgttctttttaatggcttcgtcagcgacttctcggttgcccttcagccatatctcggagtaaaatttcccaccgagggtagcagcttcgtctgaaggattcttgatgtcatcaactgagaaggcaaagtttgattgagccacaaccttagtatgttcgcaaccagccttctccaagatggacgtggccccctgcgcaccagcaaaggcacagaaatctcctcggtcacttagaatttcgtcaaaagcttcggcttccccgctgatccactagacaactccatcagggtcaccgcgaatgaatctctgctcagaggaatatgccataaccctagcaaagttgtcctttaatttcctagcgcattccaaggatatttcataacatctttctttggaagcacgaagctcatagtcattcttttgtgctcttgacctttcgatctcgcatatctc

SEQ ID NO: 55668 - DNA, 660 bp, Zea Mays
gggattttggccccgattgcgaagacttaccttcatcagcaatctttcatttttttcaaagataccttttttgttcttgtcttcttgtactgacctcatagattgtcttttcataatactcacaattattttcctttttactccaccaacttcttcttcaaacatttcataatctggataatcaaatcctagcacgtccatgacccgattcaaccttcgcttctccagattgccgaaggcagcagtcattagttgatcctatttcttcgtgtacttacccagaatttcattacacatcgcctcaatcatctctagccactcggtacaaggatcgttgaaggtaccatggaatttgaattggtaggataatcttacaagttcgaacttattcgcatcacccttaagctttggcattcccaagtcgcttaatgttggaaagactctattggcaaggtactcttgcaccaagtcccgagtactaatttgttcagcaacaaactctgaaatggacttcgaccatttgagatggggagcctattttcatgtagcatagaggccttgttatgccgaagcttaatttcattgggctcatcactatgtttttaactttttccctgcctttgctatcagcttccatgtaaaaccattcattggtccaac

SEQ ID NO: 55669 - DNA, 682 bp, Zea Mays
ccttcatcatggcacaaaggccagcttcgagcttcggaaaacccatacttctggccatctcccggcagacggataattctttgttatccgggagacaatacaagaaatcatcttcatccgtaccattaaacactaaggcccccttcgggtacttcagttctcgggcatagtgtttagcttcaaaaatttcttcctcagataatctttttcccgacgcatgtcgaatgacataatcaaggtcttcggaaggtgcttcgagagtaagggatttggcttctttggccataattctctcaaaagctatattagtatttggaggtacttcttcggccccttgctcagttgtggcaagcttcgtctcaacaggcactgtgggctcggcctcgattctagcctcaatcgttgcagctttaccttttatctgcctagtatcagcttcagtctgcgctttggtagtttcggcaaccttctttatggaagaggggtgtttggaatctgttgtttccaaaatatctaatacatttaccatccttttccttctaggggttattgtagaactttattctgccttcagcactgttgcttctactaaaggacttagaatctcgggcatctttgttgcttcttcagtttttgacctttcagccttatcttcgtcaaccttcgtttcaattagctcagt

SEQ ID NO: 55670 - DNA, 872 bp, Zea Mays
atggaagctggtgaccaaaatattttagagctttcaaaatcagcagccaatctcgatcaggtgatttcttccttgcttggccccggaaactgattgcgacggatggttcttcccaacataaataacaaaaaacacattgcaccgaaagactagaaaaataaatgggcgggaggaaacggacattcgccccatggcctggcccaccacgaaacgaacagcaagaaaacaaagcacaagtgaccgacattcccctgggaacccgtgcagccaatttgcacgcagcggcggctagctaaacaaacaatctgatccgcacaacacgcatctatccctgctgcagtaaacaaatgtcacgcgttagcagctaggcctctcaccaccatgcatgtgtctgctgcgtacctggcctgcagtattttggctgtcgagcagttgcgcgctgctttctagtatattgctttgcttctcacagcgcataagaatatttatatatatgtgcacacttcccaagctctaatctaatctttctctctctatatatatatatacccctgccatgccaggccagggagctagagatgggattgttttcatatgtatcgatcgagttggattattggaacattaatcgagagagagagagagtgatcagactataaacaaagatagtttgatgatagaatgttggtttgatgatagaatgttttctaggatttgtgtgcaggccgggtggttgcgaggaagatccatctgttcttcatctacatgcacgccattatatcccatgcatgtccgccgtggatgaatacgagagatccagagagaggcggtcctattaattgtataaaatcatatcctagctatacctgctg

SEQ ID NO: 55671 - DNA, 523 bp, Zea Mays
ggggtctgccgtgggcgtcgtagtggttggaatcgggcccaggacagtgggggctggagctacctcgggcgtggatcgccgtcgttggcatggcgccccgtgcggtgtcttgaggaagatgggagcgggcccttgatccgtgaatgaacggtcctgatctgaccaggccggtacctctttcatcccttcagtctggccattggattacttgtagacggcttagatcagaagcaggataccgatccagaacattacatcgcgaccgttgagatcaaatccgtgggctcgggtgtgatttggcgtggacgaatctgtgccatggatctcggatccaacggcttcactcggtgaccgtagatctaaagatggagggacctgggtgtgtgcgggttcgtcattgcaccggaatctaatcgtggcccttgatgcgggatcggatggccagaattgatctataccccttcgcgaccgcagttttacataagagcccctccgtttctgcggattaaacccgcggtccact

SEQ ID NO: 55672 - DNA, 308 bp, Zea Mays
cccacatcgcgcgatctgcggttgggattagatccccaaccgatatgtgccatcagccgcgagatcgagatccaatggctaggattttattaaggcgcgatccaatctctgcccttcaaccagaatctaacggccgatacaaattctcttacctcgatccttgatcgcacatccaacggtccttcatcatcttcccttcgcgaggtagatggagcaatggttgctccccgcttgcagcggtgtccgccgaccaggggtccggtccgcccggcgatccccacccgttcgagctccacggtgaagtcccc

SEQ ID NO: 55673 - DNA, 353 bp, Zea Mays
tggcctcccaactgttctctgtttcagacggagcacgcacaagatggaactcgagaacagtcaaactcgcgctcgattagaataataataggtaacaaactggcgttcgattggaattagaccatctccagcagtttggatgttgcatcagttcaattcatttcatttactgtctccggactcgataccttattattagctgtatgtaatcacgtataaagtagtcatgtcctacgtgcctccttttattcgttttcggagaaggaacgcgttgcgatttggaaacttctcatagagaccgtatacctagaccttttctacaacaatcagctagcagaccacttggattccat

SEQ ID NO: 55674 - DNA, 423 bp, Zea Mays
cttatccttgtggattcatcttgccctaattagcatatctatcccactctagaataacaaccacgagcagaatatataactcaaccaatagagtcatgatgaattgtataacctatctactcccacctaacatccaacaaggttttgatctacaccatgcagtccatctcacccataactaccttaaccatattcccccaacttcgatgatagacactgaccccgactcaataagaccaagactggagaagaaaagatcaacctcgtcaaggaaggagagaagtcaaaatcaaccttcagatgcattaccacccaacacggagttcttcatcaccataaactttcttacctctgcctattcttgtcctaaactatccatcttttatcccacatgataagtagttgaatacctatgctctccca

SEQ ID NO: 55675 - DNA, 365 bp, Zea Mays
ggcaggggcctctgcgcaaagatcctaagacacagtgcgcagacgcgagggatggcgggttggttcctaggaagttcaaggatgttttagtaagatgtacccgcgaaggggtatcagcccaagagcaccgttgaatgcgagatcaatggcgcagattagaatcgaatcgctacgtcatattagccatcgaatcgacgatcaatggctatgcttttaagatgatgcgatctactttggatcaccggatccaaatctaacgacctgagttcaatctaggtgaaggagtacgcggttctaatcttgaccattcaatctaaatctggcgcccgcaacatcatcaaccctagatcaaatcttggtccttg

SEQ ID NO: 55676 - DNA, 521 bp, Zea Mays
gagaagttctatgccttcggcttcagttatgcatttcaacatgggttgacatgggttgacttatcccctttttgtagagatgtccgttgactatagcgaagtctctgcttctgtgttttaatcttttggcttcgctttggtcagaggggtggtagtggccttgaagataaagggtgattggtgcccactagtcttcggccattatcaaattgactatccgatgcccatcgacgtcttgtgttatttgcagatcctcggggtttcgtacggctggtgtgccgactatgggataaaatacatcggatggcaagggtttgcccttcgctgctgctttagctaatgtgtcgacttcttcgttcttgttccgctcaatatgttgtaatgtgaaacctttgaattgtttttctaggcttcgaatagcggcgagatactgcattaatatgagctctttggcggagtaatgtttttcaatctggccggcgacgaccttggaatcagttttgataatgcaggtggtcact

SEQ ID NO: 55677 - DNA, 890 bp, Zea Mays
gtaatggttaaggtttctctaaattataggttcaatcccctcggggacgagttttaaagaaatagtagtatcgaaccacgttggagagctttgaactcagaggagtttgtgtctttgatcgaacttaattctgcaaaacaggccatcatcaaaattctttccctggaggaggaaaaaaaaacattagtgattgagtttctttggatatggtgggatgcacgtaaaaaggcgaacgctggggggataagattatatctattgaggagatagtctataaagcacattctatgaaatatgttgatactcttcgttcacagagagaagccaaataagagacaacgtggattttctttctggttgatggagcctttataaaaaggagggaaaaaaggtgcgtgtggttttattacgaaggatgagaaaagggctatggtgttggctggtggtgcagggagaatcagtgggtgcatgacgcgttaagcgcagtgtcacaacacaagcatgccttgcaaagctctgtaagtatgcaacattggacggagcgtagagttgttgttgttgttgttgtccaatgctcaggccatgcgccacgctcttgtaattagtgcgcacgcggagttcctcgagttggtttgaattgggacctggaagatcggctggtcgcatgtttgggtttcagactctaaaaaaaaatgtggactctgatgatgtaaacgatgatcccaagaaataataaagtgcaactctgcttaaaaaacagcgacaatacagagagaaaacccgcagtgcctcgagacagtgaccacctcttcggcacaagggaaaactgcaggctcgctcggcactctggcaagtggtggtgcaaccgcgagcgtgctgattgatgtccg

SEQ ID NO: 55678 - DNA, 720 bp, Zea Mays
cttttgccactctcatcaagcgtgttaaggattgttgaacttggggccaatcccgcaagtatggaccaaggccaagcctcgagtggttttgtatgatagggggaatttagtatcattagatagtttagagtgtcaattgttagtgcaatgggtctatgtggtttgttagcttagtcattacaattagtcagtcatattggtagtatgactaggaccaagagattcaaactatcttatttaggtgaggacaacaataaggagctatcatgacctccttgcctcgataagagcaaggctatattttgcgaacaacaacacaagaagaacaatgactcattcgtgattagtagaaggcaatcactataacagccaccataaagcaagctgatatgcatgggagtggtggtcccatatgaatagattcagatgcacctcccacctaagcaccaccaatagttgctataccacttcaaccattgacatgctcccatgttcccgtttacccttcatagggataacctcaggcacaacagaggactatttcaccaccgccaccacaacctatccatgggagaaactagtttgagggtagagcaggtctaggacaacccatgattattggaccttcatagagccacaaccagttgagtttgtcactttaggcatgtttccatttcctagtggcttctatagtagagagaccatagttagagttctttt

SEQ ID NO: 55679 - DNA, 514 bp, Zea Mays
atcttatccacccatctcaacccaaccacttcgcttatctataataatgtaacaaccatgatctagtccaaaattaactagatcttatccatctaagctagtcataccaatctaatccagatcccatctaagctgctatgatctaatctaatgtgagttacttaaccagttagttaatcctggtgaaatagattagaccccactccgataaaacatgaacctaaattggtgccttacaccaactcatctatgaacaacaacctaacttacatcatgtagtttatctcatccatatccatcttaaccatattcccaacccgatgacatacactaacctcgaatcaatgagaccaaggccggagatgaaaagatcaacatcgacaaggaagaatataacagtcaaagaaaatctcgacatgaatcaagacttaaacatttcggatgaagccttttcctcaccataatctttcttacctccacatgtccaacttatatcctacataataagtaactg

SEQ ID NO: 55680 - DNA, 343 bp, Zea Mays
caccggacggcgccatatagatgcgcgctagctgcgcgactgcagcggcgttgccacacagccaagtacgtactgcaggctgcgatacgcagggatagatataggtgccaagaagtacgtgacctgatctgccttgtgctctacaccagactgtctcatcgatcaaggtctaaccgttagtcgatctcttccattcactcacattcccattcatcagtctagatgaataataccagcagctcgctcaccgtgtcattttaagatcgtcaaccgacaataggcaggtggcagcagccgagtagcgtacggtatataggtgtaatacttgcagaccatatgtata

SEQ ID NO: 55681 - DNA, 354 bp, Zea Mays
gtcacttagaccgattgagtgcttttttacatctcgatggtcacttagatcccgcaaagatcaccacataattaggtgtcacttgctagctttacaagtcattgagagtttaggagaggaagaaagcacgatcaataaaccaagcaacaaagagcgacaaatgaaacactagctcacactctctagaatctctcacaaggcacttaatcactaaagaacatgtaacatcctggtttttgctccaaaagcttagaaaccctagttgccaaactcccctaaaacccctgcatcatggcattatttttttaaaactttactcaagtgcagaaaagatgtttgttagaagcacctcac

SEQ ID NO: 55682 - DNA, 292 bp, Zea Mays
gatggatggagcagccccggcaatggcaatcgccgtggtccgcttggactccgctgctggcgtgttcctaggaggaaaagaacgcctggtttgcagatcagagagctgacggtttgggatcgccttctccctcaacgaattagtgaaggagtttatccactgcaccaacctgtggctttcccgccgcgtgcgccattggcagaggaggagaaagaatggcgtcgccgctgtgctcgtgcgcgctattgccgtgcgggggaaaggagatgttggtcctgccgttggattctta

SEQ ID NO: 55683 - DNA, 457 bp, Zea Mays
cgcatggagacggcgggtttatttactaaaaaattagggactcttctgcaaacatgccacgacaaaagggtatgggcggtttctggccgaccgacaagattcggtcgccacaattaaatcgtcatctgaaaggaatcggtatatgattccgaccgtaagactgaagacgtgtggctcaaattagatcaccccacaagccgaaccggtaagtcaccacaatcgttggattatacatctatgatttcgattctacgaggtcacgatctaatccggagcgttggttatggatccaacgccatccaactagagtgcctaagccccagcccctatctgatcgctaccattgatcaccggatcaatggtggatggagtctcgtcttccatacggctggcaacggcggcggcactgcccagcacggcggcgccatgggccatggccgatgaaagtgagattttt

SEQ ID NO: 55684 - DNA, 1423 bp, Zea Mays
aatcttattaaacttggtagagttaagtgagagtttatgcttattactctttgtgatcggcacaagtgagagtttctactaattactcttttatgatcggcatcacctagacggttcgatggcaattggagtgtggtgatcattgggagagtatgtggatgacctgtctcaggacttatacacttttgtgagcgggtcaccgtacagagtgacgaagaaccagctcatagagagcgattgatccttgcacataccaagaggaagcgacacacttgtgagggtgctccaacgaggattagtgaagagtgtcgactctctaagacatcagaataaatattgaggagtcttctaacccttacattggtttgaagcaagcaccttgcacgtggtaccaacggtttgccacctacattcgatgcctcggctttgtctccgccagctccgacaccttcctctgtctacaaggagggggccaacacagcctacctcctactatacatagatgacattgtcctcaacctcctcgacaactcttcttcagcacatcatgggtcgtctacactcagaattcgccatgattgaccttggcgccttgcaccactttatcaacatctctatcccacgctcatccgattgtctattactgtctcaacaatggtatgtacattatcttcttcaacgtgtaggcatggtcgagtgtcactccaccacgacaactataaacactcgagacaaactttctacttcggatggtgctctcgttgtcgatgcctccgactactagagtctcgtcaatgcccttcagtacatgatggttgatgttgcccaccccaacttgacatacgcggttcagcaagtttgtctcttcatgtatgatccctgtgagtctaacctcggtctgattaagcgaattctccaatgtgtgaacgacactctccttcattctccacattggcaccagctccatcgactggttgacaacatacttggatgttgactgggcaagatgcctagactccagaaggtctacctctagatactgcggctacctaggtgagaactgggtctcctaggctgtccaagcgacataccactatctcccgctcctaaggaatagtactgtgtcatcgcccacgctatggttgagtgttgttggctcctacagcttttctaggagcctcacgtcccacttgctagtgcgaccattgtctattgtcacaatgtcaatgttgtctacatgacagccaatctggttcatcactgatgcaccaagcacatcgagattgacatacacttttttcgcaagaaggtggctttaggacaagtatgggtgctttgcgtcttatctttgcactagtgcatggacatcatgaccaagggcttgcctatacagttgttcactgagtttagatccaggcgttgc

SEQ ID NO: 55685 - DNA, 500 bp, Zea Mays
taatagaactgggtcaaaatcggcccaactggtccaagtccatgcagaactgtgcgcccccgcaacccgcgctggcagatttacaccgagacccctggccgttcaatcaacttggaaagagcccatgtcctgtttctatgtctctctgacacttttccttctgaccccccgattctttcattttcacaattctcgtccccgagcccggccgacggcgttaacgaaattaaaccctggtcatggtggcgtgaagcttgggcactcttttaaacactctttaattgcaatcctatcctaacccgaatgattttggggcaggaacctagttaacaggcactgcatagacccacccacgaccacgacggggttctaggttcacgacgtcgttttcccaaggcaacaacaccgtggagctcaaacaaatagaatgggtagcactagtagttcacgtagtatataatgctcacgtgagccggctcaggacaagtgggaattggtcg

SEQ ID NO: 55686 - DNA, 951 bp, Zea Mays
ccgattttagggcaaacttgtagaaattccagaggacgcgtcattgcacaaaaaaatctgaaacttggtgtgttttcttcttatgtgctactgcaaaagagaaaaatataaaaaaaatatttgaaaaaaaatcgcaagaaaaaaaagaaaagagtagcacataaacagaaacgttagtgttctgtgcacctctgtgattatttttccccaagtctgttttcttgttgcacccatatacttgtacctcctttcttgtgccttggtccaactgttctattacattttctaggccagcaactaggacgagtacttggaacacttattcagcattgctatctgttactgacttgtgtgccacatatatatatttagtcagccttcccatagctccagttttctctcgagcagaacaggtactcctttgcaatcacacccatgctcgttggacagtcacaccggtgaccgtttgccacctgcagtgctggtaagaacgttgtaagagcggggtaagacgcttcataatttgtattccaccacctccaccaccaccctgagagatagttgtagggttcacattgtttgttgcctttttgtctctgttttgtgctaacaatgacaggaccaaagaatcaaatggacaaggacaaagggcctaaacttaacgacgatgagtgtgtctcttagatggaattgaaggagatgatgcgcgcgatgactgaagcttttaaaaaataccaggactctgcctcgacatcctatgagcagcttgatcaacgagttgatgaacttgttacacgcatggaagtactggaggctcgtcccccaccaccaactccagccccatctcactctcctgtggacgacgacgatgatgtttatgcaccgctgccacaacgcttcgcacgtaatcgacaaggtatgggaggtaatggtagatgtcgtcatcataat

SEQ ID NO: 55687 - DNA, 637 bp, Zea Mays
gttaaatcatctattctttgtttttcttatgtttttcctaaccagattcctattttctagaccgattggtcgaagacatgatgttccatagttgaatcttgaaatactagacatctagtaaattaataaacatgcacacacaaatgaaaagaacaattaaactattgtaattattaaaaaacacattaacataatagagcattttttaaagttaagcttgctgctttgtgctttctttcttgaagctttagtgttcgtcacgtggtggtggcagtctggtactggcagcattagaacgcaaggattgaagtcttcaagagcactagagcacacagctagcagtagcagcgatgtcgtccaaaccacgccaccgtgattaggtatagggctggggcgctgggcggatggcaggggaggctgatgaaatgtcgcaaacttgcgagtgatagtagaagtcagaagatgaagattatgattatctatgacatgttttttatattatatgggttgtatctctgcaaatctaggggcctttgaaatttgagggcctgttcttgtgaacaggtgaaaccccctcccgcacgtccatgaagggaactattggagtatgggcttttctttaggtgtaagtattttt

SEQ ID NO: 55688 - DNA, 728 bp, Zea Mays
gcagtttggggtccctcgataggggggtccggcagcctggggtccagttctagagaacgggttcttgtctactagggtggtccggagctatgtagccatttagcttggttacataccctaagcgtgcacactccaccactttgtgacgggtaccctagtattcgaaactatagtcctgtgggttcgacaaccggggtccggttctagagaacggacacacatcccctagggtggtctagagctgtgtggtcgcttagcctggtcccataccctaagcctacacgctccaccactctgcgacgcgtgtcctagtatttggagttgtgatccagggggtccagacacacggattggcttcctggtctaaatcctgcaggtcctgttgcatgaatcaaagggtaaaagataccagttagtgggggtcctatgggtgcactactaaagcttcctagccaaggttgtgtgcaggtccgggtcccagtcgagactacctcctgggggccaggtcatgaatttttcttaagtatagtggcatccagcctcgacatgtcgagcctacataccagggggccaggtaccagggagaagttggtaacaaacgcacacagcaaaggcaaatagcatacagataagttctgtcactgttagattaatacttcccaaaagtatcttacaaaaccagaaaatattacaagccgcctcccagcgggacccttgccttctctctg

SEQ ID NO: 55689 - DNA, 413 bp, Zea Mays
caaaagtagtatgcttcctatcttccctagacatctggatttgatggaaactagagtaagcatctaagaaagacaaaaggtcgcacccggaggtagaatccacgatttgatctatacatggaagtggatacgggtccttaggacaggccttattcaggctagtgtagtcgatgcacatccgaagcttcccattcgccttggggacgatgactgggttggccaaccatactgggtgatgaacctcttcaattaagccagcgtctagcagcttccggacctcctttcgaatgaagtactgtcgctcgacggactgtctgcgaggtttctgactcaccggcctggcatcggggttgatcttcagatggtgctcgatcacctccctggggatcccaggcatctgcgatggctcccat

SEQ ID NO: 55690 - DNA, 505 bp, Zea Mays
cgccaatactcacaaaagatgttggcccaaataaatccatgtgaagtaattccaaaggccgataagtagacatttgactcttatttggatgagtattcgccacttgcttcccggcttgacaagagctacacaatttgttcttctcaaatttcacatctttcaagccacggagtaggtcatgtttggttaaacgattgagttgctttattccaacatgaccaagtcttctatgccatagccaacctagtgaagcccttgagaataagcaagttgtgagctttgcctcactagatgagaaatcaacaagataaagattttcatatctaaagcctttaaacttaagattgctaccatcaacactagagataataacatcatcaacggtgaaattgcaactaaatcctaaatcacataattgagctccggatagtaaattaaagttcaaagactcaaccaatagcacatttgatatggaatgatcatttgaaatagcaattttacccaa

SEQ ID NO: 55691 - DNA, 850 bp, Zea Mays
agaattttcgtaagttatccacattccatgagtgctctaggtcttcgccggatggtgaagcgagcctgtaggcgttgggggatgtttttgtcttgacgatgaagggcccttcccatttgggtttgagcttgccccgggactctgttctggtggttctggtgaggactaggtctccttcctcgaattctttggggatgacagtgttgtagcgccatgccttcatatgcgcttggtatttatttagtgcctctagggcaagaacacgatctccatcgataaggtccttagaggttgactcattgacattaggagtgattgtggagctcgctcgtggagatccatgcttcagctcttgcggcgtcattgcttcgaatctgtacataaagaggaaaggtgtgaacctggtcgctctggattctgttgtgttcagtgcccatatgacttcgggaagctggtctgcccattttcctttcttgtcgttgagtagccttttcttgatggcactgaaaattttgccgttggcgcgttcaactactccgttggattgcggatggtagacaaaagcgaacactgcttttgtgccgatagagttgcataattctcggaagtctttgctgtcgaactgttttccgttgtcgactgttagctctgatgggactccaaaccgacacatgatgttctgccagaagaatttttgggttgttttagaggttattgttgatacggctctagcctcgatccacttggtgaagtattgaatgatgacgaaggtgaattttaggttgccttgtgctatgggcagtggtccgacgatgtcactacaaaacaaacccccttatggcaacgtata

SEQ ID NO: 55692 - DNA, 663 bp, Zea Mays
cttgcttccccctcccctcaaccattactttcatggcttcatgtattcgggtcaaaagaagtgctgtaacatggtcccaaaatataattctgccactaatttgtttctaacatgtcaatacataaatagtacaactgctttccaggatgaatgtactgatgaaattttcaaatgctcaatctgaacataaattactccatatgaacatggcaaaaaatatatatttttgaacactgaattttggtccatctctggatctttgaatgctgatgatttgcaacaatgaagatgctgatctaggatgaagttgattgaaaacttggaatgctagcatcttacagtcagttttttgttgtcgatttgatctgtatttggtccatgaaaggaacacactacatttgccctaatgtgtagttttgattggtatacagattttctattgttaccttaattattaatctataatgagaaacattctttatcttcatagtttctctcacgtctgctatatttgttttagaaaaggataagacacccataccaagcttcatgattgcaaaaaaaaggacatttgttgtttagctgttttttcttttgactaatttatgtgtcacagtactacatttttgggacttactacagtgtcatgtattatgaagttac

SEQ ID NO: 55693 - DNA, 609 bp, Zea Mays
atcatcacaagcataggcgaatactagagttattacagaccattgttcattacataaataaaagcgtttagcccctgggggctaccaagccaagccatcaatccttctccccctttttggcaacgagcaccaaaaacaagaggagagaaacaaccacatatcacgaagtaggagatggatcgaagaactgcgacgccaaatttgctgcaaagttttcttccccagggttagctgggggaggatagctgccagaaggatcctggggaggaggataggatgaagatggacccggatccccttggtggggaggcgggacatactgctctctgtcatcaaaaaattcttcatcttcaccttcttcatcttctgctgacatgaatggaaccccataggtttgctgatgccattcattaatctcttgtggaggaggatggaggggcacgtcaggcgagcggggagcaaaagggatacccatagatgtggcctaacgatgaaggttgtcgtaagtctcccactgtcgcctagctagctcatgaacatcagaagagatattcctgcacatagagaagaaagttgcgatgccatgagccaatcttgctcccatcccac

SEQ ID NO: 55694 - DNA, 1475 bp, Zea Mays
ggatagtctgacgccctatgtttctttggcggtggaggataccgtcgaacagtttgatgaccctcacagacaaccaacacccacaaaaatagcccatcaaaagaggaaattggagcaacttgaagcccaaatttggcagggggttctctagggtgtataagagatatacactaaagatcatcacctagaacttcacatagaaccaaatatcagagcatcgaagataaaaatgtgggttttctcaagaacaccaaactggttagatctttgagatcgtgaaaagatagacaaaatcactccatagaagtgctccacatgttttattgctcaagttgttccaaccaaaacttttctaaaaacatagattcaacagatctcacaaaaatccaaagaacaagagaccaggagatcaaagaacggtaaaaaacacaacaaacaagacacaacctttagccaccatgaacctaggaggttagggcctccattcccatgagattcaactcgttacaaggtctctcattactcaagttgttccaaccaaaacttttctaaaaacatagattcaacagatctcacaaaaatccaaagaacaagagactaggagatcaaagaacgatacaaaacacgacaaacaagacacaatctttagccaccatgaacctaggaggttagggcctccattcccacgagattcaactcgttacaaggtctctcattactcaagttgttgcaaccaaaacctttctaaaaacatagattcaacagatctcaccaaaatccaaagaacaagagaccaggagatcaaagaacggtacaaaacacatcaaacaagacacaacctttagccaccatgaacctaggaggttagggcctccattcccacgagattcaacttgttacaaggtctctcattacatagatgaaggattatgcaaagcttaaacatttgtggatctcaataacagactatagaaatgaaaaaatctaacaaggatgaaaataaatgaagtgttggagagatgaggctggttggatcagcctcaccattatttatagggtcattattgattcccaacttgtctttaagtaattagagtgaaagcttagccctaggagcattatggtccaactcgtaatctgcagatctgacgatcacatgctcttcatgactttgcttcgtattgatgcaagctttatgatgaagccacatgttacctataattcctgctggaactccgccatgattttaagactcaatctcgagaaatcatccatccagtgggtttgacatccgaactaccaagacacttcaaagtagcgtgtcatctatgcccccttcatgatcttggcatatgtcatctttagccttgatcaccccatcactaagtcctctagtgcctctgctttgacttgatcgaccaccatcttgacttggtctacatggttcactcctccatgtacacttgcacttgtca

SEQ ID NO: 55695 - DNA, 421 bp, Zea Mays
ccggagagctcgctatctccaccggggtaacgtcacaagtacccagacttggcaccaaagcacgagcgctagtgcacttgctagacgacgacggcggacccgtcctcgagtttgcggtggcggtggtgagatggctcagcggacatgggcgcgagtggcgaggagagaaaacgatcgcgactgcccggtatatatggcccgcgacgcaagactccagccggtgccgcccctgagatccacggcggcaggatttctgttgcgcccggagattcctacggcggagaagccggtcctggtgaccagagcgcgcatggatccggctggagggttggcggggcccagctggcagcgccatagaggaagggtcagcagagattcctccgcgcctggcgaacagtttggcgcgtggactggacgcctg

SEQ ID NO: 55696 - DNA, 684 bp, Zea Mays
agcattttgaaataaatcatataatccaataaagtttgcttcatctacaataattgaacacaacaattctaggtcgaaatatattccgccttagtggtagagagagcgaccgagttttgtttcttggacgaccatgagacaagagacctcccaagaaattgaaaataactagaggtgctcttcctacccactttacagcctgaatattctgaaccagaataacaattttgcatcctgaatagttcaaattagaataattaattctacctgaatagtctgaatcggaataaccactttgcaacctcggccatacagtctgcgacctatcaacttgagaaccccgagctctgcccaccttactttaatacaggcgaacggtccaccaatcatggctggacggtccacgacctaggagttagtactgtccgagctcagaccttagacggttcgcaatacaaaccacctagaatgcacagtccctgcctaaacatatttggacacctgcggacgggccacgctccttggcaggacggtccgcacaacaactcagggacttgtgcaaaacaacatctttcctggtcaggactgtggatggttaggccactaggctcgaatggtacacaatacaaatacttcagaccactccaaaaagcattaattctgcaacattctcagttagctcac

SEQ ID NO: 55697 - DNA, 421 bp, Zea Mays
gttcactcggctactggaagacagctgttggatgaattccatgtggggcaatgtggcgtgcatgcaccatcaaggacattagtagggaaagctttcaggtccgggttctactagccaacaacgaagaatgatgcagcagagttagtccagaagtgcgaagcatgctagttcttatcaaaatagcagcatctacccgcacaacagttccagaatattcctataacctggtcgttcaaatgctaggggctagacatgattgggccattcaaaaaagctcaagggcgatatactcacatactggtcaccattgataagttcaaaaaatggatagagtacaagcccgtcgactctttgacctcaacaaaagcggtggaattcattcaagaaataatgtttaggttcgggatacctaacaacatta

SEQ ID NO: 55698 - DNA, 452 bp, Zea Mays
gtgagttcacacgtactcgcggggaccgaggctacctggttgtcctgtatttattgtagtggatgacgcaggggcggtgatggtcccagacgccatcattccggctacgtcgaccattggcttccatagcctggggctcagtgcagcccatcgtgtagtgccctgcgggaggtctatgcactcaggccaagtccgatagatcataagtgcgatgtggtccgagggcgcatggggcattaatgtgtcgtagtctgagggctcataggtcatgagtgctatacagccagaggggctgtaggtcatgagtgtgaagtggaccggcatccacgctatggctcaatgccaaacatggttatgctgtcattcatttatggcgggccagtccatggccgagctgggatccactcgagtggttcccttctgacacgctcgtcctcccttgttaggctttg

SEQ ID NO: 55699 - DNA, 399 bp, Zea Mays
caacttcaagcccaatttcaagcatgatccagtggctttttgtggcaacaccatatagcaatgttgtagatggtatattgctctacaattttgctgcagagcgttgatcatgttgccgtatgaatctgggagaaaatggagctccaaagtgctctgtcaggtcgactgcttacactccgcgatggtacagtagctgaaatggatgagatcgccagcgcgactaccctcaccgccgacgactccctccgccgcgattcgtgtcaccggcgtcgggattcgtgcctggatggttggatagcgccgcgaggtaaaaagatcgtcccccccgtgcgctggacaccactccgatgattcccaccgtaccccctgctttgcggcttgagcagataagctcgccgg

SEQ ID NO: 55700 - DNA, 359 bp, Zea Mays
gtctattttaggaaaacggccaccgaaggggtatcataggatctgagccgcccgatcacacaccgacgggttagattagaatccaacccccacgaatcggtacgcgaccacgggcgtccgatcagcgttcgacgatcaggatttaattactcacgatctaatctctcccctgcgattctgatctaacggctctgatcacgttaaacgaatgggtatgcgatgttctaatcggagccctccatctatggatcgacgtccaggagccacccacatccgaccacgatggcccgaggcggcgccgccggcttccatggtggtgcacctcaccggagtttcattgccagacgccccaagcgcca

SEQ ID NO: 55701 - DNA, 1050 bp, Zea Mays
ggcgacagctgctcccctcctgcgatcctccgatgatctccctcggctgagctcttcactcctctctgatgagctcctcatcttccctctcctttctctttcctctgtctctcagctaaatggagctcctgcccacctcttgtgcttgattcaaattcttgtgtaaatcttgtaaatcctatgcatggttgtgttccctagtgctccattgtatcccctgcaggttcctagctccttagggagggcttcacagccttaattgatcatttccccgaaacgctaattccccgcagatcacatgttcgatgaaatgcccaaaccagacaaaaatactccaattgctcccaaatttttcaggcaccttcacaatacctctagtaacatagtcgcaaaatttcacgccaatccgatccaccaggcttcaatttcacacatttccatgtttcgagcgatcgtttctgagccgagtgcccaaattccattttcttcgcctcaaatcaaaccaagcgcacacttcactcatatttacccatataaacctattcgttaagtatcggctcaattccacgtcatttcatacctcaattcgaatttcaaacctcctatggcactatttctcgttcaaacgccgttttcgcgtcgtttgacctctcgatcgccatatctctcgttttttgtgccataattctctatgtatgtatttattcacatttcatatacttatgactatgtgactaatacatgctcacctcttttgtcatttcagtgaccttgcctgcccgtgagccgtttcttgtcctacttggattttcacctctcgtgtgagctttccaagtagacatacactcttttgatattctatcggctgttatcgacttgtgcttagcttctctttctcatttgcagtcatcaggtcaggatgccgtgcacgaagaatgtgtcggcgccagggggaggagctgacgaggatcctcctcaccccttcaggcaggtcaagggaaagaccgtttatttggagcagcaggaaggccgcaagaagcggtgtctgga

SEQ ID NO: 55702 - DNA, 414 bp, Zea Mays
atccaacgagacacgcaacaacaagtttcttcatggttacaattctgcaaacttattgttattactaccaaatgcatagtcaatcattaagatttagactgatatgcgcaacactattttatccatgagggtccttcaggggctcatgcataccattcgtcgtttggagctattagttgacttcagatcaacaagtaaaatgaccattagggtctagtgctcacaagggcattcactggttgcattgtgctttgaggcacataggaaaaatgtgtgtttataatggtagtaaagtgcacgacatcatgccaatgctgccaagcagagacttttatatgcagagatgtatagtccatctcgttttattattgcccatggtttacccaattactcataccgttctaaaattgggta

SEQ ID NO: 55703 - DNA, 424 bp, Zea Mays
gccgacgagactcgaaagggggccgaggaccaggacccaagagctagaaacatgtgtatttggtgagcagcgacacgcgccctaaccacccctgcaccctttcggttttggagatcatgcttgctcatctccgtatggttcagattgttcggtatggccacgaaccgacgaacgagtccacgcgcgagcgcagcgtctgcaacagggaagggaaggaaaagataaagggaagggagcgttggagttgcgtatgtcgcttgccatcactgggattcctgcttgctgctagctagcctctgctttcaggatggtttcttaagcggtaggtagccatgcgtgggccaacaacgtacctactgatactgatacatgtacgcagggagaagccgccgcgggccatgtggcacaatgcatctagtgtgtt

SEQ ID NO: 55704 - DNA, 781 bp, Zea Mays
ggttggggtgctagtttagagatgcgccgtgggaggaagtctgattatcttgaaatccctctcaaggacagtattaagggatggcgcttggagtggtttatcgttgagaacctcggaaattctctcccccacggtcagggagacagccggacgttcgtaccccgagttggaccgagtcccccacagatcaggaggttgttgaggctggggctttgctagctgaagttggactgctgaaggagaggggcctgactgcagaggttgtggttgctgattttgttttcaagaacattcagtcgttgaaggacagggcttacccggcttatctgtaccgaggcctagctgactcaactcgggttaccaataggagaattccctctctggacttggtgaaccgacttgagatgattcttagaggcaaggtatcaaatgttggtgccccagtggcatactcggcctggaacctgcctccttccaaagccttcactcattttgtttcgaatccacctgttgctaatggcagtttgggccttagagtgcgaccctctgctgaagaagttaacgccttggttgcctcgctcggggaaattcctgatgatgaacggcaagtccactttgaggtacctttggatcctagtgacgcagaaataagtgctatgcttgatttgctggctgaggactcttctgatgctactcctgctgggacgttggtggtggcgcctcccccagaaactgatgcaaccttggatattcagagacctgtcagtgctcgcccaaaacg

SEQ ID NO: 55705 - DNA, 1036 bp, Zea Mays
caactccgtcgtgagggcgacagggacgatctgaagtgccatagcacaggcggtggagcctagtcgtcgactctagaaatccaaagagctgtcggatctgactggcatgtagtgtgacatcctctcgctcaaaatggaatctcatccactgatggtcagggtcaatccaaacggtggcgtagaacactctgacccactcctcaatatatctgccactcgcagtcagaagtgaaagcagacctggcagataagtaaggtgagcctctgagtcagcatcggcggctaacagaaaaacaggtagatccaaaagccagtgcgctcgcaaggcaatctgagttgtcaattgtgcccggaagaaggactcctgagtcctggtactgaagagtggcgcagccatagggtccctctgagctggcaaccaagactccatgggtacgtgtctgaaccgacgtacccgggcaacagtagcacgctgaaggtcgagcagacatggatcaacagccagcagtctcacctcagtctcgtcacgctccctgaagctatgtggtagaatgggtggagaggaaatgggagcgggagcagtggaagctggagtggtggaggtggtgggtacaacaaaagtagtggatggctctggagcaacaggagctggtgaagtgggaggtggagtagaggcagtggcagaaggtgtggagggagcagtggagcaaggccgagatgcgaggcaacgaactcaatagactatctgatctgaggaaatctagagctggcctccccactcagcctgctctgctgctgctgccactgcaagtgctgcatgagcggctctgtccatacgtcacttctttctgccctcctgctgctcaaggtaaactgtcttccctttgacctgcctgaaggggcaaggaggatcctcgtcgtctcctcccccttacgatgagacattcttcgtccgcaccatcctgacctaactactgcatgatagagttaaaggataggtaggagtagagagcagccgataggatctcaaataaag

SEQ ID NO: 55706 - DNA, 358 bp, Zea Mays
cactccttcagcacccaagcacatcaagaacaacacatcaccctgacactgctacaacgcattctagtgattctagtgatatccaagcaccattttgagttgttcttgtgacttcgtgtgtttacactcttgtggtcttctttcttgcattgtgttgctacgtttgctcttatgtatgtattctctcctctctcttgtgttgttactgagttgtaaacttcattaatatatgtacggctgcaagggactccaacctgtggagattccttgcgaggggattataatcgatgtaaggaagatcgtggcactcaagttgatcaaaggatcacttgagaggggttgagagcaacccttgtcc

SEQ ID NO: 55707 - DNA, 558 bp, Zea Mays
aggtattttgtaaggtgtgtccacgtgagcacgcaggcataatcttgtagagtgaaactgttgatgtaaaacgagatctctttattgcttgaatatatatacacaagttgtaatcacagggaaaagtaaaggacgttgtctattcatgcgtggagtagggatgaaaacaattttggaattctggaaactgtttttgatttttttaccggaatctcggaatcggtcaccaaaattttagatctaaatcggtatcggattctaccgaccctttctttctgtttctttcagctactgttttgatcgaaaattaccgaaatcacaaaccggaatttaccgaaaatatgctgcagcccagcctaagttgcgaaccttaggacttctttcacggactcacggcccagcagcctacaacgggttgttcacccaccggcctgtccactgtcctgggctcctcgctgtacacggagtcacggtccattggccatcgtccatcgctcaggccaggctcaggcgactccactccagactccagtccacgaaacaggcaccgcgagtcgg

SEQ ID NO: 55708 - DNA, 480 bp, Zea Mays
agaaaatcctcttgcgcctgggcacggcgtcgagcacgaggcagcacagagagtggtcaagttcaagcgcggattggctccaaatcttcataattatggccatgatcccattgagagatctcttcatctgtcatttctttgtcgtttctatgtggaggcttatgtgttttgttgactggagccaaagatatggagtgatgaagtttggtttgtctcactgctgaaaaccgagatgaaatcccagatttgacgcgtctacgacacgaatctcgatgccatcttctcacacgttgcagaggcgttaatttagcacaactttgtcaatgggggcttaaggatttgagctagggatcaaggtgaacgtgctcaagttcaaggtgagggctgaaattcagaattctgaattttcagatttccctattgagctgcacttggatggcctttttggggattttaattaattattttggccaaactttt

SEQ ID NO: 55709 - DNA, 1099 bp, Zea Mays
aaagtaagataaaaacagacctgaagatggtctgtcagtcgagcataaccctaaaatcagactgacagtggcctagaactaggtttgagagccattttgagctagatctgttgctcgattgatggttgttgctatagcataattgtagctggtatgaaaggctgcaagtttgctactggcgaattagcaagttcttatgtagaaatctgtgttctggacgctacaagttgggctgtcaggggcgctgaattgcgtttccgatggtacagtatcccgatcggatcgccagctcagtccctcgccgccgatgagccgcgcgcggattcgggttatcgccgccatgattcacgctcagaacagctggatagcgccgggggtcagtaaatatcacaccgtggatatgctccggccactaaattactccgaccaccgtacccgagctagttacggttgcttcggatgggttcgccggagattgccacctcgtggtcttgtaccacgtgcccaggcatcttaccacgtcgcggttagtcatgttaggcatatctggtgatcgccagaaggaccgccacagtgaaagccactaagcgcttgcgccagtgcccctcttcctctccggccgccgcgcgtcttcatccaattcaccggccaccgctcacggactctataaattgagcgcactgcgagctccataggataattacgcatccatagcacccacgcttgcctccaatctttcaccagagaccgtgcattgctcgttgcccccaatctccgtttccgccaccgtagaaacaccctgccgaggccagcttgctccaggtccgttcatgctccctgttctctcgttttagcatgcttgtgtgtccctgttgctcctcgacccctccaattgagctagagtccctaggatcgccgggaacgggcttggttaaccgtggtgtccgctgtcaccgtgggcagggcgtgttattgcgccaatggtgaaattagttggggggaaatgctccttaggactggaattaggtgtagaccaaagaagagcatcggtcattgagtaattcgaccggtgtgcgctcgccagagctcggctccccgc

SEQ ID NO: 55710 - DNA, 579 bp, Zea Mays
gcttactccaaggccgaagataatgctctgtttgcagccttcggtggtgggggaaagaaaataccaaacagagtttttgatgcgatcagcttcgtgtaccctgattaccgctacccgttgcgaggataggagaaaaagaggaagattgctgcttcggtcaccccagctgagcctgtgccgaagagcaaaaaggtgaaggttcttacccaccggccacgttacattgaaccggccatggtgcctgactttggcgcagggtcctcttcagtagccgaagcaatacaaactgctccaattgcacaaggcgctgaagaaccatctgtaatgccgaagacgcatatagttgagccagtcaaagataaggttgacaagtctgaagagccgatggttaaagagataataaaaatgccaaaaattctgagtcctccgacagaggcaaatctaccgaagatgcaaaaggcttctaccgcaactcctaagaggagaaggatggccaacgtactagatgctgtgctggaaactacaaaggtgctgagccctgctcctgtaaagaaaattgctcaagttgaagccaaatca

SEQ ID NO: 55711 - DNA, 393 bp, Zea Mays
gggcatttgggaaaagtcttgggagaaaaatacaaatttcggtaaaaccaaattacaaagttttagttcactaattaaccaacaaagtatagtaaggaagttttgccatttgaacttttcaaaatctttaaaccagcccctaaactattgcacttgggaaaaattcagaaattcagaaatctgaatttcagcccctttccaaagatcaaccacattctgtgtttttcaaaactcaaatcaaacaagtccaaatagcaaagtggcgccaaattcccttgaacacaccgtggcaaagtttgggaacctctctccaccgtttgacatgatcttggcatggttttacctcgggactcgaccttgtgacactaccacctttgcgacacgacaactctc

SEQ ID NO: 55712 - DNA, 776 bp, Zea Mays
tcagatttccctagagagctccacttggatggcctttttggaaattttaattaattactttggcaaaacttttctaatagatattgtgacttaattagtatatttcaacttttataattggcctaagccatgattccatgtttttcatggtgtttttaccaatttctttcttttttacttaaatggcccatttaaggttattctagggtttagacattttttccactttgagtgcatgatatgattaaggcatgattcttaagacaaaaagactcagttgaatttgtgttcccatgtttttggtgtcttttgctcaatttgattaacatgagataatggttcttgagttagcactgagaagaaactctaggaaccactggggtgttacaattttgacaatgcatttgttgctgcattgcgatccctttccacgtggtgaaattctaaaccctcgaattttccttctagcttccgcaccgcagcacagtatttgttcattgagtcggttgagaagtgatagtccttatatacctggctgatgactactagcgagtcgttgtataccattaaccttttgacgcctagcgaaatggtgatggttatcccgtgaactaaggcttcatactctacagcattgttggagactgtaaataggagctaaagcgcatacttgagttggtcacctccaggggcaatgaaaaggatacccactcctgcccctgcaatctcaacgagctgtcaaagtacattttccagactttagcagcttctgggtt

SEQ ID NO: 55713 - DNA, 277 bp, Zea Mays
tagctttggaagcaatagaaaaggacaagatcatagtagctagggcctacaacaagaaggtcgaagcaaagtcatttcaagtaggggacgtggtgtggaagaccatcctgcctctaaggagtaaagaccgaaagtttaggaaatggtcgccgagctgggagggtccatataaagtaaaacaggtaatgtctggtaacgcctatttattgcaaacattacaaggcaaagatttacccaaagccttgaatgggtgtttccttaagcagtaccatcctag

SEQ ID NO: 55714 - DNA, 512 bp, Zea Mays
tccccgaatgtgatgtattccttaccaatcatggggccaaggctagagaaccatttggagctttcaatcatgtggcgcgaacagccggaatccatgagccacgtgttctccaagcctctgtcctgcatcaatagtaatacacggggtgagcaaatggcacaacattggggaaagtaaactgtgaagaatactagtgctgtggcatttgcccctaaaaagtgtttgggaaaacactaaacatccccggtctcgaagggaagcgatcaccacatgaaagaaattatggtccgctggggaagtaagaaccaaagcctctgtcacggggtccttggccatatggcacacaaccagcacctcatcagtttttttttttacacgtggtctcgctgcctgaggcctagcagccataggcaaaacacctctaggcctcgcaggacatctctgaacaggctgagcatgaacaccatgagaggggcggttcatgtccttcctgctcgactcagaaacccgcc

SEQ ID NO: 55715 - DNA, 382 bp, Zea Mays
tgcttcatggtctactagtgtgataaatgcttttaggaccatagacccacaattagaacaaattttagacaagagtgttatacctcctagctatgataagaaaaatgcttccgaggaagatcgaagatgtttacgcttaaattatcttgcttttgacatcttaggtaaatctcttagcaaagaagattatcgtgccttcataattagatatgatgaacctattcatgatgcacatgatatttggactagaattaaaaatagatttgatgagtccaaacatgttagttcatatgatgcttctacttcctttagtccttgtgaacctaaccctttaaaggaagaagaagaaaatgaacattggagaccaaacgatgaatccgcc

SEQ ID NO: 55716 - DNA, 627 bp, Zea Mays
attaagccctgcaaaaagaagggagataaaggatcagcacgagaataaaagacaaaggataatctatttaaaagtccataacttccgtaccttcagactattgtacgcaaggctgtctacgaggtcatcctttgacatggcagagaggccagcttcaagtttcagaaatcccatattgttggccatctcccggcaaacggatatttccttgttgactgggagacaatataggaaatcatcttcgtcggtgccattgtacactagggccccctttgggtatttcagttcccaggcgtagtgtttggcttccacaatttcttcttcagacgacctttaacccaaagcatgtcgtataataaagacaagatcatcggagggtgcttcgggggtagaagatttaactttttcgagcgcgtcttttttcttcaaaaccacaccaatgtccgaaggtccttcggttctttccttagttccagtatgctctgcctcagggggcactgagagtccaacttcgggtttggcacgagctgtagcagcctcgacaattatggctccggtggtcctaccgtttcctctcggtctagcttctcggttgcctttcctttagcttcggcagtatgttcctgc

SEQ ID NO: 55717 - DNA, 360 bp, Zea Mays
gcaattctacttgcctctcaagcatggcatttttcattctaagttgagcaacacaagataaagcatcatcatttctactttgctcaattagaattgaatcataccgttggaccaagacatcatgagagcaccttagctcctcatgttctttggtcatcttctccaggctgttgtttgttttgatgagagtctcctctagcctgagaagcgtctcgccttgttccttgttccttctcaacagcttaatcaagagcgctttgtcttctttgttgagatgggtgtataaacgtcgaatctcctcttcttccatatcgtcggtctcattttcactgtcattaatattagtggaagcaaaacggg

SEQ ID NO: 55718 - DNA, 596 bp, Zea Mays
ttctttgcagggcagatgcgtggtcgagtttgacctgtacttctcaagtattggggagacaaggatgctgatatgagaatgtataagtaggctgccacactgtactatattatataataccataaagcgtgtcaaagaaagatgatagttactataaataattgatgagtggttgtgtgcatatgtcgtctcatatctgaaggtgatcaaattgttagtgctcgtgcatgtgctgattgaaactgaaacaactgttggcggtgatgatatgatgttaagatttacctagagatagcttgttaagatttgctcttcatataataatatctcatgtaatatgctcttctctataatctgtccctatttcactgtctctttcatgcttatcctcttgatataccattgaacataaagacaaacaaccttaagaacactaatattttgttaaatactttgtatattgttgcccgttgcaacacactggcatctaactagtacaaaatatgtgctaaattctaacgagtctcaccccttcttctccccacacaacgacctattgggatccctctctcaccctatctatccaactacctccc

SEQ ID NO: 55719 - DNA, 629 bp, Zea Mays
accctgttattcgtgaccgcatcgagctcttctaccctcctgcctccgtccaccatcaggagggtcaccacaaccaggccatttgtgttccgcaatgtcgagattgtctctatgacgatcgaggccttgccgtctccaccacccatgctcgctgtcagcatggtcaccactagcgaccccagcgcccctcccggtggctctgtggttacgccaacacctagctgagctgcaaactctactgcgcgctatgacgctgacctattataataatattagcacagtttacatgtcttccaatcctattcagcatcaacgtgccaaacacattgagatttatctccatttcgttcgagaaccggtggccttggggtctattcgcgtacttcacatttcgacgacgtttcagtttacagacatatttagttatttaccaaagggctcccagtttctatcttcacgagtttgggtccagtctcaacgtttgtctcatcgacacttgtgactacagggtggtgttagactagcatattgtatgagtacacgctaggtatagcaggcagactcgtgtatatagtagactgccatatatgatgtgtgcatgtatgatgtgggtatgtgctaggtataac

SEQ ID NO: 55720 - DNA, 700 bp, Zea Mays
ggggatcaatgtagcaacacagcacaggaatcgctctagcgaccgtgacttggcgcaaccagtcgggatcgagtggttgtgctgagcagcaggcggagatggcgggtcttcgatgacacggcggcagacggcgtttcgtcagggaatcggaacaggggcattcgggaaagcttttgccggatagtatgtggtagtgctgggggtcaaggaacagggctcctgcgaggtggacgtgcctgcagcgagctacgagcaacaaagagctggaacacaagagaagagcgagcgtgggagaggaggagaacacgcccggtgtcgcgctttataggcgagggagaacgtggccttgatgaccattgaaacgctaccatgaaacgttcgcagctaatgaatgctataaatggcagcttcaacacggcgcaagaaacggctgagaatccgaacgagcgcagccttgcgcacgcggcgctggtgcggtggtagagcggcacgtcagcccacgcagggaatcggcgagcggcgatgcagcgtggcacacaagctagcacgacatgctgcaagcgagcgagtgtgagaacgacggtggaaaagataaaatggttgacacattggcctcgtatggcagccaacaagagagaggagggaacattcgttgactaggcctagatgacgtccaggatttttttcttttctttgtttt

SEQ ID NO: 55721 - DNA, 590 bp, Zea Mays
cgtgtctataaatatttttagtaggagggttagaaagtaatatgtacttattaaataaaaataggtaatataaaaatattaaacaagacaaacctcactaatctgccaacaacaagtgcgtgaattgtgactaagtctaacgcacttgccacactcatattgttcgggggtcggtaagaaatggtgttcctcttctcctcctacttctaccagctatctgatccataaccataccgtgtctcgtcctcttcctggatccacgcttggtccaacgactgcttggatcggcaacgtactttgggccatcgtatggaggtcactcacccgggtcacggtaaggaataaatcgtggactccaagtcaacacaagcttgtcaatagtaaactcttggggtatcctcctatctatgtcaaagttgcgagctcgggcagctgcgataagatgagaacatggaaaattgtactgcctcggtgccccacaagtacatgacaagtcattatggagtggtggtactgttctctctatgtcggcatgaactatggatgagtggtggtttagtggtgtaacctattggagaaacatttttctg

SEQ ID NO: 55722 - DNA, 651 bp, Zea Mays
ttttttttgggtcatacggagggagcaatagatttctttgatgacgtgcatgatgacacatgtattgacacacctgatctagcgatctgtttcccattaaacaagcaacacgttgatcctatacatatgtaactgatgatgtcaacgcgaaggaccggagcagggaactcggtctccaacactcgttgttgactggcccattgcatattattatcatatcctcctgatggcgtctgcaattaatagtagaacagtgtaccttccaactggatgcacatactattgtttaatcaagctgtccttcaggtaattaaacaacagatcgatgcatatatgcatgacaagcacgccctgattgggattcattgttactttaacgacatggcacagatgcgtgtgtatgtagagtgaagcagcagcggcgacggatcggaggggagagatctacgtagaaactttgacatgcagagatcgatcaagccacaccaaattgcaacaaactagctacagctcgcctaacggtgacatgtggtggacaattggatcgtgtaaagatctggtccccatttctttatcagattctgtttactaactgctacgatataacattatataatatgctcatcaagttgcagttaactaacatgtctc

SEQ ID NO: 55723 - DNA, 471 bp, Zea Mays
ggtttatgtggcactcaactttccaaatttagtctctcttgaacatctccactaatcttttgagaacatactctaattattatgtcacacacacacacatacctctatcccttggttaagtaccctatcctagggttaaggatcccttcaagtcatcacatcacaacttgttttgaagttttagcctagtggattcactataagtgtaacatacataatgaaatgccattgcatatgatgccatgcccaagttttagttcttgtaacaccaggggtgttacagtgcgctgctatactcctagtatggcgtactgctccatccgtccggtatactagtccctatagcgagttcgatgttgatgttgatgttgcggcgcttagcgggtcccataaagtagactttacggtggggttcagggtcgtggttggtgtggctccgttttccatcatgtcctgacatcttttcccgac

SEQ ID NO: 55724 - DNA, 420 bp, Zea Mays
tgctgaccctggctgcatgttgcacaaaggtctggtcattccaaagcttaaagccagcgggcacatgacaatcgtcatcagtttccccctcttcttctcatcggccttgatataaaaccattcactcttctagctggttggccatttggtgcggtagcaaagaactggagccttcgtattcttgcgatacgcgaaattatagcagccaaaattttcatgcagaccgtctgccctggccttcgtttggtagtgcaactcatgcactcggcaaaatgcttcgccatttgggtccatcacttggcttcggagggcccagatgaagatgccgagcctaatgatagcgttatgggttagctgatgaagataaatttcaaaaaaattcaaaacttctcctatcatctcgttcagaggaaaccgtaa

SEQ ID NO: 55725 - DNA, 501 bp, Zea Mays
tagctaaaggaaagcaaggctagaaggttgtgagttgaatgaaaaggggtaagatttcatgtataggcctatttaaagcatttttcctactcctctctctctctctctaatttaccatatgaagaacccaaagtgtcgcaaggcctacactaaaaggtgagttgtatgacacgacagacttacaaaaaaatcacccaaccactattatgatggcaccaaatattcctattgtatatgatgggacgacttggtcatgcatgcttagggctcgagctctcgcttgaaaaccgggaatttctgaatttattttccaagtgggaagatatgggcaattaaactccatatgtctaatcaattggttctaggcccaatgattgtgatgtcttgtcaaaggggtgtagtcatacgacaagactgctaccggtgccttggcttttgagtagaggttggcaattagtggcaactggcctcggtggcatagcaataagtcatagagacgaa

SEQ ID NO: 55726 - DNA, 461 bp, Zea Mays
gaggccggtgagcgcctcgatttggaggtcgtcgaggcacagtgtgggctacggacgaagtccgattacgatggcgctaggtggtggaggtcgtccaccacctggagaaaccgctccgcctcagcgtggttagctgcaccgtcgaacaacatctggccatccccgtcggccgaggacactgctgacgcagtggaatcccaccgcatgatcatccactctagagacgccacctcctcagcggcggatcccgccatgcttgtcgtggatccctccatgctgtttcaagtttggacttttttcatgatttctggttcttggagcatgtgtcatgagtaacattctacctaggcatgatgagttgagctgtgcaaccaacatctctgctcttgccgatttcgcattggtctgtcggtgcttggttctctaaatcgagctttgtgtgatgttcatttagaccgtgt

SEQ ID NO: 55727 - DNA, 660 bp, Zea Mays
tacctttgttcctccttttccagcagcgacagcggcggtgtgtccataactggtccacgacgcttccaaggactccaagatgtcgagcgttgattgctactccggcaataatctatctgtttctctctctcccctgctacctcaacgctattggcgattgtggacacaactggttctagcctgttgggcacgagcgttcgctatttatcctcagggatgagcatcgaatctcaacgtcctttcctagattctagcggatcgcacagccccggttgttatggtcgagcgagcgtctatcgcttggttggttgaagacgtatgcaacttggacccacctagcgatgacacggttcttggtgatttactggccgagcggcccatgagccagcgtcccagcgagagcaaacaatcatagaaaaaaacaaggtgagaaaaaaaattggctaacatcaagatgtgccgtgtcacgtagcttgtgtctagagaataaataaaaataaaaacaaatgagaaggtgacgtgagaggaggccagagaagtttctttctttttttattttttttcttattcctgttttactatatgtttttaaatccttatttcaaactaaaatcttgttataagtttcgagcatagattaaatacacaattacaaagttc

SEQ ID NO: 55728 - DNA, 425 bp, Zea Mays
aaggcggcagcggaacgcatcgcaaggcagtcagcccactacaccctcatagggggcatactgtacagaagaggtgcggcaggagtcctcatgaagtgcattcactctgctattgggaaggaactgttagatgaaatccatgccgggtagtgcggagtacatgcagcgtcgagaactctggtcgggaaggctttcagatctagtttctattggccaacaacgaaaagtgatgctgctgagttagtccagagatgtgaagcttgccaattcttatcgaagcaacaacatttacccacacaacagctgcagaccattcctgtaacatggtcatttgcatgctagggggctggacatgatcgaacctttcaaaaaaactcagggaggctatactcacgtactggttgccattgacaaattcacaaaat

SEQ ID NO: 55729 - DNA, 545 bp, Zea Mays
ggttagtggtcacaaatgttttggatgaatcgtacaataatttagtagcaacaaaataataagaattgaaaaagagattcagagcaatgtttagtttactatattttcatcagcacgataggaaattttcctttgcttttccttcgcttcatttctagggtaatctaatcttgtcatctttacaggatgggtgatatacaaaatgctatgtagtgacttcaatgagcgtgatttagtatcatccgaaagacgacaaaaagatcaaatatttatcatatctatattccaaaggcatgaataagttttttttcctataggaattagaatcctacacttttcctaaaaaaatccttcaatccagaaaggcccttaacgggaaactgaattcagtagcatacatgaaatatgttttccaaaggtaacatagagaagtttgaatttgaatcatctggatccagctccacgtatcctagcatcagcactcagcagggtccgaccaattggcgatgatatacaacagtacatgactgccatcaacttgtgaa

SEQ ID NO: 55730 - DNA, 383 bp, Zea Mays
gtttccctgaacaaggattcaggtttccttgaaaaaggattcacatcgcgtgcagcagttaccttttcgcattctctcccaatcggttgcgtccctttgcctttgtgctcccttgctccacgcccgcgccgccgcactcgccatggcttcgcttggtcatcctgattgctttcagtctaaggtagcgcttaacctggtgcgttgcctgcttgggtagagcgcaccagggctcactagaagaatccgtgccgacgctgcccccctcggtgatctcgccgccggggagttcatgttgttcacctcctacatctcttgcggattggcgctgccgatttcgcctttctttctactgctgctggaggagttcgggcttcagcttcaac

SEQ ID NO: 55731 - DNA, 554 bp, Zea Mays
ttggaggagatggttcagattgctttgctctgcacaatgtacagatcttgccaccgccccaggatgtctgaaattgttaagatgctggaaggaggagatggggttgcagaaaaatggcaggccatgaaagatattgaggaaccaaaccccgactcgtcatcagaatttgtgtgcattggtataaattatgacgtagacgagtgcaattcaatcgagcttcaagccgttgaactctcagggccaaggtgatctgactacagcttgtcatgtgtatatatatgtaaagatcattttgggactaacaacttgggaagacaaaggaagcgtagggatgcttcagactttcagttgagtaccgtgccatgtctataatgtctctttatgtatgtggcttttctgagaagacctgtttatggcaaggcggccttgctggacaaaagttagtaataatgaaatgaactggattatatatgtagataaaaaaattaactagtagaatcctgtgttctgcgtctgagactttattactactctttcattattatattagtttt

SEQ ID NO: 55732 - DNA, 416 bp, Zea Mays
gacaaagaagggtactagattgttacacgaatacctagtatcagctacaatactatataaaaatgcagagataagcaccaagctgaaactaggtgcgacacagcgacagaactaagcctagccatgataagggtgaagcatgcttgcattggcagcaatccaggagctctaagcagcgtagccacttaaattcagtgctcaactttaccccgaaagcgcattggttgcagtaatttaattgcccgcaggttctgttaaacaaaccactaaaaaagccacccttcactttacatgagcagcgtgtgacctcatcatgccttgtatagaaccctaacattccactcgtgccttgcgccaagtctaccgtgctcgtgccgttagggtcttagggatcgtcatggaaatgggtcaggaac

SEQ ID NO: 55733 - DNA, 342 bp, Zea Mays
ggctgctgctgcacctactgtattgctgctagggtctgaccaattgcttggactgcctgagtttgcataatgaacatctgctcaactgtcatcgggggtggcggtggcaactgctgctgctgagctgcatcttcctggggtgcctgctattccggctgagcatgccttgcacctctgcgcttgttctcagacatctgtagaaagcacacacacatcagatctgactctacagtctttcagcacaagaaaagagatacgaaaatctttatagcactgaacaattgatcatcttcactgacagcttctcagataaagaggaaagtggaaataaatggattaccc

SEQ ID NO: 55734 - DNA, 702 bp, Zea Mays
agccttgtccagaagtctctagaaagatggaaaggtgtcagacattagctgatattggagcggcccaacaagtccttctaggaataactaatgcttcttctcatcatcagtgacttctacgggtgcatatctagacagctggataaacttgtccctgtactcgctcacagaaatccatccctgcttgagggaaacaactcctttatcttcatcaaatcgacaggaatatgataattcttgaagcttgtcgagaactcaactcaagtgatggtgtcagtggcagcatgtgctacgcaataagcatcccaccaatcagcagcggggccaatgaggcgactcgatgcataaaggaccttttcccgatcagtgcattgcgcgatattaagcattttttcaacatatttaatctagtcatcagcttgaagcgtggcttatggctcatgaatttgcggtgtttgtctctaggtggtggttggtgtgggtgatgttgattattgttgagctgagcctgcatattggccattgtattagccatttgctgtagtaactgtgtctgtgccgtgaagaatgcttttgaccctactggtagaggatttggtggattcatctacgattctgaattaattaatgtcgttcttcgacatatgcgtgtgggcagatcaacacctccttctgtcttggtattcaccatctagggttagg

SEQ ID NO: 55735 - DNA, 296 bp, Zea Mays
ggaaaaggcaatcagaggggatgaatgtgagtctcaattattctcaaacttgagcacaccatacttgattctagaattcaatctagacccttggaacaccaaacacacttcagcaggaacaacccaatgcagtgtcgattggctgcaccaaacagtccagaaaagcacctgcagaaccaagaggcagtgtcgcatggaggttcggcattgccacacgtcagagcagcagcgccacacaaccaaaaaatggtcaaaataaccccaaattttgcagacagcaaacgcagaggaagaag

SEQ ID NO: 55736 - DNA, 482 bp, Zea Mays
ctaaaaatatatatattgatgaaagacttgctactatcttaagagaagaggaaatttgtttctttcagtgagtgaaagttaaacatcttcttgaaggggacaataacactaaatactttcagtcagttgtcaatagcaaacatcaaaaacaaagaatttatagccttgaggacaatgacgggactcgtattgaagaggttgacctcaaaagccatatcactaatttctataaaggcatgtttgggaagccgaatcaaaactcaatatcgctggaggaatcgattactcacaatatctcccaggtttcagatatcgaaaatgcaattttgatggcgcccttcattgttgatgaggtccgtgaggctatttttcacatggaacataataaagctcctcgaccatatggtttttcggctgagttttaccaggtgttttaggaaataataaaagatgatttactagccttgttcatggaatttcac

SEQ ID NO: 55737 - DNA, 754 bp, Zea Mays
acaagcagctggctgggacgatgagccatttttagagggtgttgccgaggtgcaatctggtctgtcttagctctcggcagcaggtgtcacctctttgatgagttatgcacgcttctggttctaggacacctcccccttagtttttgactcttgcgtgcgtctccaagttcttagtcagttgtggaagcgtcaacacggaagtctgagttcattcatcgctagaaggagccacgagagcatttttgcgaggagctctagaaggaaaggaggcgggcaactgaggctcttcttcgcactgaagaggctgagaagttttgcgacgaatcggtccaggcagcgagaagagatcaggaggctactacccagacttgctttgagggacggcaggtcgcgacgcatttttaggcgatggagagatagaaggaaacgactaaggcccaaacttcgtccttcaagtgtgaggtgacgcgctggatagaggaggtggagtgtctgagggcttctctcaaaagtaaaaacccttccttcttgagtttgtgcaagatctggtgcttaccatttttcttgctagtgtgtttgacaaacttaccttggtggagaacggcctcatcgaggcacaacaccgtttgggggagcttggcgcagaatatggcgacctttcgagggcagtgttgatgccatatgcgatcagcttgcggtgtcattgccatccgaaccaaggacatcgtccagccggattgggcgtattgccgat

SEQ ID NO: 55738 - DNA, 754 bp, Zea Mays
tcgggcggattccagcgtaaaacgtgagctaaaacagcgtaaataagtacgaaatttagcgtaaatcatatatttgttttgtaacagcaaacgaagcccaaaattacggcgtgaaaatcgcgtccacccaatcgtgtgctggttctggctagggcagatttcggcgtaaaacatgagctaaaacagcgtaaatgaatacgaaatttagcgtaaatcctatatttgttttgtaacatcaaacgaggcccaaaattacggcctgaaaatcgcgtgcagccgatcgtgttagggttctggctcgggtggatttaatcataaaatgtgaatcgacataacgtaaatgaatacgaaatttacgtaaattatagacctgtttcgtaacagcgaatagggtccgaaaattacggcgtgaaaattgatcacgttcgatcgtgcacggattttggcttggtcaaatttcagcgtaaaacgcgaaccaaacagcgtaaatgggtacaaattttatcgtacatcatcaatctatttcgtaacgacgaatgtggcctaaattacgacgtgaaaatcgcgctccgatcgtgctcgggttctaggtcaggtggatttaagcgtaaaacgttgtccgaaacagcgtaaatggatacaaattttaccgtaaatcaatgatctgttttgtaacgacgaatgtggcacttgctttttagtggaagcgtaaaatgcaataagagctatcgtaaaattttgtttgaaaatgtat

SEQ ID NO: 55739 - DNA, 488 bp, Zea Mays
ctaccccccttaaaaataatctcgtcctcgagatttaggaagaacgaggaaaaagatggggaaaatctatacgaagttcttctctctcccaagttgcttcatcttctccatggtgactccattgcactttgcacatctttatcaccttatttcttgtaactcgattcagtgtgtcaagaatcttgataggatactccgtgtaagtcaaatcaccctgaacactaagctcttccattggtaactgttcctcagggacacggagacacttctgaagttgagatacatggaacacattatacacatctgatagattatcaggtagctcgagttgataggccatctctccaacttgcctaaaaactctgaatggtccaataaagcgagggaacaatttgcccttaactttaaatctcctcattccacgaagtggtgacaccttgaagtacacatgatcaccttcctcaaactccagtggtcttcttctatta

SEQ ID NO: 55740 - DNA, 592 bp, Zea Mays
cggtgcatgtactcactcaaaactagtgctaggtgtcactcaatagcccacaaaagaattggaatcgaaatcgatttagaaaaacctgagttagaacaggttgtagctgctctggagcaaggactaagggggaacgatatccttgcgcgagtgctccaatgaggactagtggagagtgtcgactctccgatacctcgggaaaaattagaggagttttctagccctttctctagttttcgcatttacttttgagcacacaccccatgacgacttatggtttgcttagagtttcctagattttgtgatctatctaagtcgttgggtgaagttaggctctcgtttagggtttaatcttttgcaagaaaatttagagaagatcaatgcacccacctcttgggcattatgatcctttcaattggtattaaagtcgtgttgctcctagtttagctttaccgctagagtaatgatgtccgatggggatgaaccttgtcccatatttgatggtgacgatttttcatattggaaaatttgtatggaagcttacttagaggccatagatattggagtctatcgcgccgctacccaaaggttc

SEQ ID NO: 55741 - DNA, 869 bp, Zea Mays
ggagaagaacggtttggattgaaaggtcggattaccagccttgtccgtttttcacatccctgagttgatccttcacccgcatatctttttggctttccctgtctggaatttttggcttccactgatagtgttgtgctgatagctctgctatatgtgagatctaaacacgtagccattttgcgctggagtctatcatttaatcccctcatgaagcatttttctttttcatgtctgtgtccacttgatcgatggcgtattgggagaggtgattaaatttgttgagatactgcatcacagaatctcccccttgcttcggacgtatgaactcttccagcttcatttgtagcactcctttcggaacataatgctccctaaatgctagtttgaactcttcccacgtgacctggtgtcctgcaggctggatggctgaaaaatttgcccaccaggtgctggtagggcctctcaaatgttgggcggcaaataggggcttctgtgtctcaatgcatcggatcagcccaaatttttgttccatcacccgcacccattcatcaagttccaggggttcctccgccttgacaaaaagaggtagacgggtctcagagaactctagatatgtggtatctcatggtccttgaggttgacctcttcctccgtgttgctaaaattgatttctcgccatttcacacatgaagcacgtgttgtcggtggtagcattgactaaggcaccgatagcctcagccagtataggaggtacaggtggcgggttgggagtgtcctccccgccgcgggaagttcccgccccatcatgagcacgagttcacgatggattctgaggaagaaaaaacatcctgaattattacatgccaaac

SEQ ID NO: 55742 - DNA, 1196 bp, Zea Mays
gaggcccctagccatttaaataacccataaagaatccctcagcactattcacatgtcgctctgaccaatgcacttaagcccctggatttctatttcttcactaaacaagtccccggcgacgacacactcatcctctggccaccccttcgctgagattcacttcaaacagcgacgaccaccgaaaccgagtatcagatcatcatccccgatcccagatgagcctagtccatgccctaattgaactaatctaacccggaattcccctgcccacgacgacggcgaaaaccgaggatagaccgagctgttctcgacgaccaagcacggtagcgttcaatttatcgaatctacgagcaacaggagaccctaaggatgctagaacacgaaccagagaagcacgaaccgacctatggatggctggccacgacgaggtgtcttacggtggcacgactaaccgaattggggaaaactggaattctcgggctacggtggctaatcgagggcgaggactggtgcactagctccgtaacaagttagtggagcaggccaaacactcaatttatagagggcgaccaggagtacgacgaatttggaaggagaagagcttgcggtgataagagaatgagtcacaaaagttcatctattgtggcacccgctgatacattggctcaagaaaggtaattccaggcttgccacagttatagctacatggtgaaagggtcacgacatggtgcaatcgcgaggaacggcgaccaccacggcgatgaccatccgaccatgtcactacacaagtggtacgacgaactgagtagtaacagtgcccaagctcatccccacgccgagatcttttaccgcaagccgttatccgcgcgccactgggcacgaatcgcagcgccggcatggatcacgatgtgggttcaccggcggcgagattcactgaatctgtgatcttcttcaggtcactgtgccatggaaacctccttcaatgcgcctgaaagagcaagttagagggctccgttctccatttttcttgtggaaagctaccaatccatcagtagcaaagttgttgctctacatactagctttgtttttgttataaagatattgatcgaatactaactagatcatgcgaaatttgacccccaaagttcatcagagcacactgacagtcgagtttcaatctctgatttgacttacag

SEQ ID NO: 55743 - DNA, 597 bp, Zea Mays
acgggctaagcatcgccatttcactaggcatcaaaaggttaatggtatacgtcgactcgctagtagtcatcagccaggtaaacaaggactgggactactcaaccgactcaatgaacaaatactacattgcggtgcggaagctggaagacaaattcgagggttttgaatttcaccacgtggaaagggatcacaatgcagcagcaaatgcatagtcaaaattagggtccagtcgggcccaggttccacctaggattttcgtccaagaggtacaacaaccaagcatcaccgcagagcatgctgaagaatgcaaaaccatagaccaagcagaaatagatcccaacgactggagagagccaattatcaggtacataaaaatgaggaagaacctgaagacaaggtcgcggtagaacacatcgcaagacagtgagcccactataccatcatagggggtctgctatatagaagaggtgcaggaggagtcctcatgaaatgtgttcattcggctacaggaaggcagctactagatgaaatccacgtagggcagtgtggcatacatgcagcatcaaaatcattagtagggaaagccttcaggtccgg

SEQ ID NO: 55744 - DNA, 430 bp, Zea Mays
gtatttcagtatcactggtgtacatagattatagatgagctatggggcggtggagggtgagttctcctgctaagctagtggtggtgtggttgttgtgagagggctaatgagctatgaggtggagatgggatgtgacgagatgagatgagagatgccttcgtaggggtaccccttcgaccttatatagatggctagagggttatacctttacaagtcgtgatggctatcttactctatctgagtctatccttttaacgcgacatgcattcctccttatccgaagttcagttgcccttcatccgagttatctccgagtatttagcactttaggtatgctcaacctctctgccagaggcaacatcgctccttctgcgcattattcggttgtccagtcttcgcctccctgggtcgagcttatctagcctggttg

SEQ ID NO: 55745 - DNA, 542 bp, Zea Mays
cgagtgggccgcagtgatgagggtacgactccaggttcgccacatgtgggaatcagtttggtatggcgacgtcgactattcaaggatcgacgggcgctggatgcccttattgccgcagtcccgtccgagatgcagttttcgcttttccagaagcggattgccaaggaggcctgagatgccatcgctgcgacctgcattggcagcgaccgtgctcgcaagaccacaaagcaggcacttcgcaaggcgtgagagaacctggccttcaagccaggtgaggatgttgatgactttgctctccgcctcaacactgttgtagaagatggtgcagttcggtgatgtcacctacgatggatgagagttgttgagaagctcttccgttgcatccccaagaagtacaagaagattgcttgctcgatcgagtctctgctagacctctccacgatgacgatcgaagaggcgatagatcgtctcaaggtcgtcgacggcgatgaaccataggttctctctgggcctatcatcatcggcgggaagctacatctttc

SEQ ID NO: 55746 - DNA, 394 bp, Zea Mays
atctttgagggttacggtccaaaatctttgtcaaatgccctttattaagccctttgcaaaacatcctttatcaaccacttttttcttataaaataaattaaccaaccagtccagcattattgccgatgcaatttaaagtggtgaggtccgaaacattttaaaacttaccggtagaaagggtagctgtttcacgccctattttagggatctatttttatagcagttataaacacgataccaggtttttagcgtaaaaatcagcacgtttgaacgtaaaatagtatcaaacatagcataaaatcttatttctgttatctttcatgcaggactcattttatggaaggtacaaccatcacccaccagatgtgcatgcgtttttcgatttttatggcag

SEQ ID NO: 55747 - DNA, 939 bp, Zea Mays
gtttagacagatttggggaaaacttcaaattggagagctctggtgagtaattggaggcacggcttagtggattgggtgcttgactaccttacgaacccgacggcacactcaatttataggctccgagtgcggtggcgcgtgaatttgggttggcgcggtggcggtcggagaagaaaggggtcactggcgctcaagattagtggctttcaccgtggcggctctccggcgatcaccggatatagacgacccgagctattgcgacgtggttaaaggcctgaggcgtggtgcaatcgtggtgaacaacgcggattccggtgacagccgtaaggccacgtcgccggcgcaaatgactgagggacagcgcggccacattgtctcggacctatccgcgacgtgatcttttcaccggcgagctcaatccacagacccgaagcacaaatcgtggcgagcagcaccaatcacagcgaagggtcatcggcggcgagatactctgaacctgctggtatttgtgtgcactgtaccatcaggagcttcttcagtgagtctgacagatcatgtttggggcgaatttcctcccgattttgtatggtgactagatcaatgctctgcagcaaaattgtagcctaatagaccagctttaactttgttacagtgtgcatccacaaaaagtcacaggttcttactcaaaatcgagctctaagttcatccaatctcactgacactgaaagttcagacttaaggtgacatgatagcccgactttggatcaaattttctcaaaatttctcatggcaacaaggcataatccctatagcaaagttgttctcctatagtagctctacaaacttgatgtgttgaccctaggcaaattcctcgtaatttggaagatacagggttctaaagttggtccaaatgcactgattttcaaacttagctatatg

SEQ ID NO: 55748 - DNA, 363 bp, Zea Mays
aaagtgctcatggtccaaaatgaagatgtaatgctaatgaaacttactgcaattggtttatgccaaagggatacacgcagcagaatatgtctgtaggccatctcctggctgacttaatgggatcaaattagggccagattgagcatcaggcacagttggcacgtcatccacagcacgatcatagtcttcagggggacgatctactacaaccgaccgcatcataacctccatgagttgcaactaggtcttcatagccgaagtaacgtaattatcccaatccagttgagaatcaattgggatgactcgtcttatgacatttggtggatgaccaatgttaagcactccatcaaccgcaatgtcatc

SEQ ID NO: 55749 - DNA, 545 bp, Zea Mays
gctatggagaatacaatctggatggatctcctcccagctggctgtacagaaaacatggtcgagtttaacaagtgtagggacatttctctcatttgaccaagtgaatttcctgcctaccaacgggacttcttttagctccaagtcattgataagtctcctgaatctgccgatcatggccctatttatattggcattatttttgtcttctgagctgtagatctgattgaaatctccagctattacccaagggccagcgcatgtctccctgacttccctaagctcctggagaaaggaatgcttgagaggatcttggtgtggcccataaatacccgtgaaccaccactaagcaccaccttcctcttgcaacttgactgaaactgtgaaaccatgcaccaaactctcaatagcagaatagactccatctctacaggccactaaaacacctcctctggttccttgcgctggggagtacacgaagtcactatacccagcaccaagaatagataggatgtcaaaagccgagatagagcatagcttagtttcct

SEQ ID NO: 55750 - DNA, 522 bp, Zea Mays
ctactgatgatactaattttgtggcggcttcaaacgcagtgcctgttagtgatagtttgtctggttctgaattggggtcttggtcatctgatggtggtgagtttgggagcccgttttcctagactgaagagtcttcggatgaagatttggattattttgctgcgttagatgtgtccgcggcggagtcctcaccgcagctggaggtgggcgaagcgtctgatcccccggctggtgtgaggaccaagcgtcgtcgacgaaaagtggtgtcgaagcatagcgttggcgagatgtcgcgaagtggtacgcacagtcggatggggatggaacaaacccgccttcgggtagatcggggtgggcaacgagattggttgtcctcatcgtgtgggacgagtattggtgagggggatctgtgaaatctttttgagggtgaggagttgaaaatgatgttgtttaattttcaggaggcgggccatatcccgaaggctgagccgatgtagcatgtttgctgccctcactcttgtc

SEQ ID NO: 55751 - DNA, 452 bp, Zea Mays
catggtcccgtaccctaagcctgcacgctccaccactctgcgacgggcgtcctagtatttggaactgtgatccaagggatctgggcatacaacttggcttcccaggctcaatcttgcaggtcctgttgcgtgaatcagaggatggctgataccagacgatgggtcctatgggtgtgctactaacgctccctagccaaagctgtgtacaggtccaggtcccagtcgaggctacctcctgggggccgttgccaactctttcttaggtctactggtatccagcctcgacacatcaagcctacatcctaggggggccaagtaccaggaaggagttggtaacgccacacacaacaaggacaaatagtatacatataagtgctaatactgctcgataaatagtactcaaaagtatcttacaaaaacaaaagttattacatccgccttcaagcggagcc

SEQ ID NO: 55752 - DNA, 627 bp, Zea Mays
attatggtcttctctacctctcagtggatttcaggaaggaggccaactagggctacgccttcataaacatgacctcgctagaggtgttgacggccataggggccccatgggggcctaccatgcgcaatcgtgggctttcaagggcagcaccaagacttgtgtcgcccactatgacagtcaccaaccaagctccatggagtttgaagttgccgccgtcgaccattgctcaagctccatcctcggccctccatggaggcaacataggctcttgtccaaccgaggaacccaacgtccgacgtcgctcgaacggttaggtcggccccgtaccttctacccataaggtagtatgagaatgaactcttcctttgtaataggatagcatttatctgtggactagcctggtgaggtctatccacataaacttgatccatagcgtccatcatacagatctcacgtatctagttataaaggaagaatttgctctcagttcaatcctaatgtatcgattccttttcctattttttacacatatcatttcgtctaccccccatgcaagttctaacttatgttgttatcatgaaatctgagttatgtaactagcttatcgcttagtttgggacccctccc

SEQ ID NO: 55753 - DNA, 547 bp, Zea Mays
cgagggggaaaatttcgtccggatataatcccagacttcctttgacgtcttggcatccaggacatcgcaaatcatctctttagtcaacgatgagaggagcccgctcaggacatgctggtcagtattgtaccattgctcataggcaggattgggaaccagctcaacgccagtttgtgcggacgccgcgatttgtgacgccggtgcgatgagggtgccgtcaaggtatccgataagcttggagctacgtaggtatggaagcagctgcgcacgccatataaagaagttgttttgttgagcttgatggtgacaacatggtggaggggaatgatagtggtggacatgatggacggcacaacagatgagacgacagtaggagaggaggaggatataacaatgaacatggatcgagtgattaagcccttggctccgataccatgttaattggcttagctcgatgccctataagggttgttgggacttgctctccgatgcaaattgatccaacgggggagtgtagcaacgcaaacagggtttttgcacgagatgg

SEQ ID NO: 55754 - DNA, 317 bp, Zea Mays
tttgcagcctgtctgctaacctgttagccaacaatttagtcaccaacttcgctaaactatgaaccagactgattgggcggaaatctctcacactagtggctccctcaaccttgggcagaagtgtaataaaagctgaattcagcggacccaagtttctgaaatttctagccaaatgcagtagactgccgccatgaaatcagccttgatcaccgacttttgtaaaatctgccagtgaacccgtcaggacttggggattcgtccgaaggaagggacttaattgtatcccaaacttcctcctccgagacaggcgcatcaag

SEQ ID NO: 55755 - DNA, 306 bp, Zea Mays
gaaaatatttgttgtctgaacaaatcactatgcaggagcatctttgcaaggaacctcgccggtaggattaccataggaagaaggtttgctcacaccagcagatgcagcgagaacgtcagtaacgatgtcctcaggcaccacaacaccatgtcttctcatcaagattcgcctggcgcggacagccttgtccattgctttgtcacacattgctttcataacaacacgatcatcctctaaggccttaatgttgtgatgagcaacctccaactcttgcatgacaagtttctttgaggcgcgcaactcctt

SEQ ID NO: 55756 - DNA, 836 bp, Zea Mays
gagctacgtatcatttcaaagaaagaaagaaataacacattccaaaatagaccaacacaaccccccacacacactcacacacaacactcaacacaacacaacacgacacaacatgcatgccacatccccaagaactccccaacttgtgtcaaccacattatctgagagcaaggacaaacattttcctccaaccatacaccacaacctaaaataatcatcggccagaatgagggccttggagatactaggccgcacactcttgaacacattcattacggtggcgccaaatacaccaagcacctaacaccactaaggaattcaaactagctttaaaatcgccatgcaccatcccaaccgctttgctccaccactcatcaaagttagtttcatcattgccaggggagagggttggtagcccccaacttttgcagcaacaagaacaaggattgtattgaaaaagacacatgatactaagaggtggtggatgatttccccttattgatcacagaaggggtcaacacacagggtgagggaggcccccttttggccaaacggtccactgtccaacacctattatacatgaccaaccataagaagaagctgcacttggccagagcccaggtcttccaaattctctcatggcccccaaggaagttgagccactaaataacaagtcatatgctgacttagccaaataatgactaaagctagaaaacctccaaacatgtttatcaggggttcctgcatgacgcaccacataagaaatagcagcccacaaggtcaaaaaatatgaaatgacctcctaggtgactaaacctctcaaatctctgatccaa

SEQ ID NO: 55757 - DNA, 464 bp, Zea Mays
gactgatcagtaataactcttcaatgtatatggatggcaggttgattacttaaaacagtgggggctcttttgtgagtctggcttggcgaaggggtatctttgattcccagccgcccgatcggcaacacgcggctcagattataacgcgattcatgtgaaccggtaaggaatgatggccaccggatcgatatctgacggttcggattttatgaggtctggactatattcatccaaccgatctacgatctacggcttggatcaacactcgtgaatcattatgcattcgtctaatcccacgcattggccgaagatccaacgatcgcccgatcccatgccccactcctaatcccgatcgtccgatcggaccgaccgcccagattcaatcttgcaaaaaggtacactacgacttaatctcggccgtccgataagatcagacagcacactccctttgtctaccccccgat

SEQ ID NO: 55758 - DNA, 883 bp, Zea Mays
atttcaaaagcaaggccttgttttgcgtctccaacctgaccaccccaaggctcccatttcgcttcggctgagtaattatgctccaagcagcaagagttgatctgtttgagttcacatcatttcctctccagagacaatgcctccaggaggcatcaatccttttgacagtggaggcatgaattttcagcgtgcttatcaagaaagtcgggagagcagagaaaacagagttaactacctccagtcttccggcctgggagagtagagcagaagtataggatagtctcccttcaatcctttgaataagtggtaaaaaatggcagattctgggttttgacaggcctagaggtacaccaaggtaagtgaaaggcatagaacctgtctggcagtttaaagttctggttagaatctccgaccttgctgggcagacattgattgggtacatacttgatttaaggtaattgactttaagacccatcgaggtagcaaaggagtttagaactgctctgagaaaaaataattgtctggggcaagcttccaaaatcaagagagtgtcgtcggcatattgaacaatcgggaaatcttgaccacagttctcagtgagtggcagttggagaagaccctgctgtctcgccttattgattatactttgaagcagatctgtcgctagaacgaataaaagaggcgaaagagggtctccttgtcttaccccacgcttgcaatgaaaagatttgcctggcacaccattaaggagaaccgaggacgtgccagagtggaggatatccctaatccagcgcagccatttgggcccaaatcctctgaaggacagcacctgaaggatcagatcgtgctcaactgtgtcaaaggccttctcaaagttcagctt

SEQ ID NO: 55759 - DNA, 367 bp, Zea Mays
cgccggttcaagaagaggcacacagcgacacagtcgtccaccgtggacgtcgggtacttacgctgccacgtttggaccgcacgcttcccatccctgaaataggagttctgaacaattcatctactctactctagtactagcttgatagcttatgtctgacaggaaatcaaatggaaaaaacccctacgtgacagcataaagatggagcgattaaccaaatctcttctcctttccaacaaacactgtcagactccaacaaggattgcatttacatcacacaaatatataatgctgctgtttcatcacaccaccacacccatcttgatctaccatatcctgaggcaccttcttcccacacacacctcct

SEQ ID NO: 55760 - DNA, 368 bp, Zea Mays
acgtcatgtttaggacacgtgcagggtggtatcatcatacattagtcagctaggacgctcaaaaccaggcccgaccctgagtaggtgcgagtggtgctgctgcaccaggcctccaaaaatcagagggcatctacatacaacctactatatgtcatatatattagtctatagtttggcccaaaaatctattaatcaggtatgcaatcaatcactcatgctctagtgccttctccttgaccgctcaacgtttctatgcctccaggcgagtagttcgcacgcacatgcggcagacggccagtgaccgctcccgagtcacgaattgttggccctcgccctccacacatcaattgctccctctgccccgcaaa

SEQ ID NO: 55761 - DNA, 306 bp, Zea Mays
tattcaaaaaatttactggaagcagcgtgcggctattaggtgggctactgagggagacatctgctctcgcttctttcacgcccatgccaccattaaacacaggaaaaattcaatctctactttgaccgatgacaatgggaccatgttcttcgaacatgaacataagtctgatcttctctgggtggctttcaagtgcagactggggtcgtccgacttttctgacattgggtttgacctttcagaaattttaacttccagtgagcaattacaggggcttgatcatccattttctaagctggaaattga

SEQ ID NO: 55762 - DNA, 508 bp, Zea Mays
atctaactttgaacaatgtgtaagcctgcataaagatttccacggacaaccaaaacacagccaaagtgcaccgcagaagcctagatacatgctaatgcaggcaatcaaagagttccataataaaatattcctttacttagaagcatcggtacaatcataaaaaccatcttttaggaaaatcacaatgactgaagccaacaattatgtagatttggggaagcctacagttatagtgcaaccacaatcatgaaactgcataatcaacaagcttcatcatgactgaacgtttaatcactaaaaagccacatataataccaataaaggggtcgatggagtatcttaacaaaacatgtgaacaactataagtgcctcaacagtaagcattgcttcatttggctcatgtctgtaatcagacaggtaagaaagatatttgtagtgcctaaactaaaccatatatcatttgactgactcaaaagttcaagtgataccattcacaccaataaagtac

SEQ ID NO: 55763 - DNA, 509 bp, Zea Mays
ctgaggttttatagctcagtgatcggtgttgtgccatccacagtggcgaagtcaccggagacggggcagacgcgatcgccgcgggtctcgggtcaccggcgagggctagaacgggtgaagaaggtccggcaaactcactggcagggctccagccacgagaacgagaccagagatgagtgaacggtgaaggaaaggtactatgggcgggtcgggcaacaccgatgtagaatcccggccgcggagaaggtgttttgggcgtgctaaggcctggactggcttcgaaagggtatggggaacactacagaccaacgcaaggcatagggcggtgctaaattggacagtcaccacgcgggctcggtgaaccggcgcggccaaactccggcgaggccaaatattctaagaccacgcggaaataaggtaaaccaagcacgggaatgatttcctcacctcgggacggagctcgggatggcttgacgtggcttatggagggctggtcggccggcagcgtg

SEQ ID NO: 55764 - DNA, 283 bp, Zea Mays
ccaaccagacatacgtcacatcgccaatctaccagcgacaatgcggtcgagcacacgcaagtctatcttgtctccggaccgtgtacgccatatcatgccatacaagcagggtggggaaagcgggctacaccatggctcaacgccatcgtacagcaacgaaggaggacgttggcaatgtggctgctgatggactggtcaagtaccggaaatggggcaagccttacctcgctgcctggccggagctacgtcgccgtcgccaaatgtaatacctaaattgtaagga

SEQ ID NO: 55765 - DNA, 1107 bp, Zea Mays
aaattgttctgtcaggcgctttgtcgaacgtttccaatggtacagtgaacagataggatcaggttcagagaacctcgccgccggcgaccgtgcgcatggattcgcgctcgccgcggtgattcgtgctcggctcagttagataacgtcgtggggtaagtaaatatcacgccgtggatgaactccggccactattttacttcggccgccgtacccgagcatgtcacggccgctttggataggttcgtcggagttagccacctcatggtcttgcgccacgtgcctcgccatttaccacgtcgcagtcagtcgtgttatgcatgtccggtgatcgccggtgagcccgccacggtgaaagccactaatccttgcgccagtgcaactcttctctccggccgccaccgcgccaagtccaaattcactggccaccacccccggagcgtataaattgagtgtgtcgtcggggctataaggtagtcaagcacccaatccaccaagccgtgcctctaattgctcaccagagctcgccaatttcggatttcccccaaattggtctgaaacaccgcgccttgtgacctcgccgaggtcagcgtgctccaggtccgctcatgccccctgctctttcgtttcagtatccttgtgtgtccctgatgctccctgacccagccgattaagctagaacctattagatcgccgggaacactcggtgttgttcttgtattgcacgaacatcgtgagcagagagtttgggagcccgaatggtgaaattaagcgaggagaaatggttgttaagggttgaattaggtgtcagccatgttggagcaccagtcatcgcgtatcctggccagtgcaagctcgccggagttcctgctctgccgtccacggtcgtggacttccccttgtgaagaattagaacgttgggggtctctatgtaaatgtcagtgacccatggtaatagtgcacgagacttttaatcagttcttcatatagccaagggcctctgcgcaaagttgtcaccacgagcgcgcacgggcgcgcgttctccccgtttcagggccgacttggaccagattcagcccaacactgttcatagtttcgctttttcttttt

SEQ ID NO: 55766 - DNA, 332 bp, Zea Mays
tgtatctctttagaaagggcgcgtgagcgccgtgggaacctcgagcaagatttcgctgtggtcgcgctgcaggccccagaggatgcgcggttccagacaagcatctcgttggctggagtgggctgcgccgccctagcaaaccacctccgcgcggcaacgtggccacccaagtttcggccacacctaccagaaaagtacgacggtacgacaaacccgtcggaacctgcaggtttatgtcaccgccattacgacagcagggggagacacatccgtaatggcaacttacttccatgtagccttgtttgggccagcccggacttggctcatgaacc

SEQ ID NO: 55767 - DNA, 748 bp, Zea Mays
ggaaccgagctgcatcatctgcatataaacttgttcgtatctgtatgggcccttcagtaatcgactgcaagataccatggcgagtagcggcttccaaaagtgtgtgcaacggctccattgctaaaataaagagcatcggggaccaagtattaccatgctggttgaacacccgctgtagagccatgtacaaatcgttcttgataatatcccagcattgcttgtagaaggcccccgtgaacccattaggtcctggggccttttcaaggggcatgcttagcaccacagcccgcacctcagcttcagaaatgggcgcatataactgatgtagaccatgttgcattaagccaagctattcccaactgaccatggtggctcgagacgtgtgacaaccgaaaattgaagaaaagtacttgtgcagttccaatgacttgtcttcatggctcgttactacctctcccacgttgtcaactttcctaatgaaggcgatgaagtttttcctccttcttgagttagcgcgaacatggaaaaaacctagtgttggtgtctccaagctttatccaagacaatcttgatctttgtcgagctttgatccgccttaacgcagagaacacaaggatccgattcttggttgtgtgcacaataatgtcaactctctttgatgcagttgcctctgttcctgagccttttcaaacagagctactacgtgactcgctatatctgcccgcaattttaatgccgaagaatgcag

SEQ ID NO: 55768 - DNA, 476 bp, Zea Mays
gatttttgtgccttcaccggtgcccatggggctgtatcaattctgaaaaaggtcggctgtgatcatgctaaggctgttgttcagccagaatttgttttctcacccgacgacattaaaaacccttcagccgaagcttctgcattaggtgggaaattttactctgaagtatgaatgaagggcagtcgtgagttagctgatgaagctactaggaaaataaaaagaatctcacgatgctcaagaagaagccaaaagagctgaagaagctgctgagcgtgccaggcttataggtacatctattgtggtctagcttcgtactttgttttagctttggaactaacgaacacatattatggtgtagctgaactatctcccctgccaaagccatacgacccagaagccgacccgaccctaaaggaagtgctcgagacgattagaattgccaacgaagctattgacgaagctgtcaacaaactgtt

SEQ ID NO: 55769 - DNA, 792 bp, Zea Mays
gaaggattgagcgccgccactttcgtctgtagacctgccgtcgccggtgaactccctcggtgcgggaggttttgtttcgctgcgtggccatgtgtggtcgtaatcatccaaggaagacgcccgcgccttctattggtgtcgtgcgtcggtgtggagggcgaattgctcgccgccgtgtcaactgcgggcgattttccgcttcgtgccgtggtaggcttctccgccgtggccgtctgccgtaaggtaccttctacatgatcgcctcgtcctcaatttcgttttgcgcatgaagtcaaccgcatccagtagccggaacggtggaattcgggtggccggcgaagagctccgccgagcggaggtgtctctgcgcgcgccgccgggggggagctggctgctggcgtaggattgatgacggaccgatggtcgttggatgggaaaggagcgcccgagattagatcgtgtgaaccgttgattcctaacccttggatcataatcggacgataggcgcgtagctctgtattcattaaaccgcggccgttgatcttggatccggtgatcagaatggatgcgggttattagccggcccagatctaatctggtccgtccatttcagatcgggcggccagaacctctcgataccccttcggctgtaactttttactaaagagaccctgaactatgcagaaaacaacccgccatcctgtgtgactgtgctctgggtctcagatttcttgcgcgccagcccctgcactttccagaaaatagtgcccagtccagataattaataaaacc

SEQ ID NO: 55770 - DNA, 680 bp, Zea Mays
ctcatcattagttgagatgtcgtgtcatcaaactcttgctaattaacgactgcatattctgtttaacagcggctactagctccccgctgttgctgctgcaatatatgctttcccagcccaggtaatataacattgtttttttttagaatatgatgttttagaggacgcagggatataattacatatgcattcatttttagttgtaattatctcccatattgcttcactagcatttaatttctccttgtagtaattgtttagttctctcataaagtttccttctgcatattactattagatcagcaaggtaaataatatagccaactggatctttgtagcctacctaagttgatttgtatagtagttagatctatcttcacaaataatacatggttcacttgtctctgtcacaaagtttcttggtttctatgtctaaactagctataagagagtgtttgcaaatcttccatacatctccgcttctaacaagaatcactctcacgtagccaaacggtaaaaagctgaactgctctatatagtggaagcaaaatgaatctactcactgttttgtactagaaagtgggaggcaaagaacatgttccctaatctccaacccctagagaatggaatcactcttttgaaaaatcagctcccgatctaccctcactaccggaatccga

SEQ ID NO: 55771 - DNA, 674 bp, Zea Mays
cttgtgtcctttatccttgtgtaggctcttgccctctcaccatcaatagggcatggtggttagacactatcggacgatgtagagctataatcgccttccacgtgaggcgagatcgttgcttccatcgccgtagtcggagtcaccataccacacacaccacttttgttgatgacgaagagcacgccacatatgctctagtagtctagcctaaattcaatttcaccggtcctattacgaaatcacttctttgttgcttgtagcagtataacgtcatctggttcacttggtcggaccacagataagtggttgtagatactgtgtaaagatggtgacttttttggttgctcgtggaccacttattccttaagctgtttgacggtacgatggcgaggaggtaaatgtggtgttggacgtggttgttgtttggccctaaaagaccaacaattttttgtcattgccctcaatggggtcaacagagtgcattgcccatgtgtgcacctataaatgtacgaactcacaaaatatttttcacttataaaaagtgtggaattcataaagatatacttgtacttacaagcctttcattctccatcttagtccaatctcgttgatgttggaactatgatgcaccgaagtacctactgtaagtccaatcaaccttttgaggatttttg

SEQ ID NO: 55772 - DNA, 1772 bp, Zea Mays
ccgttttccgcggtgccggaaaactaggtttttacacaactacgatagtcccaggaaatcaagctatcgtagattatgagattccagttgccagcacatccataccaaaatttaagcgtgatagttcgcttacatcccctaacacttggggtaaatatcatcggctcgcaggccggcacacacacatgagtactcctagcatctagaagctcagagtagcagccgtggtcttcggtcctccacaggcatccttgagcgtagacccgcaacctagtcataccacccgtcgttggcgaagtcgtactccggctcgtcctctcctaaacctgccgataagcgtgcaggccacgttaacatcctcgagcatttagccagcggtggaatctagtagtttaggtggctgttggtttcctagcaggcatgcgacattatctaaaatactgctgtagtatattagatacaaatcaggaggtccggtctcacaccactggttcctggcttaactcaccacacacacacatcaccaaatctcccattcccaatccacactcgcacacacctcaccatcatcaccagcacatcacccaacacatgcttagactaaatctgtgacaagggcagctccctcccgtccttgtctcaatggcctaaagccggatcctagatcagaggtagaaaagaagattcccatactaagacgagaaaactaagtccctaggattgtccttggccatggacacggctatacgttagatttacactctgcagaggttgtacaactgtacccatacgaagcggaggcttggccgagcctcgacacaacaccctccagtaaatcccccgctcacggcaccaacctgctttttcaagccaagatctgtgggaggtactccctcccacacaacggaactgtgaactcccccacccagggccctcgagaggagtctattggataagggcagggcgcaccatcagccccgttcctaacacttacgccttatgcccacagttcgtggtgccgcttacgggagaccaccttttgggccggtacccacaaggcgtatgttatgcacggaaattcccaaagcgctgttaacccatcttggtccttacatggcaagggcttgcctcctctaagaacggttgccaccctcaatggtgggccactcactccatccacctttctcgttccacaatcactcacaggggatgtcttagtcatcccctaaatattttacacgcacacatgcttgcccctgccagtaatcccaactcacgtcactattcccgctcattcccatcctgcttcacacacgccaagaatccaccacaatcccatccatcacagccacacaccacatacacacaccaagtcgcatgaatagtatatgtatagggtagtagcatgatatcaagtaggagcaatgatatcaacaaaggcttatcaatcaaacggcatgaatatcaaaaggcgagacattcatgaaggctaggaatgagatctcgggtttttaggggtctcactcccatttgtcgctcggaactttggcctagcactactgcatataatcatgtctataggaagggcgaggatgttagggtgacctattgtagtgaagtcctcctcgagctcggggacatactccgagtcgtcggcttcctcctcaggctcctcgggtcctagtatcgacaagatcccgaacaaatcgggagcacaaacattcaataagacgcaaaaagatgcaacaccaagcaagatgggtaataccggg

SEQ ID NO: 55773 - DNA, 368 bp, Zea Mays
tgagttttgtgggacttttggcttgattcatgctcaaagggataagcaaatgggcaagatctctatagcagaattgtagctagtatgtagggctacaagtttgttatagatggattggcatgttcttgcacaaaaattcaagatctaggcgttgcaactttgtctgacaggcgctctaaatcgcgttttaaatggtacagtgtccagattagaacaccagttcagataactcaccgccggtgaccgtgcgcccgaattcgcgcccgccgtggtgattcgtgccaagcgcagttggataacgccggagggtaagaaatatcgcaccatagatgaactctggccactattctaccccggccgccgtaccc

SEQ ID NO: 55774 - DNA, 382 bp, Zea Mays
tgagtatagaactatagatgtccaagcagggcagccgaccagcagccagagcctagagggcggagagtagcactaccacgagatagtgaagaaggctagtaggtggcaaccgaaggccagatcagaaagcaatagccaccagcaagtgccgagcagacaacaccaacacacacggagatgtgaaaacaaaccaagcagatcgataaccggacgtcaacgaggagcaccagctagcagacattggatccagaggagattagggtgaaatgaacaaaccatgcacaatcgacgcaccaaagacgttgaccagtagccgaggagtaaggaccatcggatctggagggattaggattagggattgagagacgcagggagggataag

SEQ ID NO: 55775 - DNA, 557 bp, Zea Mays
ttatcctgtgcctacctttcagaagaagtggtcgggctcttggatgcaggagtggttttatgtgaagaataacctgaactagagggaggatataaggggcatcattcaacatcctatatggtcctgctacggcatcagaagaccttcaaccgcactcaaaaatgatgtgcaagcgtcccagacggctttcaatactatatgcacctatatcagcacgagggatttggtccaagagcatattgcttacagagtatggacccttgcaagtggatgggaaatgtcgaaggaggctgccgcctgttctagccaaagtgccctgatttatcagaagtacacatttcgattcagggatcggtttgatgagccaaatgatgattggttggatgctgtagaggcgacaagtgatgagctgcttggagcctactcgagggctgaagacgaagctatgacagtcgccttcggtgctcgagggaaaaagagactgaatagggtttttgatgttatcgggtttatctaccctgactactgttttcctgttcgaaaacaaaaggggaaaa

SEQ ID NO: 55776 - DNA, 374 bp, Zea Mays
gtacaatcacagagcaagaaggcagtagagttagggttcggggttcgagcacagatcacaagaacaagcaccggattaagaagtctcaaactcgtcggagacgtcgactagaggaagaagaagacgaacactgaaagcttaccgtaaccaaatccgtgagcgaaccaccagccaagcagccaccaagtgaggggaagccagagctcagaggtggagggagcggtggaggaccctaccggagggcggaggcgaggcggcggtggagacgaatcacccccaaaatcgcccccaaatcgtagacggagggaaggagggcgagagacaacgggcgaggcgagcgagtgagactgacgaggcggggcccgatgggggag

SEQ ID NO: 55777 - DNA, 474 bp, Zea Mays
gtgagcttgagttgtgtctaggatggcttgagtctgtcctctgtaacgcagcgtgtcctcccttttatagtctaaagggggcacgtacaagggtgctgagccccgacatgtgggcccagggacataacagatgcactacttggagcgactaatgctcgtccccaacgcaatcttccttgcgccctgatatccgcgatctgcataccattggcgtgtaggggaagcttccctggcaacgtacgagtggtggtggacgggcacagtgcaccttgcagcacgggcgtactgtttggcaatgggatggataggcacaccgcctgtaggatggcccgggcgccgcctgccagctgagtggataggacacattaaatgctgaaggggcacatcgtttgtcagcggggtagtcaggcagcgcgtcttctccgcaataaatgcagagacagcgcgacccagaggtcttacgtcaggctccgc

SEQ ID NO: 55778 - DNA, 498 bp, Zea Mays
gccgagaattggttgtggatgattacttgatcgagggtgtgagcatgttcgatgctcacaacagactggctgctggcggtgagtgtatttattattgtgcaagtttttatgatgtgtgtgtattcttgtactgactggttttcagccacagggtcggggtctagacagatggtcgtgatgtcagtggtggagacgacacatgcaaagtctgcgctggaggtttcactggacccgtgggcgcaattctgcgctgctgtggacgggagcggagggatcgccaatgcctctacggctggcggcgtggcggcatctattgcacggcaactgtgatatgtaggtttttttactaaagtctacgtgtaggcaggctgctgccttcaccgatcaggtggcgtttggggcgctggtggacatagcgacctcgcagctgcgctccaagagaaaatgtctggaggacaagattgaatgtcttcgaacgcaaaacatagaggccattgg

SEQ ID NO: 55779 - DNA, 743 bp, Zea Mays
attagagtaggatctagtgatcggttggggatggttactataatcgaattgtagctggactataggactacaactttgttaaaggtggattagcaagttattacatggaattttgaggtttgggcgctgcaatctgctctgtcaggtgttctgaataacattctgatggtacaataactgacatagatcctaggtgcagctccctcaccgccggtgaaccgtgcgctcagattcgcgccggtcgccgcgatttgtgcctcgggtaagtggattatgctcagccgtgaaaagatctttgtcacagatgagctcgggacactttggccactctatcgtccatccacttgcgccggcgacgtagccaagtgaccgtcgttgaggtatacgtcgcctgccgtgatcgcaacacaccctgaccctttaaccacgtcatagtgagtcgccttagcccacccgttcatcgccggtggtcttgccacggtaaagtccacaaatcgcttgcgccagtagcttcttccctctccgaccgccagtgcaatctcttcaaattaaatgccaccgccctcggatcctaaaattgagcgtgccacatcagccccgctatgtagtcaagcacccaacgcacccactcgtgcctccgattatccaccagagagccccaatttgagacttcccctaaatcgatccagaacaccgtactgagtgagctcgtcgtggccagcgcgttacaggtccgttcacac

SEQ ID NO: 55780 - DNA, 885 bp, Zea Mays
aagattttctatatttttactagatttaattatttcttttaactaaaaatttacggtggccacagttactcatgagttcaagggatgttttacaaatttcagggacttggatgtagggatcccatattgccgaggacggcgggttccatataacaataatctagggtttttttgtaaggttgctacgatgaagggtatcctgtcatatgaaccgttggatacccaatttgtggtccacattagatctcctataatactgaatcggtatgtgacttggttcgcacgatcaatcgtctacggctcggattctattaaggcgcgatctgatctccacctctcgatcaagaatcagtgacctagatttaatctcatgaaagggtacgctccatctaatcgcaatcgtccactctagatcagacggcgctgggtcccttttcttgacctcacccatcaacccccagggcatggcggcgcgccggccaccccacgatggaggccatgatcggagttcccttctacgtgctttcgcaccctatttcgagctcggatagacgctacacattgctcggcacgtggcgaatggggtggatggtagcttaccggaaaccgaaacatgggtgatgatgtccatggagaggagcgactctgtggcgatccacaagcaccggtgagaaattcccaccactctgtcgcatcatcctttgaattaagggttgccttgccttccacaagcgctatcgggacccagggatgttctctagggatgaatcaatggtgtggccacagattggatgcgggcgccgctcggctctactcctccatcttctcccggcgcgtacgccagtgaaagggaaatagggttaaccttttcccacaattaatttt

SEQ ID NO: 55781 - DNA, 426 bp, Zea Mays
gcacgtttccttcaaattagccgccaccgctcaagggccttataaattgagcacaccctcggctccgctaggtattcaagcacccagcacacccactcgtgcctccaattgttcacctgagcccccgaattgctcatttcccccaaatcgagtttccgccaccgtaaaaaggtcctcaccgtggctagctcgattcaggtccgatcttgtcctctgctctcttgtttcagcactcttacatgccactgatgctcctcgacccattcaattaagctagactgccctagatcgcagggaacacgtctactcatccgttgtttgcactatctccatggacaggtttatttagagctcgaactatgcaattgatcgaggggaaacgcttcttcggtgttgaattaggagtaaaccaatttagagcactgg

SEQ ID NO: 55782 - DNA, 579 bp, Zea Mays
atataggcatatagcatttgcggataagtagggtacccgggagcgtaaaagtcgacgatgatgacctggtgcgccgtcagcacctcccagaagttgtccgcgtctaagaccaactccagcaatggctggatgcggatccgtatcctacggagtggcatgcgacgatacagagttgcgtagtagcccggtttccaggaagctccataaacagttccataaagcggtgtaacaaggcgatggctaggttgcgcggatgagagagaatacgcgagaaaagggagcgaccacccccaccccatttttttccgtcgccggatacgacgtctgctggggaactcaacagtgcgaaaacgcacaaattttacggatgcacgcgcccatatatggcctctgctggagttggtcttagcaccgcctcctccgcttgggtgctccaggccgacaccacgacacaagcagaagcagcaccgcgaggaaggggtaaggaagtcgcaaggaggccgctattgctgcgactgtaggtgtaggggcgtcgccgcgtagtgctgccgcgatcgtctcgactctcgaggtcggaca

SEQ ID NO: 55783 - DNA, 649 bp, Zea Mays
aattatatgggaaatcttgtaaagaagattaggaaattgccacatggaacgatcatgaacagaggttaaaactcatgatgatgattaaacatgtgagcctgcaaatacagaaacagaagcgacaatccgcacaaaacattaagcgatcgcatttgcactgatcagagactctatctgacaaatcgcggtgaagctctagtttctcgctgcatttatcagtggactagctagctagctagcttacgacggtggatcatagataacaaacagaatgcgcttttacgtcctccgggacaacctcgtccaagcatctcccgtgatgattggcagctctcttcctgattcaagaacgattccatggtcaataacaatgcaactgatcagtttaaaccaaatgttgtaacgcaatttattaactttcattgctacttaacctgacgtgcacatcttcaaaccagcattatcagcaatttcctcctcgctttcatcgtcatcatccggatcatcttcgccgtcctcattgtccctgtcgttttcgctgcaccatggcatgcaatcatcactcccaaccttgttgtccttcatcgtcacgccggcgaacagacccgtcacgctcatctgcttgctgatcatccgagcgacgcagtac

SEQ ID NO: 55784 - DNA, 1616 bp, Zea Mays
atgtcaagttcgggtactgcgtgtaccaaatggtgcacgacgcgcatgtgggaggctccagtgtggcatgccacgccatccggtttgtgcaaatctagttttggacgattttgcacggatcggccaagttcagggcccatttttttggttttctaagtacggaggcccaagtgacacaatgccaagttcgaggaccgctgatgcattttactaatgcaatttgtacatgagctttctttgcttatccttacatatatatatggctttggcttgctctattttacccccagatatttatagctcaatcaatctaataacaattccaagcatatgttgcagttatcgattgcactgggattcctgaaaatgaggctggcagaagaatttttcgtgctagattttcatctgttactgagaaggacatatcgagcgccatggataatcttgttctgccaaacaaagatgaatcactatctgtggatgctcgccaagaaattgacttaaaggttggagtagcatttactcgatttcagacccgatatttccaaggaaaatatggaaaccttgattcaagagtgatttcgtgagctccccatctcttttcacgattcaatttttttaaccaatcgcatattgattttttttatctaaagaaatgctatcagataactacctttttattttttattcaaatcatcataacaatatcttttacatttgctctgcttctgtcttttagtaatatttttccagaactgatttaagttcggctttccttgtaaatcaggtatggtccatgccaaacacctacacttggattctgtgtacaacgccatcagcaaatcaccacatttaaaccagagaaattctggtccttgaaaacgtatattatcaaagatagtgatgaaatacagctagaatgggaccggaagaaactttttgattttgatgtgagttcatgtactcatatgatttagctttattcttcgaaatgttctcaccattttccttaattaaaaatacaggttactgtaatgtttcagaagatggtcatcagtgatgggactctaaaagtagcagatatatctgtgaaggaagaatgcaaaacccgtccatctggccttaatacagttaatatgcttaaggtagcacagctcttacctcttagagtaaccatatcttttccttagctctacttattaaatttgccttgctatctataaatctcactttgtacttacctagttacctgggagtgttaaatttgttcagttccattttgaaacatgatgtgttctttcaatgttctactggtgtttactgttatcgtatgttgtgtcatgaactcatgatgatcttgattgaaatgtggtacccaagatgctcctgttgggttatgacttgatagtattaatatgaaaaagtgcatccgtttcattatgtaagaatagagtaaattttgtttacttgatatttttttatctcaggttgcatcaagtgcacttggtattgggcctcagacagccatgcacttggctgagcggctttacactcaaggattcatcaggtttcagaaatgaacctcgaaacagcgctatattttgcattgaaccttg

SEQ ID NO: 55785 - DNA, 456 bp, Zea Mays
aagattgatgtttgctaggacaattgtatgtttttttggaaggaacatggcagatagcataaatgcttaaaatgtgggaagtcgagatacgtggagcttgtaaatgaagatggggagaaggtggtgacaaaggttgcaaataaacagcttcggtacatgcctctcactcctagagtgaaatgttagtttctctcgaggaagaccgctatgcacatgaggtggcataaagattgtacggacagacaagatgggttaatggtgcacccatcagatggtgatgcatggaaggctcttgacaactttgatctagattttgccagcgatgcaagaaacgttcgtatcggcttggcaactgatggtttcacgccgttcaatatgaatgctgcatcgtattcatgttggcctgtcattgccataccgtacaacgttccacctgctctttgcatgaaatatgag

SEQ ID NO: 55786 - DNA, 428 bp, Zea Mays
tggggtagtgcttacctggtcgtggctataagctagctgccgcacccacgattcccttcatcaaagccactacttgtgcctcaacctgtttcacgacacagcccgtgaggaatactccaccgctgccaccactgcaaaccgcctcacccatccccgcgagggccccagttgtgattcatgtgcattcgtcggtgtgccagcattgcatgtgtggcttcggtggacaaggatgcgacccaaagactcaccaattgctcgccatcatgccagggctaccgccgaccgcacaatcaccgggagggaaccagcatcgctttgatccaaggtaaaagcacctccgcaaactttgttaagctctattacgcgcgtagcacctctcggatttgggtctgggcgcgtttggagcgatctggccgtgcgccgatgat

SEQ ID NO: 55787 - DNA, 502 bp, Zea Mays
attgcgataataataggcaagccgatgtgtatggtgtatagcggcctaggttgttgctctggttaaacaaacttgttagatggttttggttaagctcgtagtcacgatgatttgcttgttgtaatctagatgcgcatgggtatggtcgcgagtaaaaattagtagtgctcttgtggtgtgtaaggtaaaatgcgaactagtgggtgaaaagcgcttcaatatatatgtcgtgtttgatgattgtggtgaatgcgttgattaattgtgtatggtagttctcgcgcactaaatgacttgagtaaaatttgtaagtctacttgttagtcctcatttgattaatttaactctaacaaatggtaaagtgttagaataattcaagtctctaaaacatggcaattcttgaattatataggagctgaaatttagtaattgttgttttggactgcacgcagtgatttcctcgtgttgtatgtttgataaactaaatcatgttttctgtaga

SEQ ID NO: 55788 - DNA, 505 bp, Zea Mays
ttcttgtaatgagggaaaattacagaccccaaaaagaagccctcgtaagcaatctttgctgagtagatgccattaggggcaatactgaaaacatgtttatcctcaacctcaggctgcagctgccaatctgaaatcatgtcccataactgaagatactctgttaagactcccactgtcagaggacctttaatatcagagatccattttctgtctgtaattgcctcatagactgtcctgctattgataatcctcttggatataatattatataaacttggagtaagatatttaattcgcttaccatataaccacttatccttccaaaactttgtatttgtgccatcccccacctcagtaatgaccacctccatgaagaaagctctagcttttccaggtacttttatgtggagatcagaccaaggtcgagtaggattagtcttctgcagccagagccaacgcattcgaagggcccaacataattcttgaaaactagatatgccaagac

SEQ ID NO: 55789 - DNA, 444 bp, Zea Mays
cagtctgatactggtctgacaatgagttctgatgaactttggacttgattcaagcttgatggagtaagtaaatgagcaaggtctctatagttgaattgtagctagtttatagagctacaactttgatataggtggatggttgagttgctacatgaattttggagcaaatcacccctaaatatgctttgtcaggtactctgaatggcgctctaatggtacagtaaactgacatagatcctaggtacactgcacctcaccgccggtgaccctcacgtcgtgatccgcgtcgtcgccacgatccgtgctctctggctaggagataatcacgacagagtaaaaaatcttggcaccggataggctcggacccggtcgatggtaagctcgtcgtacccacttgggctgcggtcgggcaaaatggtcctcgccggcgttggccgcttactg

SEQ ID NO: 55790 - DNA, 363 bp, Zea Mays
gccgtagcgacaagcgatgcgggaacgcgaggaagggaagccacgccgaggacgcctgaatctgataccaggttgtgatggcccgtggccgccggcgagtggagatcgtcgtggcgtgagcgaggagaccgacaggatcaggtaacgagttatctggtaatatttcttcttcaattatttcttaacccctctccaagtctgagacaaaacttatatagttcgcttacatgggccagcccacaacgcaactcacgcacacaaccaaaacagcccatcaaggcgcacgaccacccctgcttcagacttcatctcctgctgactccactccctggctcactgcattctccgctatggcatccaccg

SEQ ID NO: 55791 - DNA, 614 bp, Zea Mays
ggggtttatatagggtagaatgcttgttgaagtgcttcggttcatgcaatggtgttgttgcattcagaatggtttgaaagacgtaatttaagtgtatgatgaagtccaagggtgatacaccttacatgaggagtgcctaggtgcatacgtaggtctagtgtaactgaactgatttgatgtttgtgatgtgcttgtgtggatttctattagatggctgacattgataccttgtattaggaaatatcaccttcgatgttatttgctcaagttaataaatcatggagggtagagatttgcttatggtttattcattgtttgtcatatttatttcatcatgtcatgttgtttaagtgttctcccttgttaatagaaagttagtgaaggatagtattgtgaacttatatatctctaggctttttcataccgttgtctgagtttttgtttagggaataggatattcgatataatcatgtaccttaaataattggtaatcccttggttgtgatacttgtgaagtggaatgtgtcttatctatgttcttatattgattttcttagtgctaattcttgaggcatatgtgtgcattttctccttaggctaaattagaggtatgg

SEQ ID NO: 55792 - DNA, 395 bp, Zea Mays
tatgtttggattaatattggaaaagttatgattaaaacaagtaactgttgtgctgttgtcccaaaaaatctgcaagcactcatttaattgttagttcacccttttggctaaaaatgattggttgacactaaattcacatagaattgccatggctaagcttgagataatatatgtgtcatgtttttatacgttctttctctagttaattgtgatgtagtattgtgttgcgtaaatatccaaaatgtttgtcgtctttttagtggtgtaatgttgtgcgctcgacgatatgtagttagctaacgctagtgggtgtggttgcttgtgatgtctcgctacttagtgtttaattcgctagcgtgtacttaaagtatcttgtgctatttcattatattcat

SEQ ID NO: 55793 - DNA, 325 bp, Zea Mays
ttgatacgatgcagctgggctccttcaaaatcgatcggcgtattagttgggatcgggatcgttcaacctgtggctctacacccaaatgattatctcgtctcgcttgtggtgtgggcggtacctgaacaatatagctccagcgattttttggtggttttccagtatgctagggttgttttgttagtttatgctgaggcctattggatggggtggatgcccagttctgtccgagtagcgtgctgcagccatgcttcatcggtacttttagatgtacaagagcaaatatgaagtcaaaaggattgtaaacataatgtcctcggatata

SEQ ID NO: 55794 - DNA, 616 bp, Zea Mays
aatattagagcattaacaattcagttaaaagttaaaagaaaattcgaaatttgttaccttcggaggcacaacacccacttcaattatctcgacatattttgccttgctagcttcagcagctaataggataggcggttttgttgctctctctcaatatagtacatcctcggccggtgggtcagagttttgaatttcttttgcttcggcgcagaggaggtcttgggcactcttctgtttcatcaccctccttcaaatagaaaagcaataattaggataaataaatccaataacatcaaacactatgttcagtcttctttttccccggccactgaaggcaaggtttaattcttcgtcttcaaccttcataaaagcacctagcatttcgtcgcaagttgattcaatagcttcaagccactcgtcatatggctcgccaaactaatttctataatgatatgtatatttcaagtatactaacccaccctttccagcactttgacttgaactagcgtcaacgtccttcggcatctcccactcattgacgaggggccatactttaaatgctatgtgctcttgaaccaaatccttggtgcaaatgtagctgcacacaacattgaat

SEQ ID NO: 55795 - DNA, 717 bp, Zea Mays
aaaagttattgcaaatgatagatgagtacataagagctgataatgatttccgtcaaaggagggaagagttccaaagatacgccaaagtcgccaggggcttcgaaggaagattccatccaaggcatgtccgaagcatccataacccgtcacaggttgaggaaagaatgacccagtcacagggtcaatcaggacaacaggcaagctctcagcagcaatcttctcaaagcacattccgaccacctgctctgagaggaaggggaggatgaagctttagtggcagatttggtgcgcctccaaggaagccaatctatttgttttgtggtgaggacaaaggccactctacaaggacatgccattacaccattgacaagcagaaagagcttggttcgtcagctactcagccttcatagttgaaagaggtgttcagtacatcttcatattgttcttcatacatcccacaatacgtccacactcagtcataggagccaaggccaagtctgccttcagcctcaaatgcctcaagcaacctagtgatgagtacatggtcaccagctgcctccttcgtcccaggaccgcctccctatgatcaagtctcccacaaccaacctaaattcccaaggcaagacctgcaataaagggacagaagggagggatccgaaacctataccgtcaacaacatggtctagtggatgaagcatataaactgagtaccccaag

SEQ ID NO: 55796 - DNA, 558 bp, Zea Mays
aaacaagttctagaactatttgaatactaaaaatcattttttataattcttttgttccatttactagttttctgtactgcacgcataattaccagggagttcagggatgaaatcataaattttagggcctcaccataattattctatcactacaatggatcacgggttaattttgtaattcaacagggactcttttgcattttaaccatgacgaaagggtatcgacaccgctgagccgtccgatcacggccggttggtccagattagacctgagtgaagtgaaccggtacgcaatgccaaccctaggatgcggcatcaatggttccaaacgatccaaacatgattcccttcaatacacacgatcggatgccaacggtctagattcaaagcgcgaaggggtatggcctttctaatctagatcgctcgctaatcatccaacaacaccgattcccctagatcatttagagacggcgacttgatctccaccgttcgatcgaatccgatggtcaggactattccttcccccccttcactgagccccgcacgacgacactcaaa

SEQ ID NO: 55797 - DNA, 403 bp, Zea Mays
catcaagcagctcaacacgctgggcgcggcggccgtgctcgccttctccaccacggtcccgctctcggagactgccttcgcggtgctcctcccccctacctcctcgtcctcgcctggctcgccttcccgcagcgcccaggccgctcgagacccggatcccgcctctacccctcggcaccatcgtcagtgtcttcgatggccacaacggccccgacgcccccaccccgacagacactgagccctcttccgctcgcgtgactggtgccccctcaaccctcgactctcctccccaccgtggccccttccccagccccagtgaccagcgcctcccttcctaagtgcggccatggcgaccatcgtgccctagcccgcccctgcaccatggcaagcacaccccttctac

SEQ ID NO: 55798 - DNA, 450 bp, Zea Mays
gtctgatgctccatatgatgatgatgcaatgaaggtatagtctatgttgaataaaatgacttctattgtactatgtgcacttatggaggtgcatgaggcgtaaccatgagcttctaggagatgacgatgaaggtgatttggaaaatggacaagttagcaaaaggaggcatactgctactaaatttagcatgagaaaatcttcaaacaggtacatgatcaatgcacttcaaatattttattgtttctggtctataatgaggcactgtcgggcactaatagagttctattttcttttcctgtggcagagtttctgcttctgtttattctgttgtgcagaaactatgcttgatattgggttttcttaaggaactgctcacaacagtgcgcttgtcagatagttgtattctgcaattagcgaaaacatgctttactacattcttggtggataat

SEQ ID NO: 55799 - DNA, 319 bp, Zea Mays
ccacaatgtatgcaactgtttacgagcacaagtccacgacctggctcaatgtcgatccaccctcacgagtaaattacatcgatatcaaaaccatacatttacacacatgcactacatccaatatcttgttaatcactttgcaaaaccaacaatgtcaatctaagcaatgtttcatcacacacaaatttcataatctccccttggtggaaatattggcaacaccacacaaataatgagcatcgacattcactttcaaacactatttttgaacccaaaatcaaagtaaaaacatcatcaaaagatccaaaccataatctcc

SEQ ID NO: 55800 - DNA, 445 bp, Zea Mays
gtagatgtcctctgaacctggagaagagtttggtgcaggaactaaaactgagaatatggaggtggagggtgtggtggtaagggctgatgagaatgtgattacccaaggtaatgaaggagagcaaaaaagaaccgaaggagatgaggaagaaaaccatgccagaaaacaaatggcaccaagatctgaaatgtgggaacatttcatcaagattaaggatgaccaaggtgtggtgaagaaagggaagtgcaagtattgtagccatgccattagagctgattcttatgtcaatggcactactgcaatgcggaggcattttaatatctgcaagcgcaatccacataagaacaataaggatttgaagcagcccaatctgaaagtgagccaaggagaaggtgttagcacttggaggtatgaccctgaggcaataaggcaagcgtttgctgaa

SEQ ID NO: 55801 - DNA, 336 bp, Zea Mays
ctctcctcgacattgtttgcattactcttgtccctgtttagtgatgttccttcaagaatggttagaggagtgctggtcaggcaacatcttgaatgcgcacatcagcacttcaaacattagacagataaaagacgatctgaatgtagctcaattttggtgaactggtgtttgtcaagcttcagtcatatgctcagaattctgcagtgtccaatccaactatgatctctcatttcgttattttgggcattttcctgtcaccagcaaaatcaatggaatggcatataaggtttggcttcctcaatcaagtttacctggtgtttcatgtgtcccaactga

SEQ ID NO: 55802 - DNA, 997 bp, Zea Mays
cgaaaatgaaataaggcaccgggaggaatacgaccgagatcatggtgtaccgacacacatccgcgcaacccagatcgagtcagcagcagcctctaccaccagtccggtccggggacggtcgaggcgacctaatactcgctcccctccccgggatcgacgccgtgatcatcgacaagaggatacgtgcggggtctccacactcaacccacgcctctgggccatccaatggcctcccgatttcaaagtctccaatgacgacaaatatgaacgcaagcaggacccactgagttggttggccatctacacaaccgcggcctgggctgctagggcaacagaggacatcatgacagtgtacttgcccatcgttctggggtaggacacactataatggctccgacatctgcctcaacactgcatcgacgattggggagatttcagtcatcggtttatcgtgaacttccagtccctctccgataaactggcgcagccgtgggatctcaaatccattaggtgacacaatgatgaaactctttgttcgttcctcaagaggtttcaaacaatgaggaactgtatccccaaggtcgctgaggcggctgtgatcgaagacttctataggggatccaacgatctggctttcgtccaagccataattcaaaaagcacccaccacctctaaacaactgttcagggaggcagacttctacatcaccacagatgagcgggctcaatacctcattggaggcgcaaagcccataccaccagcaccgcgaagggacatgaaccagcaaccagacaaacgctgggagaagagaccccgggaggaggaacacaccaccgggccacatggagaggtaaggacactggatgagatcctcgactcccaatgcctgcactacaaggacatgcggcacaccctgtggaactacagggatttcaaaaactccgtcgggcatggccgaccattccagcctctaccgcctcccccacctcgagaagag

SEQ ID NO: 55803 - DNA, 770 bp, Zea Mays
agtgctgaagatataccagatcttccttcatcaaattacccccgaagctataattaggatagggatttttgtctgggctgtaagaagtcaggggctagagccaagcgtgaagtgtttctacagtatgcacgaacttttatacgagacgaaggctactggcaaagaacagtaccataacaacttcggttgttatggatttattgctcacactagtgcaagtcacccagtgccaacattctagaaaagatggcccggggcctagatggaggagtggttttatgttaaaaatgatttaaagaaaagggaggatattaaggaaattatccagcgccccatcttgtctcgcttcggcgtccgaagaccgaaggtggaaattgatagcaatgttgaggcatgcaagaaggcttttagtactgtgtgtgccttcattggcacgagggatttaattcaggagcatatagccttcagggtatggcctcttgtggagagctgggatatgccgaaggagacctcctccgattcaagtgagggtggtctagtcagattgaagtataccttcagatttggggagaagtttgatgagccaaacgatgactggttgaaatgtatcaaagctaccagcgatgagctacttggggcatactccaaggccgaggataatgctttgtccgtagctttcgggggccaggggaagaaaagactgaacagggtatttgatgcgattggcttcgtataccccgattatcgctacccactgcgagggcaaggaa

SEQ ID NO: 55804 - DNA, 906 bp, Zea Mays
cttgcctcgtaagattcagtttggtgggggctcaaatgattgcggttgtaatataaccaaactgtttgaccagaccgattgggtcagggatgctcatgtattgatttgatggtcggtgtatggacttgctgtccattgcgtttttatctgtgacgataggtggtttttttttctgtttgccactttttccatgtttttgatcgatcttcttgctgcaatggtaatatttactgcggccaattatttgttatgtaaactactggtgtgtttggttcgaagaatcaacttatcctaatgcagtgatgcatcataagtttattcctcagatttagtgggatgacctcattcctcatgctagtattaattattaacccgtgaggaatggtgtcggatcaatggatcacatcattccaccaaccaaacaccccatacaggtatcactaaagctgggttcatggattcttagaaaagctacaagagggtattcatgctttagatataacagaacagtaattttcagtctagttgcttaagcagttaaaagtaattcattcctttgtccatgggcaatgttggttctgccaagaggtaacctgcttttcatgacagtgaacctgttatgcaatgggcaatcttgctcattgtgcatgagggattattttgcttggcatttggacacacattggattgcttgggcttcgatttggcaactctgcagtgacaatatatgtgatgttccttaacatccagtggaatacatgctttgcaaaatgtgaattaattttgatattcaagttcttctctttctatagctgttgcatgtcatcattaggtctgtgcaaggtcgtcatcttgcctgctttcagagttggcaaggacttggataagataaatacaaaatatttc

SEQ ID NO: 55805 - DNA, 853 bp, Zea Mays
gcgagtactacgctggtgctctttggggggaaggcccatttaggcgagacaagcggcctcgatcactgatgctctgcccgtgttggatgcttccgctgagcgactttgtcgtctagaccatgttgttggtgcccggcttgaagccgagggccatgaactcatccggatggtgatggagcacgtccttgtctgccttaggacccacaatccatccatgtctctgacaccggttgctgtaggacctgtgaccagggacgaggacgcaacatgggcatccgtccgagatatcgtttaacttgttgaagcctgcttccaacatgattctggcgatgcctaggagctgggccacctgcgaatagatgagagggatgtcgaggtacacaatagactaatagagaaaacattgtattttgtgtgacagttgtaatggacaactctaaatttccatgaaaaacttatctatctgttcaagtagaactgtggagaatcactctcaacagcccacttggcgatgttgctagtagcgttagaactatggaggatcgctctcagcggataagaagtcactaccattactctatggaactgaaaatagtggtgcaacttcctggatgcaatatgaatggcatagatgatcttatgtgccttggaattcctagactttgcatcgtggaggacttcgctgacgtagtaaattggcttctagatggttcggaccctatagtcgagtttggttctctttcctctgcctcaccagactcctaagccatgggcctttcgcccctagcttgccacaattttcactgggtggggcccatataggcgctcctaggagttcctctctgtcctctcg

SEQ ID NO: 55806 - DNA, 288 bp, Zea Mays
gttaaaatagtggaaagcagtaatacattgtgctagaggaacagtagaactttctagtcctgatggggatagatttgaagtcacagttgcaccacccacatctaacacacctgctgtatacatgatcaacggtaaatttgtgggagattgcatcaaaattattagagagttctcagacgtctttccagaagagttacccggaatgccaccggatatctaaaaggccatacagaatgtcagtggaataattaaaagaacttaagaaacacctaacagagttacaggagg

SEQ ID NO: 55807 - DNA, 668 bp, Zea Mays
ctagctggagtggcgtccggctcaccggcggcgaagattttcttaccccgcgatgttatccatctgccacgagcacgaatccatacgccggtgacacgaatcgcggcggaggatcggtcgtcggcggtgaggtttactgaacctgattaggctactataccatggcaaacaacattcagacgacctgacagagcatcttgagatcgatttttctcccagattcatatggaaacacaaccaatgctctgcaacaacattgtagggctataaaccagctacaactttgctatattgtgctcccacaaaaagtcactacatcttgcttggaattgagcttgaagttcatgccatcccactgttagtctgatttcagactttaagtagtctgacagtccaacattgggcttaattatttccaatttcttctcaacaactatgcttacactctgaagcaaaattgttctcctttgataggtatacaagtttgatgtggtgacctagggcaaaaaccttagaatttaaaagttacaaagccccaaagttgagccaattctctgattttcaaacttagtaaagaactcaaatgagatccattttgcaattaagtccaaaatccaagatttggcttacaaatccacatgtttgtgaaccaaatgacttaggatact

SEQ ID NO: 55808 - DNA, 912 bp, Zea Mays
tattgctgaccatacaacaataaaaaaaaacaaatcggatattggtttattttttcaatgcagaaaacacattcacatccctgcaaaaaactgaacctcttacaaatcccgggacaacccctatagcaatgcgccaatgccattgtatgtaccttgtagtgtcgtgccggctgtctgggcatatgtgtagtcgtagctaaatgagccgagcgcgatgccacgaatatacgaagagatgcccagcgcgtttgtcctgcatcctggtagccgtttccttggcatcgacggattcgtacggcacccagacccagctagctgctcacttaattgcttggccttaatttcgttcattcatgcatatctgaacatgtaatttagcattgcatgtacagacaaggcagatagatagattggcgtgcagagcaatataatgcagggatgagggaggtatatgctctcagatatccaccattgctcggttacacccaaggagaaaccagcaagcacatgacattctaccccgctgtgtgctgctaattgatgacctgctgcacttcgctttcatccgcgtcaccaacatttattttcgtatgtatctgctataatgcatgcaatgcatcgtggcacaacaacgatcaattcgcaacgttaacatgcatgcaagacgcgcgcggatcaatagttacaagaaagggaccatcgatcacctcacgtcgacaccttctatatatctctgcacacagcacacaccttcactcgcagctcggcagctataggaggaggaggaggaggaggagatcgagatagcaatcgccgggtggggggagggagagagacaagaacggaagaagaagccagccgcacagcacgcgcccgcgcggccatgtgcaccgagaactacgacgcgtgcta

SEQ ID NO: 55809 - DNA, 971 bp, Zea Mays
aagccggcggctgccccagatctgtggagaaagaaggttgcccccttgcactgtaccaggtagggggccgtttagcgcccagatctgtggagaaagaaggttgcccccttgcactgtaccaggtagggggccgtttagcgcgtgccgttatagctcacgcatcaccctaaattgctacaggggtaggagaggggaggtcggcgggcgttgaaagcagtttaagcagccacctggccacataacccaagcatccgccacgaaacacgccagctcagctgtgtcacgctcatgtttcgccaacgtcgccgaagcaaagcgcctcctcgtcctccagacctccacgactgcatgcaggtggggccactgggtccagcatgtcagtaactcaacccacgaaaaaaatctgtacgaaacgcggtagctagaggaggaaatgcttcgaggtgaatgaggggcccacgcataaaagtccaattctttgttcactttttttcttggcgtcttatctcttcccttctctgcctcgcttcgcttcctacccacgccacgcgtgtgttcttggcagccacccaatccccgcctcgcgaaatcagacgccaaatccccttatcttatcatcaaatcgatcgccaacgggcatgatctgatggctccctcatcatagcctctgctgctgcaccgcagcaaaatggccctggtttagtttagtcctcaagatcccgcctttctggtgctctgtttggctagtgtcgtgccgccgcgcgaggacccggagattcgattccggtccggtgtatctctaggctgcttggtttgggttaggatttagtgggcagggttgtgcagctggtgtctcgtggaggaagaatttcgtgggaggattttgaccgggtttgggcaaagagcgcgccgttcgggaggaggtgattctcgcgtggttgcgtgctttgctgggagtctgctgcggccac

SEQ ID NO: 55810 - DNA, 298 bp, Zea Mays
cgactgaagaaggctataggtccctggtcttggtgtagtaggacaacaccaaatcctgagcctgacgcgtcgcagtccactatgaaagggcactcgaaatctgggagctgcagtactagcgctgcggagagtgcctgtttgagtgtttggaatgctgagtctgtgtcggttgaccactggaagccttctttcttgaggagctttgttaatggagcagcgattactccaaaatccttgatgaatttccggtaatagcctgctagtcccaaaaatcctcgcagacctcgtggtgattttg

SEQ ID NO: 55811 - DNA, 467 bp, Zea Mays
gttcatcgccgtcctccctcctccccatcattactcactcgcacagggaagtttggcaccattttgtcccccgtgccactgtgctcatgtactcgcatggcacctcccccaccgagtcatcttgtcgctgtcgttgtgcaccattactgccgccgctgtgctcctcgatgaatcccagcaagcctctaccacacacctccactgagcgcctataaaagggccgccctgagctcctcttctccccgcaccagcccttggccactcttccccctcccctaagctcaatcgacgcagcgtcgtcgccctcccttactctggtgagcctcccccttccctctctagtagcccagtgacaaattaaactagctagcaagcttcgcgacagtctcacgaacacagaacaccacctctccatccccgatcaccaccggagcctcactggcgaccacccccatcgtggagctcca

SEQ ID NO: 55812 - DNA, 375 bp, Zea Mays
gttgggcatcctataatgtaggttaggttgttgttttacggacgagttggtctaagacaccaattttggttaaagcatgtttataggaatatggtctaatctatttcaccaagattaactaacttttttaagtaactcacttttgaagatcagattaaccatattagatcatatggattgggctaggttcaattaaactaggttagtttagattagatgaggtctaattaatttggattaaatcatagtggtcactctagggtgggataagtatgtttattagaacaagatgaatttatagggatagaatacctcaagatgagatggatctttttttttgctagattaagtttaatgagggaaagtctaagttta

SEQ ID NO: 55813 - DNA, 620 bp, Zea Mays
aaccccatggtccaagaaagtcgggtcaagaaggttctggtggacggcgtcagcagcatcaacgtcaccttccctagaacactctaggccttggggatcctgactactgacctcattaagtcgaataccccattctttggcaccgtagcaactcgaggagaatacccgcttagacacctcttcatgtcggtcacctttggtgctccagacaactacaacaccgagttcctgagcttcgaggtagctcggttcgagtgtgggtacaacgccatcatcaggaggccgggactggccaagttaatggccatcccacactacccatgcatgatactcaaaatgctcggacctcaaggcatcttcactatatgagccgacttccagggagcggtggagtgctattgggaggccatcaagacaaccctcactacgggaccctcagtagcaccccaacgacgagcgccaacgaatcaccaagggatgacctcacaatcccagcgaatgaagcatctaccagtagcaccatgcgaccagtcgaagaaactaagaaagccaacctcggtttctctgacaaattcaagatggcgataatcggctccagcctcaccaccaaataggaagac

SEQ ID NO: 55814 - DNA, 371 bp, Zea Mays
catacgaaacacgcaccaattgtcggcgtgagcagagaagcactagcacgggcagagcgtcatcgttgattggaaccggtggaggagcagagggactatgaaaagaaagaacgaatcatttgggtggaggactcatttgtgaaaagaacttgacgtgcaggcggtggtatgcaaaataacaggactctctatttcatacgcgagatgtgttctagacggccaggatgatgagtttgcatggtttcacttgggtcttggtttgcaccagatacggagccatcaataaaatgatacaaacccgtagaccttttgttgcattctatttttgttgccacattaacaagttagattgcattatgaatacattgatc

SEQ ID NO: 55815 - DNA, 356 bp, Zea Mays
gggtgatctatggttaagggcccaacgatccttgtaatgcgagactgggtatcttaatgttctatgggccaatagagcgccctagagtctatgtgttgatgagtgctttacaagccaaactgaccttgagtatctatactcttcatagtgccatgagacacaaggggcccaggggacatagactcttgagtgcctcaggagacaaggggcctctggagcttggatcactaaatagtgcctccatagtataagggacctagaggacttacattattctactatggcccctcaggacataagtggccttagggacctcgagttttgaaactagatttgataagagtactcctttgttt

SEQ ID NO: 55816 - DNA, 543 bp, Zea Mays
cgggtgatggatggagcagccccggcaatggcaatcgccgtggtccgcttggactccgctgctggcgttttcctaggaggaaaagaacgcctggtttgcagatcagagagctgacggtttgggatcgccttctccctcaacgaattagtgaaggagtttatccactgcaccaacctgtggctttcccgccgcgtgcgccattggcagaggaggagaaagaatggcgccgccgctgtgctcgtgcgcgctattgccgtgcgggggaaaggagatgttggtcctgccgttggattcttatccaacagtggtgattagatagggagatgacctttcgatggattggatccgggccatctatccagatcggacggatgaaaagcaatcgcatgactttaaaatccgggtcatcggtttgcgatcggacggatccgattaaacgataccccttcaccgtgccacaattgctaaagaacccctgagtaaaatagaattcaacccgccatccaagggtagtgttccctgtgtcttagaatttttacctcg

SEQ ID NO: 55817 - DNA, 425 bp, Zea Mays
gttccgaccatcggtacggagcgggagggccggtggtcgccaccaatatctggcgatcgttgagattttgttgtcttcagttctcctgcgatccgtgcccgccgaagatgacgttgacctctttgtcaacgtgcgggaaggctccacctcctccctcctcctgctgctggggttgtcgcggttctcctggtcctccctgcggcggaggaggaggtagaggttgaaagggccggccgtgtccgacggagtgcttgaagtctctgcagttccgaagggtgtggcgcatgtccttgtggtatgggcactgggcgtcgaggatgtcgtccagtgtgcgttcgcccccatgaggtcctcctctagcgcgagaggcaggtggtccggcggcgtgcacttctttgtgaggcctcttctccaagcgtttgtcg

SEQ ID NO: 55818 - DNA, 358 bp, Zea Mays
ctttgttactctatggagcagtgacattgttttgttaataactttagatctgaaagtatggtcctcgtggtttcagttgggttagattcataattttacctagtttaatctgttaaattttaagacctatcaaagttacggattttggttagcaatgtttctactaatgtaacaacggtatatctagattcataaaagtggaatcaattggtcttgtgattaagagaaggtaggataattctttttaatcttacgcaatcatccgccccctaatttcctattctagcgtcatacaatcctgcaataacctttaacttttttcatttatccacctatcacacattgatcgatcggatgt

SEQ ID NO: 55819 - DNA, 584 bp, Zea Mays
cttagcactagccagttcatcaacttgatgtcaagaatgcattcttacatggcgctctcactgacacggtctacttctctcaacccacaggttttgttgaacccactcagcctcatgtcgtctgtcggctcaataagtctctttatggtctgaagcaggcgcctcgtgcttggtatagctgctttgctactcactcagtctggggtttgtcgaagccaagtcgaatacttcgatgtttatatatcatcatgggactgacatggcttgttgctttatgtggatgacattgttctcactgcttccagccaggaccttccgcatcacattatcactgcttttcagaaggcattctccatgaaggatctaggtactctccatcaattcttaggtgtggctattcagcaacatttagagggcctctttcacagcagcagtatgctctcaatattcttgagcatgctagtttgtctgattgcaagtcgtgcagtactcctgtcgacactcatgctaaggtctctgccatgaccggtaccactgtcagcgaccccactcaatgttggtgatctacaatacttgactttcac

SEQ ID NO: 55820 - DNA, 1015 bp, Zea Mays
gggccgactttgggaccgtgtggagctcaatttgatgggtgtttgactaaaacctttgtaataaggttaaagctggtttgtaggggaataactttggtacagtagtcttactagcttgtggtacaaaaatcaaagaaccagtggtatgaagttgctctgtcagaagcaagtcacgcaaattgggcgatactgaaaaccggattcacagcagtatggtctcagtgagatgcagccaaattgagagcaccagatctgagaatttatgcagttttgatccatgaatcctatagtaaacttgaagaccattgtcttgtgaacacttcttattaataaagataaacctgttcttaacaagaatcaagagaaaggggggtgaaaggaggtcggttcagtggaacaacgaagatcagtgactcaggaaatatctgaagaaaagatccgtggtactatggattcggatgtgttcaagtgaattggagatagagacggccgcggcaagataactttgagccgattcacggtctcgcggattaggccgaggtccggccggagatatttcactggtgctcaccgtggcgcggtactttcatcgccgtgtcactcgcgcctcaactctacctcactgtgctctttcattacatggtggccatgtgctatcgatgcgttccgtggccaggcgaacctggtatggttccatgcatttgaattgttgttttagcagccctgtatgcccttaaagctcactatggcagtcgtttggccattatgggcacagttttgtgggaacgcgggatcgacgttgtgtaccctaccgtgtacaacgcttacgtcgaccaactaggattctattgaaccaacactggtttttgtgagcaccgtgacctacgtgacccccctgatgctctctgttcccttaatttgggatttccatgacaaatactgcaagaacatgcactgcggaaccgagaccccgccgtgcgcatggttaggacattctctggacgtgtgagccaaa

SEQ ID NO: 55821 - DNA, 568 bp, Zea Mays
cttgaagcttttattgtctccaacacatctagtacactggccatgctttttctcttgggggtcgctgtcagacctttttgtgacttcagcactgtcacttctgccgaagggcttagaacttctaatatttttgtcccatcaactcttgtctcttcaatattatcggtcttcggctcagctaatttggctgagggtgccttcggcattgcagtcggctcttcaattttttgcgtgggaggagcatgttttttcgcttcagtagctgaagaagtctcaccgccaaattcgggcactatggccgattcaatgtagcgcggtcggtgagtaaggaccttcaatttttcctcttcggtgcgggctcgcttgaagtagccgaagcagcagccttcccagaagttgcaccctttcttttctgctcccacggtgggtagcggtaatcagggtacacaaatccaatagcatcaaaaactctatttagccttttcttttttcggctcccgaatgccgctgatagtgcgttatcttcagacttggagtatgctccaagtagttcatcactagtattttc

SEQ ID NO: 55822 - DNA, 550 bp, Zea Mays
ttgggataaaagtctaccttatgctgaattctcatataataatagttatcaggccagtctgaagatgtcaccttttgaagctttgtatggcaggaagtgcaggactcctctatattgggataagactagaggaagacaattctttggacctgaacttattcaagaggcagaagaacaagtccgtatgattcgagagaatttgagggtagctcagactaggcaaaagagctacgctgataatagaagatgaccactggaatttgaggaagaagattatgtgtacctcaaggtgtcaccacttcgtggaatgaggagattcaaggttaagggcaaattgtcccctcgctacattggaccattcttgatctttaggagagttggggagatggcataccaactcgagctacctgctagtctatcggatgtgcataacgtgttccacgtgtctcaactgaagaagtgcctccgtgtccctgaggaacagttaccaatggaagagcttagtgttcagggtgatttgacttacacagagtactcgatcaagattttg

SEQ ID NO: 55823 - DNA, 343 bp, Zea Mays
tctaagcagcatttaacacttatctgtgtaacgcatgttcctgttgtgtgcgatgttgttgactcttccttagtacctggccccccgcctgggatgcaggcttgatgtgttgaggttggataccagcgtttctgaaaaggttgtcaacaatcctcgggaggcaaactcgccgggatctagatctgtacacaacttttagctaggaagcattagtagtacacctcatagggttctccgtctgacattagtctccctttgatacatgatcgggacctgcaggttttagtctgggtggccaagttgcgtgtccggacccccttgggtcgcggttctagatactagg

SEQ ID NO: 55824 - DNA, 533 bp, Zea Mays
gggcgccaccgtaatggaccctataaatcaatgccccagtgagctccgttaggttgttacacgtctagtgcaccagccctcgcctccgattagccactgtagctcgtgaattccaaactttccctaaatcgggtttccgcgccagcgtgaacacctcgtcgtggctagccctctgcaggccagttcaagcttctttgcttgttgatctagactcccttgagtcccctgctacttgtagacccatttaattgaactagactgccctggatcaccaataacacgtcggattgttctcagttttcgccgtcatcgtggacagagagattccgacccggattagtgcaataagttgagggattaaggtcgccaggggtggaattaggtgtcagccaagctagagcgccggtcattgtgtgtcttggccggtacaggttcgctggagattgctcgtcgccgtccaccgtcgtggacctggcgctgcgaagaaatagaagtgcgagggcctaactgcgattgtcagtgagacattggaa

SEQ ID NO: 55825 - DNA, 617 bp, Zea Mays
tgattaggagagcataggtatccagctacttattatgtaggatataagctggacaggttgaggtaagaaatattatggcaaggaaaagacttcatccaaaatgttaagtcttgattcatctcgagattcgctttgactgttatatccttccttgttggtgttgatcttttcttctctggtcttgatctcattgattcgaggttagtgtattttatcggagttggggaatacagttaagatagatatggatgagatagactacatgatgtaggtcagaagtttgtttgatgttaggtggggataggcagattatgcaatccatcatgactctattggttgggttagctcttctactcacggttgagtgggtttaatgcactaatttaggtttaagtgtatgaggggagaacaaggttcataggagtaggacctagtttatttcactagtattaacttgttaagtgactcacattagattgaataagctctagattagtataagctgagtgtgttatgtcaaatttcaattgagtgtctttgttttaggtagggcttggaaaaacaatgatgtatatcattgaaattatgtaggtcaagctggtagattagaatctctt

SEQ ID NO: 55826 - DNA, 611 bp, Zea Mays
ctaagatgtaccaggatctaaaggaaaagtattggtggtacggtttgaaaagagatgtggctactcatgttgcactatgtgacgtgtgtcaagagttaaagccaaacaccaaagaccaacaggattgctacaacctctcaaggtaccggaatggaaatgggaagaaatcagtatggatttcatagttggattaccccgtactcaggatggctatgattcaatatgggttatagtggacaagttgactaaagtggcacactttatacctatgaagacaacctactcgagagcctagttagcagagttatacatgtcaagaattgtttgtctgcatggagtaccaaagaagatcgtatcaaattgaggaacccaatttacctcgcgcttttggaaaagactacatgagtccatggataccaagctaaacttcagttcagcttatcatccgcaaacggatgggcaaacggaaagaacaaaccaagtgttggaagatatgttaacagcttgcgctctaaagcatggtagaagctgggataaaagtttgccttatgcagaattcccgtataacaatagttaacaggcaagtctaaaaatggcaccgtttgaagcac

SEQ ID NO: 55827 - DNA, 787 bp, Zea Mays
ggaaagaaccccagttgggccgaaaccccttcttctcggcccaactagccagtcgccagcatcctcctccactcgctccatgggccgcgatgcaggcccattcccacccggctctcccacgcaatcacacgccctgtgactgaccaaggggacccgcttgtcatcgttttcgactgcactaacgtgagcgtctctcccacctcgtgtctctgacatgtgggcctaaggggtcagatgttcattcatccatgccgatgacgctggggagctcatagcagattcacaggaatctcggattctgttgatcctaaccaactcggagtatataagcgacaaccccctcctcgcctcatcattccattgaggcgatgtccagaccccgaacatcatgccaccgtgccgactcatggcgcgcggcaaagagcgaggcgtgctacgccgccaggggatgtgcatgcgtttcaacatctagatcttggaataggcctagggaaattcctagtacacacggatgcttgtcgtggcttctcctgggcggaatcgtgctccagaccaccggaattctccgcctaagtatggtgaatgtcgcgaggccgtgtctctccgtgggcagagaatcccataccttagatctcggtgagatttacttttctagattctccataatctcctttacgtgtagcatgtttctatcgagggatccgtgttccagaccacgagaagactttgctccggcgggtgcgccaccgtgggcatcgggcgacgccactgggctcccagccatgag

SEQ ID NO: 55828 - DNA, 516 bp, Zea Mays
tttgtttctcccatcaccaattgttacaatttttatttcctcagacatgccaatattttgaacccaacaattatctctagcagcaaccacctctttctgaaaggataaaaacacctcatgtgtatatagattactactctgtttttccatgggccaagatgttattagcttaggagcactatgaatgcttttgttgtctgccttcaactcctcttggcgttgccattctaaggcggtctcaaatcgaagccaaaactcaacaaatgatagtttgcgatgaataaaatgattaaaaaaaggaatttgcactctcagaccttgatgtggttctaaggatgcctgctagagatacatccatatagtatgctggaatccatgattcacgaatatgatatctattttgtatccattcattcccatgcaagccataatcaatcataagagaagtccattgtgactcaaattcttcccctgtttctgaaccccaaacacatgcattcaacctcggccaaaaat

SEQ ID NO: 55829 - DNA, 916 bp, Zea Mays
tgatgatgcctttgggctatgaaagtctcctagaggggaggggttaatagacgaaacctaagatgaggagggggcctagaggtttgcctggtcaaatggatgaacataagaacacaatgatttagagtggtttaggttgctggagagcaataccctacatccattatgagttgtattgctatgatagcttgagtgttgtgggtctgagtgtccgagtcctccccttcgcaccgtagcaccctccctttttatagtctaaggagtggcacgttataagggaaccgagccccgataggtgggcccaggagctactatgatatgaagcgtgaggcgtcgggtagctgctagatcttgtggcgagtatctcctcttggttgctgcgcaggctcctggcatcctatcatcttgctctatccaatcggaacacaagcgtaggccttggcgtaggttgcggtgtaggccttagcataagttgcggcgtagtctaatacgctgtcgtgggtgtctagacggtgtcatcctgtctcctccgcctatctcctcgcgcctcgggaacgcatgaggaacagtagaggccataatgaaaggcgcccaaatagtgcattgagttaatggtcttgccttggtaacgtgcgggcaatagtgtaccccatgtgttgtagactaggcgcgttgtgtgcattaaataaggggtacgccacatgccactggcgtgggcaagtgcacatcccactcgcacctatagttggtgggacctaggtcaaagacttatgtcagacgccgcccggtggcttacgtcaggtgtcctcagccacgtgtcagcaccagacctctgcttaggtagggagtaggcctaggaagatgtggtagcgtggcaccctcggatccctcctgacttgggatccagaccatgctt

SEQ ID NO: 55830 - DNA, 744 bp, Zea Mays
ccaacacaaccaattttctagcatgagacgtctgaggtgggagagactcccgatgagcgggattttcgcctacaaaggaactcccaccgtcggagccaccacctcgcccaggagcatgaatgcgaagcagcctgacataacgttgggacctctcacggacatgaacttcttccttgtgacccgcaacctaagttcgcctagaccatgcaaattttgagtcatatcgggggtgtgctgaaaaagatggtgaacggtctacctcgcactcctggcaacgagtactaccggtggatcctcactcaagcggcgaaccacctcctaccatcggctcaccccgatggcaacatgcgccaccacatcaacaatcatcgcgacgcatgagccaacatcgatggatcacgtgcttgacgacatgaagaagagctaaggcgccaagaagaatatgagtggggccacgacgccccgcaatggcaagccgcagaccgagtcgactccaccattgccttgatgaacgacctgtaaccgcgccgatctgctcgggaccgactagaagatccacgttgcccgtcgccaccacgggaccaccaccacacccgcgcccgagacgattttcccaaagccgggggactattcgtggtcttgacctttactccttggatgtgggcggtccaatgcccacccaacttcaaggtctccaacatcgacaagtttgaggccaagctagaccctaggggttggctggac

SEQ ID NO: 55831 - DNA, 551 bp, Zea Mays
attcatctcattacctcgatcttgtctttagaggtaagacagaacaaggcacgtggcagcttgtcgttgtcattgagcacttgggttggtcggtcacaaagcattgctagatctcttcgagctttcagattgccctttgttttttcaaaatgcatgcaggtgaatatgagggcttcaacaacattacattcttggtgcaagacatcaatgttatgcacaagaatcaatgacggtatataagggagctcccacagaccacatatatgtgtccagttgtggtccactctgaatccttcgtacttgtcccccttttcatttaggacaaggttgttcagctaagcatatatttctgctacgttcagacgtttaggcggtcctttggtgaccacggtgttctttataaagtttttcttatcgctcctaaaggggtgtttcctaggcaaccagcgtcgatgacaatcaaagtgatctttccaccatgagcaagacggaagcaatatgtatctgaaccgcaatatggacatgtcaatctaccatgtgtactccaaccg

SEQ ID NO: 55832 - DNA, 439 bp, Zea Mays
gcgaagcagacaggccgaagggggcgcgggtaaactccgaccgtctgatctaagatgagcgcttctgattagatccactcttatcccgaaccggtacgctatgccggccgttggatttgagatcaacggctccacgatcccacacgctcagctcccttccgattagatcggacggcccgaatccattcccacgattagacctgagccctataatcacaaccgtcccctcttcaatctatggtcagaagactgtcaccctcctccggcgttggttcatggcgcgcaggtcacctcacggcggcgggttcgccggagatagtgaacccggccccccaagcgccataacccaattcgttcggtccacgcaaagttaatgactcactgaactctttactccaaccaattccagccgaaatcgaacgcagcaaccggcccccgg

SEQ ID NO: 55833 - DNA, 283 bp, Zea Mays
tcaacaacaatgacttcacgactttccaaggcagttgcataggcttgagctatggtgagacccacatggagctgatggttgcgcttctctacatcttctactcgggctatcatctaacggtggtgccgagctaagaaatcataatgtgcatccacggtgagcaggtatgcagtgaggtacatgactatggggtcgtcctcaagcagcttctgcccttccaatgcatgcatcatggccatccaaacgagacggtctctctaaaagggccgaaagaatctgttcg

SEQ ID NO: 55834 - DNA, 305 bp, Zea Mays
taaagcatctttgtttaaaatacacaatgcagatgcatttaacgttcaattggaagacccttggtctttatcaaactatacagcgtgttcagcctcactataaatatggtacaaatccttgccgacgagagccaggacggtgtcgaggaggtggagcctcactataaatatggtacaaatccttgccgacgagagccaggacggtgtcgaggaggtggccaggcagatgagttggggaagggaagcccaggccccgctggcggggatggaggtcaggcgacagggacgagatctcctgaggtgga

SEQ ID NO: 55835 - DNA, 744 bp, Zea Mays
ttcaaaaaccgatgaacctagaaccctaaatcggctgtgcgatgattaaacttgtgcatgggttgtccgacccgaccaaccacaacacatcccgtccgaaaaaaaacctattgggtatggtaattagggtacccagattacacctctaaaacatgattaaaccctaagaacaatatcaaagtatgttccccatggtcaaaggatcaagagacacgccttgctcaagatcccccactggggtcttctcaaaactccgcattgtccgagcctggtctcggacggggcatgtgctcgggagaatctttgtcccgaccgaggtcccctcaccctaggatagcggtgtcggcctcgctcgagcccgtatcgagcaagaaggacaaaacctggggcaagactcatccaaagtccgccaggcgacagcctacagggacaataagaccgtagtcttgtcaaagattcaccaactatgattacatgtgcggcactatacatgcacgtcgtttgccaactctggatgggacgcgtaatataacagggccacagaccagccctcgggcgtaaactctcgtcttgcccgaagtggaactcaccctcagggcaaaactctgcctcgcccgagcccggtctcgaccacctgctccccggcgaatcccatgggaggccacaccatcaactgtggcgcacgactttgaatcttggaacgagtttggccgcagccttgggaggacttccacctctcccgag

SEQ ID NO: 55836 - DNA, 343 bp, Zea Mays
cggtggacatccctaagaagtgggcaccctttttcctttcgaatctgcttcagcctgatactttcaattggtccaagacctttctgctgtcagatattccctcaactttgcaggagcagggaatgaaatccatcccttttgtggtccctaaggaatgtccgaatgattcctccatggaggatgtcatttctgggatctccaaggattctggcagttgtggtgggccgtcaccaatcattgtggagtcagagctcagaagaagcaaacgtttgaaagaatcacgtgctgggttcaggcagggggcctgcccaaaaaggaactgcctcatgtgccaacataactt

SEQ ID NO: 55837 - DNA, 685 bp, Zea Mays
attttgccgtgatccgtaccgctttgtttatgtggacaatataagacgacgtggacgtgaacgtcccatgttcagccaacggccattgtaggattgtacgcgcgttgttttcttctgtaaacaacagggtttggtcgacctgtactgtacgtatctgtttgtgtgtgtgtgtagtagtagtagggtccagtctgtgtcgtcgtctagtagcttgccgcagttcatcgaccgaccgacctggcacttagttaagtgcgtcgtcgtacggcagctaggcacctacccggccgtgttgtgattagttaagttatactcgcgtgtgtttgtgtgtattagctgtccgcaactaatttaggagctagcgccgccgaaagatacatctcgatcgtgtgttctcttctgttctgcactagtactgtattgcgcgcggctctatagccaatacatctgcacagttgtacactgaatgtaccccgtttagacgctgctggttcagatatgatatgccctgtgctgctgacacggagtagtagtcaaccaatggagttacctaatctgcctaatctggaacaaaagaatagcaaacggaatatactacatacatgtagaaaataatacaaattctggcggtagactatctgaaaaattgactagatatggtagaaaaaggctatcaacatttata

SEQ ID NO: 55838 - DNA, 420 bp, Zea Mays
accggattcactccctttcgcctgctatacggattggaggccatgaccccataggaaatcaaacatgggtcttcgcggacaagcgcttcagcagtacccgacgtcgacgagctaacctcccaagatctcatcgacggagaccgtgtcttcgccctccaggccctcaacaaataccaagcccaaacgaaggcctggcgcgaccacgcagttgttccaaaagaattcattgaaggggacatcgtacttgtccgcacaacccggacagagtcacggggtaagctggagccaaagtgggaaggaccatttatcgtcaagacgaagtcgtctcccagcgcgtacagactaacaacgcaatctggcgaagacctggaacattcctggaatattgacaatctccgtaaattttttgtttaaatcctc

SEQ ID NO: 55839 - DNA, 1082 bp, Zea Mays
cgcaaatcgtgttgtgctcataccagcccaccgtgttggggtggggacctaggcatgacactaactcaaatgtcgtgtcaacatagaccttatttatataccgcctgatttgttcgttatgcgcgcgggcatggtcaggcttaagcgagcgctcgcacatggtcttaaaaaattcagggtccaaaaatcagcagatttattctagttttataatcttttataacacatgttaatatgtagcacctatttctctctctatcgtgccgttgcgctaaagcggaactaccgagtgtcgcataaagaataaatcttcatatgatcctaacatatgtcggcttgcgtgaacaaagtttctcaaaattaaaactactaaatttatgtttgtgttctactatgacacaataaaaacgtattatttagaacaatagcaatagagagtgaatatttggagaagattggatataaacatattgtagaagatattatttaaaactccactaaaagaacgatgttattcaaataaaatagatatgcttgtttatatattctattgcaatatatgctattacaagttgtagaatattattaatcattttgaatatagaccctaccactttaaatttggcacatggcctcaaatgtttcaagcccggccctgcgtgcgggcctagttggtcggatacgactgttttgggtatatgtgcgaatgcagcgaaatgtcctcaaaatagattcttctgcttccgttcatgcagctcacgtctcccacgtgcagacaactaaacagacgctcagacacagtccaggatgacactgtgcatccaactaattaggcggatagtcgtaataattgtgctgtcctggaaaaaatgagatgtgcattctttttaatatggaggtaataatagagcagcatccctattacgtacaatgccatgctatctgaaactggagctctcggcttttgccgtactatcactattgtctagccatcagccaagacatgatgctataatgtctaatcatattgtgtcaacactacacacgacactagcacctaatagtgttttgtaccagcccag

SEQ ID NO: 55840 - DNA, 726 bp, Zea Mays
ccccagggaggtgatcgagcaccatctgaagatcaaccctgacgccaaaccggtgagtcagaagcctcggagacagtccgttgagcggcaagacttcatccgaaaggaggtccggaagctgctggacgctggcttcatcgaagaggttcatcacccagtgtggctggccaacccagtcatcgttccaaaggcaaatgggaagcttcggatgtgcatcgactacaccagccttaataaagcttgtcccaaggacccgtatccacttccacgtatagatcaaatcgtggattctacctccgggtgcgacctcttgtccttcttagatgcttactctggtttccatcaaatccagatgtctagggaagataggaagcataccgcttttgtaacagtggatgggctttactgctatgttgtaatgcattacggtctgaaaaacgccttgccaacatttgtgcgggcgatgagtaagactttcggggacttgatcagggacaacgtagaggtatacgtcgatgacatcgtggtcaggtctaagagagggtcaaccctagtggaagacttaaccctggtcttcgacaagctgcgggcaacacgcacgaagctgaacccggacaagtgcgtctttggtgtctccgcaagaaagttgctggggttcctggtttcgcaccggggcattgaagcaaacccggagaagatcaaggcgattgaggcgatgaggcctcc

SEQ ID NO: 55841 - DNA, 283 bp, Zea Mays
ttaaacaaaatggtcgcacgtttccttgacgttcgacacaaacgacgtcaatctctgaaacgccccgcacacggacacaatgttcataacttgcaacatagcaggctagaaaatacacaaggctctcgtagacaatgacaaccaagcagatatcgtattcatgcatgcgttcgacaagatgagcatgaatcccaacctgttgcagctagccaacaactccctatttggatttggaggcaaggccacactcctcctcggtaagataaccctgccactatccttt

SEQ ID NO: 55842 - DNA, 417 bp, Zea Mays
ctttcttaccttaatagatccatcttatctcgaaaaagactctaccctagcctactagatctaactaatctcaaaagattatgtcttattcgtagagacttgtcttgttctagcaagcatacttatcccaaccacttggcttatatcataaccttttaacgaatataatctattctcatctaacaacaaacaaacttttgacctatatcatgtagtctatcttaccataactatcttaaccatattcccccaactccgatgagatacactaaacccgaagcaatgagaccaagaccggagaagaaaagatcaacctcgtcaaggaagggtagaagtcaaactcgatcttcaaaggcattaccacccaacaaggagttctttctcaccgcaaactttcttaccccatgctattcttgc

SEQ ID NO: 55843 - DNA, 339 bp, Zea Mays
cttattgctaccagggtgcatggagaatttggaaaggtgagcttcatgcaatatcctctttctgagttcagggtctttggggacaaccaatcgatctccaaaccatagaattcccttgctgtcctgacggaagcacttgtatttttctgccttctgcttgatcatgtctttgataacctgaacacccttatcttcaatctgtgccctgactatttgctcttgtaatgtgggatccaccgagatatagtttaagtcacccgaagaaacaacttccaggtttagcttgcacaattcatcacacagggtggtaactctcgcatccatgttcatacaattgca

SEQ ID NO: 55844 - DNA, 567 bp, Zea Mays
cctcggcgtcagaagcccaccataacgcctatataatgaggggcgggggcgcggttaaggataaccctaattcgccaccagcaaactgacagccgccgcccacctctcgccctcgccaagccgccgtcgcgaacctagcagttcggtacgcggcgcttcctccctgtacgtgtggatacctcggaggtgctacatctggagcacttggacgaaccgcgcgaggacttgaaggacgccggcgactgcacggcactgctcgacgcgttcgtctacatcgagacggcttccgctgctctgcgcgtctagtggtaattccatgacctataaccgcagtagttcttggtattatggggatgaaaatttttgttttgcgctagcgtagcctccccgtaatcctacatatatctagtactgagctagggtcgggcgagacggagtccccgaagactcgcccacccggcttgttgtatttaggcgtcccatcagagggtgccacgcgacgtgcacacactgtttggcataggtgtaatcataccgctacgtttagacgtgattgctatcttatcc

SEQ ID NO: 55845 - DNA, 560 bp, Zea Mays
atcgtctcgtgtaaaataatgactccctccataatgtttcttcctgacatgaaagcagtttgagaaggcttaatgactttctgtgctactagagccacacggttcgtcattaccttggtgaaaatcttaaagctcacattaagcaggcatataggtctaaattgttgaatttgtttggcctctttttgcttggggagtaaagtaattataccaaagttgagatagtacaggggcagatttcccttatggaactcaagaaagaggcatagtaaatcgactttgattacgtcccagaagacttgataaaattcagctgggaagccatcaggtcctggtgccttattatgttccatatggaagattgccttcttgacttcatccatcataaatggtgaagtaagaatttcattttccaggtcagttacctgtgggatatcgtctctgaccgattcaaccatggaaaaatggttgggttctgatgcaccaaagaggcccttgtaatagatagtgataaatcttttaagattttcatcaccctcaatagtgcagttctcttgttc

SEQ ID NO: 55846 - DNA, 387 bp, Zea Mays
gcatttctttgggcatgaaattattcaagaggcagaaaaacaagtccgtataatctgggagaacttgagggtagcacagactcgacaaaagagctatgttgataatcgaagaagaccactggagtttgaggagggtgttcatgtgtacctcaaggtgtcaccaattcgtggactgaggagattcaaagttaaaggcaatctatcccctcactttattggaccctttagaatctttaggcgagttggggagatggcctaccagcttgagcaacctgaccatctgtcccatgtacacgatgtaatccacgtatctcaactcaagaagtgtctccgtgttcccgaggaacagttacaaatggaagaactcagtgttcagggtgatctgac

SEQ ID NO: 55847 - DNA, 349 bp, Zea Mays
tgggcaaggttcgggcggaggttgcggaattgcgtgctaagtgcgcagcacgccactatctggatggtggttctcccgcccctatcgggattcagcacccttacatgtcattgccccgtggtcgcttcgactatggtaccccagactgcaggacccacatagatttggatccctagatcgacagagtcggagtctgtaataatgcttaatttagtgtcttagtctagtcagtcttagttagagttagtttggttatctcttgttggatgcttgtcatgatgaacatgtaatgaagttggatctttgtaatgattgtcaccaaggtgtgggtatcccctgcaacttggtg

SEQ ID NO: 55848 - DNA, 3062 bp, Zea Mays
gacaaattcaggattccatgtgattcatcctggaaaatgggaaggaaacatgttccatatgatagcaaacttattgatgtccactgcccacaaagtgcaaggaaatgaagaaagtaaatataattgttcagtatgctacaaactgtcatgaatgataacctagcatatcttggaaggggaaaacgataatcatctgcaagcaagattgcttgtgacattattctaaaataggtataaatggtctagaagcttacccatacaactcgtcatggtagtctgtctcttctcattcacagatttgctgccttcagtattcccagaatccatagatatgacatcagtatcagaattttctatttcagatgaaggaattgtatctgcatctatattcaataacatatctacaaagccagatcttcgcctatcctccgtaaccagcacccttgatgtagatgacaattcacctgttttatgaaaacgtgcaatttggagctcaaaaccccatttataatgctcaagtcatcacagaagaaaaccataaccaatagttccaaccttcttgccatcttaaaataagtgatgagtatggctcagtaagcagttgacgtagtggaaggtcagcaaaaaattgatatagagcaaaagctgcaactcgactttgtgcttcctgttaataatttagtttaatattggtactttggataagaagagaagataatattctagtgtgatttgttatgaactgatatctcagtgtatcatgtacgtataataatgaaaactattatcatggggagaagtgccatatcagaataataattagcttacctagagtatttgtaagaactaagaagtgttagtgtacaaagtaacagaaaaaggttgtaacctgaacagatccatattcttcatgtagtttaggtaactggattatcgtcaagcctccagccttccgactcttaccacggccagtagctccccgcaacacattaacagaatatacaaatttgccatctctctcagatattttattatactttggtgcttcccaaccaagtttttgacaaaacttttgtagaacagctttcggcattttaccagaatctccctgtggttgagcaaaagaaaagaacggttagaaaatagtacatagcagaagcacaaatcaaacatgaaacatgtcccatcaatatgaagaaagagtaaaaaggcacttggaccttcttccatatatcatctatgtttccaataagatggccataaccatcatgtgataatttctctatttgttgctgtttcaagatttctggagccactgcttcccaagcagatgagtcttcaaagaacatgttatcaagctctatcacctcttcgtctacctcctttgcacaagttttatcaatatccttaggaatttcctttttcaaatcagatccttcatcaatattgcctagactctcagatctttcctcacttgcctctaaatcattctgaacaccctcaacatttgcagtttcagaatttgaagatacagaattggtaggatagcttatctgttccttcaagtttccatgcttggaattcttttttgcagctgttaagtgcgggagggaatcataagatagttcgcggtaaactatctcaactatgtaaacttccaaaaagttgtcagggccacagggccatgtaactaaaaactagtagacaacatatgtcatagttacaatatgaatgccaataaaacaataagcaaagttacccttgctcttccgcctacttggctttgcttcgacaacttcaaaactttgtaagcagtgatcctcccatgtagaggaatcattggaatttgcatcctcttcctaacatcagtgatatccaaaagaaaaaatgtaccaagaaatatgatattaaaagaaatgaaaaggaataacagttaacagaaagacttgatagaggttgtgaaattgtatgcataggatattcggatgttgggtacatgcaacctcagatacattggtgaaaggtgtcatgttttcataaatttcccattcatgtgtaaaaaaaagattatttagattgaccacaagaaaataacattagtagatgtgtcatctcaaggacttacattctattacttaatgtttactggcatggagttattacaagtaatagtcaaagctacatattagagttatcgctcgctggtgtccctggcttggaacttggaaaaactcatatgttatctttataagcagggtattacctcgttctacaaaaaaactacacattggagaccatgtcaaaatctaaaactgcagtgaggatagttaacgttttgaaacaaaaagataaaccataagcaataaaaataagaagagacttgaattgttgtgaaacatagttcccagtgaacaatagttaccaatttgtgtaaccattttgtgttctttttttcaaatagaacaaaacattgtgctacttagattagacaacaaaatcagttatttgtcttctaaaactgtaagttgcacaggttcatgatgtagaagctcttagtatccactggaagttcagaacaacctgagagaagtatgaaacagaacgatacaattggagactaagcaagcggacaaaaaaaacataagactaacaaaatccaacagtttttcaaagagtactaagagatgactcaattcatgtgaaaaatacttgttcactcatctatacctcctcttgttgttccatgtattgacgaatccatgcagcttgtgacaatcgcccatcatccagtgacacattctcatctctccgcccaccaattctaacttccaacccctcggtgctcaccttcacctcctcaggttcacgactctgtggcacccaattgtccttggctgtggacagtactttaacagaaccttcagctcctacaacacatagaaacgatgtaatcattacatgaatctagcatgaaagagaaacacctaattaatcaaccaatcagagcctcatgagtggaaaagaaaagacaaagtcaacacttcatatttatacgatattgg

SEQ ID NO: 55849 - DNA, 583 bp, Zea Mays
ggcgggatcggagcggggcagttaggtgagagaggggcgtggggaggagggatggatctggggagccggtgctcgcgtgaggcgtgggcatctttcggcgttggttgttgtaggttgcatccgacggacgatgaaaacagagtcatggatggacggttgagattattggaaggcagaacgagaaaaggcatgctaccttagagttttaataagtagtatagatattgtagactgctcgtagagtggagtttgaaaaataaaagatgaggtgggagatagaatgggtaaagctactgcagatagtttaacaagttaatatgacctgatgaggatgaagccggatactcctgtttgttttacattttggtagatttttcccggccggcgctcagtcatacatcttccttccaatcataggcatatcagcatatgcacgccttatcctgttagaaaccggcaaccattttccttgcattaaattcattcctgaacttatccctatagcagagaaagttcttctcttccttcccgccatctcctaccgccgcccatcatcctcaaacggccgcgtaatagatcgagc

SEQ ID NO: 55850 - DNA, 375 bp, Zea Mays
ggcgcggtcgcgaatgcatcccaaaatctcttcgtcgaccccgccgaagagtatggatccgggctggtaaccgcagtatatagcaaactctttcaattctgatttgtcctcttcggaaagttgttggtcacccaaatgtggaaggtcaaaatctttatcttccgaagaggcatcttcaattctttttcccttgtcagtcgctgcggctacgttttcctcggcaaccacatctgatatgagtctgtcgatttccgacattgtggttgcgagttcatcagcttcggctccgacggtatcttcggcatcgacaggcatagctgtttttgccgacgaagctgggggtggcgtctactcaatagcttgcatccatcgttt

SEQ ID NO: 55851 - DNA, 312 bp, Zea Mays
cttcaaagggcttggtgttgtcaggttgagctagcacttgtgctgtcgtcaagtgttgccttagtgtatgaaaggcatcctcacacttctggctccaaccatacttgactcccttcttcaacagttcagtcattggtttggcaattctagagaaatccggaatgaatcgtcgataataccctgccaatcccagaaaactctgaacctgtctcactgtggtaggaggtttccaatccattacctcttgtaccttctcaggatcaactgataccccatcctgagaaattgtgtgacccaaaaatttaatttccc

SEQ ID NO: 55852 - DNA, 875 bp, Zea Mays
ttattcggtaaaaggtcacagcctcagtgtaatggtttaatcactgatctggattgcgggtttattctggtaaaacacaggggctcttatgttaaagtgccggggtgaaggggtatgggacgagatcgatcgtccgattagaaaccgagcaccgggatcatatttcttttaaaacaaaatggtatgcaatgacagccacccgatccgtgatcaacggttcgagtttatcatatatgaagcctactcctgaacgcccgattctaaatcaacgcgcttgatcaatctaccgaatgaatacacatgattctaatcagagtcgcacaattgaagatctacgaactccaatcatcactccatcaagaaatcggcgacggtggcgcaaacgaccccgcggtgaggcctcgccgatgcgacggtctttggctgtacacggaccctacacccaaattagatcgcaactacgcatagcaggaacgatggcggacatgtggatagagatctcaccatgaatcaggaacgtggaggtcgctgcccaccgtgtttggcggagctaccgcggcgttgggtctccgacgagggaataacactgaccctgatcacccaggcttggcgaagcccttagatacgatccaattcaccggcactgcactccggcctttccccaagggtccagattgcagcccagctcgatcccaaccatggaggcgactttcccctccgaattgcaatggcggcaatggctgagttggatgaggagagcacgggacgagagaggtaccgagcgcataggttttatagtccagataggtcggtggcaccagaccagctataatcgcgtggcagcgcaaagcttggtcaggtggttgcggtcgcgg

SEQ ID NO: 55853 - DNA, 315 bp, Zea Mays
tcaattacttaagtaaccttgggtaggatatgtaggaattttgcttcgtttttttgcttcttggggtgtcagttctgtggtctgtcatttttgaaacagttttgagccttattgggcaggagttgtcatcactaaattagtctaattaatatgccactttaccttctcagattttggcggccacattttctcatgtttacttttttagtaaagaaaaaggagcatggaaactaatgattgttctttgcattaccacaatatgacctttatttttgtcatctttttatagggtctgattttaaaagagaactctcg

SEQ ID NO: 55854 - DNA, 782 bp, Zea Mays
cggggtcgcgggttggccatgcgccggcgagcttaccaccgtggggtggggtcgtggggagctcgacgccgcctttgctggccgccatggaggtagccgcggtgagaaggataaaggagaggcagtcctggctatcgatatgaaaatagatggtctcgattacatcgggcaagtaccggttgagatttttgatccaggccgtcgttccaggatcgaagcgttgtgagtcgattgatgcgtgggtggtgtacggaccatggatcgcggatccgttggacagaatggcttaccgtttcgtttacaagatcagacggatatgcgccgtgggcttctgatccaatggccggtgatcactcataccccttcgccgtgtcctttttgctaaagagcccctgtcctttctccatataaacccgccatccacgcatatgtaaagaccattgcatcctgaccctgatttttgcaagttagaccctgaggaatttataaatagtggtcgccatccacatcacatgaatatctgtaaaattaaaatccgaaaatgattttaaggataaaagtaatcctagaagcttagatctgtactacttcttaagcacataacgtaggcgtccatagccgtccgtggcgcacgttctgcctccctcccgtgctcacagccgcgccctgccagccccgcgcagtcaacgccgaaaaatccgcatcccttcgcctcacgtctcctcctccatccgcagccctccttctccgcctcccgatctcccgcatctgcgacttctaca

SEQ ID NO: 55855 - DNA, 397 bp, Zea Mays
atgacgatgttgggaccatcctctgtagcttcaacattaatttgattaaccctggcaatgctgtaagcacggttgctgcctggagtctgtgtttgcttgccctgagaattaccacgagccagtgtgttggggttcctcttcagacacacattagcatactaaccagtctcatcacacttgaagcatgtggtgcctatagtagtgccctagcctgtaggtctcgccggggtgccagtgggggcagcctgacgagtatgcagagtatgtggtgctgcctatggtgtctgttgagcagatcactgataggactgttccctgcctttaggacgagctggtgtacactagggcggaatatagtgagggcggacgctactgctcccctatccctgggtaatag

SEQ ID NO: 55856 - DNA, 759 bp, Zea Mays
tcagttttgaagatgagggggtgaagtagatcatactctaaaagtcagggattatgtagacttattcctaatataatatggtagtcgtcaccttttgaacaattaactaagaatcctggtaaataaacatattaccctcattttcttttataagacacaatcaaagatgacacaattcaccaaattacactaccaccatttattcattatatttttaatgaatatacaaattgtagcctagacattttgatagagaacaaattttatattaggggctggagataaaaattggttacaaccatttccattcataatgcacttcaaaaataagatacattggagactatattcaaactaattaaactaacttaaacataacaaaagccaactaaatctaagaatcatccttcatccgccgcatgttgggaggctcctcattattgttgttctcctcctcgtcatccttgtcttcctccttagcctcgacatctatgtcattgacgatgatgacaacggcgtcattgtcagtgtcgttcatggcgccgcaggtgtcgtccctcgtggcaagctgcaacgaggagatgagaaataacacttaagttttgaaccatgaccaccgatgattaatttgttataccttgctttggggaccatcttccatgggaccctatgcagaatgacttgcggcttgccatcaatagtaatgaggcagtctgctaaactacatcctagggtctttagaactccgatgcgttcgat

SEQ ID NO: 55857 - DNA, 305 bp, Zea Mays
agacagagtaaaggtcagcgaagccaaacttactgcacagtccgcagctcatacagccgaagtcgaagatcttcggaaaaagcttgccgaagctaatgaaaactttgaacttgcaaaggcaaagcaagagataagtgaatggacaagtgagaggttggaaaagaatgtgaaagagctttatgaatccaaggaaagatgctatgagaaatccttggattgcgccaagaaactgaaagatagctttgccaaggtgggtgcatactcatcagagcaaaagtttattcgaggcgatcctgaaggagtca

SEQ ID NO: 55858 - DNA, 495 bp, Zea Mays
taccttacaatgtatacaaaaataagatgattaaggaacaacaccgcttaagaagaaaacattattaagtctgaacaaccacctacacttcccatatatccaaacttgtgtgtttcatgtgaaagaaaaggtcacataaatggtcctaatgttaagtacatgcaagcaaatgtagtagctaacaaaaggaaaacctgaagatccctaggaacttcaactaactctattacaaaatcatctttcccaaaggtttgcagcgcaacatgccccatccacattaatgtgtatacgaaattagaccatcaggtagttacttggtagtccatataattgggtgtgccaacccaaaaaaatctgggccaaataatgaaaacgatgaattgaactgactctcgtgttaagcaagaacaatagttaaataaaggaacacttgtgctactaaaagtacagtataagtactctgcgaatagcaataagccaagtcctttggatggc

SEQ ID NO: 55859 - DNA, 331 bp, Zea Mays
cgggagtgttacgaacgcaaagactggacctaaaatcagtaaataactgtacaggtaaccctttggtcataatatcagcaaactgaagtgacgatggaacacagagcacccggacctgtcctaaagcaaccttctctcgtacgaagtggatgtcaatttcaatatgcttcgtgggacgatgatggacggggttggcagtcatatagacagcactgacgttgtcacagaagatgattgttgccgaagagatgggtgcatgaagctcctggagcagctgacgaagccaacaagtatcagccacatcgtgcgcaacagcacgatactcagcctc

SEQ ID NO: 55860 - DNA, 645 bp, Zea Mays
gttgggtccttcaaacctcggttggtcataagctctctcatgatccgaggggcactatacgtgtgactttttcccattcaacatacccatgcgaggcgagccccgagcaaataatcgatgctgagatccatctggggggtcatcccatccttttgctttactctcctctgcctatcccttccacaacaatgaggggaggtgagcccaaccgcacattcctcattggtctagcaatggtgctcggtgagctgcaaacgggtaatccgagtgaggccctaggtcctttcacaggatccaaatgcagggtccgctaggggatcgtcctcatactcttaggcaccgactcatatagttgcagactccgttcgactggactcaatgactcattgcctctcttcacgataaaccatgagtcagacaataccaagactcgaacacaagctggtgacacccttcgcgcttcacgcatcaaggtcctagcctctagtgtccacatcacttgcttgcccctcgctctagatttcgttgagatggttgcgagcccttgcgaactggcctttcggagcctagaatttgcggcaattctgtcacggggtttttttgatccccttgtaaaggaactagaagtagctagaggttttacta

SEQ ID NO: 55861 - DNA, 315 bp, Zea Mays
gtgttcaggtggtcaaagacatgatcaagcaaaaggcagagaaatacaagtgcttccgttaggacagcaagggaattttatggtttggagaccgattggttgttcccaaggaccctgagctcagaaagaagatactggatgaagctcacctttccaaattctccatgcaccctagtagcaacaagatgtaccatgacctcagatctttatattggtggaccagaatgaagagagaaattgccaagtacatatctgagtgtgacacctgccagagaatcaaagccagtcatttgaaggcagcaggtcccttgcaac

SEQ ID NO: 55862 - DNA, 303 bp, Zea Mays
aaaatcagtgtgcgtggaacaataagagtcaaacccaagttttgagtatgttctaaggaagaattatacatttcaagcgttaacttcatattaatattgtctactctacgcagtaacaacattatttgtatcgtaacatatattcttataattagatatttgtttaacctatgtttagtagatcaacctttctaatcaaagttaatctgccaataattataatttgactaaaatataatctctaatcaagttataacttagggaaggattatacatttcaagcgttaacttcgtattaatatt

SEQ ID NO: 55863 - DNA, 330 bp, Zea Mays
gcctacctgccggacatcagaccgacgacccaaatgggcacggcttcgacaatcaccgccgggaggctggatttggtcgagttttcgcccattctcacctcccgcacaatggtacgctccagtttgacactacttctttctcacatctcctcgggtccccacatcaccatgacgatagacactcaccaagcggagctcagttaccacagttaggttccttgcccaagatgcccttcccaccattcgatggagaaaacccacgtttatggctaacccaaagtgaatattattttgatttatataatgtcgatccccacatgtggattcgtg

SEQ ID NO: 55864 - DNA, 364 bp, Zea Mays
aaaaaataaaaaaataaaacgtgtgttcaagtggaaacatgtagttgcaaacgtaaattgtgcacaaacagcgagagaaagtgataagtttggtacgcccagattcccaggagcctatccagatggacacgtgaacgaacctatccacccagttcgatctcatgacgtgaagtacagagtacatgttgagggcgcacaagtcgctcagaccataatttcgactcagtcgctttccattcctttcgagggtcatagtgacagtaatgcttggcaaatcaagatagccaccacacacatcggccgggattcctggtaaatagaaaacgacagcctggcaaatcaagataaccaccacacacaaccc

SEQ ID NO: 55865 - DNA, 655 bp, Zea Mays
cctgcggacggtccgccatgctggcccggacggtccgcggtacctcaattcatcccacattaaaaaaacgtttttgaataagtttttctttcacaaaccaaagtattgttagccctcatgcaaatgcaccaactatatgagcaatgaggcattaaagacatgttaagtaagataattggtccctcttgatagtacgtctatctagcctactaactcggtcaattatcaacctctaagcacctcttgaccggtaaaacaaaaacatattatcatacctttgccttgagcattcaattccatgtcctcaaatgatgaacaatgggcatccataagtgtagccaaccatgataccttttaccatttgtccatagcatgaagttcctccatcatcatgatcatcatcaagccacttgatcaatagtccagatcaacacttggcttgataattctataatgacatgatccactccatgttatcacatgaccttcttggttcattaatctcatagcttgctcttcactgttgctttatgtccatcggtgctaagtccttgctcttacttcaccgccacgtggtccctcaaacatgagcctctgacttgcccttcacactagccacactagccactcagtccatcgaagccaagccatatct

SEQ ID NO: 55866 - DNA, 1342 bp, Zea Mays
gtgttgtcctcagctatcacttaaaattggagggataagaggggacattggaggacgtggttgtcccgcaaccaaacacacccttaagatttttgggaaaccatacatgaaccaaacaagaccctaaaacaacacccacgtggattgagcaagaactaggtcaacaaacatagaaaccctacggcaaagcaaatcctgatgtcatcgtcgcatatacgaatcagccaacctttatttcctgcatttcctcctgtccacacaaaagtgggagcacatcattttaccttttgctccaagtgacaccatgatagcttactactcatcccgccatatccatccacacaattcacactgatgataaacaaattaaatgaagacgctttgctggagacgacagagcaaatcgattttgtgtagtctcgaacaacaacagagagggaccgggaggacataggaagacacacgctgagcgagctagctgaaattcgacgatgatttgatggcaaccaacgacatggctgatctctcccgcttttaattcgctaagcacacaatgcaaatcagtatcacgccacacatctcacactcttcttttgtacaaagctagctagatgctcatggatcgatggatatctgcttcatgaaatcagtttgttggtcagcggagggtcttgatgcatcagatagggaagagttctataaactcaaggcaaatgaaattgttgatatggtagtggacaaatatataactagatgttaatatgttattgccggtgtttaaaatagcgggctaacccatttatccccggctttctccagcggctacaaaaggatatatcgggatatatctgcagctaaatgttttagcggttttcactagacagtagacacttagacagatcctcccatgatcatgcctatcccaaattccacgaacagcctcgacggcccgatcctagttcccagacctcacactagccgctgattgcaacaagcaaagcagcccaaaatacatttatctcacaactagccgctgattccacaaacatccaagtcattgatctcacaactcacattctcacctacaatttaaaatgcacctcgaacaaaaacagctagccgctgattgcaacaagcaaagcagcccaaaatacatttaccattcacaaatgtaaacagctagcaaaacattcaccagaaataatatgcacctaccagaagtccagaacatccacctacctcactgtagcacgcacattcagtcagccattcagcaagcaaatcagctagccgctgattgcaacaagcaaagcagctagccatgcacctacctcacctgttc

SEQ ID NO: 55867 - DNA, 658 bp, Zea Mays
gccaagttgctacacgaattttggagcaaatcgccctcaaatatgctctgtcaggtgccctgaatggcgatctaatggtatagtagactgacatagatcctaggtttggtgcacctcgccaccgatgaccctcgcaccgtgatccacgctgtcgccacatttcgtgctctctagcgaggagataaccacgacagagtaaaaatcttggcaccagattggctcggacccggtcgacggtgaggtcgccgtacccacttgggctgcggtcggccgaaatggtcctcgccggtgttggccgcttaccaaccgtgtgccacgtgccttacggcgttaccacgtagtagtaaaccaatgaagcatgtccgttcatcaccggtggccttgccacggtgaaagccacgaatcccttgcgctagcaaccttccttctctccggccgccagcacgccattccaaaattaggagccaccgcccttggactctataaattgagcataccgccagctccgttaggtaatcacgcatccagcgcacccacccgtgtctcggaatgtccacagagagctctaatttggagttcccccaattcagttctccacgccaccatgagtgagctcgctgtggtcatccttctgtaggtccgttcacgccctcctcgc

SEQ ID NO: 55868 - DNA, 604 bp, Zea Mays
atggtctcgctttggcattagaaggccatccactgcacttggaaatgatgtgcaagcgtgctaggctgctttcaatatagtgtgcacgcatattggcacaagagacttagttcaagagcatattgcttacaaaatacggcctcttgtaagcgaatgggaaatgccgaaggaagccatcgctggttcttgctagggtggcctggtttatctgaagtatacctttcggttcagaaaccagtttgatgagccaaatgatgattggttaaatgttatagaagccacaggtgatgagatgtttggagtgtactcgaaggcagaagatgaagctatgacgattgcctttggcgctcgggcaagaagaggttaaatatagtgtttgatgttattaggtttgtttacccagactactgctatgccgcccagaaacaagggagaaaaaggaaagccgctgcctcagcatctactggtgtgtcgaagtcaaagaaaatcaaggttttgacatgtagacccaggcgcatcgagatggccgatgtgccaaagttaagtgaaagagtggagacaaccccctggccatatagactgttcctgttgtgcctgttgaaac

SEQ ID NO: 55869 - DNA, 783 bp, Zea Mays
cgtgtatagatgcatgaataaataaggtgagcctatgagctatgcgtttcttccactcctgatacatgccaatcaagtgtttctttgaaacaaccttcactggcatgctttgaggagcttgcatagcccttctgaggttttgcctttgcctttgcctttgccatagccattgctactctactgccattttgtggtggcttcgtaaaaattccccctctcatcccctgattattacagtgcccatgacccctttctctggagggacctttcttcctttaagactagaagttggcgtgtgctttatgcatgaccgcgtgccgaatggatgcttctagtagttctgcatcagaagctcattctgagccttagcaccaagcaacatgttgacgaggtcacattatttgtgtacttgttgctacagtactgctgttggagcaccatattggaggggtagaaggtttggagagttttctcgatcatctctaagtctatggctatctggccacagaaatgtagctgagcgacaatgcgatggatgacagtgttgtaagcctcaactgcattgaagtcgagagtggcccattcatgttgcgcccgcgggagcatcacatgcttctccacactgaaacactcacatagctctgtccacaatatcatatggtctttcacctctggatactccatcttcaggcctggatggatgtggtgcccgacgaagatcgtaatttttgctttctcatgaagtttcaggcaagtgtcattcgggccctaccagaagatctc

SEQ ID NO: 55870 - DNA, 463 bp, Zea Mays
gtggacttcttacccattataaagtcaactgtagtttacactaaattatacacaattttacacttcttttgtatcagttttatgctaaaatggacaaagcaagatatacaacaactaccacaaatcttacgtatcttttacgcaacgtttagaataaagtggtaattgtcctacatttatcacgattttacagcactactttcctaatctcaaaccaacccagatctacgcacacactggtcacgtatatacaatagcataaatggtctgacgtcttgatattgcatggtttatgatgttacgtttcatgttattatgcagtcgtaaacaccgaacaaacttgtaaagtcgtcccacgtgatttgcgcgtcagcagattctttttgcatggtttatgcacattattcaatctgtttatcccggtataattgctgacgcatgcataggtgaactgccttcccag

SEQ ID NO: 55871 - DNA, 422 bp, Zea Mays
ttgaaatatcctgcacacacatagggggagcctttcttacattctgagttttaattgggatttatctatctctcggatagaacttcaaatcaagataagtcctacgaaactcgtctccaaaatccttcttatacctaaggtatgagggagatttagaaaaacaaaacttctcttgaatatattatgtagtgttgtcatcaattaccaaaaagggggagattgtgaatcatctaggccccttagtgatgttttggtaattaatgacaactgcttgtggactaacggttcttggagaaataagaatgcagggttggaccatatagaacatgaaatcttggagattcataagcattggttgtggatcaagtgaaggcaaaggtataacataggtttcatttttgccggtcttgaggagtttagag

SEQ ID NO: 55872 - DNA, 911 bp, Zea Mays
gggaatgatgatgcatatgggtcccgtcgaatgcgctgattgtggccaaaccaagtttcttccggaccccttttatttgtcctagccgtcggagatctgctatatgcttcagaagacagtgcgtggcgttttcttaagtttgggttgtagttttgtttattcaagtgtttgtttcatggatttttctgctagtctaaagaactgctcgtaccatgtatttgaagtccagatcttttcagtttcaagcgtcacggatgtttttagacatccatctgtcaatctatgtacttattcgaaattgtctgaatatatattgacctgtcagccagggtaaatttggctgcttgcggaatcatagtttatatatagtttatatattaagagccctgggcttccaataatagaggaactcttgctagtcaatatgcatattgggttgaaccagaccaggtcagcatttctcagtcacggcgtcgttatcccgtttccgccgtcagcctagcccacgtcacccccttttcccagtttccaaaatcgtcttcgcgcaatcaacagagagaaacccgcgcgaatagtaaggaaaccccagcggccgaggtgactttccttgcggccaaggcgatttgccaggcgatttccgccgctccaatccagctgcgctccttcaatctccgaacattggagcccgattcaagagccattgctttcccgagaagttccaggtaatccatccaacttgaaatacatcgaggtttctgtcgatttttgaagcattttttgtcgattgaagtgagtttgattgtaacccttagtttttagttgtgtgtgatttgtatccgattatacatttctctaatcggctcattgcatcgctcattgcatctctctttggttcaggagccccgattata

SEQ ID NO: 55873 - DNA, 584 bp, Zea Mays
ggaatctctattaggttaaaacagaggggttatgcaactatcgggtggttaaggtagttgcatatggccaggttggactaagactccaatttaggttaaaacatatttataaaagtaggatccaatcttatgttatcagtattatctaacatgtttgtccattagattagatctaatcagattagatgggatcagaattaaattggtgtaatcagattagactagataagatctactttatttattttggaataaatcatgtttgttacactattgtgagataagtaaagtgatgggggataagtatgcttattaggacaagttgagtctctaagaataagatagaatcttttgagattagttagatcagttagggtaagataaaatcttttcgggataagatggatctattaagataagagtgaatcttgtaagataagatggatctattaagataagggagaacctttcaagataagatggatctatttgatatattctagtgggggtacttttagttggtctagtttatcttataaacaatttaagaggataagatattttttaacacaagatgaacctat

SEQ ID NO: 55874 - DNA, 621 bp, Zea Mays
aaggttaatgcttgcataagattacagtgacagctcaactaaaaggaaaggaaactacagatgaacttacctgaagtacaagtactctaatgttgattccatgatgacaagttctttccatatattccttgttctagtcgggttggtcgtcagttattactactgcaatcttaggaatagatttagtaatttatatatatggtgtttggttcgaggaatagcgtcaatcatctcctcactttttttgtttgatttgttgaatgaaatgagtgtcacaccggtggatgccatagcggagaatgcagtgagccatggagtggagtcagaaggagatgaagtctgaagcaggggttggcgtgcgccattctgggttgttttggttgtgtgcgtgagttgcgttgtgggccggcccatgtaagcgaactatataagttttgtctcagacttggagaggggttaagaaataattgaagaagaaataccaccagatacttcgttacctgtttctgtcggcgtccacgctcacgtcgcggcgatctccactcgccggcggccacgggccatcacaacctggtatcagattcaggcgtcctcggcgtggcttcccttcctcgcgttccc

SEQ ID NO: 55875 - DNA, 380 bp, Zea Mays
agcccattgcaggctcgcaaagtcgcaacgccagatatgagagaccctaaaccttctctgtctcctggatacttttgggcttctgcacaggcccattaacgtgaaagaaattgacattttatggatcaggctcgtatatggtacattaggcctccttcgtcgtttgcacttcgatgtgataattttccaatgtgaaatgtgcactgtcacttgttcacgtgaatttcgatttcgtctggaagctcagtttttatttataagaacttgttgagcactatatttgatagtggcaacgaatggacgggtccggccatgtggttcgaatggtacgtatcgggcggactgcaaatgtagctcgaacgatccacaaatagattaaa

SEQ ID NO: 55876 - DNA, 494 bp, Zea Mays
gagcgggctggccacgatcgggctattcttggtggcgcggctgaccgatttgggggaaattggtgattctccggctatggtggctaatcgagggtgggagcaggtgcttcggcttcgcaaagaactctagttttactgcgcacacttaatttgagaggaggggtagaggtagcgcgaattcggcttcgattcaactcactgtgtgtgtgatggtcacacctcgccgtggaccaccatgctatttatagccacggcgacccgacagacgatctccggccacggatagcattgctagcgcatgcataccacgtcggtaggaggcacaatgaggcagatcgtggaatgagtgacaccgcggcgaaagttaccgagtcaaggtggccgccggtgaagaactccggctggactcgggagatggcgccacgtacgagttatccatccccggcgttatccgttcctcaccgggcacgaatcaggacggcggcggcacgaat

SEQ ID NO: 55877 - DNA, 695 bp, Zea Mays
attatggaacattttaaaaaattatacatatcatcgtcaagggagggtcgtacctccaaagctacccagacccatttaagaacccagtatacgaagctattggtggacccacccactcctaaggctctatgacatcggatctcttaaagctatctccaacggtctctctatcccaccaactatctcactcaatattttaaacttcgctctataaatagtgtagtctacactgcaaaatagtgttttatacgcccatatacacgtttcactagagatgtcctaactccctaaggccccatgacctgggacctcagagctacttgatatcgaggcaccaaaagtatctacaccaccaaggccctatttgtttcggcttcttgccagattctaaccattagaatcacattctgacatccaaatgcttcgcttcttagcccgcttcttatagaatcgcttttgtgataatttctcaaatcaacgtgaatgtagaatccttcgagtcatcatggtgaaaggaatttgttgcttcgtacacccttcaacttcctctgcatgcaagctttgcgatatccagattttcatgatagctagattatccaggaatccagattctcaaaaaagctcttcagacaaagctatcccaaacagtcccactaaggaccactaggggacccgaagcctcaaagcacttcaag

SEQ ID NO: 55878 - DNA, 687 bp, Zea Mays
tgtttaatataataggtatatttttacctctttgtctatcaacacaagatcgatgtgatgtataggtccattgtccattgcgccacgaaaaatccattttctcgagacatacacttttataacagcatgtctattttgtggtactaaatctgggttaagcgtgaactccatgtctgttaatgtaattatatgttagatttttaatgaatatgatgagtatttcgaaaaagaaatatgtttgataaagagaaatttattacactaaaaagtgatttataatacctgataggtaataatatgctgtacatagtgtagtaacaatcataatatttacatatttatgctactaaagcgtgaaaatatttctttgtacactatattttttgtttcattgtttgacttgccattgtcatcttcaatcagtatttttaatcctttctttgatgtgacacgtgatatagcaacatataattgaccatgagtgaaaacgggtctcttaagatatattcccacatctgaaagtgtctgaccttggcttttatttattgtcatagcataacatactttaataggaaattgtcttctttccaaaacaaaaggtagcttgtaattcttcaatgataaacatatccttgggataagaacagtttttccagtttgaattcccgttattatttttgcctctaa

SEQ ID NO: 55879 - DNA, 506 bp, Zea Mays
cgacaaactacgtggacgtcatcacagtctcatgcgtccttccgtactgtacacagtcgcccttctgtattatcaattacatacacgcatgaatacatgcatgtatacatacgttcatacaaataatatactcacaaggactataaagcaggtacagagcggtacagaacgacgcgcctcctatgatttgtgtgctctgatgtcataacaacaataatattggaaaaattaaaactacaagataaagacaaagttgttcgtctaaatattgcttcactgcatttagtataatataatattgggtcaattattacatcctagtggacttaatttcggcaatattaatagtagtcacaacaaatctgtaagaaggacaaaaggtacagtacgtagtatatataactaactgaccaaaattatatatactacaaacgtaatggaatacatgtatctctattattaaacgtaatggaatagtttccccgattattacttgccagttgtgt

SEQ ID NO: 55880 - DNA, 732 bp, Zea Mays
cgatggtgtagactccctttcaagggacctagccaaaatcagcgttgcacccggggcaccgacaacaacacctgcatcaaatctcctggtaccacctcctctagcataggaagaaccacctccccacgccattgagtgagctataccagccacattggacctcgcactcgcgggtcaggaggagccggtcgttccttggcaagacatgacaagggctaggggagaaccctatcctctttcagccaagttttgacaccagctccgtcaccaggttgtatggcagacttcctttcccctcgggatgcttagactccaaggaagtggatggtccaagctttggcctggacttctctgggctgcgagatcctgagtgaatgctggagttcctgtacacatgcgatgaattgctttccgagagttcgaaaggttacaacaccagcggggagagctacgacccaacccggggatgcctccacatcgacccagaaatccctaacgaggggaatcacctcggcatgcctcgggaaggtgaccagtctcctccgcgcgttcgggaagcagtggagccaggtggggcctagacccctcctaggagccacatggctcacctcgagcagctcgagagctccacgacaagctcggagaggaacaacaatggctacagcagctaggacaagcactagagagggaggccaccgacaaaaccctcgacgggggcgtgcgcgcgaaggc

SEQ ID NO: 55881 - DNA, 320 bp, Zea Mays
atgatagaaatgcaagcacaaatccatcaagaacgtcaagaaatgcgacaggaacgccaagaaatgcatcaagaacggctggaacgacaacaactaccacctccaccaccacaagctgcgcctagagataagcaccatgagtttattagtcacaagacacctacattctctaactcctccgacccactacaggctaacgactggttaaagtccaaggaaaagatgctcagtatagctcagtgctccgacagggagaaagtgctatatgcatcgggtcgccttactggccccactgtagattggtgggatgcatactatgc

SEQ ID NO: 55882 - DNA, 976 bp, Zea Mays
attccacatctagtagaaaaataccatgagtaaagatcgtggaatgcacatgtgcttattcggtgaacttcaagtcctttggtacctcgtcttattccttttcgggtctgtatgggtctttatccctttatagggattatcaaactttggtgtttaacacagactttatttcttttggaaaggttccgtcaaggaactataatctcatctaggagatattatctctacataggagagtgttcattcgtcaggaatgtattattcagtacgatatttatatgttgcatatttataattcaaatatatgggtcctcctaggatctcatgatggatctttagaatcctattaactgcatattttaattcatgccatttgccagatatatattacatagcggaacagtgtttattcaacacatatgtgggatgggtctctcaagctctgtggtgatgtgggatttcatagttatttgtctactcttctcacttctggtagatcggaggtagataatggtaagcatgccaaagggtggaatgaagtgtagttcggctacataaacccaagtatgtgtccattcaggaccgacctttaccatttagcttacagtgtataccaaacttgtcaaaggactatcccgagtcaattcagtgactataagtatttacaattctgagagatgtatgcaacacaagcatagaggtcctagataaaacgagtgaagtggttcgacgggaacacactatggttttcacaccaacatagtgaaaaaattctcagaataacctctcggtatactcgcaacttcgtgttgctagcgattacatgtccttttatctcatagtttgtttcatgtcattcagcgacaaagagagcaatgtgctaacatctagttgagcaatgtatgactgagatttctggtcttaaattatttggtaaggtctttttgcttactaatagaatcccaatttgtgatgt

SEQ ID NO: 55883 - DNA, 1687 bp, Zea Mays
cgacgttgtggtcaagaaagtgcatagtcgtcatgtctacaattgcaggtgtacccgagaccattgtgtgatgtgcaccatcgttcttgaaaccacgcctgttgatgcacctgcaagcattataaaatataggcagctacatcgtttaccaactatgtcatacttaacgatatggactctggtacttgtcactggacccttgtcactgtgacaggacgtacctggtactatagcaggacatactcaacattgtgacatgattgagacgtgcactacgtatgactccatatctatgataaaatagtggttgaaccttcgctgaacagagcccaccgtccagcaggcacataactctcgtcgtgctataaaagggagtagagcaacatagtgggatccagggctaattctagtcgatccagattcaattcaacaccacaagatatatcaaatcaagggttcatagacgaaggtgaactagaggccagttagtctaaaactctcactagaaccaataggaaagggacaacaagctagtcatctggctcatgtgatatatgagcatgtaatggctccacattcatcaattcatctgccacaaagaggatgttgggtattacgcttacgcggttcgaacctctataaatcatttgtgtgctcataactatagtggtaccccaaatcaagcgtctagcatgcaaccctcactctcttcaaactctacgaacttcttgggtacctacgataccctggtgtcgttactcgacagcaaatatattctcaccataaagcatggtacaaaccttttcatgcaccttacaaatacattttccaccaaaggtaagacgccaagagaggacaaatctaacacatagaaaaaaggaacggctcgattaagcacagcacgacccagtgccatctgtgcccatgccagcaggaaccaatggctagtgtcgtgtatgggccacaccatcaacctatagtgtcgacccgagcatggcattagtaggcagccccattaacgtgccatcccaaaccatcaccatccacgccccacataatttccacccccaactctagccactcaccatactctcatgtggtctagtcacacgcccacgctatcctttctatcgtgtcacaatccactttagctctcctctccaccgccaccaccaccaccaccacccccccatactctcctccccactacaacgcagcaacacaagagctgctcccctcccttctttggttctccccttcaagacatgtgtggctgtgtcactcccttctcccttcacccgtccactatttgtgtaggagtgatcatcaaactctgacaaggtggtcagtgttgctctcctctgttctttctcatctactgtcgatgttgacagggtgagttgtaacagccacctcatgtagcactcaaatactccaccgccaacatgaatctggctcggtacaggaacttggattgatttgtgtatgtatggatttgtgttcatatggatgtaaagatgttgttgtagttaatctctggtgtctgtacttctaactgatttgtgtttgggagttcgttgggctcgttaggctggcacgacacaactaagccgccaatacgccatgcctaggtcgtcgcccaccggtgaagctcgtgtgctagcacaccatggctagctaatcatgc

SEQ ID NO: 55884 - DNA, 669 bp, Zea Mays
tagccgttgggccgaggtccggtacaccatcggacgcttaccgttcatgctcaggtgaattttagccaaaattctcaagaacttatagtttactacatagagtccgatgcaccatcggaccgaccgtgtagagggtctggtgcacccagacaaccctttttaagtcctttttcttctccaatctttctccttttgacttgaactctttggaggactttcctgtgacttagtaagtgcagtggtgatgcacacttttgaaatatagtactaggtacccctatgggagaccatgagaagttggaaaacaaacctaactcaaaaggtatttgaaatagatgaattgtccatggtataattgcactgaatgtgtcaaatgcatgctagatacgatgcactagacatgaacttgctagttcattgccttggggctatatatagctcttcttctcgcccatttaaagtctctcgcccatttgttcagctaaagaaatctattggagtgaaagggagagcctctggcgagtgaggtaattgagatgtgataatcatgacattagtggcctcattagtgtattaagagtagtaagtgtgcatccaccattctcattatgcttggtcaggtcaaataagagtttgtggttgttactcatggtgactagcatcacctag

SEQ ID NO: 55885 - DNA, 665 bp, Zea Mays
tccacgtgtcagaacccaacatttggcatctaaccaatcccatgacgcctcctaagaaaaaccaacactaggaccaactccaccccgataaacgaagtcgcaaaggcatcccttgtcaatgccaaaaatatccaaagttgccttcgctgacaacctacctcaatcctccaaaagcgctcccccgccaccattgggacagaggatgatgtcctccaacacaccaacaatgacccacattcccagacgtaagcgtccatactacaagttcaacaacttcaagtgacccgcctttcaacccatgaagcccatgatatggccagacctaacaagaaacttatcacaaattccctctggcttcgcgccgccaaaaatagtcagcacccctcgtcaagcacacgcttcacaaacaaaaatgaaaatgacctgcaagacggtgtggacgttggcatcaattcagaagaacaactattgctcaaaagccttcacatgagctccaacaacctacaaaaacaaagggacaccctcgcagtcatgtggcagcgcgctaaagtccacgccaaggtccagtacctcatctagtaggaaaaagagcacctggcaaccctcaaacatgaaatttcagagcttcagactcagcaaccgtaatgtcatcctgtaatacccaa

SEQ ID NO: 55886 - DNA, 397 bp, Zea Mays
aggcaatgaggcaaagattcattagattaagccgatgatgtgggacccatagcaaatctagaggccgggacatgtaaatatctagcagtatacatgttactgctgtagcatacctttatttggcgccatagtttttcttatcaccatctttgggctttgcgtaattgcattcgaactgaacttgctcatcgaagaggagcaatagatttgtgttgcgtcgtactgtgtcgcaatcaagatgcgtacgtgcttgcagctttcccagccggtgccggcgggtgggagtgtcacgtactcccgctgccggtaccaccacgtcctccaggcccgaacggacaaaccgaaccccaactcccctaccacaaagtctaccaagtgctccacacgtcagcctccg

SEQ ID NO: 55887 - DNA, 681 bp, Zea Mays
ctttgtgcgattggatggagaaaccattgatacgatgtttccttgattccagtcgattatgaacaagatgtgcacaaacaaggtgcacctttcctttgatgatcatgagagagcacttacactagtaagaatgtgatcatcagtgacgattttctagtgacgctggtgacttcagtcacagattgatacatttctatgaccaaattgacatcttcgtcaacaattacaagggacgaagattagacttgaatattaaagacgaaaatgaaaggaacgtcatagacgaaaatgaaaggaacgtcacagattaatttggctttatcggctgacgtaatgatgaaataaattggtcacagatgagttttagtaaaaaacggcccacgtgtacacaccacttgacggcgtgggatccttggcctacatgggccgcagttttttgggacacagcccccacctggcgacgcggacccggcccagtacgaagcggcagttagttatttggcaaaaaaaggtgcgcccgcggagcttcgaaccagggacctgcgacttgcgttaaatcgttgctaccaccagactacggacttgttcgtgtatataaagaaactatccgtctgttaacaggtgttcccatctgtcgttatgttaacaggtgccgccattctgtgatctgcatggttcgcc

SEQ ID NO: 55888 - DNA, 352 bp, Zea Mays
gttcacgcctctgtagagaacccgtcgggcggtccatctccagtgtttgacgtccgaatcggcgtcaatagtaattgtttttaaatggtgtttttatcagggaggttggcatgaactgatcactgaaccttcatcaaactgctttggaacacgtggacgaatcgaaagtgcgtaaaggcttcataatccacgtacaacttcagcttttagcctcgactctggcttcacgtgatgcttcacattccttcactaaactataaatttctatacattaaagttgggcgcaaaagtgtcccctctatctaaccacattgtccttttttatctcctccgcacgatccagaattaaaga

SEQ ID NO: 55889 - DNA, 407 bp, Zea Mays
ggccaagggccttcttggcgtcttcgccatgtgccgctctcgggcggtcaaggagtctatgcatgaggattttcttcgttatgcagccgagacaggtcatcctctccctcccgggtcccctccacctccagtccctaccttccccgcagaccttaatgagtggcaccaacaggagtttggtgtgccattcattaccccggaggatgaggtcgaggactttgatgacccctactacacctcggatcttcctcatcctcctcctccctactcgggtcagggacccactcccggtgaccccaggctgtccgactctggtcactatcctcctcctccctacccgggtctaggacccattcctggtgacccgtggccttccggctctggttaccatcaccaccctcctcctc

SEQ ID NO: 55890 - DNA, 310 bp, Zea Mays
ctcggatcagttggataacaccggggatccgtaaatatcacgctgtggatacgctccggccactattttactccggccaccgtacccgagtagaccacggttgtgttggatgggttcgccggagctagccactgcgcggtcttgcgccaagtgccttgacacattaacctcaccgctgtgactcatgttagctcgtccagtggtcgccggggagcttgccacggtaattgccaccaatcacgcgcgccagtaaccttcttcttcttcggtcgccgcgcgtctctctcaaattcactggccaccgctcaag

SEQ ID NO: 55891 - DNA, 590 bp, Zea Mays
tgatgatcgagcctcactctgctgatgtccttctttcatgtcattcgctttcctatagccatgaacttgttgacttctcgtgattggatgggttacgtgtggttcatggggcacaacgatccataaccacgtcagacaccagccccgttggagtgcctatactagagttggcagcaaagtgacaaccatgacggtgattctcacctccgggatgactagtgtaccgctgggctcgttcgtaccccctgtatctgttggtttgccatgtcctcgtagtctacttgcaacatcatttcccattcatgtacaagcggaatgggagctcatagttgatttagacataataagtatggaggttaggtagaataaggacaacccccattcctctccatgttgtgacgactattgcaatgacgagggccaagtatggggtggtcaacctttgatgtttgaccctcgaatggtgtggaattcgaccgcatgggtccggtttggcggacgcccttagactaagtgtagtttgcccaaccctcttctgcctcgcctgactccatgggcccttgcttcgtgctaggacctgggggctgttg

SEQ ID NO: 55892 - DNA, 603 bp, Zea Mays
gtggaattaatccaaaaacaaaactaaaatcaccccaatgctattgctagcctgttatcttctcagatagattcctgtgaggccatgaccctgatgctcatgatctgtcgtagtgtgtagctgatgtaggtgctatcctatgtcgcccgctggttttggttggaggggctccttccagcacaagatcaacactgctgccggtgtgaggagccgtcgtgatcacgagagggagctgtcggtcgccttcgcctgatgttcttgccttgccaccgcctaattaggagtggatagagaggggtgaggcgctagggttactaagcatgagcagtgaatgggtaggctgggttgcatgtgcacggtgtacctcctaggctattgtgctgcagcctattaacaaacgcagtgcttagttattttgggtaagttcgataaattgggtaccgaaagtcataatccgaagcacctaaacaaaaattgggttttcggattacgtatccaaaatgcacatcggggttttcgggttcagatccaggtagtttggggtttaggtaataggtatctgatttttgtcccaatcctactcgatactaatgcatctacgaa

SEQ ID NO: 55893 - DNA, 357 bp, Zea Mays
cccagagatttcaagattactaaccatttttggtaaaagtcagggtaaacttctcgtagataggcatccgtctcccaggttgcgtcatgctcatcgtggtgactccatagaattttatacgtcttgaccgtactgtttctagtaattcggtccttagtgtccaaaacttcgacggtttgttcttgatataccaagtttgacccgatcttcagatctctgacttctactctctcttcgggtactctaagacatttcttcagttgagatatgtgaaacatgggaaagattgtgctcatgtcctcaggcaactgaattttgtaggctacttctcccttccgttcgataacctgataaggt

SEQ ID NO: 55894 - DNA, 475 bp, Zea Mays
tgctttccatacgcgtacgcacgcacgcacgcacgcatgccgtcatcgccacctaggacttgtcgaatgtacggtcgcgtagcattgctagaaacgtactgcgtactcatttcgaaccccacccccgtaaagtttgttcaaactcgcggtcagatgagccgatctgaatctgatgttgttgctattgcacgttggcccggcccggacgtactggtactgggcagagcaaccccatttgctagaggccagagctgctggacattgcaacggacaatgatgccgcagcacgtagcatgtacacgtctgctccagtcccagtgacagcacaagctcatcatcgcatagacagacagatgcctgttgtgtcagggcatgtcgatctccgcttgcatatactgtcggcaggacagagcaggcaaatcgaacgtccacgcggagcagagggtatcatgattcatgagggcagcggtgtcgt

SEQ ID NO: 55895 - DNA, 1277 bp, Zea Mays
aacgggcgcacacgcttttcgtggatgcgtaccgtgaccttggcgagcaaactgccccttttgacaaatcgggggaggaggtggggacccgctttctagggtggctgcaagatgagctagagtcgctcccgtccattgtgacgggtctcatgtcctatgcgtctcttatcacttgcgaaggggctgcgaatgatttgtctcgagaggtatgtaggcatttcgaggtctttgaccaagcgaacgaggacttcgatcgtggtgtgttctagattgaagatgacgtgttgaagcgctctgttggggcgctttttgataggatgtggggccctcacggccgcggcatcgaccgagagaggtcagaccgagcgctggcacaggtatgttatggtttggagaggggtgttgtgtgtgttcgttgttttgaaacattgttgtgctatcttcgcaggcgatgaatgaagaagatgtggaggacctcgccggccttgacagttcggtgacccggagtgatgcttcggcggaggcgggagccgaagagtgaaccatgctccaaggaggtgtcactaagggtcctacgacaacagatgctttggcgtaggttgagagagtgtaatagggaatagactgatagtgttcgttttgtgtgatactgaagatcggttgctgcgcaggttccggcgtctgggcctgcgcaagcaaaccctgatgatgacatgaatgatgatattttgatggatggaaatgtggtgtctcttagtagtaacgcgtctgggaatctgatgctgggtcgtggtcttcggagggtggaaagttatggagccttttttcttggatagatgacgaatcctcggaggatgatttagatttttttgcggcgttggatttagctgcagcggagtctccattgagggtcgctcccccgtgaagcgtcgatgacttcggatggtgcactccaggtgacccgcgggggcaaaaaagatgggggtatcgaaacaaaacgtcagtgagtcttcgcaaggtgttagaaggcatcgtcgaatgggtatggagaggtcacatctttggatcagaacacagcttgatcaggggcctatcgtgacttgctggcgccgacatccgggtcgtgtatgggggaagggatctgcgggacctttttgatggggaagagttgaggttgatgctgtttaatttccgataagctggtcttatcccgaaagaagaaccaatgtaatgatgagtgttgccatcgctgttctttggcgacgatgagcgaaaat

SEQ ID NO: 55896 - DNA, 309 bp, Zea Mays
ctgggattaatatcatatccacatttgacttattggcatttgatctattctgcggggacgcctgcagatatggtccattggccttagtcaaagcatatgttctgattgcagattcacgtggtctgtgataactctcctctgattaattcaccctgatggtgatttgcctcacgaagaggttcatcttgagatgaaattcctagcaatgcgcgcaatatcattgtgctgggaatacggaacaatgaatctttcgttttgggaaatgacggagatcattattaaatgtgggagacaaatgtgtcgacacct

SEQ ID NO: 55897 - DNA, 866 bp, Zea Mays
ctcggcctgtcattcgcctcgaggggatcgtccctaaccctccatccatacctgtgtttctcgcggaatcgctggcagatccatatgcggatctcgcagaattttggatctttctttgttctacattatcgcagtttagcgtcatcagcatgttcttgcatgtttctacatttctttttccttatcctagatgttctctccggatagacgtttcatcgttttcatctaaaaccttaacctgaaacaggagtataataagttcgagtttagagactattcgacttgacattttggcgagctctcggggaaaactgttccctgtagggggtttcatgtcttcctctgttcccctaatgttttgtttgataagaaattaagaattgtatgttgatgatctattgaaaccaatggatgatttgttgaaatgaacgtttttggcgatttgattcggttgcttgagaactgaaaatcttctttccttattcgattaggttgcctgcgggagagtctaagaggtttggtgttgtcaagttgttcctatattctcatgtgctgtcccatttgtaggatcttcaaagtttaggaattcaaatgtgagaagaacaacatgttattgtactgtacccactaaaaacagagaatgaattgagcaacataatttctttcgccacaagtatcactttcgtgtgcatactaattaattttgttttgttaatttgtgagtccaaggacctgtaccattgacccattgttatagtttctgaagtctctgattattgctgtcgtaactgtttgcatgacttcaccatgacgctttgtttggtctggtttcatcagatcacacagatcgttatcttagtttgtac

SEQ ID NO: 55898 - DNA, 863 bp, Zea Mays
ctttcccagccattgcttaaatgtatcaccgcagtcgagggcgtagacctcttccacgaggtgcacaaaggaacatgtggttgtcactcgggccttagagccctcgccaccaaaatcatgcgccaaggtttttactggctagacattgtatgcatagcgaaccgtgtagtgcggtcatttgaagcgtgctagaaattttcaccctgaagcaaggcaccctcgcagttcacgaaactaatcgcccacacttggctgctgcagcgttagggcctcgacatagtgggaccgctccccatagcacaaggcaacctcaaacatgcctttgttgctgtggaatacttcaccaagtggatcaaagccagagcagtctccactataacaacaaaaacaacgcaaaaaaccttgtgactttgtcggggtaccctatgtattaacgatagataatggaaaacaattcgaaaatcaaggtttgcaggatttttgcctctccatagggacaaaagcgatcttccattggtctaccacccacagtccaatggagtcgtagagagcgcgaacaaaaagatcttcacaataattaaggaaagactcctcgaatataaaaagggtaagtgaacagtctagctactcaaagtactttggtggttaaacacaaccaaatactgtgcaacgggtttcactccattcagattaatgtacaaagccaaagccatgactccacaagtgctcatgcacggctcaccacgattagaccccatcacaatacccgatgtcgatgaattaacaacaaaaacctcctcgatggagaccaagctcaagcccttgatgccttaaacaaatatcaagcaacaacaaaattttgg

SEQ ID NO: 55899 - DNA, 770 bp, Zea Mays
cccgacactattgtttagtgaacaaactttattaatgaagtttgctctgttcttaacaagaatcaagagaacaagtgggtggaagggggtcagttcagatgaacattgaagatccagtgcactgaaaatatctgaaacaaagatctgggcactgttgaatcggatgtgttcggatgaatcggtgggggaatcaatcgcggggaaggataacctcagacgtggcaccatcccgcatacctagccgggcgtggccggagatattcaccggcggtcgccatgactcagttatttccgccgtggtgtcacccatgccttgctcctccctcactgtgtcttttccctacgtggtgaccatgcgctaacgatgttatctgtggctgtggatagttagccggaccgtcgtgcctataaatagcgccatgaaccccggcgagacactcacaacttcactagcgagcttgggaaaagccaaaattcgcactgccttctccatctctccccaaattgagtgtgcacggtgaatcggtagcactttgcgatcgtgtagccccaatctcacctcccaatttcgccagagcccgtcgcgacgcccttttcccccttctcagtcttcggcaagtggaaattctctgcgctccatggccggaccgttctggtatggttctgcgcttctcgcgtattattttagtagctctgcgtacccatgaagctcatcgtggcaaccatttgaccaattcgggcgtgattgaatgggaacgcgggctcgacgt

SEQ ID NO: 55900 - DNA, 603 bp, Zea Mays
gtggataaattgttcacgtgaaggtaaaagtgcaccaaaaccaaatgatacacctaggatgaggaataggaattcgggtcgtacacaatgtaaggctggattgaaattaaaaaatatatatgatgatgaaaaaagggtggtagctgcaaagaatgaactggtgaatttggagcataaccatgagttcataactgacgaagcagagaaacaacatttacgttgcaacaaaagtagggatgttgaattcattaattttgttgatgcaatgcatgatagccgagtgccgcagcactgcgtagttgattttatatataccagacatgcatgatgggccagagaacgtaccggtaattgctcaagatctgaaaaacatgtaagaaatcttttatgttgactatgtatatattgagtaatattactatagtaaatgtttggataatcattttttgtgcatacaaatgtaggagggcagcaaggagacgagaaaactgcgcaaatgatgtagctaaacttctgtctttctttacggaatgcaagaaacagaatccacaatttttttgtgattttcagctagacaatgatgggaaaatagtgagtattttt

SEQ ID NO: 55901 - DNA, 314 bp, Zea Mays
gaggggcagctctcctcggaggagatattccaggtatagggtctgccagtttaggtttggtgtgaccgcattccgctctatctcgacgcgcagggcctcaccctcggtggccgaaggtacctcaagctgggccgaggtcccttcgggctcgggtgcgtcgttgagttttacggatggttggtatatgtccctggagaagacattcgggggaaccgttgtccatcccgaggctatcttagccagctcatctgcagtctcgttgtaccgtcgagcaacatggttgagttccaacccatagaacttatcttccaaac

SEQ ID NO: 55902 - DNA, 434 bp, Zea Mays
tttcggctttggtattgtgaaggctacattacatttgagattctatcttggtggaacctctttgttttgagtttccaaattattgtttagggtttaaagcccatgacaatgagaaagtcttccttccttttggtggtttgaggagcttcgagttttaccttgttattgagcccatggatgctttcttcctttgtgatggatgaaaggtggtgtgttttactcaaccttcccgacgtgttgctaccttggtggttttacactattgtatttgatatgggattgtagttttacatctattttggattgaagtgagctcattttgctcttttaggccttcaattcctgaagtgacacctttgagatagggaaacacgagcatgggctgacaccttggtgcattttgatgctatagaagcttctgttgaaggttgttg

SEQ ID NO: 55903 - DNA, 562 bp, Zea Mays
acctaggagcagctagccgcgatggggtgattcacggcggcgcagtcgaccagtttgggggaaaacccaaattcaacggctatagtggctaatcgagggcagggatgaatgctctggcttggtgataacatagcgtagcagaccatgccatcaatttataagtgcgctaagcggtggtgccgaattttgaaaggggaagacctcatatggatttctactgcgacgtggtagttcttctaagcacgtggcgtggctacgatcgacggcgaactccggcgaggacacctatgtccaattgtgcagcaagtgtcacagtgaatagtccggtgataaggctctacacctttcctgagttgagatctttcattgcccacggttattcgcaagccacgacacacgaatcgcgacgatcgacgtcaatcgtggcgtagggtcaccagcggcgagattcactgaatccgcaggtcttttgtcactgtaccatcaaaggcttcgccagttgttctgaccgaggatattcagaggcatttttcttaaatttttgcgtgacaacatgctaatc

SEQ ID NO: 55904 - DNA, 623 bp, Zea Mays
tcaaggatgcgacacacaggcgaaggccacgtcagattatgagggacctaagctccacctcgtaatcatccaagcctacttgtaagcccacttcggtagattttgtagtatgtttgaattattgtactctgttccactgtaatgatcccattaaggggaatattacgggaatgtagcaggtaaccgggggtataacagtacttgggaccccactacccctcgcggttacctataaatacccctacactgtacacgaatggggcacacataacaagacgctgcagttatctacctattgtcttgttgtgcacataagctctcttgtctctcgagtgttgggcccacatgttcacgtgttagagggaaccaacatttggcgcccaccgcttgtgctatgaaagaacaaacctgcgatgcccccccaagaaagtgacaaacagagccagcacatcattggacgacgctacgaaggcgaccctcgtcgaaaagaaaggcaaagcggccctcgccgatgacgccctcagggcgcaccgacaatgattgagcaataaacaacaaacatccccgaacagaaaacacacccattctcgaaggcaccgttcgcacgtgcaattctgaagatc

SEQ ID NO: 55905 - DNA, 834 bp, Zea Mays
ctggaatggatcaaaaaggaattaaaatgtaaaggtgtgaagtatctaagtttatagatctctttttatattttaaaatcgattttctatatcttttggaccgctggtgagaaaaatagaagttggtctgaccttgcgttggggtttgcgctgacggaaatagggagctctatcttgcctagtggaaatgtcccctttcctccgaaaccaaagagcaagctggagtaggccatggttgatgcccatttggtcgaaggcgtgcaggaaatgatgttggcttggtttccgttctcaatgaggaccttgtgtagctcccatcctgccacattgcaactgacgacgagtgtgtccgtgtggggcgcgctgcgaaggttgacgtctcttgcgtcgaaggttaatggtacgtgagaccactttgtctaaacgacgggtcctgtgactgcgacatgattgaccctttggcagtgatcccttttttgttgtttgttctcgaagtcggagctggaccctccagtgatcatgtgaatcactcccttgaagggtgggtatgtgaagtcttcttgctttggtggtgggggtggtaggtgttggtttggatgatgtggcggtggaggtggcagcgctaacatttcttggtgttgaagacactattgttgtggaaagagattggggggttttgctgctgggggtaataggggtgttcgttttgatattgatgatggttgtactgttggggttgataggtatgagcaatgagtctttggttgttggctggcgtggtcgtggccattcggtcttttgttgctttggtctcagggcagtatgtggttgggt

SEQ ID NO: 55906 - DNA, 630 bp, Zea Mays
cagagtagctacccgaagcagtatgggcgctgaacacaacggagtcccacaccacaaggttcacgccattcaagctgatgtacggaattgaagcaacaaccccacatgagctcaagcatggctcgccccggaccaacccccaggccaccccagacatcgacgagctaacaacaaaagatttcctcgacggagacagggttgaggcccttgacgcactaaacaaatatcaaacaacaacaaaaaactagagggacaaagccatcatccccaaggagcatgaagaaggagacctcgtcctcatctggatagcaagaacagaatctagatgcaaacttgaaccaaagtgggaaggacccttcatcgtcaagaataaaacatctccgcactcatacagactcccaagtcaagacgacacagacctcaaacactgttgggatgtagacaatatgagaaaatactatttatagggcgacacgctgttagggccttcgtgcccttgtaaagacacacttctcggttgggcacacactcttttcctcgtagggggcgaggtttttaatgaggcgacgtggtgtaataacaaaaaataggaaattcccccacaagaaaaagtacaataaaaagtcaaaa

SEQ ID NO: 55907 - DNA, 575 bp, Zea Mays
ctagaagatctcatatgcaaggcccaacgcctggacgcagaaacaaccaagcttatggaaagagcacgcaaggagcaacttccggacctcaggacagataagcaaggagccctctggttcaaggaccgcctgtgcgtgccagtaggagaagcacgagaaactctgctcgatgaagcccacaactcagcttactctatccacccagggaccaccaagatgtacctagaccttaaggccagatattggtggaaagggatgaagaaggaaatagcacagtatgtggctcgatgtgacacctgtcagcgaacaaaggccaaacatgagaagcctgcaggcctactccaacccctcccaatacccgaatggaagtgggaagaaataggcatggatttcgtaaccggactgcccagatcacaaagaggaaatgattccatatgggtaataatcgatcgtctcaccaaggtggcccatttcgtcccagtaaagaccacttttggaggagcagtccttgcccgattataccttaaagagatagtcaggctacatggcattcctcggaagatagtatcagatag

SEQ ID NO: 55908 - DNA, 518 bp, Zea Mays
gcagattagaacaagataaggttagacaacgaaacttctacttcggatgttgaatcctagactccttttgtagatctggtttgatttctagccttccttgacggggttgatgtcttccttctcggatcttggtgcctcagtttgtggtttaggaggtttagataggccgctggttgtgacacatgaggtacgttaaacaaagtttatttggttcttatgttgggctgtgtaggttatacaaaggttaggttgttgcgcatggccgagttggtctagggcactattataggttaaaacatgtttataggagtagggtctaatttatttcaccactattgacttacatgttaagtaacttactttagattagatctagatgggatctagattagattggtatgactagcttagatgtataagatctagttagttttggaatagatcacggttgttaaactagggtggataagtacgcttattaggacaagatgaatctgtaagtatgatatagaatcttt

SEQ ID NO: 55909 - DNA, 836 bp, Zea Mays
tccagtcaacggtgatgttgctcggggcaaagaagatggccttccacgtctgctactgttgtgctcttgttacctatgccctggatcacatctcacctctgccttttataggccaaggcatacatgagcctgttacaaacatcccatggtcggaccttgtcatacgctttatgtccttcgatgtctttgcagatgggtgaactcctgtagatgactcttccttcttctagggtcctgtagcggcactgtggctaccattacgtatcatctcatcttacggtcgttttaccttccgtcctttgtttactttcttggtgagggagttgttggtctgacgttagcccccatgtcgtgttaggtgtcacatttgtgcaggcacatctccccctgtcccgttattcaatcacacgccttcactaaagtaccgtcaatgcgtaatatcttccaaaattgtcctctagtatagcctcgtcgattataggctaggaattcgggcacgatcctacacgaccctggggtcgggcgaagcggacctttctggttgttgttcacgctctgacccatcagaaggctcagggtaaggcgatgtgaggaatgggtttgttctcgagttcccctggtccatgtcgtacctatgatactcgttcccgacacaaggttaagatctccttggatggatctcaccatggtcctctaatcgtgtttgcttggtgacctttccgctatggactcctcatgaggattcgggcaaagatattatcttgtattctcatgtcatagtaggcgtaaagttccctatttcttgcctcttctatcatattattgaatatgaagtc

SEQ ID NO: 55910 - DNA, 407 bp, Zea Mays
caatcatactgtttctttgacgcgactggggagaaggagaagagaccgaggagagagaggaggcagtagccatcacagacaggcacgcacagttccatggagtgatgtgagttaaagctgggaaaggtacaattggacaaaccctcggagaagaaagccctaggatctagcgtcgcaaaagccatgcgtgccattgcccaaagctttaaactacgcgtaatcatcatcgtcatcgtccgtcgtccacacagctacctagagggtatagctaccagctgtaggcgccattcatttcgatcggcggtcaccctctgttcccttccatgaagctagctagctaccagtgtgaaagaaagaaagaaataaacgatacactagtcctacgagcagtggccatatgatccgaa

SEQ ID NO: 55911 - DNA, 539 bp, Zea Mays
taggtgctctcatgtacatagcattggcatcttcatttcaaagtattttaaaagaatttaattttctcatagcaatatgatatctctcctcacgctcacttctagtcccttcatgtagagcacatatatccatacacaaatcatgagcatttctatggtttctaactctattaaagacatctttgcaaaggcctctaaaaagagtgtttttggccttagcattccatttctcatagttaaactcttctcctacaagatttgtgggatctctaggtacggggaacccttgtgtggcggctttgtagacaccaatgtctatagactctaaataagcttccatacgaaatttccaatatggaaaatcgtcaccataaaaaacgggaggaggtccatccccaccggatgtcgttactctagcggttaagctaatctaagagcaataaggttttgctaccaattgaaaggatcacgatgcccaagatggggtgaattggcttttctaaaaatcaacaataattaaaacctaaacaagagctcaa

SEQ ID NO: 55912 - DNA, 1447 bp, Zea Mays
cgggagcttgacaagagcttcggctacgaccgccacttcgccgccaagtacgagctggggaaggaggtgggccgcggccatttcggccacacctgcctcgcgcgcgcccgcaagggagacatgagaggccaggtcctggctgtcaaggtcatctccaaagccaaggtcttgctattcgtgatctcacactgctcttttactggacgcacggcacgatcttacctatttcaatcggctcggttcctccaccggatcatgaacaaactgtgtgggatgacataattgccatcctgttgtgatcttttttaactctcatttagtagatcagtatctctgaagtgccactaccataggtgttgcaatcataagttcatgatttgcttcttggctgacttgcagggtgatcagtttttttcgatggtattggcattggcatttccccgcagggttagaagtacattgcagagatcttgtttcagcaacgccgcatttaatgatgtgcccattttcatgatctgagtgttcaactgttcatccatctatcacctgtttcatgcttttttgttctttctgtaagctatcatggcatagtagtttatgcagcggtagatcactagcttggcagcgacagagttccttgtgagacctcatagaacctgttcccgagtatctccatcatattgttgttcctgccatgagtttaggagtcccttggtccattctgcaccattttattatatgatcataagtagaagaaacatagggaaaagtgtaggaactaaagaaatgtctcttagattcttggtgccaaagctgaggacatgttgatattggggactgctttccactgacattgttctgattgttgaattatttaattttgatctcagttttacttggcatctaaaatgtttgtgcagcaagttgtcgagaaaacctagtgtacgatatgcgacacagaagaattctacgtgcatggctgcattgatgttttcatgcatgtatattgtcgttttttgagcgatacgacattaattaattaatgactattttggcctgctataattttcgcttgtgctactgaaattatttgagcaggagatgtatttattgagtctattgtgtttcttccttctatatagttctttatttgaattgcgtgcaattttattccttgttacaacatacacacatacatggtatatactttttgaggctagaagctaacagatgctcaaggtatcctttcaattaagattaaggtttctcttagacaacccatcagttagcgctactttcctagcacctagctcactgcaccaggggaaaaatatatcttgatctagatttttatatttagtttgcaaaattcacctcattcctttgtttttctcttgcagatgacaacagcaatatctattgaggatgtgcgcagagaggtgaaaat

SEQ ID NO: 55913 - DNA, 320 bp, Zea Mays
cttgtctttagagtatactatgctctgcaatggcttaattgagcattgtgcaatacctagaatgttaagatgcaaatggatctgtccgtacccttttgcatgctttaatttttttgatgagagaggaggggagagaaccccctactcgcttttgcatgttatctataaactatgtgaacattctatttctactgtgcaggaaaaaggaagcagcgaagaaacctatgcaaacaaggttatccaagctgctaaagaaccagggctacgtccttaccataatccatatccgagaggtaaccttctgtgatgttataataaac

SEQ ID NO: 55914 - DNA, 386 bp, Zea Mays
gaaaaagtcattagatagcccaataacgtcttcatccactagttgtactctaataccctctcgtgcgaatacagtgccctcaatatcatagaaacgtcatttgtgatttaaaaggtgatcttagcaactgtatggtggggaaaatgtgccttacaacattaacctatgtttggacaattctctcactcaatttggctaaattttccatggtctttgttttattttgagaaacgatgtggcatattgatgtgtgttgttttacttgagtgaacataaacaccgtctaggtatgccttgaataagggggattataggaaacctagtatcacaaaaggtcattagctatcctaataacatcttcatccactagttgtgctctaataccc

SEQ ID NO: 55915 - DNA, 334 bp, Zea Mays
cagtaaagctgtttgaaaaaaaatcagatcacctgcgatcgttttatattaggactacccaaggcccaaaggatgtgcttaaggtataatgtaggctagcttaaaacacaaaacatgtgaatcattgaacctatgatatatagcccatgatgtgacggtctaaaagaaatcaaaacataaaattaggcatcgccctgtaaacaatatgaacgagaacataaactgcgcaagaatttagacacatcaaaagtgcaaggaccaaattcgcctatctcccacatagccacagtgtgtacgaaccgtgtgacaaagaaatgaactacaaagaacaaag

SEQ ID NO: 55916 - DNA, 1356 bp, Zea Mays
ttcgactaggaactcaccgagcactactccaggggcttactgagattcttgagcgtcgacgtgattcactcgcgccctgccatgaaactgggtcttgcttagctggctgttggaggagggtgccttggaggcgggtgctgaaacattcttggggccattcactgagttggagtaggtaggtacggatgtcttcaactgaggacaatcattattgtagtgactagggtctccatagtgccaacaagcactgactggaggttggctgcttgcaacagatgggtgtggagagaactttgaccaggctggctgaaacatgatggagcgaaccctgttggcttgctgaagctccatcctttgggaggaaacccaaaagatcgaactctctcgtgcctgtcctgctgctgagctcggagaacttgaaacttcctcttgaggtgacctttttcttcttctcgagccctttccacctgaatggccttgtttgagaggtgcgagaaactgaggaaatcttggctggcgaggatggtcttgagttctggtctcagccccttcaagaaacatgccatcttcttggcttccgtgctgacatcatcaggcgcatagcgagccagttctgtgaatttctggacgtattcactaacagatctccctccttgagttaactctcgaaattcttcttcttttagcaggacgatccccaagggtacatgatgctcttggaaagcggcttcaaattcagcccaggtagcatctctgacggcagtgttgaaagtatcccaccaggatagggccatcccggagagttgatgagcaactagatgaacacgctggttttcagggcatccgatggcctctaacttcctctttattgtgcgtagccagtcatcagcattgagcgagttgctggatccggtgaatgtgggaggcttgagccttaggaactctcccattctgtcctgaggtcttcctccaatcgagcgctggttctcgaggcttctagtgaggacctcaacgagtcgagtttggttggccagaacatggggtaggtctaatggcagctccggaggtgcggtgaggtgggtctcactcccttatccaccgacttctccttcggcacctagggataccttgctccaatccctgaggtggtaggcgtggttttatccgaggccatctgccagaggggagaaaggattacaactatgcatatgccattttttctcaaacatgttattttattccgcactctagttcattacaagcatacaatcaccatagatcacactacgcacaagatttttctaaggtgtccccaaactccctgagaagatcatcaaggctagccagggacacttc

SEQ ID NO: 55917 - DNA, 299 bp, Zea Mays
gcagtgcctcttctggagctaggggctgaccattcgggctcacgtctgcgattttatatgtcttgtcaggaaacttgtttagcccccctatcacctctgttccgatcgctctgcttccttttccttgacctctcggtggttgtctcggtcgattccggtgcgccttgggtcggttccggtgcgccttgggtcggttccggtgcgccttgggtcggttccggtgcgtcttgggtcggttctagtgcgtcttggtatcgtgccgcagctttttcgagcatcacacgaaattgagacaagac

SEQ ID NO: 55918 - DNA, 1180 bp, Zea Mays
ctgagaagacgaaccagcacctgcaacagctattcttggcaagtttctgcctcgaagagcctgagttgctcctaatgcctcatccacatcatgccatatgttgttgtcaccatcatcttcattttcccacatgaactcttcaagcaccagtgggttgcttctttttcctttggatcctagctctcttagtgtttgaaacctattttccatcttcctgttgtaactgacatagaccaatttattaagcctctggtgttctagtcggttcctcttttttgtatggatctaaaaatgcacaattgcaagacatcagattcagcaaataaagggctgacccatacaaccactcaaacaagtgaacaagaacaacaatacttactgctacaaaatctgaccaatttctctcacaacctgaagctgcacaacataggcttataaccctttttgctaagatttgtagttcatatgccagtcctccatatgcaccccaccataggactgttatagttatacaaaaattagatcagttctagtgccaaacagaaacaggcaaacaaactaactaatgctgcaatagtaaaacttactaggactttttctctctctttctcttattgctccagcctttgaaaagcattccccttctgatctttcgtagtcatctgcttgtttacttatttttgtttgctcatcctcatcactgatcattttccacaaaacatcattgaacatagctcgaagtcttgcagcttgcctcctgtctttatccctcaaggtaaagaatttacctggattcaaataaagggctgccccatataatttttgctccatctgagtatcccacctcttctcaaagcatgagattacttcaacaagtaatcgtggcttctctttcaaagactcctgtatggtagcttttgatttgtccatagctgccattatctctggagctgctggcgtctcatcgccgtcagcaatccttagagcaatgagtagtggttgtgaagcccgaagacaattttcaagagtttgccaaaatgatactgaaaggacaatattttcatcttgttcaccttctttaactagggaaaatttagacccgttccattcatcactaacaaacaagccttgtaatttgctcttatgcttatacatgcttgccaaagtcaagaatgatgtt

SEQ ID NO: 55919 - DNA, 385 bp, Zea Mays
ttcataatacaataaagttgacaaaagatcacaaagaccacaagttcacaattcatgacataacaagttcacaaggatcacaaatttttaatataaaaagtttacaaagatcacaagttcacaatataacaagttcacagtataacaagttcataaagatcacaagttcacggactcgaagttcagaattcacaatatacactcgatctagctgacatggcatccttacttatgaaatattttttcctcacataaagagtttttcacaacctcacaagaaaaccctaaaacttagtgtgtggaacagaccgaatcgttaatctcaactgccttccaacaccatctatcccaaaaaaatcttaaagcgtccaaaaaatacaaaaat

SEQ ID NO: 55920 - DNA, 603 bp, Zea Mays
cgatcgcagaaaaagtgcaaaggcttactagatgcatggcagccttgagcaggttcatatcaagactaggcaaaaaaggcttaccattctacaaattgctcaagaaggtggataagttccagtggaccgtagaagcacaggaagctctcgatgcattgaagaagtttttgaccacgccactagtgctaaagccaccgcaccaagccacgccagatcagccggccgaagatctgctgttaaacatctcctgcacaactcacgtagtaagcaccgcgttagtagtcgagcgggcagaggaagggcacacatatccagtacagcatttggtctacttcatcagtgaagttctgggaccctctaaaaagaagtatcctcatgttcaaaaactattatacacaatacttctaactgctcgcaagctccgtcactactttgacgaccacaaattcatagtagtcaccgggttcccaataggggatattcttcacaacaaagaagccatcgaaagaatagccaagtgggcctgtgagctgggagctcacgacatcgagtttcggcctcgcacagcaataaagactcaagcactggttgacttcgtatcag

SEQ ID NO: 55921 - DNA, 283 bp, Zea Mays
gttgatagagttgtcagccacctttatatgtttggaatatcactgatggtgaggtcccttaattttagaaatgctgctagcagcaagaacttctccaacagccttggcgttttttgtgtacatgtttatgcaggtgggtgggttaaggggctgagaagcttgtgcaatttggagagtgtaaagtccagtttcatctatattaaaatggtttatagtgcactatgtgttctttgattctgacaatgtgaagtcattggaggcttggatcatcatattgctacta

SEQ ID NO: 55922 - DNA, 455 bp, Zea Mays
ggagtgagaaataaaagggttgtaagtattctgaagaggcaagcaatgggatctattgaggaggacaaaaagaaaatactttaaaaaagaccggaggttacgggagggacttaaattgctaaactaaaaccaaagccctcgaaactcaagaaacgaaggcatatagaatcaagccgtgccgaggaagaagagtctactccgtggaagcatgtcgttgatacccctttggcatcttctattggcattacagaaatcctagaggtaatggctgaatctttgcctttcgctatgctaagtactctaggatcaaacctgactagtttattacagccaaaggagaaaagtgctagcaaagtcgccgaagcggaaaccgaaaaggggtcttcggcgccagggggaaatacccagaataaacagcgtatgatgactgttatgagggccattctcgatactcc

SEQ ID NO: 55923 - DNA, 786 bp, Zea Mays
ccaaaattggcgagctctggtgagcaattagaggctcggcttggtgggttgggtgcttgactaccttacggccccgacggtgtgctcaattaatagaatttgggggcggcggccagtgaatttggagttggcgcggtggcggatggagaaggaagaggtcactggtggcgcaattgtggcgttcaccggtgcagtggttcagagagggtaagctcaagtgtgccacggttactaccgcgtagtaaagagtcacgacatggcataattgagatcgccggagtgtccacgatgacaccggcagtccggccacgtcgcaacggctacaggcacggtgataagcttcccctgcgaccctatcggcctccccgtgagatctttcacctccccgtgaatatccatggcgtgcccagcacgaatcccggcgatcggcacaaatccggatgcacggatcatcggcagtgaggggcgatgtatcagagatattccagttactgtaccatgagaactccaattcagagcctctgtccgaccaacttgtaggacacataactccaatttctgcatgagaacttgctaatctcttagtaacaaacttgcagtcctttatactagctacaatcttgctatggtggtcagactcaaatacttaccggattttcttcaatagagctccaaagttcaccctaggtcactgataatcagaattcaggctttaggctgactgacagcccaactttgggctcatttttctccaatttcttttcagcaccagtgctcagttactta

SEQ ID NO: 55924 - DNA, 523 bp, Zea Mays
cggcagtgtgtggtagtggtcgctatgcgagctcgcgatggacagtaaggcgtcgtcgcggcaagcgcgcgccattggctcggtaggggtggcagaggtagacgaggtactgtggtcgttagatggccatcgtggggcttcaatcgtgcgaaggtaataccgattcggtgagtgacggttgaccgttgatctacgatcgaacagttgggtgctttgagtgggattcggaagttagtaaccgttagatcaacatcctggggctctggttgcagaccgatctattgcggcgatgatctaatcagagtcgttcgtttgtaatcatacgactctcggcgttggataccccttcgttgggacagtttacttaagagtcctcgggcgttctggattttgaacccgccgtccattgcgctgtgcactgagtctgggtgaatttgcgagtgagtccctaagtttcttagtaaatggcgcacagtccagagatatgagggaatgtaataattaacaatagaaattgattttt

SEQ ID NO: 55925 - DNA, 477 bp, Zea Mays
ctaagtctgacgtctctttagttgtttaccgccgtggagatgatatggtgtgcctactgctatatgttgatgacattgttctgacagcttctaccgaggttctttttcgtcgcatcatcagttcatcacctcacttcaacaggaattctctatgaaggaccttggcaaacttcaccatttcttggggatgcaggtccaacacacgacaactggtttgtttttgtctcaacgtcagtacatgattgacatccttgaccgcgctggcatggctgaatgcaagccctgctccaccccagttgatgtcaatcccaagctgtctggcactattggcaatccagtggctgatcctacagattttcgcagccttgcaggggccctccagtatctcactttcacacggcctgacatctcttatgcagtctagcagatctgccttcatatgcacgaccccctgagcctcaccttgctgctctaaag

SEQ ID NO: 55926 - DNA, 323 bp, Zea Mays
tgagatgtggtcgaccaatcaaaatgttgtttatagtcctaagtaggtttttagtagaccaatatcggcaatgaccagccactgtgccatattggacatgtctggctcccacccttggtagtgtgaaaactagaaggtaccaaatcagaaacactcggatgctgagcagtagcactcgttggatctggttgccttatgtaacacagcctttggcatccgcgcacgccatggcactccaccaggcagagtccatgaacaagttgtactcctccatggtgtccatttcctcccaccttatcaagctcgtgcacggacaccttgac

SEQ ID NO: 55927 - DNA, 1050 bp, Zea Mays
tttatggggtcccttttgaaatccgctcttttcttcctttatgggcaataggcactattttgggtgctactcagaaagttgatatgcgctacactaggaaaatgggggtggttcgtattttggtggcagtgactaatgtaaatcatattccggagtctgctgaaatagtagttggtgaagggttatatgagatttttttcaaagttgacaaggttctcatagcggggaagtggacggatacagataacaggggtaatcgagacggagatgataaggagcaaggagaggatgaagattactctgagaaacatggaaatgattcttttcagctagagaagctagcggaagatactgtcatggaagataactctttgcatggtgatcctaagaagcctcaagatggggcctgtgacatggggttggtgactcagcttgagaatcagattgttaatgggacagtgataagcacgggtttgaggtcagaagggctgcctctgggcatgccgacaggcttgttggcacttaattccccttttgctgatcagtatgtctccactctcacatctggcgctcttgatcagacaccaggctgtggtagcggtgatgggaagtccaaatcccggctcgtgcaggatccccattgctctttccttgcaggcgtgtcacaggagagtgaggccgtgtggaacttgtcaggtcctgcagcaagccgtttgttcctgaatgagtctgcatctcgggctggcatggttgccggtatggatggtgaggcggtctgtgctcagccaaaggttggagtcggattggataatgagcattttaaagctgctggtaacttactaattcaccagaatattttacatgtttctccttctttgtttaatattcccgttcaggtatctgatcagtctgttactctgccctttgtatcagatactctggcgagtggctgttttctgggacaggttaattcatttgcaggggtccctcgctcagttctccaggtattatgtaaagaatttaatattaaagccaacactaaaaatgatg

SEQ ID NO: 55928 - DNA, 847 bp, Zea Mays
gtcgccacagaagatttttgtgccttcggcagacttgcccctgtcggagggctaaggattcttggcatttttacttcaactttcggctcttcagccttttcaaccttatctttgattgtttcaattgtatgcgtcttcggcattacagtcagttctatagtgctctgaacaatcggaacagtctgtgttgcttcgactgctgaagaagaccctgcaccaaaattagggaccacggccggttcaatgtaacatggccggtgggtcagaaccttcatctttttgctcttcgacgcaagatcaatctggatgtccgaaacagcaaccttcctctttttctcctgtccccgcggtgggtagcggtagtcggggtacataaagccaatagcatcaaagactctgttcagccttttctttccccgacctccgaaggctgcggacagagcattatcttcggctttgctatatattccaagtagctcgtcgctgatagcctcgatactttttagccaatcatcatttggctcatcaaaccagtctctgaacctgaaagtatattttaatcgaactaacccacctttagttgtttcagcagtagtttcctttggcatagcccagttttccacaagcggccataccctgaaggctatatgttcttgcattaaatcccttgtcccaatgaaagagcaaacagtgctaaaggccctttgatatgcttcagcggcatcatcaattttgaccttcggcctccgaaggccgaagcgagaccagatagggcgttgaatgatccccttaatatcttccctttcaattaggtcattcttaacataaaaccattcttccatccagg

SEQ ID NO: 55929 - DNA, 742 bp, Zea Mays
cgcccgagcgtcataaacacaattgaacctctaccgaacctttcccccaattcaatttcatcgttgcgactacgaatctaccggtccacggtgacagggcggatggtcatatggatggaagtgttccggccaaccggtggcgcgaacgacccaattgaagcttgggaaagcttcacaggccaaccaatggtgatgtatatacacaaatctgaactggacgcgaatagaaacgcggggctccggggagggtgtcacggcggctgttctacagagcagaggggtgttccagtgatgaggctcgggtaaactccaattggtcggctccgagagcaacagggggctacaaacaagcaagaactcgaatcaactgggtatgcactaacccgaagagcgctgaccacagtggagtcccttgcggcggagcaagaacagcggaagagggaatttgggagctatgtgggttttccggtgagctcgagtcaagtgactagttatcgatgcgcggaatgcaacgacgaagcaacaccagggtccaatttatagtcggccggccgaggagggatgagatccctgagctgtgactgcgctggcgagcacacccgcgcggtggattccggtgacagcgcggtgaccgccgtttaaccggggcttgccacctcagggagactttgacacgtcgccagtaacttttgccgtggccgccgacgtcttacccgagccacggtgacatccttatcgccgg

SEQ ID NO: 55930 - DNA, 880 bp, Zea Mays
atatccagttcgagtccgacaaggacctccttttcccaggatagtgcggcggacttctcctgtcgacgcgcatcggcgacgacctgctatagtgctgtggtggccaaagtagcggcgagggcatccttctgcagcaggcacgcaacttcctcctcagcagtcgccaggcttgaggtggtgtcgtcggccatggttagggggtggggctgagacagtggctggctgtgatggataggtaagcggaagtgaaacctaggtcttgtgataccatgatagaggatatactgccatatgttttgtgtgtcattgattgaggagaacaatacacatatataggcagagcgccttgaggtgtcgggaaccccttccctatggttggccagtgcaactacggctgggaaggtgataggtgcatcttaggctgggccttagacacacaggaatggcccagcccacaccagcggacagaacagacatattgtaacagattcaaccagtccctccgaaggagtaccagccaacgtagccttaggcttcctggttctcgaccgatgacgacaatgtttgctcctcgtctcagaagcagaagtcaccattgctgccattgttgaatgagaaacttgttccgtgggagggctgagccgctgccaaaatgccaattgacgtggtgcggtctgaagaggtccactggcaacgagatcctagatggaggcacgcccaataggctccttaaccaacttcctagcctttacatcaccgccggcgaggcgatcccagattgaaacacccatcttacaccttaaccagcgtcttggtaccaccctttctcgggcaggaggacacccgatgtggcactggactccaccaaacgatagtactt

SEQ ID NO: 55931 - DNA, 465 bp, Zea Mays
aggcggtcgaactgctcatcccctggcgcccaacggaggtgcgttggctcgtcgatgatgtgtcatgtgatggctcaaaggttggccgatttctaccctgtttatgctaccactttcggtgcttgatgagtgtttgtaagctttcttctattatatgttgtctttttcattaatcagtcacttcaatttagacgattgtgaatccttatcttattgggagtgattttgtgtataatcttacatacgccgtataatatgagttcattaagatactactggccaaaatcataatgtcattatgtgcaaatattatatgatatatggtattttcagaaacgtctactccataggaagttcagattgccagatggaccttcatggtatttgatttttttagtaagactgcagactatatttggagtctcagctcgaccatgtaagtatcttgcatcctactcctcttta

SEQ ID NO: 55932 - DNA, 585 bp, Zea Mays
ggcaggatgcccttagcggcagagccataaggaagggtaagatagtcaccatagaggatggtggccctagtggcactaggaggaagagagtgtcccatgctagtaaatcgccttccctaaggaagatccaacgcttatggatctagagaccccttcacatggacctagcaccaagtgtatattaggccacataagtatcatgatagctatttttgttccttctttttaataaacttcttcaatatgtacaagtatgtagcagtggtgggtgccactcgtagtgccctggtgataatgggagtccctggtgccatttaggagagcattgatgccactgctactaggggcaacaagaaatactggctctagtccacgacaaggcacccgaagacaaggaagattctagtgacaatgcacccagtgcaaaaagtagttcatgtaactgattgaaagggaaataggcaagttagccatttctacctgttttggtgattgaatgtctaacacaacatcttggactaactttgtttgccaagtgtatagtacaagttcacttaaatgcaatttgaagattctaagtccaaa

SEQ ID NO: 55933 - DNA, 854 bp, Zea Mays
tcgctgtaataacaactaactcactgatcatagccaaataaagtgaaaagtctcaaccaaacaaaaccagcattaacttcatagcagcgtgttactggttccaacagacattttgatgagaaatgtctgtgtgatgcattacctcctgcaaaatacacagagcagcaggcaaccagctccaaggtatatgaagagaggacctaggtggaaccttctcttttatgtttcctgcataatcttgttcgaacagaagtttatctctgacatctactaggagagcctgacaaaaggcaacacgcaaatgattaacatcaggattattgcattccctcacaaaacaaaacatggggtacataaatagatatagttgcagaaactaatcaggaacctgtctgaaagtggagacctcagctgtgtatccatcttctatcccagcatttttcaactccatcgcggccttcacgatttcatctttctcagccttctcggtaacgcctagcatctacacggtcattgttaagcttaaacatgtcaaccaacaagtttttaaaaaggacaaatggtccaatcgattgtgaactgatcagacgaaaaatcagaacgcggtcacacatattttttactcaaaatgggagggaagcgcatacaattacggatgcgcacattgaattcgattcgttatatgaaaacgccgattcaatctgcaacccaggtaattaattgacatggcgccgccgagatcaagcggcggcgatcagacaacagaaggtgagcgccgttttcgaaattgcagtcgataaaacagaccaggcgactccaaccattcacctgatagcaggtgacggggatctcca

SEQ ID NO: 55934 - DNA, 670 bp, Zea Mays
tgaatttgtgtagctggtaattaaactggtatatatgcatatgtaactggtgtgatggtgctatgttgcaagcagaaggagtgaataatgagattgtgatggccgacgaagctacttgcatgaacattgaagatcattcactgactgacgatatgagggtgggggcttttacattaattaatgagtactatgcctatatagaacaaagtaaatactaaatctggcactaaaaaagtgaaactttttttgtatgtgcacatatagttggttgctaatgaaggaggtggaagtggcgcaacattgaaactggtagggacagttgggaacatttcgacccatgtatatatgatgtgtgtagtaattacttatgcctaaatacatgaacaattattatattatctgcgaaatagtttatgactggtggattgttctttgttgtaaataaaaggttgctaaaatgtgttatgctaattaggatggaaacgacatcctgagaaaaatatgtggtgatcgaagttctccacgacatgaagcaaataaaggatatgacaacgtgggtgctgagccagatgccaaaaaggtgggtataaatgaaaaaattatgattattacagatttaatgattcatgattttagtataaaaatataatggtattcaatatatgtgatg

SEQ ID NO: 55935 - DNA, 1108 bp, Zea Mays
tgccttggtgttctccttagggtcatgggagctcctttatataggcctaggcctcccatagccgttggaaactgaatagggaaattgttctatgctaggcacatctgatcggtccgttgcgtcaccggaccagatcatatagccttgcggctaggatcttgattgctggtttccatcctgggtggtcaccagaccggtcaggtgaccaccggactgagccgcgtcagctagacgttgagccaaaatagcgcgcttgcaaactagttgttggatgatgtccagtgcatcatcgaaccctgtgttgttcacgatccgatgaattttagcaaaaattcccaagaccatacagttccctgtagacggtccggtgcacaccggcccgaccctgtagagggtctggtggacccacaccccttccagtccttttcttctccatttcttttctattcaacttgaacttcttggaggactttcctatgacttagactagtataatccaattgactaaaccctagaaccatactatttctcaacctctcctcaacttctctgtttcttctcaagtagggccccaaatggcactttctctacaaaccaagttagagagcaacctaaagtgccaaatgcttagtaaaaggtgtatgcaaaatattcaaacactcaaagcttgcacacttaacctttttcatcgttttgctcttttggtctgtttgaggtcggaattggactctaaaactccaagtctctatgagttgatcactatagccatctatgcgctccaataccctgcactggtcaacaagaacatctccacccacagaaatgacccaaacaataagtcaaagtgtacttagctcttgggactcttccaggttccgactttgatacttagcttgttcttgtgaccatgtctctacttgagctggatcttgagccttatgacttacaacatctaaccatatgcattatcttaatggttgtaagtcacgttcatatatcacagtcttcaatgcagcatgactcttcttagcttgaccaactttgacttcttgcaagccatcttcttcacctctggctttaggtacctcgatattcttgaccttctcct

SEQ ID NO: 55936 - DNA, 455 bp, Zea Mays
gcgaagctttttgagaatggcgggatattaccgccatttttataaaaggattctccagcattgcaagacccgtgaccgaactcctcaaggaagacaacaaatttgtatggaccccaaagtgttaaaaaagtttccaagtcataaagaagaaacttacaaccgcgccagtattaacactgccagacatccaccaaagcttcatcatcttatgtgatgcttcaagacaagggttgtgatgcatacttatgcagaatgagaaagtcatcgcctatgcatctcgcctactcaagcctcatgaacaaaattatccaacccatgatttggaattggcagccttagtgcatgctcttaaaatatggacacactacctgattgggaacaaatgtcatatattcacagatcacaagagcctgaagtacattttcacccaacctaacctcaatctccatcagcga

SEQ ID NO: 55937 - DNA, 371 bp, Zea Mays
gccacgtacctctctttatcgacgtctgcccaactgcacgacgtggcccactacacaagatactaaccccggacgtcaagcaggaacagcaacccagatccagatccccggcggccccacgagaaacctgcaccaccacccaggtggccagatgctcgctgcttagtgggatccagccgtcagccagcccaccagtagccatccgactccccactctgctacgggggctccggtgcggcgtcccatcaatcattcgcctcgccgttctcgcgtagctcgccttcccaaggatttggcccttcttttcctatctctcccgtacacgacgagacgaggctttcccgtaccgtcccgcccctctatgcgcctac

SEQ ID NO: 55938 - DNA, 481 bp, Zea Mays
catttacctcggctttgcatgatctagtcttacaggtgtcattcactcctcactggagaggattttgcatgatcacatggcatctgattggcatgcaccgcttttttattgtattaaattgctttgctatgcgctgtagctacgtagaattactgaaaagggatcgaacactacctttgcatgcataaaaggcttagtaagacgcaacagatcttaactgaatctagtttctgttcatatcacagttttttgcctagataatgcagtaatatctgttttgtaccgtagcagttcacagcaacaaaaggttttatccccttggatgactattgatgtaggtgatctgagacctttggtttatgatagaacatggtcttctacttgatctggtatgataatatggactctcagttaaagctataccaactttgagagttcatacaaagttagcttagatgacaagggatccgaagacaaatgc

SEQ ID NO: 55939 - DNA, 508 bp, Zea Mays
tgagcatccattacattattatcctaagacacgagagggacttaggcttataagtgccccatgacacgaggagtcctagggacttagtttaataagtgccttgagagatgtgggggctcaagtacttatacttacaagtgccataggacatgggttgcccttaggtcttagtctcatgggtgccccagggcatggaggccttaaggatttaatctctggttggtacccatgatacaaggttccttgtagatttatagtattttacccttggaggttctaagatgctaagggacctaggcctcatagcatttaggtagtcctatgccttctggtagctcccatttcatctatacacttctattatatgtcatctagtgccaagatgctccttgggataggtctaggggaggtttctaggattcaaggctcaaagagttttggtactattatggtgtgccctgaagttagggggtgtttagatgcaaccgactaaattttagtcatgtct

SEQ ID NO: 55940 - DNA, 479 bp, Zea Mays
gggttttctgcagagtcatagactcaggtgaatagtaaaccgaggacctgtctataatacacttagaacctttcgccagggaccgagatgcaaaaccattttcctttaaaccatttctatttattctttttaaattaagcagagaacttaggaaatttgtatcttgagaaatgttcaaccaaatttagtcaaaccaattttactggattcaaaatattcactactacagatcatgctatatgagacagttaattttcagttattaagacgcttatgaagtgtccaattttgatggagtcgcaaaaggtgtcccacatttaagatggttataaaccgtcttaaaagatattatataagacagtttttaatttataaccgtatgaaaaaggtatttgtttaagtcattttgtccgataaaccgtctgaaaaaggtatttgtttaagtcatttcgtccgataaaccgtcttgaattaggttt

SEQ ID NO: 55941 - DNA, 816 bp, Zea Mays
tgaaggagtccacctggagatccgaagaccatccaaggcggtctgaggccagtagtggggcctcgggaacatatgtaaccgtcgggcgaagaagaccccggggtctgtatccctcctaatggtttccagggcctccagcgggaacctcgaaacaagtggtagcatcgaaccacaccaaaggtaggggcaggctaggcccatggtgcaaccagaccccgccaacaggatagtgagggttgttgcagaaggaagcctcatgcaagcttacgtggcaggggcccttttgcgttgcagagttcttggccatgtactctcgttatctctttagaggagtcttgtcgacccgacccgcctcgaaggcaagacccgtagcctgccctcttcgtgtagggctagttttactgtagcgtctcgggcaatcatacccagaatgctgacatgggctagagtagtttccaggccctgggccctggtccggtggacaatggtctctatatagtgggcctagaagtttgtctcctgcgtcaatatctttaacctgaattgtcgacaaaaaacaacaacgacagatacccatgccctcctccaccgtaacagcatattcaacggaaacaatactatgctctttttttaaggcaaagtactatatattcatttcgttgttatacaaactaattcttaaaatcatcttaaaccaaacttataaggtcgaataaatccataaaagagcgtgattatttattatgtcaaattagaatcataaacatggttgatttttttataattcatttatttggtttggtatcattataattg

SEQ ID NO: 55942 - DNA, 638 bp, Zea Mays
acgtcgtcgttgccactccttgttgccgggccacgcgcggggtgttggccaccacgtcccgtgctccaacctcgcgtcgaactcggcctctgcgctcagcatccgatcactggccgacgcacctcctcatccccatggcgtgctcccctcagccgtcatctccagcagccgcgcgggggatccactgacgccggtcagactgggaggacgaagaccttggggtcgttgatcatccagtcgagggccaggatttgactggggcgtaacctctcggttaaataaatcttgtgcgctggtcggggatccaagggctcagatgggatcgacacgcggatcggctgtagtccgtaggatctagatccacgggttcgcgaaaacgtaccggttcacttaagagaggatctaatttgggccatcgattttggatccaacggctgatctacgccgatacccttttcggctaggtaacaattgcataagaacccctgctctttatatgaatgaacccgcgacccacactatgtataaagtagtttaatccaagtcctcgggattttacagaacagaccccgagcttctggtaaatagtgcccacagcccaaaggtgaaataacatgagtgaaattaataaagaaaag

SEQ ID NO: 55943 - DNA, 510 bp, Zea Mays
tactctttctgtctgaccatctgtttgaggttggtatgctgagcttccgatcacagtggttccaagtgacttttggagctgctccaaaaaacgtgccacaaacagtgctcctctatcagacacaatagtcttcggaattccatgcaaacgcactatttggtcaatgtagatctctgcatatttctttgccttgtgggtggtatgtactggcaagaaatgagctgtcttggttaacctatccataatgacccaaatagaataatgctactgggaggtgttgggcagtcccacaataaaatccatgcaaatatcctcccatttccaagatggtacgggaagaggctgcaaggtacctgctaccttcaaatgactagctttgattctttggcaagagttgcactcagatacatacttggcaatttctcttttcatcctggtccaccaatacaaggacctgaagtcatgatacatcttgttactgccggggtgcatggaaaatttggaaagatg

SEQ ID NO: 55944 - DNA, 710 bp, Zea Mays
cagttggtgagggcaatcccatgctgaacaacatggtcaacttggtcgccgtgctcaacacagagttggaccacgcccttgacgagttgggcaaggttcggcagaggttgcggaattgcgtgctgagtgcgcagcatgccactatatggatggtggttctcccacccctgtcgggattcagcacccttaccgttcaccgccccgtggtcgcttcgactatggtaccccagactgcaggacccggatagatttggatccctagattgacagagtcggagtctataataatgcttagttcagtgtcttagtctagtaagtcttagttagagttagtttgtttactttatgttggattcttgttatgatgatcatgtaatgaagttggatctttgtaatgattgtcaccaaggtgtgggtatcccctacaacttggtatagttattaataaagtcagttatttagttgggtaatccatttattcccactttcctctttatctgagaagctgtcagcgaagatggtcatttgttcagtgctatgaagattttctgtacatcttttcttatgctggaagtctgcagagtcagatttgatatatatgtgtgtgatttctatagatgtctaagaacaggcgcagaggtgcgaggcgtgctcagcctgaacagcaggcaccccaagaggaggcagccccacaacaacatttgccactg

SEQ ID NO: 55945 - DNA, 545 bp, Zea Mays
aagtgttatttgatactggagcaacacattcattcattactgcatcatgggtagaagcacataatcttccaataactaccatgtcaacccccattcaaattgactcagccggtggtagaattcaagccgatagcatttgcttgaatgtaagtgtggaaataagggggatagcgtttcccgctaatctcatagtaatgagtactcagggaatagatgtcatcctagggatgaattggctagataaatatcaggcagttatcagttgtgataagaggacaatcaagttgatgtccccgctaggagaggaagtagtgaccgagttagtcccgcctgagctgaagaaaggaagttgttatcagatggctatggatagcagtgaagcagacccaattgaggttatcaaggttgtgtctgagttcccagatgtgtttccaaaggacttaccaggtatgccaccagagcgaaaagttgagtttgccatagagcttcttcctagcaccgcccccatctttaaaagagcttacagagtatctggactggagttg

SEQ ID NO: 55946 - DNA, 512 bp, Zea Mays
acacaccagcccgtgcctcagattatccaaaagagcgctcgaattttgaatttcccccaaatctgtcaagaacaccgcagtgtgtgagctcgccgtggccagctctccacaggtccgatcatgccctcctcactcttgtttcagctctcttatatgctcttgatgcttctcgacccggccaattgaattagactgcgttagatcgtcgggaatgcctcgggttatcctcagtttgcgccatcaccgtggacagcacgatttagagttagaactctgcaattgatggaggggaaatggtcgttaagggtagaattaggtgttgagcaacggagaagcatagccgttgcgttttctggccggtacgggctcgccggagccgctgctccgccgtccatggtcgggggtctcgacgtgtgaagaaatagaaaagggaaggggctatctgcaaaagtcagtgacacataggaattgtgcggaggagtctttacgagttatttaaaagagtagggtcc

SEQ ID NO: 55947 - DNA, 861 bp, Zea Mays
cttttccaaagatttaggagtggtgcacaaaagaatttcaaaatatgatttcaattcagattttataacaaaataaagtttaccaggagctaaacaatgttattatggaactaatgcaattgaaatggattaaaaaggagttaacatgagtaagatatgaattttcctagcttttgtgcatttttgtattaattttgtgcctaaaaacaaactccaggggttaaaacgcaaagtcttcatttaatcttattttctttatactgcagaatggacggcgggttgaataatcaaaagtataggggcccttatgcaattgatcggtcgtgaaggggtatggttgtttgtgagccacaagattagatttggatggcctagatcgatcccgagcccataacctgtgcagaccgcacgattgaagatcaatggcccgcgatgtaccccccgccagagactccatccaagcgttcgatccgcacggacggacaggattcaattacgccacggggtcaatcctggccgcccgatccaacctatggtccagattcacttactcggagcggtacgcatactgtcttaatcgtgaccgttggtttcgatccaacggccgacgctgatctctatctcatgccgtccgagcccggcggcgcaagtgcacgcacggtggtgacatcgccggcgaactgaatccgcgccccagtgcactaattggaccccagagaggtgctacacgatgcagaggaaagggcgagtggcacaaaggtgtcgttaccaacgattatgtcgcagtgatccctgcccacagagacgcgcgacccgcggcggccatggagctgcggcgagcgattccggtgaacccagcca

SEQ ID NO: 55948 - DNA, 956 bp, Zea Mays
cctatgtgcaaaattagtccacttttggactaaagtgcaaaaaccaagttaaataagtgtcttaagtcatttgggtcactcatatgtgaatttgcaagctaaaccctgagttttggacttatttgcaaaagagccacacttgaactcttttgactaagtctgaatttcagtgtaatgtgctcatctttgtgaccttgtaacttctaaacaaaagggtttttgccctaggtcaccacatcaaaattgtagcccaatcataggagaacaactttgcttaagagtgtgagcatagttgttaagaaaatattggagataattaaacctgaagtcaggctgtcaggctgattcagtctgaatttcagatagacagtgacttggatccaagtttgagagccatttcgactaagatccagtaagaatctacctagggttgctataacaaagttgtaaagttattaaagaggaacaactttgttatgggtgtttggttttggtaccacatggaattgggagaaaatggtgctccaaagtgctctgtcaggtcgactgatgggggaatcaccatggtacagtgaaacgatgtggatcagaccgccagcgcagggtcctcgccgccgatgaccttgcgtcgggatcgtcaccgccgttgagattcgcactcactggtaaccggatagcactcggagtcgcgtaaatatcctcgtcgtggataactccggccagtaaaatattccggccaccgtacaagcgtcaccgcggcggaattggataagaacgccggtgatcaccgtcgcacggccttgtgtcgcgtgtccgagcctttccaccgcatcgccgtgactccctatagctgtcccatcgtcgccggggaggttgccacgacggtggacacgaattcacagcgccgtgttcttcttcatctccggccgccaccacggctcgaccaaattgatcac

SEQ ID NO: 55949 - DNA, 2962 bp, Zea Mays
accacattcagaagaacttccaatgtttcaagcgcagctattttgacagaatgtggagttgatagtgtaacatctcctgtactttcaggggccactccctttgatgtaattggtatggaagaaccttttcttttccttgggctgattgctactttctctgaacctgagatggttgagttttgcatctgtggttcttgcttcctcttcttcgaataaacttttgatgatgattcattggtcaattgcgatgaatttgtgttgatcatagtcatgttaatttcaccatcatcattcagatcagcaactgcattgcggactgttgcctcaagcaggtgcagagacgtccctgataaaaacagaccatttgtccagaaagtgtgcaacaggagtttgactaaaaaacgaaaccaagaatatgtgccaaacatgcatatggtatctcaagcatgaacagaagtgaaccgatctaatgcaatatcaatgtaaagttaaccaaaaggaatctcaattccgaattgaaaatcataaatttggatgtgaaatattgggaaaatactacagttctgcataatactttggttttccaaaccattagtttttaaaaccatgaaatagtcagaattagtctttttggagtttcaagaaactccatttgagacgtcttttctaaaccatggtttttgcacgtttttagctcataaaattactgtttcttgataccatacttttctaaactataagtaatctataaagggctctcctataagcaagcagaaacatatctagtttccagcttccttgagggagctgggattactgtgaccaaatctctctctctgcgcactgttcatccgcgggtactcgcctcctcacagcgacggcgccccagcgccgcccttgtcttccctcttccctcattcacccctaccgattgagagatatccctggtaggatcaggaaccctaccattaatattgccaatttaaaatagcacgcattcaagcacaattctagcatgatatgctataacagtattactatgaaaaaggtgaaactacaccaataataaattataatcaattgtagtatttccaaaactacaatcataactgcaaagtaatatatacaagaaataaagaatgacctaccaacacccatggaggtcagcaacagctgcaaaatgctataagtttttgtcctcaaagtaggcagctttgctattttgaagtactctgttataagccgtatgatactagcaccatgaggtaagagttggctgcaggatgatagtctaaatcagtctttttctatataaggtcagttttttctatcttatgtcaaattcaaacattaatataaaagaaattctatataggtccattttttgtgccaaaattagtgacagctaactagtcaaattgaaaatgtaagttaccttcgcatgcctttaatagttgcattcagcaaatccaagaaagttgaatgtaacgatggaagatcaaaacaaataagctcttgatgcaatgaagttgtagaagggaacagcttgttatgcaatgatccatcaactaacagcactcttcgcatcaaagctatcaaagcatgaattggaacattgacctttttgacaataaaagagtagaacttagaaattagaataaattaaatttataccttacactagtaagttatgagcattaggtgatatacagaaatgttctgattttgacaaaacctgaactggataataactagtcagcatcacgctgcagcaaagcgtaagagctgaaatggtaggaacagtaaagacacgaaatttcttcatgatatgcacattgcctccaggcattacttcatctcccaatgttggtagaggatcagttccaggtggaactagcagcagcataatatcatggcctttcttttctgtaacagtagaatgggtaaaaattaacctgaaatggtagaactgaaacaatattaggagcaaactgctatagtataccttcttcaagcccaatgaaagcatcattcaaaagattgtttaccacaatcagtatcctccgaatcatcagtgaccaactgtcctcggacactcggacagaaggtaacaatgctaaggttctcgcaaatttctggagcattgaaacagtatatgtaagacttggggaattcttgacaaggatcaagaaagaaaaagaaacaaaaagagacatgacgtgcataggtttcatctgtgctcactattgatacactcagataaaattcaaggcagcacccctcacctcagatggttttacattgctcataatctttgctgcaatagcagattcaacctgaaatttgcaaatgtaagtacaaaactattagaacagaacagttagggtgataaaaatactatatacagatacagtgtcatgtttacttctatagacacaagcgattagttgactaatgaaaaatctgcatcgtatatttgggaacttgggagattcttggaatagaaacttcatgcgtagaaaacatgtgtggcacagctgtgttcaaaatgacaggacctgtgcacactttcccctcttccttttaaatttaggattttttgtggtgggtgctctaaagctaattagctataggaaagaaagaaaaaaaagtgtggggaaaaaccacggaacactttcatcaccactcaatgtctcaatctgcacttccaatattacaaaaataacaagcagctgaaaatatatctagagctctagtagctgttcgattctgcaatccatatagactgagaagacttccttttctacttgggcactaccactactgtcatgggcctaaatatagcccaagatggagggcctagcaaagccgcaccctggccgcgcgccagggggtgggggcgatacccccagcccaccgggttcctcaccccaaggagtctggacctgactaaaattagagg

SEQ ID NO: 55950 - DNA, 1780 bp, Zea Mays
tgctcatgtccgtaggcccgtcaatttgcctatacgggctggcccattaactcactcgtcgtttactctcctctcgtcggcttctttgcttcgggtggacggcagggcgagcggcgacgccctcttcgtcggggaccttcgccggcgacgagaatccaacctggtacgcccttatccgcccgccgtgcggaaccgagctaaaccccaaactctaagctaagctattttagccggatctggtccagcatgtattgttgtattacacactaacttcgattcttcgcaaaaacatgctctgtgctggattcgcattcgcccctgcatgtcgtgtggagagaagcttgctgcttctgtccattccgagtgtcaggtgcgccactgggagtaggttactactgagttcgaggaatcggggctagccacgaatctgcgacttgtgctcaatttgattagggctccattatgcaactcgacacatgaatcatggttagccacgaacatgatatttgcgatctagatttttgctcgagtatgcgatcgaacatatttacttcagcctgtgtgttctggggtgttttggtacctgggatggacgttctgatgctggttaggtgtgtcccaatgctcgtttcctccctcgttggcttcacactcttattctatagtgcccaccgcacatggtattctgagagattttttcttactcatttagcaactcttgtagggtttttgttctgcgcttttttctctctcaaagactcacgattgatatgaacagataatccggaagatacatgtgccagatgtgtcgatcacagggatagtaaagctctcgaactgggtgtaaagagatggtaagttaatagttttcacttgctaaatcaacatggtggatccaagttttttctagaaccacaagacctattcactaattactctttagtttgttcccgtgttagataacatgtctgattttgaggagccctttaaaatttctgggatgtggcaatgctccatttgcacgcatgaaaatactacatatagttcatcttgtgagctatgtggtgtgcttcatgatctctcactgtatttcaatgatatcagtgaagacgaagatggaggtatatagcaattgttttatactatattctactacagtgatgcaatataattaattatgtctagccttttaatttagttacttctcccttctgaaatctagctaaatgcagacacaagtattctggagtatccatccttgcaagatctctttttacaccacctagtgcaaagtcaaaggctattgttttctctcatgatttcaaagacagaagaaatacaacagggaataagcaagctacaatggatgctctacataagacattcatgactcgcaaaaagcgccacattaacataggtacgctacatagttaaactgtggcgttcttcactttgtccaattttttcgtagaatgacataatccaaactcttattgctctaagtatacaatcctattttagttattaacattaataatatatttgtttaactattatcttttcagagtcactgtatgcactagcactagcagactttattgagtaaagccaatatggtagtaactatatatcaatcaacttgcagatttatgttccattgtaattgggatatttcttttttgggggtgggtgagatggggtgtgtggatatattgtaattttgtaggatatggtctggcaatcctctcctcttacctttccttgctgcacacttgatatt

SEQ ID NO: 55951 - DNA, 391 bp, Zea Mays
tctcaccacaattatagcaatctctatcatcagttacagtgtaggttgatttcataggatcattagctatcattacctagagcctgcattcctcattaatcattgacgacacagcctcatccatggtaggaagactctcttggtgacaaaaggcagctctcctgctctcaaactctggatccaaattctttagaaagtgagtcactctcctgtcctctacccacttgtggacaacctgtgcatcctgaggacaaaccatttggagaggagcctagtgatctagttctccccacaagtactgaagttcactagcatattgtttcactagtctccccgtctgtttcactgcatctgtcttactttggatctccatcatcatcatcatattccc

SEQ ID NO: 55952 - DNA, 499 bp, Zea Mays
acaactccatggaggtggagcaaacgtccatcgcaactcaaaagccaccgcagtacttcttgcttctttatgtagggaggagtacaacaaggtgaatgggctggaaaatgccaaggatattttgaatacactcaagatagcacacgaaggtgacaagatcaccaagatcatgaagatggagctcatagaaggggatcttaggaggttcgccatgaacaagggagaagggccacaagatatgcacaaccggctcaagtccttggtgagccaagtctgcaactatagaatcaataagtggatggatcataaagtcatccaacttatgctaaggtaatttacctcccataatgcaactctcgttaccttaattcatgaaaatcctaggtacaagaagatgacaccagaggaggtgcttgggaagtttcttagccatgagatgatattaaagactccaagaacattgataatttggctaaaggcaacgtcatcaccatcgagc

SEQ ID NO: 55953 - DNA, 345 bp, Zea Mays
gaaactctggccacagcgcctgggaaaggaaaagagaaagccggagatatctcggaagaagaagacttcaattttcaggacatacttgggcaagaattgtcaaaggctgaaaaagaagagttgaaggaatatgccatatcttgcgggtacagacccggggcgctgctctttgggggagttaacggggaaagcttaggatgccttcgggaccgcactggggcgaaagttgtcggcactctatcgaagagtattggccttccaaaggttgaagcagacctcagtaggtaccggcggcagcatatcgctggtactatgctaactttaaggtaaaattctcaacttttt

SEQ ID NO: 55954 - DNA, 353 bp, Zea Mays
gtcgatagcagtgaagcagacccaattgagagtatcaaggtggtgtctgagttcctagatgtgtttccaaaggacctaccaggtatgccgccagagtgaaaagttgagtttgctatagagcttcttcctggaaccgcccccatctttaagagagcttacatgatatctggactagagttggttgaacttaagaagcagatcgatgagttgtcagagaaaggttacatccggccaagcacctcgccttaggctgcccctgtcctatttgtggagaagaaagatggcaccagaaggatgtgtatcgattatcgagctctgaatgaggtcaccatcaagaacaagtaccccttgcc

SEQ ID NO: 55955 - DNA, 418 bp, Zea Mays
cagaccttcaccaccaacaatgtgtgtgtggtgtttctgaacgccgcaaccgaggcacgataagggcaacaccaacacctgcaagcgcagcttcctctacagcctctgtttctgctaactcggtgcaaggtatgatgccgccatcccaatccctacccccagatcgagttaatacccatacatacaaccattgcttttaatttaatccatgaaggtatgatgcaaattgtgaattagaatgtgcccccggttgttatttccgagctaaatgattaacactgctacaaatgggtaaaatccgatttatgcttatttattgtttagcttacatgttggagtactgcttgcgacattaccattgatccacacttgcattgtaaatctcaccctgatcattgcagcatgtttccaaaccaaa

SEQ ID NO: 55956 - DNA, 777 bp, Zea Mays
aatcgaagttattatgaagttgttcttttcatgttacctttgtctggtagtggaactcatgaatattgcaaaagcagtcagcatttgctccaagctttggctcctcactgcccaaataaaaattgccatcctcaccaaagcatttggggtcagtcgatgaagataaataacaaacttcttcaagacttccactaacattgtatgaaggggaaatcgaagtccaaccctcataaagcttcagaaaactaccacctcatctttctcaaggtgtaggacaatatcttcctcaccaagtctcacaatagagatatcacaaaaatatttgtccttcattacctcaatatgcccctttttcatggatgacttgccgaagacaacatggcttggtttctagggccatacttcggcatcatccagatcttctttgaagtcaaacacttcgctattgtcagaatcgttagacagacctcaccaacatctcatcagtaatctactcaacgttagacctatccatagcatcgtgatacacaacaagagcaggctcctcacttttcttctcctcagccatatgaaaactcataagccttaaagctaccgaggaaaagtgatgtagcacaatgagttctacgaagcaagctttgaagtcttagcaaatgaaatggctagaaaaagcaaataaattctatggttggccaacacgaacctcaacccattttaaacacgaggcaaccaagaagtgcaagtcaaaaattttaaaaccaagcttatcactaaaaa

SEQ ID NO: 55957 - DNA, 556 bp, Zea Mays
attgttcacttgtgacttagccgattttccatcggctctaacattatatgagtgaagcctttcctgcatacacttacgaaccgataatctgaaaaatcgactcctgttaaacattttgcagtttcataagtccaaagcataggggcagcggccatagcaatgcaagtcgttgcgtctacatgcacggtttctacttcattgcctacccattgaagtaacatttgatgtaaagtagaaggtacacattgatcagcgtgaatccaatctttgcctaggatgatactataatttccttctactttagtgacgaagaaggcaacaattagtgtatttgtcccgattgttaatttaagggacgtgacacccttggcctcgattggactgttgctcccaacgatgttgagtgtcatgtttgtcctgatcagcttgttatcctatttacctagctttctttacaatgagtaaggaaataaatttatggtcgcacctccatcaattagcatcctagaaatcggcgtcccatcaatatggtcgcgcatatagagcgacttcaagt

SEQ ID NO: 55958 - DNA, 642 bp, Zea Mays
gttgtgaaggacgtcggcgactgcacgacactgctcgacgtgtttgtctacatcgagacagtttccactgccctgcgcgtctagttgtaatcccatgacctataacatcagtagatcttggttttatggggtcgaaatttttttttgcgctagcatagcctccccataatcccacaagtttttggaggtggaagatgactacgctatggaggtctctttcctttttgtaggggttttccctcatccttatttccgactaagaagggatcacctcacacacttggagcacaagctctatctaactgtttctactagagatacgccatgtttatcagcggccaaccagtcttcgggtatgcacatagtctccctgcacgaaacacgatcctggaagcatttatgcccacgcatccgtcttctttgatcatctcatgttgcatccgactcaggcccactaggtgcctttcgggcaacccactaggggccttgctgacggccaatggagcataatcgagttatggtgacccggaggatatctatcccccacaagccctcgagggtgaagccaattttgagtataattggctcaagactctcaagacacctagttctgatgatgtatttctgccaagttgattgatt

SEQ ID NO: 55959 - DNA, 1386 bp, Zea Mays
atgtatgaaacttgtacaggtccagaccctcctaaattgttcagtgaatgtgtgtgtaagtttttgcggaatgtcacgagcgagcagctctgccgacggtggagaagggtggcccaagtatgggtcggtgccattgattcgttgccctaagtgtgatcggtgtgagcccctcattagacgcacatcaaaaaagggagaacgggaactatggttgtgagtttgctaggtgcgaaagcaagccacaccctagaaaggttgttttcattcccatcttttttcccaattattgtcgatgtgatgttttgtttctcatcttttttgtttacttgtttaggtacaagaaaattgtaactttttcatgtggatggatgattatgtaaagatggtggaagggacagggttgaagagcagctcaagggagagatgttggcaactacgagggatttgattttgaatcgggataaactgggtgtcgaattgaagaaaataaatgaaaatttggtcaaaataagtgacaatttaggcaaagtaactgaaaatttgggtaagattatggatcagactagggccctctttgcttttatggttttcattgttgtgcttttctttgcgacaaactatggttgcaagcagcaaatctgttggacgctggcttcaaaaatagagaaaaaaagagcctaaaccaaccgtggaagcagaaaaaaggagcaaaaccatcccctcaatgcgtcaaaggggatcgaacccgacacctcctcttgcaagccaatgagcaaccacaacaccacactacacttcgctttgtttctattaggcgaggtcatatgtaattacactttaatggaccagttattttattttgaatcaaataaacaaacttgaatttgaactgtaagtgcaaaaaacatagttcaaaaaattaattaaaatttatatgtaagtagatataataaattaaataacatatacagaaaattgtaccaaaattgtcacttttctttcggcacttgggcatgtgtgcgaaaaagggttgaccttaacttgaacaattgtgctattcctcatagtggaggcatgcatcctccacttacaccactcaaaccaacaatgcacagtgtatctcttgggcgaactcttatcaatgataaagtcgtattcccctttgatgtaataggttgcgagtgcattcctgcaatctctcatggttggaaaagtattgccttcttctagacttagatttctctatcccaatcaacaatcagtctatcctcatcttctacatcattgggcacacccatggtatggttctcctccctctcttcatcatcgctatcctcaaattgtgcaagcatgtcatacccacgtgcatgaccattttcaataaac

SEQ ID NO: 55960 - DNA, 450 bp, Zea Mays
tgaggacacctcgaaggcggtgatcgaactagctgccgaagaccccgcggcggaggctgggccttcgcaggtggtggtataggggttaaggattgtatgtgtaaacttttgtctgtgtgatactgaacctcggttgctgcgcaggttccaacgtttgggcctgcgcaagcaaccactactgacaatactgattttgcggcggagacttcaattgtagtgtctgccgatgatagtgtgcctggttctatgtctgaatgtttgagtccgacggtgagtctgtgagttcgtctccttggacggaggagtcctcagatgaaggcttggattactttgttgcgttggatgtggctgcgacggagacttcgccgcgtgtggagggtgctgaggatcttcctggtgcgagtactgggtgtaggcggcgaagggtggtgggaaaacatagtgtgggtg

SEQ ID NO: 55961 - DNA, 432 bp, Zea Mays
tgatggtcaacataactatttggactaacattatttgctagtgtatttggttatagtttaaacaatggaaagtgggtgaacgaaggcaaagatgtaatctagaagatcaacacctcaagaaagacattcgaagacaaattaaagatgtacaacaacatgtaaatgcctaagacacatgatggaaccaagtcgaatgtgaagaccacaaagaacaaagaacaaaagggattatatgacgccggactttcgcaactagagcgacataccataatatcatactattcttctcatagacgtgtcggatgcaaccgttggatcatggcctgaacaacattggaccaaacaagacattattcactaagaggcttcacatgttagtgtaaaaggtggggaggcatcaaactatagactataatccaaatgaggtcgccg

SEQ ID NO: 55962 - DNA, 755 bp, Zea Mays
cctgtcagcaccatcccccgtgcacgctctctctctctccctctctccctcccggtgctcggtgggaccgacctgtcggcgccagattcctccacgcacttgcgcctgctctctctctgtccgtgggccccgctcgtcagttctcgctgcccgttcgctcgtctgctctcactggtccgtgggccccgcctgtcggactcatccctcctgaactgcccgtacacgccccacgcatcgccgtggactccgtgcccacgacgcatgctgaggccacgcccgtccccaccccagccttttctagttgtctagtgccccactcgctctcctccctcactcgcgcactcgcagcaccccagcactcgcctcacaccgcgcacgcacctagggagctccatcgtcgtttgccatggtcccgtgctcgttctgcagtcaccgtcgagccctcgccatgtctatttcctcggtgagcttcacctcgtcacccgcaacccgggacacccctcggtttgctcccttttcctctgtttctctcggtccacactcattggtcctttctctacaccgccgtagctccaccgcagctctgtcgtcgtcgacccatgacctcgtcgtgccccagccgccgttcgagagtctctgagccttctctcaaggtaactaacctaaccccacccctaatttccccttgtctaccctcagttatgcacgattactcgctggagtgacctatggtccccccgaagactccccctccg

SEQ ID NO: 55963 - DNA, 537 bp, Zea Mays
acaagtgatgaactgcttggagcgtactccaaaaaggaagacaatgccttgtccgcagccttcgggggtcggaataagaaaaggttaaatagggtatttgatgctattggcttcgtataccctgactattgttacccgttgcgagggcaaggggtaaaaaggaagattgctgctgctggaaaggttgctgctttgtccatcacggctgagccgaagaggaagaagatgaaggttctgactcaccggccgcgttacatcgaaccggctgcgatacctgaatttgacgaaggggtctcctcggccgccaagacaaaagaaactgttcctcctgcacagaggattgaagatccaactacaatgccgaagctaccttcagctgagctagtagagacgaaggttggtaaaggtaaagctgaagagtcaaatattgaagaaataaaagtgccagaaattttgagcccttcatcgaaggtgacagtgccgaaggcacaaaaaagttctgccacaactcctaagaggagaaggatggcaaatgtg

SEQ ID NO: 55964 - DNA, 570 bp, Zea Mays
gttagttagatggatagctcccttatcttatcagaaggttgttagatcttgatagattagatggatagctcccttatcttatcagaaggttgttaagatgtactagacaaccttggctatataatgccaggaaagaaaggaataaagtaagcaatttaatttgcaacaaatcttgttgtcaacttcccccggtaagctggaactcacctgcgcctcctgttctcccctgcaacctgcgatcacagtgcccaagcgccaaccacaacttgcaaccaatcgcttgtcaacccctcatccatattccttgtgccatcttcctaagagggcaaggaaccctaacaatctagtattgcaatgttagctcctccttccaccaccatccagccgctgacctccttcactacactacccatcactgcaaccgccactcaccatggccccgcactcgccacaccctccaccacgccgtctttcacgatggaatccatggtctcggcaatccacgacctcgccctctcagtggcgaccattcagtccatcctagcgaacgccctcctacctctgtcgccc

SEQ ID NO: 55965 - DNA, 777 bp, Zea Mays
atggcggtctagttcaatcagaggggtcgaggagcttgaggaggacttaaggatgctagaacaaacgaccaaagcgtttgaactaacctggagcaagctggccacggcgagggcaaaccgagcggagttctttagtgatttgggggaagtaagaaattggagctctctagcgaacgattggaggcaagacttggtggcttggtgcgtgattactctacggacccgatggtgcgctcaatttatagagtccgcgagcagtggccggtgaattagacgacgacgcgcggcggccggagaaaccagaagttactggcgcgcgcgattggtgtcctattaccgtggcaagctccccggtgatgaacggagagttactacgagtcacgacgatgtggtggatgtgccaaggcacgtggcgcaaggctgtgaggcggctgtcaccggcgaactcatccgaatccgctgtggctaaatcgggtacggtggtcggagtaaattagtggtcggaatatatccacggcgggatatttacttaccccaagcgctatccaaccgatcaaagcgcgaatcacggcaccgaaggcacgaatccacgcgcggctcgtcggcggcgagggactgagctgacggcctaatccagtcattgtaccatcgcaagtgcattcagtcggtctgatagagcagattcaaggcagcttttcttcaatttttatgtgacaacctcataattcatctacataaaagttatagatctataatccatgttcactttttctatag

SEQ ID NO: 55966 - DNA, 472 bp, Zea Mays
tcaccatggtgactccattgtaccttgcacatctttatcaccttatttcttgtaactcgagtcaaagtgtccagaattttaatagggtactcagcataggtcagatcatcctgcacactgaggtctaacattggtagttgctcctcaggtaccctgaggcacttctttagctgggacacatgaaacacatcatgtacatctgacagatgattgggtaactcgagttgatatgcaacttcccccacccgctttaagatcaagaagggtccaataaagcgaggggacaactttcctttgactttgaatcttctcataccccggagtggtgacaccttcaaatagacatgatcaccctccttaaactccagtagtcttctcctattgtcagcatagctcttttgcctggattgtgcaattctcaaattttctcttatcattcgaacttgctcttctgcctcttgtataagttcag

SEQ ID NO: 55967 - DNA, 653 bp, Zea Mays
gtttgcagcggtgaactaaataatttgggacctgaagatttgtccaaaaataatacgaatgtagttgaactatgtattatcgttgggcacttcttcaaatctgacttcgtaccgtcactgaacccattttatttcaactaccctcttcctgttttgggcagtttcatgtgagctcattttggctgatcttccatggttgggccgtaccacgatttttctcaggcattgggtagcgcaacaccggttgccaaacccacggtgttgatggcctggaacaggcagcgaggggtggcaccttgcagcccgtgatggggagcaagcatgtgatgcgatctaccagaagaaaaaaatgtgtccggagttaggccgcggattcggtgaactaaccagcagctatctccaagcgcaactggttggaaaagtacgcacgttggtgtgcttcattcggtgaactaatcagctatctccatacaggcaacagaaaaatgcattggtgtaatggtgtgcttgattcagtgtagactgtagagacgatgtgcatgcagacatccacctgtgaaccaagttccaagcaccgaaagatacccatctagtatgcgcatggcgcctacagctccgtcgtccgatgtctgccacactggcagcaggcaaac

SEQ ID NO: 55968 - DNA, 438 bp, Zea Mays
gcacgagcccttaagatccattccccaacctttggagaactaacattgtacttgcctagccaagggagtactcggtcgtgtgaatatttaatggtagaactgtccttggagaagattccagtggtctgtgaatatgccgatgttttcaaaaatgacttgcctgttatgccattagaccgagacatagagtttacatagaactgcaaccgggtaccacacctatctctaagagaccctatagaatgcaaccagtcgaactaacataattgaagaaacaattgcaagaattgctggataagggattcatccgcccaagcacttcaccttagagatgtccagccttgttcatgaagaagaaggatgaaagtctaaggttgtgcatagattactaccctctcaatgcggtaactattaagaacaagtatcctttgcctcgta

SEQ ID NO: 55969 - DNA, 589 bp, Zea Mays
aaaaaagtcttgattacatcttcttcgtccagttgaaagaaaacatctcgctcaatatatgtgagtagacagtcatccaaaaggctatcacccatcttatttctgaacttactttgatgaatgttatcgcagaaaatgccctctcaacacctgctgttgccacaggtagaagtaatactaatttgagaagcgtgtatactaagtcataaactttatgtctcttcgtttgaacaagattcttcactttcatcatgtccacgaaatgccaacccttgatgcaaaagaaacttcaaacatctaagtgaataagccaatctgatcttatagagataaagatcatcatcactccatttgtcaatacgattatcaattgcaacattgggattaacaaagccattgtatctctcttgagttgcagtgtgtgccttagaaccttcatgtttaagaagtgctttgtctcctatattccaatttctccaaccacttgtagtaaatgtatctgcaccactgcctttcttaaacaagtagcatacaagacaaaacacaacatcctttttacactatattcaagccaatgataattataaaa

SEQ ID NO: 55970 - DNA, 301 bp, Zea Mays
cttttcatgtgatgccaattagcatgagaatcatctagctttaacttatcattacgaggacgtagcttgtcatcaagcaaccaaacctcatggatattttgtctgtcatctcgtcccatgtgatttacactttatacatattctcgaaactacatctattcgttattttgacttgattagattataattaacttttatctctacctagtaagtagcttgttttatttgatacaatcttttaccaagctattaaattaatttaaagctatggatttaccttatagccacgataaaaaaaaat

SEQ ID NO: 55971 - DNA, 391 bp, Zea Mays
gcctgttgatcggaccacatatcgcattgggcagcccaggaagctgaggactcactgggtttgaatggcacattgcataggaatcatcgagatggatggatggatggatcagtggcatccatttccggatgagacaacgtgaaaacgtcgtcttacgtacctagccaagacaagagcgactgacgtgcgtacgtgcgtacgctacgctacgcattttggtcagcgattaattaaacaataaatactcctattgatagacatcggtcgttacattaagcaattaagttaagcatggttactccgtctttgtcgtccgttattagagcgtagtaggccgtaggcgatggatggtgtgcatgagactatatatatatagtgagagaactagcta

SEQ ID NO: 55972 - DNA, 754 bp, Zea Mays
gccgcttgtagagaactgggaaatgccgaaggagactgtcaccgagtctagcgaaggtgacctggttcgactgaaatacaccttcagatatggagataaattcgatgaaccaaacgatgactgctaaaatgcattgaagctaccagtgatgaactgcttggatcatactccaaggcggaagataatgcattatccacagccttcggaggtcggggaagaaagagattgaacatagtttttgacgctattggctttgtctaccccgactaccgttatccactgtgaggtcagggaaagaagaggaaaactgctgcttcggccactccagtcgatcttgcgccgaagggcaaaaagttgaaggtccttacccatctgccacactatattgaaccggtcgtggtgcctgagtttagcggggagaattcttcagctgctaaaccagaagagctcattcctcctacgcagaaagctgaaaagctagttacaatttcgaaggaagcttcggttgaacatgctgagtcgaatactgaggaagataaagctgaaaaaccaaatattgaagaaacaaaaacgctagaaattttaagcccttcatcggaagtaacagtgccgaaggcacaaaaaggttccaccgcaactcctaaaaggagaaggatggcaaatgtactagatgtgttggaaacagtaaaggctttaagctctactccttcagggaaaaacgacgaagcttcaaaagtgcaaaccaaagctgaaa

SEQ ID NO: 55973 - DNA, 757 bp, Zea Mays
ggagtatttgggtaaacgtgtatgtctagtgtaattgaattgatctgatgttgtgatgggcttatgttcaatggtgagtttagttttctattcatgttaattagcttaattcgtggatttaataggatattggtgagacataaagtaagtttagtgtttttatcaacttggtgatagattgtatcagtgatgttgtgccgatttttggttatgcgatggagtcgatgcgttgctcaactagtcattatcatcgatgtcttgtgacctgttaaatgccttaagtagatattagctgctgcccgaatatttaaaggagagtagcatcggtaaatcgatttcagtcgaaatccgagaaaccccatagtagaagaggtatgagtgctttaagtatctaaattattgggaatgtagtttcgcaaggctatattccttttgataatgtattatctgttagacataaaattagcgtgctgctttgcttagttggcgtgctattcaggttagattataatattgggttagaaagttaattaatggtttctatccttagactgagttaggtgtccctaaataacgagcctaagtctagtctgccttttggtgtgttccctagcttaggaagatacatgacttgtgcttcgtttattatcacttgttattcgaattggattcgattaagttaaagaaacgtggaggttgtacttaatggcatatcaatatctagaattgcttgagtgttgtaatgtgtatgctacta

SEQ ID NO: 55974 - DNA, 677 bp, Zea Mays
tagcacttatctctacatcactaggatccaaaggcacctcaaagtggacctgccgttcatcatcaggaatttctccaagcgaagcaaccatagcactaacttcttcggcagagggtcgcactctaaggcccaaaccgccatcagcagcaggaggattcgagacaaaatgagtaaaggccttggaaggaggcatgttccagaccgagtatgcgacaggggcgccaacatttgataccttgcctctaagtatcatttcaagccggttcaccaagtctatagcaggaattcttctgttggtgacccgggttgagtcagctagacctcggtacagataggccgggtatgccctgtccttcaatggctgaatgttcttgaagacaaaatcagtaatcacagcctctacagtcagacccctctccttcagcaattcaacttcagccagcaaagcccctgcctcagccacctcccggtctgtgggtgactcgatccaactcggagtacgaacatccggctgtctccctgaccatggggggagagaatttctgtggttctcaacaataaaccactccaagtgccatcctttgatactatccttgagtgggatttcaaggtagtcagtcttcctcccacggcacatctccaaactcgcaccccccaccagctgatgctgccccccg

SEQ ID NO: 55975 - DNA, 1217 bp, Zea Mays
gattttagctagtcaaatcctaggatggcatcatacacaccaatatccaaaaccctcatagatgacacaaaagtatgtccctagtccaccaagtcacttctctaacctttttatcactcctcaagacttccccattggctaccttgaccgtgactgcagcacatagttcagaatttaaactcaacttgtccaccatagtttgactcatgaaactagtggaacttccagagtctaccagcttaagcatcaactgatcctggatcaaggctctgaatctgatgcactctgaagtgtcagctccactcacagcatgtaaggacagtttatgcaacgcttcctcccgcccttcctcttgctataccctttccaacatttccttagaaagcaccatctccaaatcttcttcggtagtcacattcagctgttgaggcaccctcttagggcatttagcttgatgacctggctcaaatttctctccacaagtgtagcacaatccatttacccttctatactccttcacctgtctctccttactccagtgtccctgctccactactccattcacctcagtcttccctcatgttccccctttattcatctgacctaacttcactaatctaccacctccttttgcccaaacctcctgctgcaccacagcaagtctgattgttctatcaatggtagtaggtatttgagacatcactggcccttgaatctcatgcttcaaacctttcatgaattgagccacaaaaaaaacttcactcaggcttggattatgcactgaaactgcatatctgagttcctcaaactcctgaacatattcctccacacttcccttctgctgtaaatacagtattctgttcatgactcggggaaacacatctatcccaaacttgtcaatcacagtcttcgagaagtgcctccaatttcccaaatcccctttcagtctttgaatttgcatccatctagcagcatttccttccatgtgcatggaacctgaaagcaccgtcatgcactcagacacctggtacatacgaaaatagtcctcacacctgatcacccatagcgcgggatcctccccaccaaactttggaaatagaaacttgggcaggtgcgattgcaactcccttccaccagctcctgattcatagtttccattttctcctcctaatgactcccctctttctctgtgttgcctgtgagtttggccatcaagc

SEQ ID NO: 55976 - DNA, 423 bp, Zea Mays
ttatttaagaagcttgtgtcctggtcagtggacgtctcctgcgaaaacacgataattaaagcgatctataccaataatagatccgacaagaacaattgtgaccagacgaagcgcacgctaggtagatctaccgttgatgccacgtcccccatgggatggaaggagcggagctcgcgtcggagcggaagacgagtgagctaggagacgggctcccggtcccttttggcgacgaggaggttcagagttggctggactcgatgcaacttttatcacctagtgagcatccttatccggaggcgagcgccctaatccttcttgctagtggcggtgcaacgacggaagaagcgggcggaggttgttgcgaaatagacggggttttttgctagagcgacagttgcgagaacgctgttgtgcgaacaaata

SEQ ID NO: 55977 - DNA, 830 bp, Zea Mays
gtaccatccatctgagtaagccgatatgatcccggccgtgtgacctctgctacgatgaatgactcttcccatggtggtgacaacttgtgtcgcccctccctcgttagaactcagcggaggaccaagtctcccaactgcaaaggatcggtgccgcacagctttgtcgtggtagcgcctcaaggtctgctggtacctggccgactgaattaccgtgttcaatcgttcctcctccagtacatcaatgtcttccagcctggttgcctctgcctcagctatgctttcaaaggtcagcctaggcgccccgaagattagatcggcaggcagcactgcctctgacccgtacaccatgaagaacgtggtattcccatgcagagctcgactgggctgagttcacaagctccagaccacgtatggcagctctctgatccactttcctgcaagcttttcgctcttgtcgaatacctttttttagtgcatccagtatcattccgttagttctttccacctggccattagctcttcgatgtgccactgatgtgtacttgatctggatgctcctttgctcgcaaaaatcgaagaactccgagctggtgaagttggatcttaggtcagtgatgatgctattcggtattctgaacctgaacattatatcctagataaactccactgcttttgctgaggtcaaggaagcgattggcttgtactctatccattttgtgaatttgtcaatggcaaccaatacatgagtataacctccttgagctttcttgaatggtctgatcatgtccagcccccagcatgcaaatggccaagttataggaacggtttgc

SEQ ID NO: 55978 - DNA, 554 bp, Zea Mays
tcggctaggtctatagggcgatagtgtccttgtaggtaaagggcaatggggccctctagtcttcggtcatgatgagacttataattatatgcctatcggtgtcccttacgacaggggcttcgtttatctgaaagaaaacgtctgatggcatagggtctcctgttgcagcggccttcacaagtgcatttgcctgctcattttttcttttgtccacatgttggattgaaaaaaccttgaattgtttctccaaactttgcacaaccgatagatattggaggaggactagctctcaggctatacaatatttttctatctgtccgacaatgacattagaatcggtctagactatgcatgtcttaatgccgagtggcctgagcttgcggagttcgaggacgactgcttcgtactatgctatgttgttggtacatttttctgtctcgagagcaaaacttagtcaggtggcatatatgtacttggtgcctgatggggctatgattactgctgctgcatcggcccccgtatgacaccaggcgtcgtcatagtggattatccag

SEQ ID NO: 55979 - DNA, 754 bp, Zea Mays
actatagtttccttcttgtggtgatcgctttcctttagaaccggggatgtttggtgttttccctaacacttttcaggggcaactgccacaacactggtattcttcacagtttacttaccccagtgttgtgccatttactcaccccgtgtcttactatttatgcaggacggaggcttggagaacacgtggctcatggatttcggttgttcgcaccacatgactgaaagctccaaatggttctctagcctcgaccccatgattggaaaggaatacatcacatttggagataactcaagacgtaaggttgtttctcgtggcaccattcgggtgaaggagagctttattctcaaggatgttgctttggtttcgaatctacatttcaatctgcttttagtttcgcaactccttgaggatgactatgaagtgcgttttaaaaagggcttgtctcgggttttggatgcccatggggatcttatttgccagttttccccttttggtcgagttttcagtgctaatttttcacattcttctggcccttctcgatgtttgctggtaggatcgtcctcttctctttggaagtggcataggaggctaggtcacttgagctttgatcttttgtgtcgtttgagctcacttgacctcatccaaggattacccaaattaaaatttgagaaagatcttgtctgtcagccttgtcgtcatggcaaaatgactgtcgcttcccattcctcggtcaccaaggtgatgacctcgc

SEQ ID NO: 55980 - DNA, 376 bp, Zea Mays
ttgagatgccgcatgtaactacaaacattagctattgattactcggccccattcctaattgtggattggatgcgggcacattcggatcctgtcacatggagctggtgctcattgcgctttcggcaagaaaaaggtgagatatatatatgtgacaccacaaattgtcatgaatttctttttctcggtcatgcatcacacgcaaggggaagcgtgcatgtgtttaacatcggtttcatcacacacatgaataacggttactacgtttgcggttgcaaacaattttgaccgtggcaagaaaacgtaacagaccgagaaaaccgatcaacaggtcagttaggcttatgttgatttcgttcttcaactagtagactctcgc

SEQ ID NO: 55981 - DNA, 534 bp, Zea Mays
agagaaggctggccgccgtggggaaatcggagtttggtcgttgtgagggcctccaagctttgctggggttcttcgccatggcgcggggatgcttaccgtggccgcgcggtgaaggaaactcccccgattcagcctcgatttctcgtcggtgatcggatgtggtcgcggatccgcaaatcaccgtggaccgaatcctccattgtctccgaaccttggtatgcccctttatcaatctcaccatcccctaggcatcgtgtagcagtctttaattgggttttcgtgcaccgtatcaccgaaattgatgactccggcgatggtccaccgtgctttccgtgggcggtgccaccgtggcttgggcctggggttgaagacgcccgcgcaccgtcggatcggtgcgaacgactgagattaggttagagcataccccttcgtatgattcggtctagtccatcagatcgtgatcgtgcggatctcgtacgatctgaggcgtttaaaatccgaatcgttgatcttcgatctaatagctatcacgcc

SEQ ID NO: 55982 - DNA, 351 bp, Zea Mays
ggagaagatgctgtcctgcatcgcgtgcgtcaataaggaagaagacggcggccgggaccgcgaggagcatggcggcgacaccccgagctgcagagaccccgtgaagtcactcacctcccaggtgcgtagtacgtactacgtccagctccagagctcctcctccttggcacccaccatagctgatagctcgctctcatctctccggttgtgggttacggacttacggttacgacgtgcgctgcgctgatgcgtcctagctagctactatacgatccgtaccgtacgtcgctgcaggtagacagtaccgagtaggacattcattccatgcatggcagcaacagtgcccccgaa

SEQ ID NO: 55983 - DNA, 566 bp, Zea Mays
gcactgcttccgacccatacaccatgaagaatggggtgtttccctatagagcttggcttggctgggttcgcagactccaaattacgtatggtagttcactgatccacttccgtgcaagcttctcgcttttatcgaacaccttctttctgagtgcatccaatataattccgttggttctttccacctgcccattagctcttaggtgtgccattgttgcgtatttaatctgaatgttcctctgctcaaagaaatcgaagaactccgagctggtaaagttagatcccaggtcagtgctgatgctgttaggtattccaaacctaaacattatctcctggatgaactccactgctttgatgaggtcaaggaagctattggcttgtactctatccacttcgtgaatttgtcgatggccaccagtatgtgagtataccctccttgagctttcttaaaaggcccaatcatgtccagcccctagcatgtgaacgaccaggtcacatgaatggtctgcagctgctgcgcgggtaagtgttgtcgttttgacaagaattggcacgcctcgcacttct

SEQ ID NO: 55984 - DNA, 574 bp, Zea Mays
gccctgagtccttagacgggcttgagggccagtcaagtgtgtgtccccttgctaggcatgtgtcctcccttttacagcctaaggggagcacgtagaagggagatggaccacaacaagtgggcctaggaataaaataatatgtagcaaggagcaatagatagagctggtgaaccaaagtattcccttgcggtagacaaatatcttctcttgatcaccatgtggatttcctggccagactcaccttgtcttgttagcgtgtgggcgaaggttgtggtgtagactgcgatgtagattggtacatcgatgtgtgtagaggggtacatggacggtgtcatctcatcccctctgcctttccgccttgcagtcggaatagtagaaatcatgataagggtcacccatgtgcgacgcagcgagtcaatggtattgccttagtaatgtgtgggttattagcgtggcccatgctttgcggactgtgcatgctaccgaccacaagtgtggagatgcgtgtatcctgcccgcattcaatacgggtggtccccacaccagaagcacgcaacgggccatgcctggcggc

SEQ ID NO: 55985 - DNA, 495 bp, Zea Mays
agttaaccatgaaaattcaaagaaacatgttatatgagaaattatagttcccaaatattgtgtaccattgaaccccttgccatgcaactatagaaattcaaccaatcccacaaaattgtgctcaccaccaaaacaattttaatctggatttgccaaaccatacaagcataaaaattatccattttgcatcatacgccaaatgcaaatctacaaaaaaacattcatataaacatcttacaacaagtgttactcatacattacttacaccaagctaactctagtaaaagcaacactacacaggtaggggacataagcattaggaggaaaatcataattatctccactaattagaaaactagttatttcggtgcattgagtgcctgatcgtaaatggggttacgattgtcaaggttttgcctcctatccacacattgagttcctatttatgtcaaagttatagtaggagaatggcatgttcaattcggtgtaaaaaac

SEQ ID NO: 55986 - DNA, 503 bp, Zea Mays
ggaatacattatgtgaataattaatgctgacaacacacatgagtagaggcgtataggcggagccgttcagattccctccgccttagtaacgcatgagtaatcagcgggagtcatgataactgtagtccatgtagtattgataggaagtgaaccctttcctggtaacgcgggagtaatggtgagtcattgtccttgctatggtaacgtgtgagtaacagcacggcccacacaacgtggactgggcgcgccgcctatcactggaatggacagacgcatgtcttatccataataaatgcaaagacgcgcgtagcctagaggctttatgtgaggctccacccgttggcttatgtcgcacgtagtaggccacgtggcagcatcgggtcttcgcctgggcggggagcaggagtgtatgtgataaggtccggatcccaccagatcaggtctggacacgtgtcgtcaccggacctgtgcctgggtcctgattaaggcctgctctgtcctgg

SEQ ID NO: 55987 - DNA, 323 bp, Zea Mays
ggggtccggtgtccctctgcggaggtccggacccatcgatgcaccctgggaagtattatctttccttgccacgtggtgcccctcgacctgcccatgtggtggggtcgggtgccgctctccgtgtggcctggaggtgtcatacgggtgcagcgccttcatactgtagaagagggtacccctgattcagggtaccgacagtggcccccgggcccacctcagaggaggatgcgagtctgcaggtggggctagagtctgattggcggttggcctgctgctcctgcgcgcctgttgatgtaattactgccggcccgcctatggtcatg

SEQ ID NO: 55988 - DNA, 338 bp, Zea Mays
atcatttgcttgagcagttgacttagttccaactggtgccgtgtttctcgaagcggcgcctgttgcgtgactcattttcaggcggcttgaattgcttattgaattcttgcgactgttcggcgagcgtggtaggaagtggacggtcaccccggcctctataaatagcctgcttggcccgttgttctcttcactcatccttcgatcatctgctttcttcttcttcatcactccctccttctccaaccaaccatgggcagaggtaggagcggtagaggtttgcctcgccacgctggcggcaagcgtaagcgcgctccgagtcctcccttggaggatttcag

SEQ ID NO: 55989 - DNA, 1228 bp, Zea Mays
gttgtattatgtaatggcttgatgtaatgaataaaataactagttaagaaaaaaatggcatgtgcatgatagtgactctcttcccatggcagatggcttcggataaaaccacgcctaccgcctccgggattggagcaggatttcctcggagagctgaaggagaggctggcgcagaagggggtgagacccacctccccgcacctccggaactaccactagacctagcccaagttctagccaatcaaacccgactcattgaagtactcactagaagtctggaaaaccagcgcccaggtggtggaaggccacaggacaggatgggagaatttttgagactcaagcctcccacgttcgcggcgtccaacaatcccctcgatgcagatgactggcttcgcacgatcaagaggaagctggaagccatcggatgccccgaaaatcagcgtgtccaactggcagctcatcagctttcaggaatggctttagcatggtgggacactttcagtgaggccgttagagatgctacctgggcagaattcgaaacagccttccgtgagcaccatgtaccccaggggatagttcaactcaaggaggatgaattcctggagttaactcaaggcgggagaacagtcagtgagtatgtgcacaagttcacagagttggcccgttacgcgcctgacgatgtcagcaacgagtccaggaagatggcccgttttctgaaaggactaagacccgagcttaagaccatcctcgccagccaagacttcctcaacttctctcacctctccaacaaagctatccaagtggaaagggcaaaagaggaagaaaaagggcacctcaagaggaaattccaagttctccgagctcaacaacaagaacgtcaccagagagctcgaccttttgggctcccacccaggggaccaagctttaataaaccatctggacccactccatcgcgctatagtcagcagagtcagagctcccttcagacaccctccgttgcaagcaaccaaccgccagcaaatgtctgttggcactgcggagaccccagtcacttcaagaataactgccctcacttgaaggcacccggaccgacctactccaactcggtaaatggccccaagattccctcggcacctacctccaaggcacctccttccaacagccagcagagcaggactcagtaccagggcagagcccgtgtcaaccacgtcgacgctcaagaagccca

SEQ ID NO: 55990 - DNA, 339 bp, Zea Mays
catgagacatagccacttagcatactagtgacaacgcaaaggatttcaaacacatcctacacatgctaggtgtcaatctcaaatggtgaacatgttttggattcagaaagtaatagtcaacttcacaattatgaaaacaagcttagctcaacaaaaatgtatcaatatgattaaaaacaatctaagcaaaagatgctcaacatggctcaatgtactgatagggagaaagtactttatgcatcaggtcacctcactggccccactgtggattggtgggatgcatactccgtagcacacgctgctgctaacaccatttcttgggcagaattctccactaac

SEQ ID NO: 55991 - DNA, 368 bp, Zea Mays
aatgtgagcaaaagacatcaaaattgaaatgctaaaacttaatctagtcctttcaccttaaggatcatactctgaccacatgaagcttaaggaagaaagaaaatgccaaaaccctaacaaccctttctagagggcaatggagcactaaaaataaaactcaataaagactaagaaaactacattatcatgacttgggccaattataaaagttgtaatacactaaataagctacaaaaaatagtaagagtgtttgcccaaaagaatttttcaaaatccccaaacaagccattcaattggaggctttctatagaaatcagaatttcagaattctgaaattcagccccctcacccaaactcgagcgcgttca

SEQ ID NO: 55992 - DNA, 462 bp, Zea Mays
atttatccttttatatttctcatttcttgtatcttctattgctctcactattagggtattacaaatcctacccccttaaaaataatctcgtcctcgagatttaagaagatctagggaaaagatggggaaaatctatgcgaagctcttcctctctttcccaagtagcttcatcttcttcacgatagctccattgtactttgcacatcattatagccttatttcttgtaactcgagtcaatgtatcaagagtcttgataggatactccgtgtaagtcaaatcatcctgaaaactgagctcttccattggtaactgtttcgcaaggacacggatacacttcttaagttgcgacacatggaatacattttgcacatcagatagattatcaggtagctcgagttgataggccatctctccaactctcctaaaaactctgaatgatccaataaagcgaggggacaatt

SEQ ID NO: 55993 - DNA, 569 bp, Zea Mays
ctttagtcacggacagttcggcttctaaggccggatggtctgttctttcacaaaacagttcggactttaagaccgaacatctaccacagcgtaaagacagtattacggataatccggtccccaagaccggatagtccgccatcacgcaaagatcatatgattcctctgttggggacatgatagaggaattcagagatcttgacaaactaggacaggggtttacatcggccgatcctttggaggagatcgacatagaagatggtaaaactccaaggccgacttttgtaaacaagaccctggagaccgatcctagaaatgagatgatcgatctattgaaggaatattcagattgctttgcttggaattacactgagatgccgggattaagccgagagatcgtagagcatctgctgcccattaagtctggttttagatctttcaagtagagagctagaacatttcatcccgatcttctccaacgaatcaaggacgaaatccactgactgctagaagctaattttattagaccttgcagatacgcagagtgtgtctccaatattgtgccggtg

SEQ ID NO: 55994 - DNA, 426 bp, Zea Mays
aaaacttttgaattgcggctgatgttattgtagctagtggtttagcttcgatccatttggagaaatattcaactgctaccacaacatatctgagatttccttgagctggtggtaatggtcccaataagtctaactccatctctgcaatggccaggtaggctgaattaactgcgttagagatgaaggttgcttttggtccctggcacacctctagcaattatcacatttttgcaccagatctactacattcgaagcagcttttggccagtagaacccttgcctcaaaaccttgccaacagtggcctagacccaatatgagcaccacatatccctgagtgaatttctctcatcagctcttgaccttcggctctagataaacatttcggcaatggagagcagactccttgtttaaacaatttgccttct

SEQ ID NO: 55995 - DNA, 687 bp, Zea Mays
agaaacttctccatacccatctcctaatggaggaattccccacagggaaccggggatcagggcccattgccatctctacgcaggaccctcctcaaccgccatccaactgacacgacacagtagcaccaaatatatggacccctctctggctccaatcagtcacggaactcgctatgacatgtggagccataataagatcttgtttggttggaagcttaacttgtcatagtttgcctattttcctgacttttaaatttgggtgactaggtaagttatggtgctaacttagttgagaaccaaacagtcccagtcctcgggcccatgcgccggaagccatcgccaaatagtcacccggaggtcgcactcgcaccctttatagtagcaacaacacgtggttacctgagagcaaggtgaatacgatggctaacgtcagattttatgatgttaccatgttatatacagccaactaaaattttagtcgtataataagtatcatacactacaatatatttaatacttgattcactctttctctcaccaactgttttggagtttgtgagtacactttcagctgactactgctgacccactttcattctctctctatttctctttcttcctaatcaccataaatctgatgtgacatttcttgcagctcacctacatcactttattatgcttgctctg

SEQ ID NO: 55996 - DNA, 856 bp, Zea Mays
gccaacacctgggtcctactggtcagcttcaactcgaatctccaatcatcgttcatgtacagatgggagcacaccgtcgctaagctccccacgttcacgagcggttcggccacctcgcgcccatgcccctatctataaatgcacgcaccccaacgacatcgctaagcctcgcccttgatcatcgacgtcgctaacccacctctctgctcatgtgccatcgtcgtagcagttgttgatgtgttcccatgcctgttgcttgtcaccaccatcgagttatgtcgataagcatcgccttcaaatctcgtacccaaaatacaccacagttcgctctctcacgcgtccctttgccccttttaccgccatccttgcagttggatcgtcgctctagttcacatccggttccaacaacaccagattgcctctagcgccaaaggaaataccagtgagtttctcgtccaagcccaagccacgggctctcgttaggttgccatttacaccttattagctcggcagtttttgtggttctatatagaccgagtccgcctccatcgaaccccaaatcataagaccttcatcagccgttgcagccatgttccgagcttcacaccaaggagaggaacacatcagactgctcttgcatttgattacccattttcttgtgtgtaattgttcgccagagtagtcggactaccatcgtagacctagccgcgccaccaagtccctgactccagcaggcccaaacctcgatcggaccccatcggatcttgtcggatcctgctagacttcgtcgaacccatttagatttccagtcgacccaaccccctctctgtcagacctgatccctggtacgcccgac

SEQ ID NO: 55997 - DNA, 419 bp, Zea Mays
ggcaaagattacgggagcacctcccagtcccagctgcagtgctgaaagcagggcgccacaggacggatcactgggctgagggtgagttgtggcttgcctttccagtttccagctataaacttgtttggatgtccactttctttatcggtgtattggggtggattgatgtagaatctaaactatattttgtatcaactcatttaacacacgtgagttgaggcgaatatatggacatccaaacaagatctattattagggcttgttggcatgtggattgggtgaaatttgagtcggtttaaatccataatccatagtaagtaaaaaaaatcacctgaatacatcacaattccctccaatccacatggaatagaattttcacacgtggataatgagagagattcatcaattgtaccgtgata

SEQ ID NO: 55998 - DNA, 404 bp, Zea Mays
ggagtccatctgttttgagtttgtataggtaggggtcatcacaaagatataatcgactgtcatgagccaatttcctcttgtccactccatgaggaacatatcatgccaccatgcaattcaccatattcgagtaccatgatgagcatgatgcaaccttcgggagtgtatcatctctcatgtagttatctatcgacaagggtgatgactacttgagttgcattcttgagagatgatctacaactaaattttctactcctttcttgtatctaatctctatatcaaactattgtaactagatcagtcatggttttgcatctttcttggtgaggagatacttgagagttgtatggtctatgtagatgaagactttcactcccaccaagtatgatataaacttgtctatg

SEQ ID NO: 55999 - DNA, 438 bp, Zea Mays
tctcggtggcttctgttgaagcgcggcgaccccggggcggtgaagaccacccaggcgagcaagccccagtgccccaccagtccgagcgtatgacaacagggagaggggagggatcatggaggttgcgacgacctagattcatcccgtgatccgcggcgcaggccctcccggtaaccacgcgacgcgatttctgttgcgcaccaaaaccaggaggaagaagcaggtgtgtatgactgacagtgccgacccacaagtcagtgagggtgagccagggcacgctcgcagatagggaggctgaccccctgaccccaccggtcagcgcggaggcagcgactgggctggcgcgaacggaagggagttggtggagatgggccgagtgaggcgaatttggcccaattgcacgtaatcaccccttttttcttttctcttattttctga

SEQ ID NO: 56000 - DNA, 289 bp, Zea Mays
taaaaaggttcttactttgaagttagaataaaacaggctacttatgatatgctgatgcctatagcagctgatgtccttttcgagcttcaggaatccaacactcttagatagggcacttataattttagcaccagcacggtcgcggatgcatcccacaacttcttcatcgaccctgccaaagagtattgaccccggctagtagccacaggagatcgcaaattctttcaactctgatatgtcctccttagagagttgttggttgcccaagtgtcgtaggtcgaaattcgct

SEQ ID NO: 56001 - DNA, 824 bp, Zea Mays
gttagaagtaccgcgtacaacagcttttggactctaggataccttatctttgagggtccttggactttgttgatgaagtaaactggatgttgtaccgggtatgcatgtccctcctctgcctgcttgactactaacgcagtgcttaccacgtgagtcgtgcaagagatatataggagcaaatcttctgccggctgaccgagcgtagctcgacatggtggcttgagtactggcggagtggtcaagaacttcttcagtgcctctagagcctcctgtgcttctgtggtccactaaaacttgtccaccttcttgagtaatttatagaatggcattcctttctcgcctagccttgatatgaacctgctcagcgctgccatgcatccagtgagcctttgcacctttttatgcgactgcgacgcttccattctcatgatggcctcgatcttcttcggatttgcttaaattcctcgttgactgacaatgaatccaagtagctttccggctggtacttcgaagacacactttttcgggttcagcttccaccggtagcgccttaggctattgaagaccagttgcaaatcctcgttgaagttttctgtcttgataaccacatcatcgacgtaagcctccacccgcttgccctagtgatcggctaagcacgtttggatggctctttggtaagtcgctccaacgttcttgaggccgaatggcatggaggtatagcagaaagatccaaatggggtgatgaaagcagtcttctcctcatcttattttgctaggttgatctgatgatatccggagtagcattctaggaaggagagcataga

SEQ ID NO: 56002 - DNA, 355 bp, Zea Mays
gtttaaaatagctgatgggatgagagataggatgtgtaagctgttggagatagtgttaacagaaatatgttgttaagcactgtcattctgacgtcacatgatgcattccttgtagatatggtgttgattctttctcacttagcacaatattggctgtagcacgcagctaggaagatgctccaaatggcgaccatgccacgtaaggaatgcccatccatctatttcaatccaaaagcacgtcactcatgcgtgcttcattgcatctgtaaataaataaatgaatggtaggactgctccaaaatcatcccggctggttccgtgttggaactctctggctagccgctgattcctcgac

SEQ ID NO: 56003 - DNA, 548 bp, Zea Mays
gtggataatagggcactgatgaagacctcaacagaaaagcattccacatttagagttgaggaataatacctaagcggtgtgggcaagatggaccatctgtcgcctacatcatgtccatctatcaacaccaaacacaatgttatcccagtaagggtatacgaataagtgcatgtaatacttggactctaactgcccctatttacactattgtacaacatatccttaggatgcagttggtaatcatgggtacacctatacttttagaggctacctcttggttgccctataaatactccggcccgaacaggatgaggggatgattgacaagacatttgagaacctctgcttcacatttgtatcgttactatgcctcaattgttcctctttgtttgggtcccatcagccagaacccaacaatcgacacgaattcgcataattttcactttcactttcatcggtgaacaccttttcatccatacgactcaaccaaaaacaatactttttgttgacaatcactcagtggcggacatagtacgagaattcatagg

SEQ ID NO: 56004 - DNA, 763 bp, Zea Mays
gcaagataataaagttatctaccacttttctatagcacatatctacagaaaacaccatttagttcatcaaacatacagtacggggaaatcgctgcgtgcagtccaaaacagcaactaataaatttcagctcatacaaatcaagaattgccgcgctctaaagacttgaattattctaacactttatcatttgttagagttaacataaccaagggaaaactaacaagtagacttactaaatttttattcgtgtcattttgagcactagaagtaccatacttaattaacaacgcattctctacgataatcaatatcgaaacgcttttcactcaataatttgtatttcacttagacatcacacgatcactaatacttttcatccgcgaccgtaaccatacgcatttagaatacaacaagcaaatcatcatgactacgatcttaaccaaatcatcgaacaatttggctaactagagcaacgacacggtctgctcgacagcatacacgtcggcttgtctattactatcgcaatccgagacacaacatatatatataacaatcacttaacgcaattgactcctacgtaacaggagttggctaacacagtataaaacttagcaaaccattttagacatcgcgactcaaaatatgggtgggagcggattaattagcttctcttaaccatttctcaacttaaattggataacacacaagtcacctaaaatagcacattgttggggtctaacatagaggtactaacacatggcg

SEQ ID NO: 56005 - DNA, 750 bp, Zea Mays
gacaactttattcattctcaccaagtcgagatggtgtattatatatcatatacatgcacaagcttaaaatcttagtgggtagttaaaaaaagtcaatccttgtgaaagcctatacacacatggtgatgatggttatcgtgaatgccacttggagtttgaaaataattacgatgttttccaagatgatgatttgtccaacatatttagtataaatattaatataacattagaatggttagtataaatactaatacgacattagggggacttcgcaggccaaggcactgatccttcgatccgcaggcgaggcggtaattaacgccgagagtacttagatttagttgatcccgttttgggtagagagctccgtattaacgctagcgaacatggtgaggtagaccatgggcctcgtcatgctatgttgatggggctttgactgacgatcgtgccttagaccatgggcctcatcatgttgtgttgacggggctttgagctacgtattaacgccagcgaactcaatgaggtagaccatgggccttgtcatgctatgttgatgggagctttgagtggctttgagatgtcccaaatgctaggatgaagagaaaataaatgactatgcattttgtgactccaccaaaaataatcctccccatcaaagcgaggaggcatgccaagaggaatagaaagtaaatgagcattggcattataaggaacacgagagtaattaaaagacattttggaataatcatg

SEQ ID NO: 56006 - DNA, 565 bp, Zea Mays
gttccttggcggagttatatgcactggctatttgaccccaaaaggccgatcccttcttgctattgccctcaacagggtagtagccacatgtggactataaatatatggactcaaaattatcatagatctaaaaattatgttaaattgttaaaatgtatattgacttactagtttttgtcttatgtcttagtccagtcctttcatcgttggaattaagtagcactcgagtatgtgggctagttcgaaactgtattgttgtggttgtttgggggcattgtagtgcctacaggaggacaaaatggaggacgtacaccatatgagggatgagcattaaacagggggagggaatgaaggaagagcaccatatggaggagcaaatgaagaagcaccatactatccataaggagaaaaactatatggatacttttatgggtatggaggtgggtatagataagcgaaaggttaagaaggaggggcatcagtggtaggatttttagtaataggacaagtgtaacaccctaggacacacaaacacccaaagatgctactggacttcactaccaac

SEQ ID NO: 56007 - DNA, 335 bp, Zea Mays
ctggcgcaaaatcgttgagattttcaccactcgctgacttgcccaacactacagtagcatgtgctcttctcctttgctttggaatcaaggaaagtggtggggctcaggatctcatcgacatggctacttgtcttgggggtgatggcatgtcagggtgtgtgggggatcttatccaccacatatattcacatcatgcataaatataggatgtatgcttgcatatgaaatgcacagcgtgtttttaaggatactatggtcctggtatttatggtggaaagctgcagacacttgtgctgtacgtacttactaattattatttacaaattaactgtccc

SEQ ID NO: 56008 - DNA, 584 bp, Zea Mays
gtcaaaaatcagcacttaaaactcgaccaaaagggaaaatctgacaaacaagatccccctgggcatccaaaacctgagacaagccctttttaaaagcgcacttcatagtcatcctcaaggagttgcgaaacaaaaagcagattgaaatgaaaatttgaaaccaaagcaacatccttgagaataaaactctcgttcactcgaatggagccatgagagattacattacctctcgagttatccccgaatgtgatgtattctttaccaatcacgggatcgagactggagaaccattttttgcttctagtcatgtggcgcgaacaacctcaatccatgagccatatgttctctaggcctctgtcctgcaccaatagaaagacacggggtgagcaaatggcacatcactggggtcaggatacttagaataatatcagtgttgcggcatctgcccataaaaagtgttaggaaaaataccacccatcctcggtccagaagggaagcgatcaccacaagaaggaaactatgatccgctagggaagtaagaaccaaagcaataccacggggtccttggccatatggcacactac

SEQ ID NO: 56009 - DNA, 914 bp, Zea Mays
atttaagtgtgatcgagtgtgcaaataacctgggacactatggcaaagtttgatctggcactgaacgatttttggagcaaatcactctcaaattgctctgtcaggcgccctgaagggagttcgcgatggtatagtaactgaacaagattgtagatacagcgtatctcgccgccggtgattcacggtggcactgcgattcgcgcccagtaatgcatggataacgacccctggtgaaaagatctcgccgtggatgaactcggagcattgtggccgctctgtcgcccatccacatgccggcgatgtggctgagcggccgtcgccgggatgtacaccattcactgcgattgtgccacgccgtgaccatttcaccacgtcattaccagccgtaatagctcaccagtgaccgccatagctccttagcctgtgactgccacgatagttcacgtcagggaccttctcctttcttcggccgccagcgcaccttctccaaattggacgccaccgccattgagctatataaattgaagccctagtgagctccgccaggttgtcacgaggctagagcaccagcccttacctccgattagccaccatagcgccccaattcctttcttcccccaaatctgtttaacgcgccatcgtgaacgcctcgccgtggccaaccttctacaggtcagttcaagcttctttgcttgatgttctagcctcccttaagtcccctgctactcgtagaccgtttaattgaactagactaccctagatcaccaagaacacctcggattgttctcggttttcgccatcaccgtgaatagaaggtttccagcctagaatcgtgcaattgatagagggattagggtcgctagggtggaattaggtgtcgaacaaaggagaggcctagtcgttgcgttttccgg

SEQ ID NO: 56010 - DNA, 344 bp, Zea Mays
gaactgttttttgaacttaaactgataaggcagccgaacgagttcgccctctttcttctcttcttcaagcttcggcataccccacttcttcagcgttgggaacactctattggctaggtattcctggactaagtccctagacccaatgtgttcagacacaattctaaactcatacacagcatcttggcatggatcctccggtgtcatgttgcattgaggtctagtcagcccgaaggttagcttcagcgggctttgaactagcttatccttttcttcatcaattttaacataaaaccattcagatttccaaccggttggtcatttagtgcgatagctgaccaccg

SEQ ID NO: 56011 - DNA, 629 bp, Zea Mays
taagcctgcctctagccgccttggcatttgtgcattctggcaagccccacctacaccctctgccctgagacagccttgtcgtgcacgccgaactgctatattaaagtgtcaggttgcagaccttgaagtgatacctcagtacagaaagcaactccggcaagacctcgtgcacccgcctgagcacacgccaatcacttgtcacaatcacaactaaatgaatgccccaccatgagccaagttacgctgccaacctcgggatgttgcgactgcactgtggtaacgtcgccactcacagtacgccggtcaagactccctccattataaaccgtcgttcctccgcctataaatattgatgcccttgccacggaacctcagagtccagccaccatctcattgtcacccccacatccgaacaacgcgtgtcttactcttcaaaccagagaacaagccatcaccgtcgatttgagccgtaggtgagcatgccatgatcttcgacctcttcctccatcgaagtcattcttaaactatagaagttatgaccttagcatcgattaagacagctttccccatggccatcacttgcccattgaaaatatgcaaggaaaacttcgcttaaacaattgtcatat

SEQ ID NO: 56012 - DNA, 415 bp, Zea Mays
gcgaagccaaaatagcggagaattattcaagtaacagatgtgatccaccagacgccgccaccggaaacggtgtcaaaaattgtttttactgaaactgccgaagccgaagccactgaaatgaaaactgctgaagctgaatccggcgaagccgaagctaccggggctgaagtcggggccaccgaagagtcgaacctggaaaccactcttgaagttattgacaacatactgctgaaaatggctgaagaggaggctaccgtggctacagtgaatacggcaactgagaaggggaaagaacaaactgatgaaatttcagaagaagaagattttaactttcaagatttgctcagacaagaattatcggacgccgaaaaggaggaattgaaaaaatatgccatatcttgcggatacaaatcag

SEQ ID NO: 56013 - DNA, 691 bp, Zea Mays
cctgaggggccctttttacgggaagcaaaaatttgcctcacccgaggcatctcggatgaaggtcagcctcgagcctggcctcgcccaaagttctcgagaaccacaagacgtgtgcattaaatgcaaccgatatgaatatctgttccaccaatgacaccatagtcaacagaaggtgatgggacatcgtggtcccatctactttcaccatttacgatgatacacgcccgcgaatactaggcactgctcctccgcttcggtcactattctcaacaactccggatggggcatgagaagtctaggcatagcctcgggagagaactccgcctcgcccgaagttggcctcgggagagaactccgcctcgcccgagctcagtttcggctaactgccctagcagtagcgcattaaatgccaccaactctcagtgaatcccacaggataccatttcgactactgttctgaccactcccagcacggctgcatgtctagccgtaggtcgactagggcctcgggagaaatcttcgtctcgtccgagcatggcctcggctaaacaacatcaacagaaggacacctgatgccacctacccttccgcaaacaacgagatggctacagaaaccacaggactggtgtcaagtctgctttacgccataagggtcagattaccatgcactttttaccatacttatcgcttt

SEQ ID NO: 56014 - DNA, 679 bp, Zea Mays
gaggtaaaaccccaacatccactaggtgaaggagatcagactctaagattacagacatatggttacccgcgaacggcaactgaatgttggggtcgattggcgggatgattgccgtggcggagctctgcttcttccgtttcggcgccatcgcaatctcgccggaggaacgaacgggaacaaaatctcagggaaacaaaagagtggttcaaggcagaaatatgaagttggggctcagaaaccaaaagcgcacgtcgacatgagtataaatggggttttcccgggttgggctccatttctaaaaagtgccaagtcatcactcgggaaagcaagacttcagacataactcggctgttacctctaaaacgtcgacaatgtcaagcataactcggtcattacatctaaaacaccgacagtgtcaagcataactcagtcattacctctaaaacgtcgacagtgtcaagcataactcggccgttacctctaaaacgccgacagtgtcaagcaccactcggttgttacctctaaaaacaccgatagtatcaagcaccactcggctgttacctctaaaaacaccgacattatcaagcaccactcggtcgttacctctaaagcgccgacagtgtcaagcataactcggtcgttacctctaaaacgccgacagtgtcaagcacgactcagc

SEQ ID NO: 56015 - DNA, 400 bp, Zea Mays
tctaagtcttggcatagcgacagggctccagtctccgggtcttcgtcgatgcctctttcctttcgttggtctgttcgtttgtcttctgtgtgtgcgtgtgtctgtcccctcggctggtggtcgacttcctccttttataggccaatgagggggtcggccatcggtggcttcctcgagaagtagtcactgggcgatggtaaaaccgagcgttctaccccggtgaagttgtgtgcatgcgtgagcatctgggtcacctggtcatcttgtattctttatggaagacggtgcgggaaacatggggcccaagtgccattacttgagctacgccgacccctagccttcgtagcctgggtcttagcgcggcttgtattgttgtgccctacaggcggcctgcgcactc

SEQ ID NO: 56016 - DNA, 340 bp, Zea Mays
gacaaatgcgcaagtgcaaccatgcactcattaaagaccaaatctgaggacaagattacgaaacagtgcacctaccaccatgggcacaggcgcacagcctacggtatgccaatttcactgtgatcctccagtaacctccgtttctgctggagtcaactttgccttttgcagctactgtacctctccttggaccgacgacactacacgcaatccacctctaagcattctgatcatctcacaacacaggcttgaagcacagaaacgaggggacacgcgctttcagcctgctggggcacaggcttagcgtagctaatccaacccctccagtctgctggggcag

SEQ ID NO: 56017 - DNA, 360 bp, Zea Mays
cggacatgttggcatgaatcaacttaatagattgattaaagaggaacttgtttgtggcctcaaagatgtgaaatttgaagttgtgtagttcttgccatgccggtaagcaattagctaatacttaccccaacaagagtcaaatttctacacataaagtgttggaattattgcatatggatctttttggaccaacaccttatgtgagtattggtggtaatacctattgccttatggtagttgatgattattctagattcacatgggtactatttcttcatgaaaaatcaaatgtatttgggacaatcaaatcttttactatcttggcacaaaatcaatttgaaaatgatattaggaaagtaa

SEQ ID NO: 56018 - DNA, 756 bp, Zea Mays
aagaggaggaggaaatccccttaattcggaagaacagccggcgctacatagccagcagggagagtagtggtgttccttctccagctttgtctgctcttgttggtctgcaagaattgtctttggcaaattttgatcagactctcgaggatatggtccctgaaggtctgttgttggagccggcagatggtgggatgatggaagtttgtgctgatgtgcctgatgccgggttagagttatcccgagcagcgtctcgtgtctcgtcgaccttggagcgtggtcttaagaatcgagaggctgatctgaattgctccattcccatggaagtggttgaaagtccctcagccttagaggtggctgctacagagagcttggtccccaaggatggcgctagcgtttacccagcccccgagggtgttgctagtgatgatccggctcgggtgggcagcgcgagctatgacccagcccccgagggtgtccgagcgggttctccttctcatacttccatggatgttcacgtcgggtcttctccacattctggttgcatggcagtagcatgggcttcgggtcaggaggtcgccttagaggccggcgcgcctgatgacagagttttgatttctactggtgacgctgaattggtccccactgatgctctgcatattgcttcggttggtgatccttcatcaagtcaccaactgaattcccatgatttgggggttccttcgttcttctccaatctccaggtaatttggttttttc

SEQ ID NO: 56019 - DNA, 398 bp, Zea Mays
ggttgtttctttacctttattcattggcctatgctaagtacactttgttgtgtgaccttgatttgttgtattgagatctatgtttacataattattttgcatcacttcacatatagtggcttatacttgcattaaattatacacttgcaagtttttatcaatttttcagcctctgttgcgcgcttgtcttgcacctgtactgctcggatagattggtgctcttctgccttcagcaagtaaccttatgttgatattgttttgcatgtgtgttaactgccaacgcccatttccgatgtcctccatgttgagttctggtcactaatgcattgcctcattttttgtgcatagctggcaagttctcatatcgcttatgttgtatccatcttggtacctttttc

SEQ ID NO: 56020 - DNA, 559 bp, Zea Mays
ggtgatggacctcttcgatgaagccagcgtccagcagcttccggacctctttacagatgaagtcctgccgctcaacggactatctccgaggcttctgactcaccggtttggcatcagggtggatctttagatggtgcccgatcacctccctagggatcctaggcatctatgacggttcctatgcgaatacatcgacattttcctagaggaaggcgatgagcgcgagttcctatttctcctccagatcacccgcgatgcgagtggtctggggggaatccgcgctgagccggatcgtcttgacggggacgtcgtctgccctagatggttgcaccttaggaaccttagtaggcatcttggtacaggaagtcgaggggtccctcccctcgtcgtccgggcgagcggcttctgccgccagagcgtgcaacttctcgacagccgcaagcgcagcagggcggtctccccacacggtgaggaccccagcaggggacggcatcttgaggaccaaatacccataatgggcaatggccatgaaccagtacaaggccggcctaccaatgat

SEQ ID NO: 56021 - DNA, 1142 bp, Zea Mays
attgggaagacatcggccgaagcagttgaaattattccatgtgccaagaacaagtggggtaactggtggtatttctggttttatggtgccagaggatgtcgaaggggtgcctggttttcccccatccatcttgtgctcacactgttatgtggcgtttccacaatttagagtgaagaaagaagataaaaacgaataggcccttcggtgcgtagcccggttgagcagcggtcgggattttgttgaagaatttgttgcctacggcgtgtggccgctggcacacaggtggggtctgggtgaagtcacgcttcacctgatgccatttttggatgatcagatggtgcagagccctgccttcgccatcgatctgcgagggcaggatgcagccgccttcgttagggaggtggagtcgaaggctgttaaaattgttggtaaatatgtgccaaagacagagatgataaggagctaggatatacgaggttccaacgttaggttgaaccgagtttttgaactgaatagcctgcggtacggccattacccggagggggactttgctgatgctggggacgaccgagggaaacaggtgaagactcggtctaaagagggcacctcgaagggaaagaatgtgattgcagcgactcgtaaaaggaaaatagaggcgaaaggtatggagagggaaacggcggggccgaaggcctctaggttatttgttgaggaattgacgaggacatgtgctgggcctggggaggttatgacttcacccgaactctgagaaacatcttcgcgaatgttgaaggtgaccgggggtcggtggcataagaaggaccctattccctgggccaccggcgatgactattttatgtcttgtatggctcgtgaattaaaaatatttccttacggaagaaacattggtgatgttgtgtcagcagtgatggataaggatcgtcaagaggcccttacggaagaaggtgatgcgtgtttatgctaacctgtgattctggtgtagggactaagaatggtcagttggtggtggcaccggcgaggccgtccgctgacatgggggcttcggcgaggggtgcggctgggacctcgctggatccgtgggcgcatttttgggctgctgctgatggtggcggcgaaattgc

SEQ ID NO: 56022 - DNA, 494 bp, Zea Mays
tttttccttatgaaatttctatataaattctgtaagattcctaagctgatactaccaattctttttgttctgttatgctaacagtttttattaggtatgagatatctacctagatatacacagtaatatgtttaaatatatacagtactatgtttagatgtacaatatgtaagtaaaaacaatgtatctggagaaatcaaaatgcgtttaactgacggagtatgtacttgcggcttagctgaccagaattgaagctttacggcgacacaaactgcttccaaagaacgtttagaaagtcgattagaatcactggcaacaacgattagaaattagataagaatcgctgccaattgaaacacaaaagcatcgacacaacattccaatcaggttgtcagtcaggcggacgtacctggtgaaacgcccggacgtgcacctactgaaacacccatatatatgtaatgaaagtactagttagattttgaattatgatgatt

SEQ ID NO: 56023 - DNA, 451 bp, Zea Mays
cagagacggatacttcttgggagcagctggaagacttcaagcttagatatacggccatgacgctcgaggacgagctcttcgtcggcgagggggaaatgttgtagacacctttgtgggccggcagtataccaggcgccacaaaggataagtcctagctaggctgtttgtttagaagataagaagagataaagagggagtcagttagccctcctattttagtggagagattagctctgtttgtttagaagataagaagagataaagagggagtcggttagccctcctattttattggagagattagctcccagttgttagaggtagttgagattaaagtggcacctaagtctataaaaggatctactgtagtttgtattagagctcatcaaagaaagttttacctagccggtggagcttccttggtcatcctggcgcaccttgcgccagctga

SEQ ID NO: 56024 - DNA, 405 bp, Zea Mays
catttctttaatttttggcccttcagccttatcagcctttgtttcaactagcttaactgtcagcacctccggcattacaaccggctcttcagtgctctgcgcagatggagtagttactcttgtttcagtagctgaagaggtcccctcgccaaactcaggtaccacggccggttcaatgtaacgcggccagtgggtaagaaccttcatctttttgcccttcggcataggctcaattggggtggccaaagtagcagttttcctcttttcccctatccccgtagcgggtagcggtaatcggggtagacgaagccaatggcgtcaaaaacgctgtttagtctcttttttccccaacctccgaaggctacagacagcgcattatcttctaccttggaatatgctccaagc

SEQ ID NO: 56025 - DNA, 651 bp, Zea Mays
ctgggatggctgggggtcagcaccaactcgtgggtggtgcgagtctggagatgcggcgcggaatgaaatggaatatcttgatattctgcttaaggacaacattaaggggtgacgtcttcagtggtttattatggaaaaccatggcaagtccctcccccttggtcgggaagatagccagatgtgcacactccaagttggattgagtctcctactgccttggaagtaatagaggctagggttctgcttgctgaagtctgtctgctgaaggaaagaggtctgaccgccgaagttgtggtcgctaattttgtttttaagaacatccagcccctgaaggacagagcatacccggcttacttgtacagtggtgttaccgactcaactcaggttactaataggagaattcctgctgaggatttggtgagccggctagacatgatcttgagaggcaatgtatcaaatgttggtgctcctattgcctactctacttggaatctgccacctcctaagtcctttttcaatttcgtgtccaattctcctgctggtgatagtggtctgggtcttagagtgtgaccctctctcgaagatattgaggtcttggttgcttctctttgtgatcttcccaatgatgagaggcaagttcattttgagatg

SEQ ID NO: 56026 - DNA, 1670 bp, Zea Mays
aaggagagctcgctcgaacaccctcgggggctgggttgcagctcgcactacacatcagagccggatcactaccgacaacaccctcgggggctgggttacagttcgcgctacccaccagagccgggtcattaccgacgacaccctagggggatgggtaaccgccagcatcatccttgggggctggattttctgcaacagccacctctgaggatgaaggatcctcagccacctccatgggagtcgggcaatcctgaccaacttctcgacactgaagactaccttccaaagtcgacgatgcgcgagatatcgcccgggatacctctaatcccacgtctggagcatcagagcaaacatcatcatatcaccaacagtcggttccaacagcatatctttaggaatgacatcctcaagggcctgatcaaaatctgttatggataaatcttgaaggctaacaagagcagacagagctggagaaggaatatcactatcccccctactacctctgtaacgccggctattcttacgaattagcggaactttttcttcgtcttcttcatcctcgtcaaaaatgcggacaatagatggtgcaggatcacacccattgggatcagcttcaataggatcacacccattgggatcagatggcgcatggatacactcgttgaggtcagttggtgcaaggttacacccattgggttcagtctcaacaggatcgatcagctggcgcacggtcacacccattggggtcagattcaacagatacaccaccagtggggtcaacttcagtaaagacctctactggtacttcttcacaaacaggagcagaaggtccagcatcctgatccaagcatgacaatcgccgaagtcgtctctttttcttcttcttctcctcggcaggcgtagttgggcggctgacctggcgaagacgctttgggtgagtaccctcaggctttggggtgtccattgttttgataagctctggtataaccgtgacaaccactgtttcagcaaaggccaagtcagaagattctctagccagcataccgagtacaacatttatttctacatcatctggactcactggcatctcaaaatgaacttgcctctcatcattgggaagatcacaaagagaagcaaccaagacctcaatatcttcaggagagggttgcactctaagacccagaccactatcaccagcaggaggattggacacgaaactgaaaaaggacttaggaggtggcagattccaagcagagtaggcaacaggagcaccaacatttgatactttgtctctcaagatcatgtctagccggctcaccaaatcctcagcaggaattctcctattagtaacccgagtcgagttggtaacaccactgtacaagtaagctgggtatgctttgtccttcaagggctggatattcttaaaaacaaaatcagcgaccatagccttgacagtcagacctctctccttcagcagacagatttcagcaagcagaaccctagcttctgttacttccaaggcagtaggagattcaatccaactcggagtgcgcacacctggctgtctccccgaccgagggggagggacttgccgtggttttcgacaataaaccactcaaggcaccaccctttaatgctgtccttaagcaaaatatcaaggtattccgttt

SEQ ID NO: 56027 - DNA, 351 bp, Zea Mays
agaggagttcaatcttcatgaagatatgactctacgcaaattatatgaaataaggaatgaatggataccagcattttttaaaaatgacttctgtggggtaatgtatctacacaacgaagtgagagcatgaacagattagtgaagcaatcacatgtagatgcgaacacccctctgcatgagttcgctaaacaaatgatgaaaatgttgcatagcaggaaaatgaaagaatcaaaggaggcattgatgagcaaggtatgtcgtgcttgttattaataatgtatggcatacatgtttatgtaaatactttgtttaattatgataataacgtcttatagggaccaaggacaatat

SEQ ID NO: 56028 - DNA, 330 bp, Zea Mays
gggacgccaccacgtagagtaggcaagtattctacttgaccgaaccatgggataaaaattgatgtgtcacttgtctttattcttgtgtgattctctctatctccattcacttcacttgcataattgctctaagtctaatactcatcttgtggagagcaattaagtgaagaagtttactacgcttgtacttctctcttgaacttggacttagctttcactaatctaatattagtccaagtttgtgttgttaagctgtttttatagtatcacctattcacccctctctaggtgccctcaccaaggaaaatacaataacttgtaacaggcgat

SEQ ID NO: 56029 - DNA, 918 bp, Zea Mays
gttgtcgccaccactgttgcttcccttgctactgctgctgtcaacgccgcctttgccgccgtcgccaccgccatccttgcccttgctaccgctgtcgacattgtcatacatggctccttcatcaccaccggcgtagccatcatcgtcgacatcgccctcctcctcctccctgactcatccaagtcatcgaggtcggacagctcgatgccccagagataagccctctccccgccgacatccccatggagtcgtccttgcaaacggatgatggggagccaggggacggcagattggtcctctcatcagagagctctgtgtcaccgaagtcctccgatggcggagttggaggatgtttcctcttatcacccctggtgttcctcctacccttaccgtctttctttcccgccatcggagtttctagaagaggagaagaggataggaggaaacaagaagtatgtgcaagtgaaggagtttgcggcacacagttggtctatttaaagaaatgaaacagtacctctttgtattccggtcgtacaacaaacagtcgccagccttcaagagtcgtttggattccaagaaattgcatgcttctgtcaccctttagcgtaacacaacaccaacacctcaaacaactattatgtggacaagacaacgtacacacgcattgggcacacccattgagtgcacatattagattttctagaaaacacaatatatgaaatatcaacgacagtcctacaatatgacaaactcaagatcgatagaagtttactggtcaaacctgagtcaaccagacctatatcagttgaattcagtcggtagccttagcaagcctggcgagacatgccctgactagagttcagtcagccaggccttagtcggttgacccttagtcggccaaaccaccctcaagacaaa

SEQ ID NO: 56030 - DNA, 857 bp, Zea Mays
gtgctatcaagctttgcgctgtgtttgttgttttagctttctatctctttgaccacaattgttttttgagcttcggttttctgttgtaactgtcgctgaaatggtcgaagataagaaaagcgtggaccccgcgcttgctggtttctacggagccatggaaaggactaatgttgagaaaatcactgatgagatgttggttgggctgtttatggactcaagtgatagcgagagctttgatgttgagagtgagaacaaagatgccgaagatcggccatggaggccaagtgatgttgttttcaggaaaaccactattaagcaagggcaaattgaagcgatgaagggcaagtatttccatgatatatccatagtgagagctagagaagagagtactgttcctcttcctgaagcagacgaagtggtggtatttaagagtcttatgaaggctgggcttcattttcccttgcataagatgctggtcgaagtgctgaagacatttgagatataccttcatcagcttactcccgaagctttgattaaagttggagttttgatttgggctatgagaagccaagggctggagccagatgccaactgctcctgcaacattgacgaattgtcctaccagacaaaggcagctgggaaagagcaatatcataacaactttggatgttatagttttgtgtaccagtatgatttgaggtgtctggtgccaacattctggaaaaaatggtcggactcatggatgaagcaatggttttatgtcaaaaatgatctgagtgagagagaggatgtgaagggcatcatccaacgtcccatccgttcatgcttcggcatcaggaggcctttgatcgcaagtg

SEQ ID NO: 56031 - DNA, 1503 bp, Zea Mays
ttcagatattaaaggtgcactcattgttggtgctctaatagattatcttcatttatgggaagttcactcagagtttgaactgcaacctggaagggaagataaacatatattcagtgttgcatctgatggcatatactcagcaaagagtgcttataagggtctcttccttcctgggatcaagtacctttggtcactatagaagggtgtggaaaacttgggccccatcaaagtgcaagttcttcatctggcttgtggcccaaaacagatgttggacagctgacaggttagccaagagaggcctgaaccacccaaacagatgtcctttttgtgaccaggaagctgaaacaataaatcatctgctggtgtcatgtgttttgcacgtctcttctggtacaagctgctgagaaagtatggaatacattccctagctcctcagccagggattattcactttctggattggtgggaagatgcttcggatgcagtaaatgggctcatcaaggagtggatttatcctaattatcttaggtgcctggatgctctggaatcaccgtaatagatgtgttttttaccacttgacacccagcctaactctgctccttaggcttgctaatgatgaagggagaaagtgggaaattgctggggccaaggggatatctcaccttgttgccccgctgccagattcttgatggctgctgtgagagcgaccttctaggggtgattttttccttatggattatttcttgtatgcttgttactggcccccgtaatggggttcttttgtatctgggcatttctaaggccctttcaaccttttcttcttaatatacaaagatgtgcagttctcttgcgctttcgagaaaaaaaaatagctaaaattattaggggtccaattatcaaagacacatttgttgtgatgcttccaaataatccaggcccccaaggcaatgcgagaattgagcccctttctaataggtccagtgactgaacctgaggcttcttcccacgagctcatgaaggaagacaagccaggctgaggggcaagcacttgtagatcaaatctcctcagcagctgaaaccagaaatcccttgtcaagacacaagaaactaggagatggtctaaggtttcatccttttgatcacataagggcattttggtgggtgatcaagccctcttttagccaacctgtcagcaatccagcacctgttatgagcagggagccaaagaaaaaatttgcatttaggtggggcccaggttttccacaccctggtatagtggctaataaattgatctcttgaagagcccttcatatgccacttttagctcaatagttaccatcagaggctatactaaaaacatgtttgtcttcaaatgcaggttgtaactctacatcagaaagaaggtcccaaagctgtagataatccaccaaagctcccacagaaagagctcctttgatgtcagagatccatcttcaattcagaagagcctcctgaacggttctt

SEQ ID NO: 56032 - DNA, 524 bp, Zea Mays
gcgtcgcccaacaagccgaagaaggcggtcgccaactgacgcgcggcttcattagttagtcaaaagctgccttgtagttatctttaccggtttgccgccaattctggacgcatgtcaagtcaagaacgccgcctgcttagttgttttagctaatgcatactggagttgcattgcatgcctaatgtaatgatcgagacatatgctgctctgctcccttctggagggatatagctagatcagctagtgtggtatatatacgtagttgggtgtgtctgctgtatgacaggcagtggtgcttaaggagtgagcttcttcttccctgggatctttaggacaagtagagctttctgctgcatgctccatgaggatgtgccaatctaaagcatgcatggtgctaccgtctttttgcatgaaaaactcgagtacagcgtagggtggtgtctaataagtgcagtgcaaaaatatcaaattgctcagccacaaaggaatggaactgacaatcatcaggcctgacaattcagaag

SEQ ID NO: 56033 - DNA, 510 bp, Zea Mays
gcgttttgatagtttcagagcccaaatttgggaattctctttaagcaaaacttttagttcttttcagtacctttttaatgggtatttacttgtaattgtctgctaaatagattgggagaggtggatgtccgaatataagtcgaatctctgatgtgcagtatttcaggctaagtttagctataggtcatgcagatttgagggtataaaggataaatttgggtacaaattcactgcaaaagtcgtggacaatttccaaacctttccggcatgtactcgtttgcagttttctgttgagtatagcaggagttataggattatgaattttagttgtccattgtttctatcctatcagttttgcaacaaaaggagttgcattgttttatcggtttggaaaccaattctgagacactcattataataaaagttttagggaatgttataatctttccaatgagtttatatttgcaattttttgttggctacagagagttatgaggttttgaatttatg

SEQ ID NO: 56034 - DNA, 1069 bp, Zea Mays
caacaacttgcctatattggcataggcagagtgataatgttggttaagataacgagtgctatacgcatgaaaacttctttcataaataaaggcctacatctacatatagagacatgaataatgaagcagcacgatctgaagcatctaggtcccctactattttttaataagaatgaactgtagctgtgacgacatgccaaagcctagtagatattttatttacgtacctgaatatgattggcccatcactgctctcggtttgtacttgtgcacatgtgagatccaagttgaaaacgcacgatcatttcaacagggaaaactacacttgagtaggaggcagggaactgtacaagtttagctctgaaacaagtagctgatgttccagtggcagctaatcaccaaacaagcataatttggaaataagggctgtcactatcacaggaaaaaatgacgagggatttatgcacaatgacattagaatcactaacaaaaagcattaggagaaatggaagctgacaaattttgtcttaccaccttgtataggatcttgcttgcgtgtactaagtctggtcagctcaagaattaagaactattacagatgcaactacaatcactacatatattctttctagaagtcaagttttgaaaggctacatcgtcctatagaattcagcccacaatgactaaatagttgaggcaaatataaactttcttttctttctcttaaatttaactgaacaaaaaaaagatcaggaacaaacaagaaatacaaacagggtgtttggtttgacagaagaactcatgtggcatccgctgaacctaccagcatagaatgggttggtccagcacttttttacggagtgtctttgtacttcaagtccttttacgattaactctccttgaaagcacctgatgggtggtgcagttccaagctgaaaaccaaacagcgttgtcagctttggttctaggatcagatcattccaggtgacctcgtgccgcaaaccaaacatgctgaaactattaccacttttccttgtgtctttcctcatatttcaccaataagggttag

SEQ ID NO: 56035 - DNA, 417 bp, Zea Mays
gacaaagtgcaagaagtgatgaactggaagccaccaacaactgtctgtcagattcgaagttttctgggattggctggttattgtcaaagattcatctcagacttctctcgaattgcgaagcccatgactaaatttttgaagaagggagccaagtttgactagggtcagaagtgcgaagatgctttccacaccttgaggcagcatctgaccatagcaccggtgttagcgcaacccgacaacggcaagccatttgatgtatactgtgatgcctctagcactagactgggttgtgttttgatgcaagacaactgggtcattgcctacgcatcaagggcactcaggcctcatgagcaaaattatcccactcatgacttggagttagcagccgtggttcatgcattgaagatgtggagacac

SEQ ID NO: 56036 - DNA, 441 bp, Zea Mays
gccacgtcaaaaggggggagagaatgtcacaagacctgttgggagcccagaaccgaaaaggaccaaacgacaatacaagcccaacagagcggtgtatgggtcgtactggactcagtaggggagtgtatttagtcctagtcccttcgccagcttcgttagggttaggcgaggatagagttggctggaagagaacagcttggccggctgcgtccagacttggagagtgtcgagaggcttttcatttccgtttgctaccattgatctatgtaacatgagaacttcgtgagagagagtactgggagcggtgctcatcgtcacaagatccttggtgtgattacaccgtagccagtcacacaacacactgcatttgattaccgttggcataccattggatggctggacaatgagacgatgacgtggctcaatgtggtggcaggattg

SEQ ID NO: 56037 - DNA, 400 bp, Zea Mays
gttgaaaaagaagggtttggatgtccaacaatccaacccagggagttgggcgtgacgagaagattcacttggcaaagaaaggctggctaaccctcgctcgtatagggataatgtgtgtataatcgcgtaggctggtataggcttgatcgtgacagtacagtagtagcttggtaagctagcattgacctatgctatgcaagtgcaaaataagccgtctggggtttcatttgctttgttgaccgcgcttggaattggaacgcgggactgctgctgtgctggctatggatttgcagaggctgtgtggctggaagtgggtggagtgtgagccagagaacgctgatctgatcgaccacttccacttgctcggttgtcacctgccaaactccaaactcactatgcg

SEQ ID NO: 56038 - DNA, 450 bp, Zea Mays
cagcaggaatacccgtcagaacaactaccaaggttcttagttccgctctggaaactagagtggggatagcaactaccaagcacaacgctctagacaacaaggtcagaggagcaaccaatataaaaaccagcagaggaactgcactcagaccggtcaaaggtctagtggtcaacaacagaatcgtcaaggaagcgctgtgaacacactggccaaaaacaacagcacaaacaccccagtcgaacccaaagttgtttcaagtgtggcgaacttggccactatgctaacaactgcccaaggcataatcaacaaacatcccagaggaacagcaaccagagggctgatcagaatacacctgctcatggatctgcacaaaacaagactccgcagaaccagagtaagggaagagttaatcacgtgacagcagaatcagttcctgaggatgccaacgtg

SEQ ID NO: 56039 - DNA, 482 bp, Zea Mays
gcttaatgcacaagtcgaagcccacaaagctgaagtcgaaggtttgaagaaaaaacttgcagaaatgaatgaaaattttgaagttgcaaaggcaaagcaggaaataggtgaaatggaaagatcaagggtgcaaaagaatgttgaagagcttcgggattccaaggagagatgctatgaaacatccttggaatgcggcaagaaactaaaaaatagttttgcaagggtgggagcatactcttcggaacagaagtttattcgcggtgaacctgaaggggttattcagtggatcggcaaagaggacgaagcttttgatgaaatactcagcaatcgtggggatttctgcgctttcgccggtgcacaaggggtcgcggcaattttagagaaggccggttgtgaacatgttaaggccgcagcccagccagaatctattttctcagcaaatgacaccaaggatccctcgttcgaagcctctttgctaggcg

SEQ ID NO: 56040 - DNA, 758 bp, Zea Mays
agttgttgcgccgcccggatagccagctacggttcggtaccattggacctgcccataaaatggggccacgttgaactcctcactcgttcgtgcgcaccatcgccacaacgccgggttagccatcatgaacgtgagaggggggaaaagcaacgggtcgctagcacggtggaccaccgatgtcggaaatcggaaacccagtgagtttgggagtggaactcggctctgggtgatcctcgcacctcggggaaggtgtgcgcctcatcaactcaggcagagttcaccgaagccctgcgtaattgctcgccatcgaaccaaatccgccgcattccgccctgctgcgtagactgcccgcctgcgtgcatcatcctcggtaagattcccttatgcataaccgcttacatctccacatcgcgtagagttatttggattagagaatcgagcggctcggggcttgggaggtcgccgccggggaacgctccaccgtgggagtagccgcgccgccgcttccctcagctgggtgagggacaagcgcgatgagccgttgatttctcacgcaacagctctgattagagaatgcttaccccttcgttccgtgtgatccggacggttggatcgtgatcggacggattgaaggaacctttgctatattaaatctgcagcatcgattctgaatccgagggtcgtgacagtgtgtcgttttagaatattaaacttctaatctggtgcgtgagatttagatcggacggcctggattcacc

SEQ ID NO: 56041 - DNA, 660 bp, Zea Mays
ggcagaaacaaatgagatgcagcccgacagaatattcccgagttccaacttctgacagaagttaggtgcagtaggtgtttgtttggtcattgcgagaagtatgaataagcaattgagaaaaaaattaaactatgtaaaatggcatgaggaactttccttcaggtattagtcgaaatatcgttgcagtgtcaatgttatgtgaaatgtttatagcatatcacaagaagcactccaacactaaaattatcatcaatctaccttgggcaaacaacaaattcccccataactagataactaagtacctcactgttataaagagacttgatatcggaacaatagttctgagataatgaggcatttgaactttccttgaatagccttttgtctctaaaggattgaggccagcataactgagcaaagatggtgacaaaaagaaaaatacaggtcccagccaaaaaagtgaaaaggttgttcaagtaaccctgcataaaataaaatatcatgaagagtttgataaatatttaaatgagtaaattttgaccaggaaggtatcagcttacattgttctttttaatctttgacagatctggattccaataaggatggaatgttttgcctggtaatgtgaattgatcttcaaagtacatgtctagaacgttc

SEQ ID NO: 56042 - DNA, 438 bp, Zea Mays
ggaaaaagggggccaagaaaggccagtacaaaacagcctccttacggaggccagtaagaagcatacataaaataatccattagactctcctctctccttagctctcagctaaaggtacagctagatggcagagccccttggcaccagcaatctcccattgcatcctttactcattagcagctctaagactcatggtaacactggggttgcagccgtcaaaaacacatttgtttctatgtttccacatagtctaggctcccagaaatataagggaatcaagcccttttctagtgagcccagtagcaatattccccaccgattcccaccagcctaggtatgagccaacatcaggttgaggggccaaagaatgcagaccgaaattccttaacaacaggtaccagaattccctggagaaggaacaggtaacgaggagatggt

SEQ ID NO: 56043 - DNA, 389 bp, Zea Mays
gtgctgtcgaaatagtttcttttgttttggcagctgaagaggtcccttcaccaaattcaggtatcgcgacctgttcaatatagcgcggccggtgggtcagaaccttcatcttcttgcccttcggctcggctgtgatgaccggagcggcagtcttcctcttttttcctttccctcacagtaggtagcgataatcagggtatacgaagccaatagcatcaaataccctgttcaatcttttcttctttcgaccccaaaaagttgcggacaatgtattatcctcgaccttgaagtatgccccaagtagctcgtcgctagtagcttcaatacacttcagccagtcaccgttcggctcatcaaacttctccccgaatctgaaggtatattttaat

SEQ ID NO: 56044 - DNA, 412 bp, Zea Mays
gacgcaatgtagatcttctccctagctgccgcaacgcccggccgattcctccgccgctgcaagctccaactgactgctacccgatccctctccgtgctagcatgtggggaggggggtataaaaccctaccatcaagcctccttcctcctcctaatttgccgccgccagtaaagccaccgcgaggaagaagactcgagggagtgttggttgtgttactgtcgtcgtggccgccctctcgtaccgtgaatcctcacctgagggtgttgggtgatactagcggtggtcgtgcggggtgattcttggaccgcgacacataggttctccaccagggacgtctaaattgctcaccggacttcatcctacgccgctgtgccgcgcgtctacgtggccaaccctctccatcgcttgtcgc

SEQ ID NO: 56045 - DNA, 317 bp, Zea Mays
gatcgggtgctccgaccatcggtacggagccggaggaccggtggtcgcctccaatatctagtgatcgttaagcttttgttgtcttctgttctcctgcgatccgtgtccaccgaagatgacgttgacctctctatcaacgcgcgggaagactccacctcctccctcctcctgctgctggggttgtcgcggttctcctggtcctccccgcggcggaggaggaggtagaggttggaagggccggccatgtccgacggagtgcttgaagtctctgcagttccgaagggtgtggcgcatgtccttgtggtacgggcactggg

SEQ ID NO: 56046 - DNA, 525 bp, Zea Mays
gccattgaacactaaggcccccttcggatacttcagttcttgggcatagtgtttagcttcaaaaatctcttcttcagacaatctttttcccgaagcatgtcgtataatataatcaagagcttcggtaggtgcttcgggagtaggagtggcagcttcttcaggcataatttgttctacagcttctttttccattgccttttctccggtttccaaggatttctccttggcgggctctgaaggcccagcttcggtctcggcctggctctttgtagcttcggcttcgatcaactttctcttagtctgcgcttgtgaagcctcggttggtttttatcgtttccagcacatccagtacactggccatccttttcctcttgggggtcactataagacctctttatgccttcggcactgtcacttctgccaaagggcttagaacttctaatatttttgtcccttcggttcttatttcttcaatattaaccaccttcggctcagctaattcagtagccggctcttcaatctttt

SEQ ID NO: 56047 - DNA, 548 bp, Zea Mays
tccatccaagcgtgtggatcttgattcctctgaaggtccagcttgaatcttatccttcctcgatttgatgaggtcgatcatcttcgatcttcgttcttgaagttgttatccgaattagggacatgtaggtaagataaagtagtaggtggagcagccagtttagtaggtggctatgagttaaatgagattagtcagaatctggtttggatgttttgcttctaaatggtttggataggttatgtaacatattatgcaggtcaagttgctgggtatatccgagttaatctaagatcctaaacttgttttataggagcaaggtctaatgtatctcctcggcattagctaatcatgtttgagtgcctcacattaggtttgatcataatagattggataagattgggtatgactagaatagactaatttaggttagataaatttaatagggtaggataaatattattaggatatgttggaaacttttaagataaaatagatctatgagtgtaggatagaattttaagatgagatggatattgttagactagata

SEQ ID NO: 56048 - DNA, 626 bp, Zea Mays
ctttaaccctccttttttatacgtatgtttggctattacactgttcaggtgaatttcaatggatagctttttttcttctagaatatgcacgacagcgtattcagtatctttttcggctacatatatgtgttacatgctcgtacctttgccttcttatagggcaaagaaagatgtctcactgaactgagaaatgagcttaaaatattggagactgaacatgcagaatgtcttgtgaaggcgagatcaaataagcaaatcaagtctttcaggtgaaatatttagtgattagtattggttctcacagtaaaacatatatgatcaaagacttctctgttccacaactccagatttctatgatttttttttcaattttgatgctatttgttggcatgtcgtacttttcatgtttctgtgtggcctagatatctattttcatgttcttgtttctttgtattacctaaacaaactctcctaaatattgaacatcgtcgtactagatatattacaaaataatttacgtgaactgatgtatttcttgtcacagtgtcggcttgcactccaaaggaaacacttgcaatactgaagttataaaaggatttttcagatcttgcctgcatactaccaga

SEQ ID NO: 56049 - DNA, 978 bp, Zea Mays
tcacctctcaagggacaccaagaagaaagggcaggtgtcaaaactgtggcatatatggacactgggctcaggactgtaaacgtccaaaaagggataagaaggagcagaagcaactcgaggcaaatgttgctgttgggactgaaaatgcagcactcctgctagctgaagttgaacagataagaaatgtgtcaccacagtttgttcatctgacagagaacaaggtggtgcctgtgatttgtgctgatgatgagtgggtactggatactggagctagtaaccacatgacaggtacttgatctgctctatcatatcttgatgatactgtcagagggactgtgagatttgaagatggctccactgtcaaaatctgtgggttaggttctatggttgttcagggaaggcaggaccaacacacgatactgacaaatgtctattacatcctaaagctaaaaagcaacattatcagtcttggtcagctagaggaggtgggctgtgacattagactgttcaatggtcgtctgaaggtgtttgaccctgaatacaatctactagtatatgctcccagggctggcaatagattgtacacagtcaagttgggcataactgatcctgtttgccttctgacaaaaatggatgatttggcctggaagtggcatgcaagatttgggcatttaaatttcagagcacgtcgagatctagggaagaaaaagatggttgaaggtttgcctactgtagatcgtgtggaacaagtatgtgatggatgtaccctgggaaagcagcacaggtcaccattcccaaaggtctcatcttatagagccaaaaagggtttggaactgtttcatgctgatctgtgtggacaagtgagaccacaaacagtgggtggaaaatcctatttcctacttgtggtggatgatttcagtcgatacatgtggatagaattgataaaatctaaggatgaggcattgctgtccttgaaga

SEQ ID NO: 56050 - DNA, 666 bp, Zea Mays
agcaagaccagataaggccaagcctaagggaagaacgatcaaaagtagtgagcaacaagttcttaaattgggtgcgaaaggagctaagaagatgagcaggaagtgccaaaaatgtggcatcgctgatggtcacaacagccgtacgtgtttaactatggaggataatagggttcaattggctaacctatctggacgtaagcgaggacggcctcctggttcaaggaacaaaatcagaggtgcagcaccacagtggaatgagacatcaacgtcgaaaaaatgaacggtgtatgtcagagatgatgattcatctggtagagagtagaataccaaaagatttatgagacaatgggcttgtttaccgttgtaactagtgatgcaaatgaatgaatgacatacagtatgctggaaatataagttgaaaattatattctggatgtaaatgtgaatcgtatgttaaattgtcaatgcacagacagcgtcataaatatgtgtacataatgtcataaacgtatgtgaaagttatcataaacatttaacagttatgtagatttatgaatgtacagcgaggtttttatagcatagaacatggatgtatgtagcataaatgtatgttgaaatatgcataacacggggttgtttattgcataaacttgccatactgtgaag

SEQ ID NO: 56051 - DNA, 639 bp, Zea Mays
aaacccattgcttctctgacttcagctaaggcagtggaattcatacaagacataatgttcaggtttggaataccgagtagcatcataactgacctggaatccaacttcacaagttcagagttcttcgatttctacgagcaaaagagcattcagatcaaatatgcctcggtggcgcacccaagagccaacgggcaggtcgaaagagctaacgggatgatattggaggcgctcagagaagttcgcaggaaaatggatcagagagctgtcgtatgttgtttggagcctgagaactcaacctagtcgagctctgcatggaaatactcctttcttcatggtctacggttcggaggcagtgctacctgctgatctcaagtttggggcaccaaggttgatctttgaaaacatagcagaagctgaagccactaggctggaggatgttgacgtactcgaggaagagcgacttaacacagtgattcaatcagcacggtatcagcaaactctgaggcgctatcacgataaggacatacggcatcgatccttcgtagtgggagatctcgtcctccaccgaattctaacgggggaaggacggcacaaactatcaccgctatgggaaggaccattcatggtagcggaagttac

SEQ ID NO: 56052 - DNA, 602 bp, Zea Mays
gagcgagccgtgattgcatctcccgcccgagattggcctttggcgagactgaacagcgccacccgtccgaggttggcttcgggcgatacggaacaacgtctcccgtccgaggttgacctcgggcaagatacaacagtgtctcccgtctgagcttggcctcggacgacacggaacagtgtctcccatctagagctggcctcgggcgagacaaaactgcatctcccgtttgaggttggtcttgggcgaggcagaagtgcgtctcctggccagagctagcctcggggcgagacgaaacatcatttttatgctcgtaagggccgggccatatatatctcctacaacaagggctatatattgattggacgattttttatcacaggggcgctacataagagattctctcctttctgctttgtgacagctaggattgggcaaaagcgtggaagtgttggtttccatgccagcacctacctcattattatagcgcttgtgattgggggccacaaccacgggaaggtttgcatcccccgatcaagccaaaggttagttttagactcgttccaatcaacttataacccttattgcaagagatagatatcccc

SEQ ID NO: 56053 - DNA, 519 bp, Zea Mays
ttttaacaaaataataaatgttaaagattagtttcttaatatacaatgtgtgagcataattggcgtatttaaaatcattttttgcatagatataaataaataaaattatggatttgaattcatactgagttcttttgtttgttcattaaaatttgagtgcaaattcaaaaccaaaatttaatgaagtttgaaatctaggaaagagaatgaaaacagaaataaataaaaagagaaaatctcacctgtgcgcttgggtcgtttctttccctgccggcccaattaggcatttcacacccgcgcagcccatcacccctcccttccttttccctttttccgcgtgagaatgacaggtgggccccagcaaacgttgactcacttggaactcctctcacggtcgcgcgccgtgtcaccggcgggtgggccccttatgccagatcgttcgttcccaacagatcgcgaaccaggcgggcgaaacagaagtcgtgtggtcctcacggtgctccctcaaccgaatcccaa

SEQ ID NO: 56054 - DNA, 965 bp, Zea Mays
ggtaaatatcctcggcgtcgtggcagaaggtcactgaggtggcgggctccggttaaacggcgaccccccatgccatcaccggaatccgccgcgcggaaagcttgccagcacatctgaaatccgcacttcttctccaattccggccgttggcctataaattgcgctcgggcttggcttcttctccacattccgcacctcagtgcttaagcaattgactcaattctaccagagaacttgcgtagcccacaatttctccccttccctgttcttgctccgccgcaaggaactctaccgtaatcagcaacctcgggttagtaattcccccaattgctccttgttttagcatgcttatggtttcttatagttcttggaaccggccaattgaagttcggccgaagcctttcaccggaacacgtgcctgttctgtagaacgccgccgtaacccaccctcactgtcgacctgctcttcagctcgtattctgcccaaaccaaagtgtgtgcataactcctggtgaacctgtgaacccttcctcagcctcaatttggtcgtccccgccgtcgtttggccggaacgcgttcgtccctataaccatcctcctgtcaccatgaaccagttgtttcaaagccccggttataaaattgattgaggggaaatggtccttagaacttgaatttggtttcagccaaagtaggacaccgatcgctgagcgaaatggccgattcacgtgctcgtcggagccctgcgcatcgccgtccgccgtcgagggcttcagggtgtaaagaattagaagattgaggacctatctgcaaatcatcagagactcttaagaatagtgaccgaacccatctccagttagataaaactccgagggccttcctgcgaagtttccaccgcgggcgtgggcgcgcccgatttccctgtgttatgggccgtttgagctagaatcggcccagaactgttgcaa

SEQ ID NO: 56055 - DNA, 647 bp, Zea Mays
gatctgagccaaaggaacgatattaaggatgtgatccagtggcctatccgatcctacctcggattgagaaggcctgctatcgtgaacacggaaaaatctcaaggctgcctggtcgcgtttaatgttgtatgcaactgcatcggcaccagggacttagtgcaggagcacatagccttcaaggtttggcccctgactgccgaatgggaaatgccgaaggatgttgaagctgatgccaatgtcgggaaaagcagtctggttcatttgaagtatacttatcgatacagaaaccaatttggtgagccagatgatgattgacttgatgccattgaagcaacaagtgatgaattgttggggacctatacgaaggctgaggaagaagctatgtacgttgcctttggtgcccaaggaaaacgaagattgaacagagtttttgatgctatcagattcatttaccgtgattactgctttcctactcgaaagagagggtcaaaaaggaaaagtgcaccgaaagcttcttctgttgtgccgaggccaaaggaagcaaaaattctaacccatcgcccgaagtcgtactttttagaaagggctgcaaaactgcctgctacaaggacttcaaaaaaagagactaccgaaacagctcaagggcc

SEQ ID NO: 56056 - DNA, 519 bp, Zea Mays
aactggtcaagcatctgaccgtgtgggatctaaccgtgtgggattaaagtaatgcacattgatagcatctgaccgtgtttctcgccttctatatatgtacattgataggccaacgaattatcaatgttccaaattcagagtaatgcatctgtccacagattaaagtaagcttatgtcagagtaatgcatctgaccgtgtgggattaaagtaagattaaagtaatgcatctgtccatagagtaatgcatctgaccgtgtgggatgagctctcagattaaagtaatgcatctgtccacagattctttatgcaagaatcagtgtttctgttttgtctgtctatttaacaacagattctttatatgtctagagaagtccatttgtgttcctgctgtccatgattcaattgggagtctgtttcttgccgttgttatgatgaccgcgattcagtccatgatgccttcgttatgatgtttaggattcagtccatgatacctttgttatgataaattttctacccgc

SEQ ID NO: 56057 - DNA, 564 bp, Zea Mays
gccaaatgcaccaccataggagcccaacaacccatgcacaccactccgtaggggacggagaaatcagtttcagcagacccacacacgccgcgtttcccatgcatagaaacacggagaaagcggtttgagcagctgtagggtggagacgttttactcatcctaatccgcccaccaacctagctacaaaaagtcgtaccgaggccactcaagcgatagcggtggtcgatctgctcggcgccggtggcctaacgctctccagctactccggctctcctacgtcctccaaggtacgcacgtacgtacatcagattttctggctcactgactccatgggcctgtccaccgagttcgtgtcgcgtttgtgtgacctaatggagaccgacgctgctggatggagggcatcggcggttaggcacgggccacacagagggcatcggcggcaagtcaccaaccttaggcttgaacggtgatttcatagctccatatcagcgaagtcaaagtcatcagtaaccaggggcgtcgaggcacctacgatcgcctccattccccttgcctcgcctcaac

SEQ ID NO: 56058 - DNA, 458 bp, Zea Mays
tccaggagacagtataggaaatcatcttcgttagtgccgttgaacactaaggccccctttgggtatttcagttcccgggcatagtgtttgacttctgcaatttcttcttcagatagtctttttctcgaagcatgtcgaataataaagtcaagatcttcggacggtgcttcgggagcatgagatttagcttttttggccacatccttctccatagccatgccaacatctagagattcttgctcatccatatcctcagttgcggtaggctccgtctcagcaggcactgagggcccaacttcggttcagcacgacttatagcagcttcaacaattttctttgcaggggcaggagttaatgcccttgttgtctccatgacagcgtctagcacgctagccattctcatcctcttgggagttattgcaggagctcttgttatcttcggcaatcctgactccgcc

SEQ ID NO: 56059 - DNA, 637 bp, Zea Mays
ctctgagggtggacttgtaggacgcttgcgcttgccgtcggcacggtgaggccatcccttgcccctcttgcctttgcccatggtcgtgtagaaagtggagaagggacagagaagaagaaagctagtgatcaagggtgagtgaagaaaataaccagggcaaacgggatatttaaagaggtcgagtggcgaccatccacttcttaccctgctcaccgaacagtcgcaagaattcaacaagcaattcaagccgcctgaaaatgagttagacaactggcgttgtttcgcgtaacacgacaccgtttggacccaagtcaactgctcaggcaaatgattacaccctccgtcacatcaaattactacttcaggacaatgtgatagacacctttcgcggggcagccaccccttgggcacacccattgggtgtatcgcctggaacctccaagattttctgaagaggtgatacccacaaaatatacgcaatggatgtaccacgacaaaaagaggagattgattgaaacgggaggaagtccaaatgtggttactgaggcacaattccaatcaacaaagcattaaagtacagggtagagtggtgtccacccgaaggccctctgactcaaccagccaggtgtccaactta

SEQ ID NO: 56060 - DNA, 594 bp, Zea Mays
cacatccaaattctagacaagccttcagaaagctatgggcaccaagctagattttagcaccgcttatcaccctcagacagacaggcagacagaaagagttaacaaagtcctcgaagatctattaagagcatgtgtgctaacattcgatagaagttgggaatccagtctaccctacgcagagttctcatacaacaacagctatcaggccagcatcaagatgtcaccattcgaagcgttgtatggatgaaaatgccagacgcctctcatgtggtccaacgtaggggaaaagcactagaaggaccttcctttgtcaaagaggcagaagagaaagttgccttgatccgcaggagattacttgaagctcagagtcggcagaagagttatgcggacaataggcggagagagctcagatatgaagaaggagacttcgtctacctcaaggtctccccgatgcgtggtgtcaggaggttccaagtgaaaggaaaactagcaccgtgattcatcggtccctatcccatcattggcagagtgggacccgcaacgtaccgtcttgaactaccagagtccatgtctgacatccacaatgtgtttcac

SEQ ID NO: 56061 - DNA, 834 bp, Zea Mays
tcaaacaactaataaagaatcttgtgcactattcacatgtgtctctgacaattgcaccgaggcccctccctttttgtttctccgcaaggtcaggtccccgaccacggacggtggagcagttgctccgacgagcttgtaccggccggaacacgcaaaggctaagcttcttacttggtcaaaatcgaattctacctcgggcaaccctaacccctctaccaattgcgaagttctagctcaaaatttctctgcccacggggatggcgcaaaccgaggacaacccgaggtgtttccagtgatctaacatgatctagttcaattggttgggtcgataagcatccatagcacacaagggtgctagaacgaggacaaggagggtatgaatggacatgaaaacggcggtccacgacatggtagctcacggtggcgtggagaactgaattgtggtggctaatcggaggcaagggcaggtgctctggcttcgtgacaacctaacagagctcactggggcattgatttatagtgtccattagcggtggcatccaatttgaaggaagtgtgctggcggccgaagagaggggaaatgtactgacgcgggtgatcgtggatggcaccgtggcaaggcctccggcgatggacgggcttgctacaagggttcactgcgacgtgttaaacctcccaggcacgtggcacacgatcggtaagcggccaacgccggtgaagatcattccggccggccgcagaccaagtgggtacggtgaacccaacagtgaccgagtccaagccaatctgggcactaagatcttttactcccctcagttatccactttgcgctgg

SEQ ID NO: 56062 - DNA, 615 bp, Zea Mays
cgaaaaataggacggatggaattcaaaaaacacatcattatcacgtgaaattttttggacagaaagaagatttttggagatatctgggacatgcaaaatgttacgtagtgcaagtgggcgatgatcggaattaattgtagaatgaccagtgtgtaaaatctgcaaacctgcaccattgccgacctggacttgctcaccaccgtgatagcgttcacgcagcgccagccggtcaagatcgctggtgatgtgatctgtggcacctgtgtcgacataccagttcggatcaatcagtgttgtagctgtcgtcgtttctgtgccagcaacgaatggcggtatgtcccacctttccgcagatctggcagggcggtcgtgcattagagccacaaccgtgattgtcattagtgcgaggcggtggtccaccacggccgcgccctcggccacggttaccacccctactgcggtcaccacgaccactatggctcacatagttggcagatgagccaagggcaagctgatgcgtcgtctaatgtgtgagctgacgtgcttcaaatgccatgagataggcataaacatcatcaagcgagagggagtcgcccttagttgtcattgatgtga

SEQ ID NO: 56063 - DNA, 342 bp, Zea Mays
gtttgaccggtttgcctggtggtgtttcagttctactgtgtccggtgttttttaattgcagcaattaacgttgttgggttccacgcatgtgtatgcacatgcatggtttgcgccttttgggagttcctgcttgtcctattgctcctacatcacctgtgatttcagagaaggctactgacgagaaggtgctgcttgcagactatgatgatcgaatgtccccttatgagttatgactcagtttagtgcttacaggacttggttggatgaggatgtctgtgcccgtgctattcttgcctctagcatggaggatcgttttgttgctagagagatcctacaattgat

SEQ ID NO: 56064 - DNA, 305 bp, Zea Mays
cggtgataaattgataatgtgggtctgtatggatcagctgccccctataacaatgtgtcgctggttggtaatcctatagaaatcaagcaatggccccattggtacaatagagatgaccccaatggaaccgatagctggcttcaaccctggtccggttcaaacatttccctcacgattgattcatggtatcttgtttcatgtagacaaattaggattttattttattgttttaggttctaaagatgcgagctttgtctttgttatatgttgcaagatgtaggtggactccttacagcacctggccc

SEQ ID NO: 56065 - DNA, 919 bp, Zea Mays
atagattgttcatatctgagtagcgaggacacggttaatttatgcacatcaatcagggtctttggttatcaaggttaattgaacactatggtggtttgcatgatacatgttgtggaatttggatcattggtccatgttccagcatgattaataaagccacatatattttctttgcctcatttcctgttttcatatttccttgataatgctgcggaaacatggtggccctatgtgagatccttatagtaaggctgattctacatgaacttaaatgtcagtaagtctcagattcaagtacatgaatgttcaaccatgtcaatacgtcattttcattgcttagtctctcaccagtagtgttgcgtttagtataagcagtaacagatataattcactgcttctttgtccagttttgcaggtcagtttatttgcgggttttcatttcaagaccagtgtttcttaagcttttatcggtctgataattgtagtatgagcatgcaacattttataggcgacagtcattttcgtccacaatcaatgattcttgtttactgcatgcaggatgataaatcatcaaagaattgagataatacgggcagttactggtgaaaggtacaaccatgccacaggtactgactcatcataatttttagtttaatctgaatcagcaataatcttaattgtgtgatgtgctttttctttttttcttaattatgaattctatgcacgcatcaactcattaacaaatacaactggaatccaaacatcaacagttttgtttgccaacaaccaatttttttggctctatcgacatcagcgttcatccaaacacacccatagggcatgttcgattttcacccaaatggccaaatgtatcatgcactagccaagacaaaatttggcaccagccagtctttggtca

SEQ ID NO: 56066 - DNA, 1025 bp, Zea Mays
aataaacaaaaacaatttaaacatgggctgacttcggcccacacggtccatctttgggtagagtcggcccatggctagggagcccacgcgcccacgcttttgcacaaaagaccacgtgctctggctaaaccaatccaagctcccccaactgttcaccaaagtcactgactaccgcacttaaacccctcggtcttgttctattcacaaggtctcggccacgacgccactccggtggttagcacaggtcgaacacctggccgcgctcacatgatctcgccgccggtgagttctccggtgaggaccagcaccctaacaccgaccctgaggtataccggtcaaatatacttcaagaatcgaaccactattgcactagacctacaccacccacggccatggcagcgagctaagtccggcgagcccgtacctgagccaccactgcagtagagtttaaccaaacaccacgggtagcatcagtgacatacctagattcctatgctcgcgaaaaaccggccgaggatgaagcaagttggtcgggcgacgacggagctgttcacggtgtcagtctgcggcggtgtgctcttgttccagccaaaacacagcagtatcgttggggataacagctcggtgagcttcactaatctaagggggacatggaacaagcacaacacagaccaatacttgcctgagttagcctagccacggcaaggtgacaaattggtaggcgtggtcacaactcataggagtttggcgcgtgcagctctggacagagcacactgatggctggggaaaggagaagttacacgaacctaaaggcacagggaccacctgctgcaaggaacccatgactagagctcaagggcagggaaagaagttcacttaaccatgtcttttagggcagctaaattggggcaggtgtccctagacttgcacaaattcagtgcaaatgtattcccagggtgccagcagtacatgggtatcccatacatggctttcatgcccaagttcctcacagatgcacagacaca

SEQ ID NO: 56067 - DNA, 646 bp, Zea Mays
ccccaccataggaaaactttatttaaacgaggttttttgtattatagtattcgtttttgtttggcttctgtctttcggtactcacaatttcatcttctccttaatagtagtatcctcaagtgaagttatcctttaaaatagaactcagcactctgacccattttagttattttattttgttttcttatttctcattgtcttttccatcacctacgaccaaaaaatctaattgtctgtataaaaaattgaataaacttctatgaacgactagggagaaattagctcaatatgagaactacatttgtacgcacctctcatctccaagatatttaacaacaaatttgatctcaggcaccacttgtcaactctatatcttctctgtgtttgatttactttatatcgtatagattgataacatacgcgaataaaaactagaaatttatagaaagaggggtgaatcagattcctacctccccatcctagctcacattttctttgccccgatgaacagctcccagtgtcatcttctacagaactgcctcctcgtgagttgcttgctagcagatctcctgcaattattgtgattgactctgattctttacataccattgtcactggactgcaattctttacttacaattatttg

SEQ ID NO: 56068 - DNA, 472 bp, Zea Mays
ttccagcccttaacttctcacgaatgtgtttcataccctcattatccttttgggcatcaattatcctttgcaagagaattgactcaagcttaagatgattcaaagttccttgttggaccattcccaggtttagcttctccatctcttgacataagtgttgtcagaggtctttattgttaaacaatggcaggaaaccttgcggcttagtgcatctgccacaacattggctttgcctgggtgataatgaatttcaagttcatagtccttaataagctcaagccatcgcctctgtctcatattcaattctgactgggtgaagatgtacttcaagcttttatgatctgtatagatatgacagatatttcccagcagatagtgacgccaaattttcacggcatgaacaacagcagctagctccagatcatgagttgggtaatgctcctcatgtcggcgcaactgtcgtgaagcatat

SEQ ID NO: 56069 - DNA, 597 bp, Zea Mays
gctatgcacgggcaaccgactagtgatacataatatataagctacaacttttaattctaggttttcttattctgggtaaggcactagggtcgatattatcttagttgacctattcgtttccttagcgctgagtaggacagggtggagtttgactaggttctaagttctatgggttaagacttttcttcactcgccgatatatatgttcaaaggccttacactacatttatcaagtccccctaactagattttactgtggaatacttaaaatattgggtaacttattagtttgactatattccagtggtttctattgggatctatttatacaatgcatacttaggtctcctagattgaactcatgacaatttggattaggaatggggacatgagtgttgtggttggctatattattgcctttgactatgatagtctaggtcactatgccaatgaagaatcatccgttcattggtaagattgtttggcattctagtcggtgaaatgcaagattcatatcaagacttaaaagaaaagttggcaaggatggagaggacttataatttttaattcaacttggttaactagattttagagtat

SEQ ID NO: 56070 - DNA, 552 bp, Zea Mays
tgggtcaggccctcgcaatcggacttaagccgacaaaaccgtacccagtcccaggtgcacaacatcgctaatcagcagcaaactcgggacaccgctcgtcgtcacgaataccctccgcagcaagcccgcatcagtaacacaactagaggaagggcagaggccaaggcccatagcaacgaaggttctattgtcttttccatggtgaagacttggcacgcccaaccaggggttgccctgaaaccaaagccacaaaggatcgaatggccagaaaccaatcgactgacaaccaaagagttgtcgcccacacctaccatccccaacagtacaaccagcaccagttccacaatgaacattaccatactcatcagcaaaaccacaactgataccagcaacaccaagagatcctaactctaccacctccaccaccacatcatccaaatcaaccattaccaccaccagcagcatcgaaacaagaggactttgctgatcaacctttttgagggatcattcacatgattacaagaggatccagctctgagttcgacaccaaac

SEQ ID NO: 56071 - DNA, 740 bp, Zea Mays
tagaagtggtggttgaacgctaatccctcttcttttgtaaccaactttgtcattcacacttcacattgtctctattaccgtttgtgattctttgttgatttgaatgattggtggctactccagtcctagaacaacattggcacccaccgtggtagtcgctcaaaattccctctgtccccaagtaaatctgcgaaaataggaacaaaactagtgagacatcaaaggcatccaaggccgcaacaaagaatgtagcaacaaaataagttgccatcatagtgggacccctataggcaaagctaagacaaaatgacaaaaaaaacacaaacaccagaaggaaaaatttagtaccttcccacttgacaaataagacgacaaagacacaaaaaatcaataccgagctgagccatgaagaagctagaggaacaaaattaagatattgaaaggctagagctacacaagcaaaagttgttgcagtaggcaacaattaggaacaggtttggagcatctataaaacttttagaaagaagctaaacaaacaataatcatacttaatagtgacatatactagctttagagggcacatgatgttgatgatctagaagaagactatgaaggtttcatatccatacacacatgacatcatggcgagaacatgggagaaccaatgtatgatcggaccttcccactctctatgcagttgtaggattaccaatgcccacccaattacaaacctcatgaag

SEQ ID NO: 56072 - DNA, 363 bp, Zea Mays
taagaatgtgactggagttgaagcagaggctgctgacaaaaagagcatcacatgagaactcttcaactctgcgaacttgtcatgatcaccacgaagattatccggcaagagactagcacgagatttgataagaggatgaacagaccatgagatccaaatagattgtcgagcttttagagacgcaagagatccaaggacaacagcaaaatccattaatccacatggatatgccacttaaagataaggttgacaaaaacaacgtcatggggcctagagaaagagcatcggaaagactagaaatgagagattagattgatcgacacccggtacttgagaatcggttggagcagattacaagacgac

SEQ ID NO: 56073 - DNA, 1088 bp, Zea Mays
cacagcccgattccctttcttgatcaatctgcgatccaaatatctccataggctggacgttgtgaccactcagatccgaggaagtaggaagagtggtaaatacaggagtgtagtctgggatatatggtttcagttgtgagacatggaacactgggtgcacctgagcagcagccggcagctccaaacggtaagccactgcacccacacgctccaatatcttgtaagggccaaagaacttgaaggcaagcttaggacatggtctactgaccacagtgttttgggcatacggttggagtttgagcaaaaccatatcaccgacttgaaagtggcgttcggtccggagacgatctgccttcagcttcatgcggttctaggctgctgcaagctgctccctcaacatcaaggtgaattgagccctttctactaacagatgtgccacatcaacgacggcatcagatggaatatgaggtgctgctgcaaacggagggtcataaccgtacatcactttgaaaggagaacaagccagggaagtgtggtatgtggtattgtaccaaaattctgccaaaggcaaccaattcttccatttagtgggttgagcatggactgcgcaccgcaggtacatctccacacatttgttaacccgctcactttggccgtcagtctgtgggtgatatgccgtgctcaggttcagcttagtgcccaacagcttgaataattgactccagaaaatactcgtaaagattttatccctgtcactgacaatagatctcggaagaccatgcaaacggaccacctgatccaaaacaacttgggccacctgtgcagcagtgaaagggtgtttcatagctataaaatgggcatacatcgagaaacgatccaccacaaccaagattgtatcatagccactggacttgggcagtttttctatgaaatccattgcaatatcctgccaagcgccttgagggaccggaagcggttgcaataaaccagccgggtggactctctctcctttggccttttgacaaattggacactgtttgacaaaatcttccacatcagtcttcatacccttccaaaaaaacaatttc

SEQ ID NO: 56074 - DNA, 511 bp, Zea Mays
cgccctccactgcacctccctaacctcccgggtggaaagcctggagcagaaagtcagggagctttcagaagaaaaagcgtccctccaagagagcctctcgttagctgaaggcgaagagaccaacacccgtgaagcttaccgcaccctcaaaatggactacgacaaggtactaaagaagctcgcccccgcaaggaaaatccgcaagaagaccaaaagccaaggatgtcagactgagcagcaggaagaaaacccacccaggaaccagtccgacgccgaggacatgtccctggccagccttgatgaccttctcaaggagtttggggacactttagagaaagagttcgggggtaccttaggtagcactcgtgtgtaataagcttgtggtagtggtatgctatgtaatgtaatggcttgatgtaatgaataaaataactagttaaaaaaaatggcatgtgcataatagtgactctcttcccatggcagatggcttcggatagaaccacgcctaccg

SEQ ID NO: 56075 - DNA, 729 bp, Zea Mays
ttagctctttccctctctcaatcagtcacctagaccggttgagtgcttcttaatctcaaaggacacaaagtccccgcaagaatcatgacacaatttggtgtctcttgctagctttacacggtgaaagaatggggttgggaatgagagtgaaacacaaacaatagcacaataactttgcaacaactcaagaataagtctctcacaaggcgctaactcttttctagctcaattcacttagatgtggcacttggagactattgaatgctcgggagtgttgcactaagtgtatagatgtttggtgtagctcttgtgttttttcaatgctagtgggggtagatatagccccaaccaccaaatatggtcgttgtaaaagttgacaaaaacgacactatctggtggtgcacgtaactacctacagtgtcggtctggtgcaccactggaccgtctgacagctatggtggcatgttaccgttttgactattcagacgtacagtaactggtctggtggcgcatcggacccgccacaccaatagatgatcgttggaacttgaaggtctggtacgccaccggactggtccgggtcaccactcctcaaatgtccatcttcagtctttcagcataggcggttcgatgtgccaccaaaccaatctggatagccatccgccaaaagtccaagtatggccttccccgcataagcggtctagtgcaccacttacaagtcccttgtgg

SEQ ID NO: 56076 - DNA, 428 bp, Zea Mays
cacgcactccactctgtcgtggctacttcgtttttttctctttttcccctcaaccattacccttgcacgtgggcccacttttctctctctttcctatgacgttcatggcccactagcagctccaccttgttctcttcttcgttgaatcaatcggcggatcgtagcatcgcgccgactctcgtccatccgtctgccgcgcatcgcctccaatacgccttctcgtctggccgagtgaagaagcaccgtgaaaacctgctctccctcccaactgcacagccggcctcctcgtctcctctctccactatagcagctccgttgactgccattaacaccagcgctcttcctctcctcgcctgcacccgaccctataaaagatagcgccctgctcgctgatcccatccccaccttgcaccaagctcttccctcac

SEQ ID NO: 56077 - DNA, 469 bp, Zea Mays
aagaatcctaataacatgtcacaaacttgggatgcgttgaaatgggtcatgtgggctagattagttccttcttattatgcacgtgatccgttaaataagttgcaacaattgagatagggtgctaaaagtgtagaagaatattatcaggaattacaaaagggtatgttgcattgtaaaatagaggagggtgaggaaccttctatggctagatttttggacgggttaaatagggaaatttaggacatccttgcttataaagattatgataacataacctgtttgtttcatcttgcttgcaaagctaaaagggaagtgcatggatgacatgctagtgcaaggtataatgtttctgtaggaaaatctacaccatggaagcagtgcatgactacgtctatgaccggtcgtacaccaccaccaactccctcaccgagtcaaccggcaccatcgcctttctccaacgataaaccac

SEQ ID NO: 56078 - DNA, 429 bp, Zea Mays
tgtgggcttgacctttgtggtcggtgaacggaggattagggttgaaagagacttggatctttgtgggcgcctcaacgaggaagtagcgcaccttttatggtgtgaccgaaccttgggataaatcttgtgtctcttgtgttcttgttcattgtgtttgttcgtgttcatcgttctctcaccattccgtggaagaattgttcatatctttttggtgtgtggattttgagaagtgccctttttagatctactactttgaaccctgtggatcatctaggacatctcatttacaaagtgaattgggtgaatttcgagatcaattcagttttatatctcattctttagttgagctcgtgcaaactagttgagccggttttgacactggttgaactagttttacccagttcgtttctagtttttgttgaaaaagtt

SEQ ID NO: 56079 - DNA, 826 bp, Zea Mays
cgaagtgcgaactgagtgaagctatagaagagtgattcagatcctttaatgcagttatgaaaagaattggttctcgatatttaattcaagaagcactttcttacaatgtttacaaaactcgaactaggtggaaacttctaaaggatgtgaagacgaaggatggagagcgtgttacattggcctttggcttcaaagatcaatctttgtataaagctccttcggctggatggcttagattaataaagtgtaatgaaatatgtgaaaattacctaactagagaacacgaagatatgtcatcagtcttcggaagctgggagaagcttcggcttaatagagtcgtgaatgctatttgatttgagtacccagattatgaagatcccgcgattaatgccgaaactggggaaaggaaaagagttgctaaaggtgatggtaaaacatcgaagaagactgttgatgctgataaagagaaggatgagtcagacggtggcgaagaaccattttcgggccccgaaaagaagaaagccaagacttcttcgaagaagtctgccactgcgcaagagcaagggaaagggagtgctacaaccacctcttctatgggctgcacacgagttcttgaggtaatgacacaaccattaccattctcccctctaagtcccttgggacttatactaatttggtttgtgccaaccgcaaaggggactaacgaaggaggccaatctttgaaggacaaagaaatttcatatgaagaagtggaaagcccatgcattttggttcttagaggtgctgccttcggaggttcgtcatcctccgaagaagacaatgaaaa

SEQ ID NO: 56080 - DNA, 469 bp, Zea Mays
aaaaaaacagtagagtctgcttcttggccgttgagcgaagggcaggtcgggtgaagccgttggagcggtgcgtgccatgcctgttctgttcattatattggggataattaagctgtcgttttcgctgatgatgatgaaaggcgatttcagcctgatttctcgctccggcctggcgcatgcacataaattggcggagcaaggtgtggttggacgggccatggcgccatgatgcggccgtgtggagccgtgacaacgctaagcacgactgaggtgctaggattagtgctctgcgcgcggtctggaccatgagcccatgagttcaggtctatatatatggcgctagagatttacgctgcaaaactcaatgctagtcttccgtgctcagggtaggggtggaaatatcttctttttttttcatcgctttttatgcctctcagtcgcctgactgctcaggattcgtctataataa

SEQ ID NO: 56081 - DNA, 322 bp, Zea Mays
ccatggactaccataacttcgacattatgcaagcagagacttccaagaaagaacaaagaaggggaggacatgcagtatttgatgcagctacaagtagacatccaaaatagtttgctcacactaaaagaaaacaaagaaaccaacaagtggcggaaggtgtggtcgtcgtacacaagaatagggccgataatcgggcatcaatttacggtttctggcaaaatggtccctttgaactatttgtcgtcctggtacggaaccctacttctgagcacgttgttattcaaagtcttggtttgttgcaaccataagtgtcgcgttgacg

SEQ ID NO: 56082 - DNA, 485 bp, Zea Mays
aaatgatttcaaggcgcgtgaattcagtgagtgaagccaaaaacttacctcaaggagaaggtccaagattccaaagctagaagtaggaagggtgttgttggccatgagaaggatgaagttgtatctttagaagaagggctagtgttagaagccaaagtcgaaggcacacccgcgcatgtaggacctgccaaaggaataaaaaaggctgagaccaaaactagcgaccaagagagcgcttttgcctctgcgctaggcattactcaaattttaagggaaatgactaagcaagtttttgtaacaatgttgagttcgctaggggctaacttggttaactttaccactacatcaaaggaaattaggacaaaggctaccctcaaagaggaaaccacattcaaagataggggtgttgataaagaagaaaccccgaccaaagggggaataaggacaagacaactaaagcaccaaagaagcttccccatatggtg

SEQ ID NO: 56083 - DNA, 823 bp, Zea Mays
ctgaagatgctctgtcataacaattgaagaagaccctgatggtacagtaacaaaaagatcttccgatttagtgtatctcgccgccggtgacgttccaccacgattgacgctggtcgtcgcgatttgtgcgccctagcttgcggataacgactagcagtgaaagatctccacgcagggaaggattggagccttatcaccggactattccctgaaccacttgccgcgcgattgactgaggtgtcctcgccggagctcgccgtcttttgtagccacgccacgtacttagaagagttaccatgtcacagtagataaccgtaagtagccagtccatcgcatgagacgttgccccggtgaacgacacggtagttcgcgccgatgactcacccctatcttcgatcgccgatcttcccctttcaaaattcggagccaccacctccagacactataaattgatggtgctactagcttcgcaaggttgtcaagaagccaggacatccacccctgccctcgattagccaccatagtcggagaattttgttattcccccaaatcagtcggaatctcgctgtgaaggtctctcaccgtggtcagcctgcctcaggttgattcatacccctctgttgaatgttttagcatctctaggatctcctgttgcttgtaggctcgattaattgaactagattgtactgaattgcccagaacaccgtagcttcttctcggtttccacggttgtcatgagcaggcatgctccggcctgaattagtgcaattgaatgagggattagtgtcgccgagggtagaattcgataccggctaagttaggg

SEQ ID NO: 56084 - DNA, 749 bp, Zea Mays
atttgtgttcggtgaaggatgctagcgtggactcactctgaatggtgaatcgttgggactcgaacgtggagactgagacagaaggtttatactagttcgatctcgagcccttatccagtgcagtactgatcgtagtattaccttgggacgtgttacaaccggtgcgtgtgtgggaagaaggagaactttcccttttatagctcaaggttttatagctcaaggtgtaggaccttacagaggagacttgttctctactggtaagagaacaatatgttgccctaggttgacgtaatgctcatgatgtgtccgtagggtcgtgtgtagccgtacttccggtatggtgtattgtcccgctcattcgtcatacgtgtccctgcagcgagtgtacaactaatgtcttcgtagtagtgcgcgatgggttcgtgggtcagtctcatggtgcggccgtgcatagcgcgactttgcttgtcgtcatgagccctatatcacttggcgtgcgtaggcatacacccggtatggtgtatttgtcgtgtcctttctggtatatgagtcactgtagaaactccggtgctaaggcccccatgacaggggttgactggcccctcaaggtagtggggatacacttgggaccgtacgagggggtgtacagttgtgtggatagtgacctcccagcgtacattcggtgtgccgcacgtatgtccagacgtggcctagggatgacacatcttgtccttgctgatgcgggtctg

SEQ ID NO: 56085 - DNA, 439 bp, Zea Mays
ggtgaactcatacaacccatacttggtaatgaatgccgtctttggaatgtctgaaggtcggatcctgagttgatgataacctgacctcatatctatctttgagaacacgctggctcctctcaactggtcgaacagatcttctattctaggcaaggggtacttgttcttaatcgtgacctcattcagaactcgataatcgatacacatccttctggtgccatctttcttctccacgaacaggacaggggcggcccaaggcgaggtgcttggccttatataacctttctctgatagctcatcgatctgcttcttgagttcaactaactctggtctagatactctgtaggctcttttagaaatgggggcggtgccaggaagaagctctatgacaaactcaactttctgctcaagtggcatgcctaggaacacatattggaac

SEQ ID NO: 56086 - DNA, 1083 bp, Zea Mays
gttacagatgagttctgcttatcacccgcaatctgatggtcagacagaatgggtcaatcagtgtatggaaacgtttcttcgctgttttgtcaacgcttgtcctttgaaatggcttaagtggttacccttggcagagtactggtataataccagctagcacacttcacttggccgctccccttttgaagttctctatggacattctcctcatcactttgggcttactgcacttgatgcttgcaccagtccggatgttactagctggctatccgagagggctattatgactgaattggttaaccagcatttgcaccgtgctcaactccgcatgaagaaacaagctaacaaaaacaagtctgaacgtaccttttcggtaggcgattcagtgtttgtcaagctttagccttatgttcaaagttcactgtctcggcgttcttcccagaagctatcctttagatattttgggtcgtttactattgtctccagaattggtactgttgcttacaagttgcttttgccagaatcatcctccattcacccagtgtttcatgtttcgcagctcaagccggcaaacaagcgccctgagcaggtcagctagctttgctagatatttcacatgacttgcaggttccaatgcaggttcttctggaacgccacgtccgtcgcaacgacggcatagttcaataagcactgatcgtctggtcacatcttcctcgtgagctggccacctgggaagatgttgctcgggttcgccaagaattccctgctgtacctgcttgggggcaagcagatatccaagggggagggggtgttacgtccactactcctgagtcggcgtgccgctcttctgagattgaagcccaagtcgcacaaggagacccaagaaggggaagtcgtgtccgcaggcccagttctcacggcccagttctcgtttagagggttttgtgtagcctagaggacaattgtaagggagagagttaaaaggcgactgctattgtttggatgcagacttaacaatacgaataaaaaaatcctgcagattccgccgtcctccctcctttcttcttccttgagacttctacc

SEQ ID NO: 56087 - DNA, 662 bp, Zea Mays
accatgcgcaatttggctacaacatcccaaacgcgtgcaagaacactagtttctagttttaaccacatggttgttccattaatcattttaactatttaatcagcatcgaccgacttaaccttcatctcgacggtccaagcaccacaattcacgaaagtctacctagacatctagcatcacatagagagcctaccatctcacattgcaattcatacagaaccgcaaggtgtcaatagtaacacacaagtaatcgacctttttctacgactttcagttaggtcaccaaccgacgacatgatgactacgaaggcatgtcaccatttcatcacacccattcatcgcctatatgcgcactcattcttttcttgcaacacatgcactcaaaatcaatccacactacacaaaatacacttatctcttatttatgcgtagacttaacacctttcgggataaagcgtcactataaaaacctcacacataattgccttaggaacctattagttcactcgaagacatctattcaagttataaacacaaccatacacttatttgcgaagcacaatttaaggaatgcctaacgcgtatagactcgacttataattatagaggaagtgatgactacttacggcatatcattacctctctacataagacaaaacaat

SEQ ID NO: 56088 - DNA, 348 bp, Zea Mays
gcctaattaaaatttatcgagtaagtgaatacgaatttggaacctcgtcccactcttgtgatttttgacccaagtaaattttattagaactcaacaacaagagtattaatgcgagactaaactggagcgatattgagtattcgtaattaatcggtttccctattcagactgcggatgaaattatttgatttcaaatcaaatcgaatacaacctaaaatacggaagctgatctcgtttggttcgatctgtgtgtttttcgcccatatcaatatcttcatataaatagctggtaaaactttatctgattctgagagtatccatcaattaaacaccatccaaatattatcg

SEQ ID NO: 56089 - DNA, 373 bp, Zea Mays
gacttatcccaccatgatcatgatctaacccaaattaattggatcttgtctagtcaaagttagtcatatttagatctaatctaatgtgatagattaatctaacctaatgaaggctaacctcaagatgagctaatgtaatgtaagttgcttaacaagaaggataatactgatgaaataaatgagactctactcctataaaatatgttttaacttaattcactctgcactaagttaagaatgaccgaccgactcggcctcatgcaactaccttgaccatctaatagttgcataactcctctgttttaacctaacagagattctgatctacctacatcatataatccatcttatctcaaaagattctaatatatcc

SEQ ID NO: 56090 - DNA, 485 bp, Zea Mays
atagctcattagtactctcatagaaactatgccacaaccagatcaacaggagaactcacactccaccgcccatagctcatttgtaacccttgtaaaccaataatactcaaatactaatcctcgatagtaagcagtgttttacgcattccagcggcccgaacctgtataaattcttgtgtgatccgacgtgcatccacacgtaccatcgagtcgcgatcaacagcgtcatcttgtccaaaagcatcatgtggggaaccccgtggagcgcagtcgggtcataaacaccaacaactggtgcgccaggtaggggtgcgacgttgattcacgacgactacatggctatcatcttcaacaccccgataatcttgaatgcaggggaggttttcgctttagatcactctcttgcatgtggatccagaggagaaaatcaatctactttcctgttgttgtcatctgtcgaagtgttgctttgcactgatctgttt

SEQ ID NO: 56091 - DNA, 318 bp, Zea Mays
ccatccccgacgtagacgagcctacttcgaaggacctcatcgacggagaccgcgtcttcgccctacaggctctaaacaaataccaagctcaaacaaaagcatggcgcgaccacacagccatcccgagggaattcagcgaaggagacctcgtactcgtccggacagctcagacagaggcccggggcaagctagagccaaagtgggagggccctttcattgtcaggacgaaggcgtcccccagcgcgtacaggctcgcaacgccatccggcgaagagcattcttggaacattgacaatctccgcaaattttttgtttgac

SEQ ID NO: 56092 - DNA, 565 bp, Zea Mays
gcatttcgttcaatttcccaccaaatggctgatgataagaaggttgttgatcctaccctggctggtttttatgaggccatggaaaaacaaacacagagaagattacaaacgagatactagctgatttgtttgaagattcagatgatagtgggagctttgatatggaaagtgaagacgaagatgcagaaaatcggccctagcgaccaagtcacactatcttcggaaaatcatccattaagcaaagtcacattgacgctatgaaagagagatatttctgagatatttcaattgtgagagctagaggagatagcgttgcacctgctcccgaagaggatgaggtggttgtttataggagttttatgaaggcagggcttcgtttcccattaagcagattcctggtcgaagtgctgaagaccttcgaaattttcctacatcaaattaccctcgaagccattattaggatggggttttttatttgggccgtgagaagcgaggggttgcagccaagcgcaaaatgcttctacaacatgcatgagctgttgtacgagacgaaggctactggcaa

SEQ ID NO: 56093 - DNA, 1245 bp, Zea Mays
gttaggtttcggaatccacacatgcttctaatgtggggattttggaggttctttaaacactccatcttcagtattaaacttgagggtcttatgtaaaatgattttgattagtttaggggtagtagatgtggttggtctctcactagacttcaaaccattataatatcccaattttcatacagcttgttacacccattgccctcaacaataaagcctaactctagtccaccaacaccacacttgaattatttgaccatcaccctaactatggttctctactggacactcaactcaagatggtttgaggtatgtgttttcttccttagaatgcattttatcatgtcaacaagactcaagctctagcactaggccatcatacagtgcacacttagaagcaggcagagtatctcagctagcttgttcaaaaaaatatcatatgattcttctttgctagcttagaatgcaaagcaggacaatattttcatatacccaacaacctaggcctagacttcaactcatcatgctcatcaagcaaagtgacatacatggttgggaaggtggatatgttttacatgtatatatcataagcatcacacttagtctcgtcaggcactatgacaacaaccttagcaaactcaagctcgctaaacatattgtctaacttggtcttaaatgcgttcctctattgagtaacatgcttaagaaacttatcatgactaagcaaggtggtattcatagcaagctcatttgtggaaagagataccttagatctagagtcaccgttgttgtcgctccctacctcatgccaagcaccatggtgcagaatcatcccttggtggagtcaaaaagtactagtttatatcttgaagagtatgaggagtgatcatcactagagtcgatgtcaaggtcgctgagggaggtgaggaaatcatgctcttgggacttggccttattgaggtacttctacttgagcgcctcattgtcgaacctcccttagatgtgtgcttgttttatgtgtaattgcacttgctaatggtgtcattgcccttcatattggagcagttggtgatgaagtggttggatgctctatagttgatgcaaccttccttctaaccaccacaccatcgatttatgcggctgttatggaacatcatgaactagttgatgaccaatactagtgtgtcgtcattgagtgcctcaacctgctcctctataacaaaaaccaaagaagtagagcaaacaaag

SEQ ID NO: 56094 - DNA, 426 bp, Zea Mays
cttaacgacgatgagtgtgtctctcagatagaattgaaggagatgatgcgcgcgatgactgaagcttttaaaaaaataccaggactctgcctctacatcatatgagcagcttgatcgacaagttgctgaacttgttacacgcatggacatactggaggctcgtcccccaccaccaactctagccctagctcactctcctgtggacgacgacgacgatgacgatgatgtttatgcaccgctgcgacaacgcctcgcacgtaatcgacaaggtattggaggtaatggtagacatcgtcatcataatcctgaactagactatgatccatttgctaagattaagttctctattccaccattcataggtttttatgatgctaaagcttacttagattgggagatgacggtagaacaaaaatttaattccca

SEQ ID NO: 56095 - DNA, 483 bp, Zea Mays
ggagtaacgcattcatttattattgcatcatgggtagaaccacataatcttccaataactaccatgtcaacccccatccaaattgactcagccggtggtagaatctgagccgatagcatttgcttgaatgtaagtgtggaaataagggggatagtgtttcccgctaatctcatagtaatgggtactcagggaatagatgtcatccttgggatgaattggctagataagtatcaagcaatttcagttgtgataagaggataattaagttggtgtccccactaggagaagaagtggtagtcgagttaatctcacctgagccaaggaaaggaggttttcatcagatggctatgatagcaaggagccagattcactcaagattatcaaggttgtgtccgaattctcagatgtgttcctggaagacttaccaggtatgccacctgagcggaaagttgagtttgccatagagcttcttcctagcactgc

SEQ ID NO: 56096 - DNA, 463 bp, Zea Mays
tgtgacgcatcaggtagtgtactcggatgtgtcctaaagcaagagggtcgagtcatagcttatacttcaagacaactacgccggcatgaggagcactatccaactcatgatttggaattagctgcagttgttcatgccctcaagatatggcatcattatctgttgggaaatacttgccatttatatacagatcataaaagtctgaaatatatctttacccagtcagaactgaacatgaggcaaataagatggcttgagctaattaacgattatgacttagaaatccactatcacccaggaaaagccaatgtggtggcagatgcactgagttgcaaagcttcttgtcattgtcttaccgcaagggcctctaacaccacactatgtcaagaaatggaaaagttaaacctgggtatgatacaacatggaactttgactcaattaaagcttgagtcagttcttctac

SEQ ID NO: 56097 - DNA, 584 bp, Zea Mays
attcttttaagtggggtagtgttcttggcagacttaaccgtcttgccatcccaaggaattgatgtgatcttaggaatggattggttaaccaagcacaaaggcatcataagttgcgcaaacaagacagtccttctcacagaccaccaaggaaagtcagtctcttgtcaggctcagccacccgccaatgatccaatggtgtttaatgtagcaacagaaagcgtatcagtggtagaagaattcatggatgtgtttccagaagagttgccaggaatgtcgccagaaagagaagtggagttctacatagatctgatccctggtacggcacccatcacaaagaggccataccgcatggctcctaccgagttagcagaattaaaactccaaatcacagatctgcaacaaaagggtacattcgtcccagctcatccccttggggagcaccagtcctttttgtcactaagaaggatggaagtgggaggaaataggcatggattttgtaaccagactaccccggacgcaaaaagggaacgactctatctgggtaataatagaccgtcttaccaaggtagcccacttcatcccgg

SEQ ID NO: 56098 - DNA, 544 bp, Zea Mays
ccaagaagactgctgtcggctttgggttcttacccatcggaacacaagagaatgggagagaatcaagggattgagcaagttcttggtaagttggttgaattgttgtcagcaagaagggacgaagctccatcttcaagtaaggaaaatattgtccatatagaaccagttcagaagctagagctgatgccaaatgaggttaaactggagggggtaaagaattatttagcttggtctaggagagccttgcgattattgaaagcaaaaagactcgagggctatgttgatggaactgtcgttgagcccaaagacaagccaagtgctgaatggaaggattgggatgctataaactctttggtagcagcatggatgttaagttctatgatcccagcaattgctagcactgttgatacaattataagtgctgcagaaatgtggaaagcgcttgaagaaatgtattcgggagctggaaatgttatgttgatggtggagactgaagatcgcctccataatatcaaacagggggagcgaactgtggcggagtatg

SEQ ID NO: 56099 - DNA, 1363 bp, Zea Mays
gccaacccgcattgtggcagcggagcacagtggtggacaagacaacaatcatgtccagcgcagcgacatgattacgcctacacaaacagtgcacgcatgccacttgacgcccttcgatgggacacctaatatgacaagccgacctaactagccttcggatgcaatttctccacctcgcccaacgtcaagctcagccctcaagtggattctccgcctcgctcgagctcgacctcggccaccaactacgccgtgaatcccgtagatagccactctacacgtctatagcgcacatcgaaggacgactcggcaaaaagcctcagcaagacttccgcatcaaccgagcaagggcgttgatctcgatgaatgcagtagggaatctcgatgtcatcacacactaggacaatgacacaccccgtaagaagcctttggcccataccccgacgctgcatgttacagccactacggcatgggcagcctctcccttaggagctcgggcatacagatgatccctcagtctcggcctcagctctctacaggaagtcagcaggcacgaatcaactacacagtttgccatcacgtcagacgccaggcatctctccttcaaatacaagacccgacttcactaaggacgctccccttggtgtataaatagggcaatggtccctccacgagggaaggatcgatcgatcgacgacatcgacatacacacgacactcgtagacgaacgctcgctctctcattctgtcttagatattggcacttgcctcaatcctctctagggacttggtgacttcccctctcctgccttgcttgtaaacccctactataggcaccacagtgcaagtaatataagcctcatcctctctactggaaatagggccttgagtagcccgaatcaggataatcgcttgtgtctactcgcacaccatctagagttggccacgcaacacatttaatggttggttaaggacccgcggtccaaacaccgacactcactataaaatttaatttcatctctacatttaccaacctcattgggactcctaaagtccatcacaaaagcctactcctaccactatttcgtgttgtcccaccgccccgcaaccacaaatccatcttcacctccccagataccttgatgccaccaccactagacaacctcttgtgtcgagacgtcgcagagcaccttctgttctgcctccatgacgtcgcagcgaggacctcggtggatggcgtgtgcctattgctgcgaccatcttgcattctgttgatagctttctcctctcaagacgtcatggaaggttgttgatgaagatttctatagccatcttaattaaaaatagaaagcatgtccacttatttt

SEQ ID NO: 56100 - DNA, 915 bp, Zea Mays
tggaaatgggataaaaatagacatgaaactggcctgtcagtcgactttgacactgaatcaggtctgacagtgatctagggctgattttgggagctattttgagtatgatccagtaaatatttgtgtatgattgctataacaaaatcaaagctggactataggacaccaactttgttacagatagattaagtagttgccacatgaaaatcaaagatcaacgccctgcaaatcgctctgtcaggtgctctcatgggggttctaatggtacagtgcctcacaaagatcagtagatgcagtgtatctcgccgtcgatgaccccgcgccgcgatcctcgctggtgctacgatttgtgcccggtagcgtgaggataacgatgtttgataaaagatcttagcgctggatgagcttggacccgaccactaaactattcactgtacccacttgttgtacgactaaccgcggtgtcctcactggagttcgccgtcttcgtacctgcgccacgtgcctaggagcattaccacgtcgcagtgaaccgtaatagggagtttgtccatcgtcgggagccttgcctcagtaaaagccacgttagcgcttctcggtgatttcccctctctccggtcgatagcgcgccttctccaaattagacgccaccgccattgctctctataaattgatgcccccgtgagctccgctaggttattacgcacccagtgcactagctctcgtcccagatcattcaccatagcgtcccaatttcccatttccccaaaatcggatctccgcgccgccgtgagcactacaccgtgaaccgctgtctctaggtccgttctcgtttcccctacccttgcacgctcaggatgctggttgacccaaccaattgaactagaccatgctagatcgccgggaacacctcgg

SEQ ID NO: 56101 - DNA, 677 bp, Zea Mays
cccgagcgccagactcaaattcgttcggccctcgcgaaattgacgatgcccagagcctgattcacccatcaattgctaccgccatccatcgtaggacccggcccacagtgcaccgcgccagcatcacccgctaccccgaattgacacacgagccatggctaattgagtgcaatacaactgacaaaccgaggaattaacggtgtttctcatacctaattgcgcagcagaggttctccggccccggtggatagttggaggtcgagattccgcgacaacgacgaggaacttcagagagtcgcaacccaatttgtgtgtgtaggggtcttggtttgcttcctgtcgtactgaagactccaatccgcgacaaaccgaacccacacgatgtgagtgcggtgacggtgccgctcgcaagctctcaatctctctcttcctctcctcggatttctttctccatcgattttgcgttggcgctcggttccagctcagatgtgacgaaacggggaggccgaagtggtcgtggctggtggctttgtactagcgatgcaggtcgggatggctgtaacggccccgaagctcacggcgcgacgcggcatgcgcggagcgagagacgcgcggagaagacggacacattctgttgaagggaggctgacgaggcgatcccacgtaccagtgacaag

SEQ ID NO: 56102 - DNA, 687 bp, Zea Mays
taggtacactgctgtgccagtaaccgttggattcgattttaacggtgaagattttattatcctagatctaaccctggccgctggatcagagatccatgacccagatcaaaagatatcatggctgattcttaacggtccgatctagatcgagggttcggattcaatctcgaagggggtatgcccgggatccaatctcagtcgtacactctacatcctacggctcacactgattcacccccatcccaccctttttccttggcccgcatagcggcgacgccgtccagcatggcggcgccatggctgtgcatgctaagcaacggtcccaaggccaaaagtccaatcggagtagtactacgcgaggcggttacgatcacgagcataaagagataagtctcaccggttatcgcggcgtggagggcaccggccacggtgcagcacggaccgcggcggagcagaggcattggagagcaattccggcggctatagggtccttccctctcccctgacgcccccataagcttccctgcatatcgccgaaccccaccgtacaccaatcgagcccccagcaacgatatgtctccaattagccgacggtggcgcgacgacaacccatccaccctccgccaacatcgatggtggccaggatagtcaactgctgggggtaacacccgattggttgggtccagg

SEQ ID NO: 56103 - DNA, 722 bp, Zea Mays
ggtgtgcaccagacactgcactgtgcaatgtccggtgcaccggcagccgcgcgctaaattatcattctcctgtgcgttgtccggtggttcaccggacaactactgtgcgctgtccggtgtgcaccggacaggcactgtaaactgtccggtgtgcactggacaggcactgtagactgtccggtgcgcccatactcggtttttaaaaaattctttcccctctcgcgcccgaggcaggcagtcttcctctctgttctctaccactggtctctgtctcaggcgatttccaccctcgccggcgatctcccctccccggcggcgatcctccggcgaccctgtacctgccctgcccttctctcggtgagcagtcccatttccccttcagctttcctccctctctgttctgttgagcagaggctcttcttcccaccttttgcgcaaatttcaaatctctatgaattccagtgaaatcatgtggtgaaatgtgttcctctgtgtgccttgaacatccctgcaggttcctagctccttcgggagggttttcccacctcaaatagccatttccctaaaaccctaaatcctcgcacaccacgtgttcggtgaaatgcccaaacccgccaaaaatgttccaattgaacccaaatttttcaggcactttcaccacacctccagtaacatattcgccaaatttcacgctcatccgatattccaggctttaatttcac

SEQ ID NO: 56104 - DNA, 775 bp, Zea Mays
gggaaaaggggtggccacctagggttttgtgggagaaagaaacgacacctcagatgacttctgactttgcatccaacggcccacaaccctttctctcatccacacaccaaagatcaacttttggtcaacattttttgggatactacagatgtgctcttgtgggtgagtggtgagcgctggtgcatcgccttggctgggcagggcaccagtggtcggttggccggtaggtgagagagggagttgggtatgcacgcgatagaagcttatgggaggttgaagacgcacggtcgccgttcgatctcatttgggcgactgagattagaactggagcatttcttcgtgtagttgaacgagggcagtcagatcgggatcggacgacatcggttagatcagaaaccacaaaatttgggccatcatatctccatccaacggtcagcgcagcataccctttagcaatctaatcttcaccatgcattataaatcatgtggcccgagatcttgagataccccttcggccaagcatttttacataagaaatcctatgttttttagtaaatgaacccgccgtcctatttcagtagaaataattaacaccgagccctagaatttgcagttgaacccctgtactatctagatttgatgcccacggtccaaaagtcatttaaatgtaaaactaaatagagaaaactgatttttagtataaaaacaaatttaaggagtttataaaattcataacttgaccattttaactcctttttggcccattccagttgca

SEQ ID NO: 56105 - DNA, 538 bp, Zea Mays
ccttcttgcattagcacacatccaagtccaaggtgtgatgcatcgcaatacacatcaaatcccttgtgaatgtctggcattaccaatattggtgcagtagttaaccttttcttgagttcctcaaaacaattctggcatgcttcatcccacttgaactctttacctttctctagtagtgaggtaagaggtttcactaacttggaaaaacctttaataaatcttctgtagtatcctgccaatccaagaaaacttcagatcttggacgcatcctttggttgcttccaatttaatatctcacttatctttcctgggtccactttaattccaccatcagtaacaatatgtcctaagaaagcaacttccttcaaccaaaaatcacacttcgagaactttgcatacaattggttgtcacgaaacttttgtaggactagccttagatgatcttcatgtgtctcttcattcggagagtatatcagtatgtcgtcaatgaatacgactacaaactgatccagatattccatgaatactttattcatca

SEQ ID NO: 56106 - DNA, 605 bp, Zea Mays
tcgttgtccttgattcacaattcctagaacttctattattgactcccataatgtttcaatacaaagcgaagtcttgtagtgggatccccatcttgtatctctaggtctagccaatgtagtttcttggttttgtcctcttccaaatgaaatctcaccatgattcagtttatccacaagaattttatgatgtttatcaagcaatacatccattctcttgcaagatccacaaacaatgttcataatcaaggtgacattcaaaaaatactcaatagttgggcaacatcttacgatagaaataacaaccaactacaattggtgagcaaaacaatggacatagaaagcttaggggttgtcatcacaattagcttttgaacaccattgaattcacctctcatattagaagctctatcataaccttgccctcgtattcttgcaatagctaaactgtggtcactaagcaccacaaccactcctttctttattgcctcagatgtagtatctttgactagggatgtcaacgggtcggattcgggtcgggtataataaatacccgtccgtgaccgtacccgcgggtattagccatacctgcccgcaactgtacccgc

SEQ ID NO: 56107 - DNA, 364 bp, Zea Mays
ctattacgtgtgggtccggagcacatcaccttcatccgttcacttggctgttcgttcttgcattcgaacgccgcctgctgcctcgacaccgcgctagctcgcctgtaagctgtctcctcgcctccgtgcgcgtctcctcgcttctgtggagcacgccagtgtgcttcgtcctgtcctctgctctcccgcactcatgcgctgctagtaactgccatacaccattgatgctcgctagtgccgcttgcctcctctgctcagctgtcgtgctgcctgtccgtctcccacattgcatttactgcttcgcgcgtaattattggtggctggcgcaaccgttctttctctccggcgtcctctcctcttcttc

SEQ ID NO: 56108 - DNA, 1060 bp, Zea Mays
ttttggttccattgcgagggagaagggaggagcgacaacagcgagcattcggcgacttgaggcatgctcgcgggagcgcgtggagtggcggcttgatggagtagatcacgaagctttcttatgcagagcgtgatggcgtgatggagcagagcacaatgcgcacagatgggaggttgttcgcggcttcaagatgaggattgcaggcggcatgggcctatgcggctagcgacggatgggggtcgatttgttcatggacggatgaggctgttggcggcagatggggaaggggtttgttcacggatcccgaatgagtctgctggcagcggatgcgcacatggggtgggagggtggatgagtcggcggttgcgttagaaggagtggtagcagctcgggctgggagacggggacggtgattattggtggatcaggcgggtggagggccgaggcacgctgatggacggtcctgatttgatggctatatatggtcgtgctagattcatggaaggcagaacaaggaggtggcagactacccttgcagccttaatatagtagtatagatatgaggttgctatcaagtctctgttggcttttgttgtttagcatgctgctactataaccatgactgttttcgagcttcggctttttgatgtaaccaaagctgagatggccgaagacaagaagagtgaggaccccgcactagctagattttacgaagctatggagagaaccaatgttgagaaataaatcgatgagattttagctgggctgtctgaagattctagagacaacgaagattttgatgttgacagcaataatgatgatgccgaagatcatccgtggaggccaagccacgtggtgttcggaaaatcaaccgtgaagaaagggcatgttgaggctatgaagggtaaatattttcatgatgtatctatagtgagaatcggtagtgataatattgttcctcttcctgagaaagatggggtagtgaattttcgaagcttcatgaaagctgggctactattccccttacacaagatgttggttgaagtcttgaaaaagtttg

SEQ ID NO: 56109 - DNA, 481 bp, Zea Mays
cttacctgttcaaacaattgtgtttaagatgatgtgcgtgccaccctttctgtgacccaactttcacagttgaaatattctcttcttggctgtaaggttgcctgttcatgaagtaaaactccaaagaaagttcttgtctttgtggacaagatatgcctttttttttaccctgtgtttctgacgaccagggaagtgaagtgatcgtgtgggttttcgtggcatgtgttcatacgtgttccagaacaattgcttggatgttatgcccttgacaaattcagctgacaaagatttgatgtgctacttttacctggtcgcaaaagaactggttttccaagcagcgactgtatcaatccacaataaataaatctccgaggagtaaaatacttctattgattttcaaagcagtggctatgtccaaaattcatgcaaactagggaagatgacaaaagttacttatcttttactacaattattattttct

SEQ ID NO: 56110 - DNA, 514 bp, Zea Mays
ccttaagagctctcagcgcttcactaagcttcgtattcttctcagcttcaaccttaagtgtcattttcaaagtttcagattcacggttgaattggctggagctctcttccaaaagtgtttaagcatccgccaactctttgcccaacgtcttattctcagcttgcgctttagcaagggatccttcggctgagcacaacaactcatcgttttcttttaaggaatcctcaagttttttgatcttatcttccaaacccttgacggtaacttcgtttttcctgtcctcgtcatcttgttgcacctttaaagctttgctcagtaacaaactctgtgaaaacaaactcaaagttagaatactcaagctattacggacatatcaaagataacttgtaaaaatgttcttactttgaagttagaataaaacaggctgcctatgatatgctgacgcctatagcagctgatgtccttttcgagcttcgggaatccaacactcttagatagggtacttataatttta

SEQ ID NO: 56111 - DNA, 483 bp, Zea Mays
gtcacaatgggcctccgtggagcagcacaaccaggacgcctgccggacctccacgaagaggaactaccagcgacgcaagaagcagaagattcgacttccatgtgcggaaaaaggaagcagagctggagggaagtaattgaggttgtttcaggcggctgttgtcagcgacggagaggaatggcgattggacgcaacggcggccacccataggtcgtaggtgtggaagaagctatgggggcaaagcttcacagcaatggcggccacgagcgctaggggcctaaatgcaaatatgccggcgccaggggcttggcctgcatatcaaccaaagcactgaactactaatcataaatgaaactaaaatgcaaatgaactaaggaagaggcaagaaacaaatgatgagctgcagtatgggagggctgcaactgcagaacctaaatactagcaaaggatcagcaggggaaaaatatgctagcaagacattgg

SEQ ID NO: 56112 - DNA, 327 bp, Zea Mays
gacgagctctcattattgtaatagctgttagaatcttactttgatgcatgcatggcttgaatgccataaacacttttataatgagcttgaatgtgcttttactctttctattcaactatgtttcattcctcatcatttcttgtgtatggtgttgattgttctctctaaatatgttgcaaattgacatatcaagtcaatgttaatatcacaaaactcatgcacatatttagggggagctacacatacacaaaagattttatatcacaagtacttgtaacttttaattcttatttctattctagtttgttttggcatcaatcaccaaaa

SEQ ID NO: 56113 - DNA, 409 bp, Zea Mays
aaaggacaactgcgccgttttgaaggctcagcgcaacaaggctatggacaaagccattcgtgttgggtggatcttgatgaggaggcccggggtagtggtgcctgacgatattgttgtcgatgtcaaggctgcgcccgatgcttcgagtcttccttcctcttccgttgctcctgtgaaagacattgctaacaaagatgttttgatgcagtgatgtcctgcgaattagtcgatgtaatatgaattcaatgtgcatgtgatggttatgttagaactcaaatattttgtgcacggggtgccagaacatgcccctggtgtcaacaagtaaaacgttctcttttttctagagcgctaattgttttgctgctaggttatgaaggtcaccctgaacaattgtgtaaacaagtgtgcc

SEQ ID NO: 56114 - DNA, 372 bp, Zea Mays
gtttacaactcagtaaagcacaagagaggagagggagtacaacaatgcaacacaagagagaatatcacaagagcgcaaagacacaaagtcgcaagaaaaactcaaaaacaacgctcggatcttaataaaatgactagaatgcattatggcagtatgtcagagtgatgtgttgctcttggagtctttgggttctaaagagatgcgcaacgggggtccttttatagccccaaatggctctatagttgttgccccttccaaagaaaacttgctaaatttttgcagtctgcggggggcacctgaccggtctggtgagccaccgaactgagtcctatagccccatccccgaaatctgactaggagccttcctttgtt

SEQ ID NO: 56115 - DNA, 555 bp, Zea Mays
gttcgagtcctcggacaacgccatgggggacactagagcgggcgaccaatcatactcagaggaaacttcctccgagtacttcgagtcaccaaagtcctccgagggtggactctgaggatgcttgctcttgttgtcaacgcggtgaggccatcccttgccccccctcttgcctctgcccatggtcgtacagaagggggagaagcgaggaagaagaagagagcaagtgatcaagggcgagtgaagaaagcagccagggcaagcggactatttaaagaggccgaggggtgaccgtccactttctaccccgctcaccgaacagtcgcaagaattcaataagaaattcaagccgcctaaaaatgagtcaggcaactgacacggtttcgtgtaacatggcactggttggactcaagtgaactgctcaggcaaatgattacacccctccgtcacatcaaattactacttcagtacaacgcgataaacacctttcgcgaggcagacaccctttgggcacacacattgggtgtatcgcccggaatcctcaatattttctaaaga

SEQ ID NO: 56116 - DNA, 847 bp, Zea Mays
ttacttttgataaccctatagtaagattgtcgatcgttagacaccgatagaaggaaattcatgagctttgaacaaggcaacctacctctgagatttggatgaccctttgtccattaagatcatgcttaaaccttgctcttctttgcttccaagtgggaaaggtgaatttaggccaagattaataatctcttgaaaaaaattatacggatttggagagtaatttgaggaatacatgagatgtttgagttagaggaacttggagcaactagcaaccttcatctttcgttcaaagttaggatttgaagtaagaattagggaggatgaaaaggggatttattgagctcacctaagaatggatataaaggtggcgctcgccaccttctccatgagatgctgatgttagatattcattgatatttttcttcttttctttctcttctttaccttccctctcatgttcttgtttgctcttgacttctccacttgtgagagagagcatgagtgagtgagtgagagtaggtgaatgggagagctggaccagtagatggagttaccccattttgagattataggtagggccaagatgaagggagagagatagctcatccaaattgattttgctgactaagtgatttaatagacagttcgtcaggaaggtagactatctaaaagaagaccgaattaggattttggaattgaaggaagatggatcttgaagccattagttccaattgtacagttgttagaaaccttcatagagttggggtacttcttgggtgatatcttgaagaatttcactgagtcaactataaagttgactaaggatgaactagttgacttgggttga

SEQ ID NO: 56117 - DNA, 276 bp, Zea Mays
aggacgagggccatcccactgaccataccactatagggcacagacacatctcatatgaccacaacaacaacataacaacccttgttctcctgagcctcctccttgcaataaaacgagaagcccggggccttctatggggggacttcacggttcacgacccacctcacttatgatattggcactcgcctcaattatacttagagacttgggactcgctccatctctcgacttgcttgtatcccctactacaagcacttaggtgcaagataatactag

SEQ ID NO: 56118 - DNA, 351 bp, Zea Mays
ctgacgatgagtagctaggcctgcgtggagaaaacgagggttccgctggggagcgggttgtaatatacctttgattttgtaagatactctttaggtactacttaccgggtgatattacaacttatttgtacgccactttttctttgttgtgtgcactgttactaacttcttccttggtacttggcccccctaggatatggcctcgacgtgtcggggctggatgccaggattcttaagtagtaactggtgtcgtgacccccaaggggcgctcccaactgggactcgacctgcacacattcttggctaggaatttttagtagtgcacccatagggtccaccagctggtattcc

SEQ ID NO: 56119 - DNA, 546 bp, Zea Mays
gtcaaaaaggagttaaaatgaataacttatgaattaaacaagtttctagaatttttttatactagaatcattttaaatattaattaactatttcctgataacctatggaccacgaacacaaaaaacagggagttcgaggttgtttttgttaatttctaggaacttacagtaattactttacgccgtgtgtggatggcgggttaaattatccagagtctagggtctttcttgcaagaatacttgcggacgaccgaacaggggtacatggcgcccaacgattggctggaatcgtgccacatcagggtacacacgattggggcgcacgagatccgattcgcactgaatccccaccactggcgcacgtgcacttaaatggagccccatccggaccactagatcagcgatcaacgacctgggtttaatgccgtgaaggggtatccctcgcttcttatcagagccgttagcgcaaggatcaacggctccagcaaccccgacgttactttgcgcccgcaatcgccgccggagtacagcccccaagcgttacgg

SEQ ID NO: 56120 - DNA, 525 bp, Zea Mays
cttcattggacctttcttgatcttaaagcaagtgggagaagttgcatatcaactagaactacccaatcatcttgtggatgtacatgatgtattccatgtatctcagctgaagaagtgcctcagggtatctgaagagcagctaccaatggaggatcttagtgttcaagatgatctgacttatgctgagtatcctatcaagattcttgatacactgactcgagttacaagaaataaggttataaagatgtgcaaagtgcaatggagtcaccacggagaagatgaagcaacttgggaaagagaagaagagcttcgcatagattttccgcatcttttccctagtccttcctaaatctcgaggacgagatttctgttaaggggggtaggatttgtaatactcaaaaatgtaaattttaaaatacaattgatttacacacatgttttgcctctgtttaatataacaggtgaatcaacacttccaaagtcattaattagctagtgacacttaaattaatatgtgcaccatgc

SEQ ID NO: 56121 - DNA, 373 bp, Zea Mays
ctccatactgtttggtctcaggggccgaatggtctacgaatgggcctgcgaactgtagccctctgtgctaaactccagattgttcagtctcggggctcggattgtccgtgacctggtataatgttttgggtgtgtcaaccattgttcacttgtggttcagccgattttccgtcgctctaacattacatgagtaaagccttatctacatacacttatgaactgttaatctaaaaatcaactcttgtcaaacattttgcagtttaataagtccagagtacaggggcatcggccatagcaatgcaagccaatgtgtctgcatgttctatttctacttcatcgcctacccattgcagtaacatttgatgtaaagtag

SEQ ID NO: 56122 - DNA, 285 bp, Zea Mays
cttaaaagaatcctgacttgggagcatttgaggtggcataaaaggtctgaccctggggttcgggtgaccaagggaatttctatatgtgcagtgggaatgccatgcttttccacaaaaccagtggctatgaatgaatgagatgctcctgaatcaaaaagtacagcagcgggagtaaattcaactaggaactcaccgagcactactcccggggcttgctgagcctcttgagcgtcgacgtggtttactcgtgccctgccatgatactgggtcttgcttagctggccg

SEQ ID NO: 56123 - DNA, 395 bp, Zea Mays
atgaaactggaatagttcattcgcttgaagcaaggaggaaactcggtgatgcaataccccaccaaattgaaccatctctcccattatgctatagagcaagttgacacagacctggaaaagaagaattgtttcatgagaggtctgaatgatcgattacaacgaaagatggccacttgcctagatctcacttacagcagggccgtgagcacagctctttcagtggaagccaagaatcggggtagggaaagacaaaaagatttgggcgtgaagggggtgaaggatcctctcaaggatccgagaatcggtcgaggttggtaattcgtccttttaacccaaatcgctcttttcctcgtccacccgcctatcctttcaagcaaccagttttcatccgtccc

SEQ ID NO: 56124 - DNA, 572 bp, Zea Mays
cagcaaacatcctcttaatgctctggtcgtccctaagtaacccttgagcatctatcttaagcgatcttcgtcccgctatcaatgttattaggccctttctcgaaccaccgtacacaatgcagttcaattcttaatttttcacttttttattatgggcagtcgggagaagcacggtcaccgcaccacgaattaagcgtggacttcatactccgtgctcgcggtctgaatgtctgatcaaacgctcatctgctaaacaatccacttccaggcaaatggcagtgcctcctgatgggatgagcaagaggaaccatacgattagcagcaatcagtcaagtcattgttagtacgccgaacttttacgagatcaaattaggtcaagatatgtcgctgtaattgtcgaggtgcgaaccgagagaacgcaacacacattcagtattcaaaatcatacgcgcacattgcagaaattaccttgcaatatatcgatcacatcatgtatccgaaactgaattgaaacccaatggaggcggctcatcatggggccagtggcgccgcagaacgcggtggtggagggt

SEQ ID NO: 56125 - DNA, 420 bp, Zea Mays
tgacgatagaagaaggatgggaggggtgaggaggatgggagtgagataacatgttggcagtgggagttgtgtcgaacgacgtgccggagttgaccacccaattggtgggagagggagggctggcgaaggcatgggtgcgaggggagagccaagggaggtgcccctaagaagccactaggatgggagcagggtcgggggtcttgatcaacaagaggcaatcacttagtgggaaaaacaagaggcccagtttcgtggtgacttgcctaagggtgtagctcaacgcggtcacgaagaacaggattcatgacgcgatcaaaggcaacgaaggtgccccagataatctgaccgtcgtgaaggttgacgcgcacatcagtcgtggcgaaactaggcggagccaagaaagaggtgatgccagtggcc

SEQ ID NO: 56126 - DNA, 580 bp, Zea Mays
atttttttctgcattaataattatttcccgtagtaaataattagcagaaaattattaaaatgcatgtgaagattatattgtgtatactcaaatcgctctaaatatttgtgttgcgttgagcttttgggctcacgtcgagcgattaaatgatataatgggtactcagacacgtcgatcaggctgcgttgataatcgactaagttatggcattagctgaatactggctgcgccctggcaacacgacgcaatatttgtgtcgtacggacttggctgcgtcatttgattgctatgtcgcactctcgcttaatcggaccactctcgttgagtcggaccgccatcatcgagtcacgcatttttcgcacgccctgtaggcattgtttgtctgtcgtgatcatcgagccataattgcgcctattgcgcatgtttcatggacttgtcatgtaccccgactattgagccacaactgcgcctgttgcgcttattacgaaggcttcctacgttgtcgtagcccagatggccacacacgcgttgacgccagatacgatagagcttgtactcgcgtggattgtggtgggtcgtt

SEQ ID NO: 56127 - DNA, 610 bp, Zea Mays
ggagtgcaggaccaccggccaccgctgagggcccaaccgtctggtctggtgatacctatctgcagacggcagtgggatttggctggtctttggagctctgctcatccgattccacgacgtaactgcttcagcaagtgaacggtgctcgatcgatcgagagcagggtacagcgactgaagtcgatagtaaaattgggttacagtacaggcagaaaatgctgataatcaggagttctgagataaaatgcgatggcggcaacggcaagacgagctattcagttcaagccctgctatgatcttttggcctatgccaagcaaattctgttccagttttcaagcatatgcatactctgtccaggaaaccaggagagcgccggtaagtgcgccagggtcgccggttccaaactgccaatggccccagctcgtcgttagggttgacaatcagtcgggttcaagtcttgaacaaaaacccacccgcgatcacaactatgaagactaactaaacctgcccacgattacccccacatgtacaaatttcaaacccgtgcccgaacccgtcggatttcggatcacccacgagtttttttacttagtatgcaattttaaacaat

SEQ ID NO: 56128 - DNA, 614 bp, Zea Mays
tcaaacgatagaattcaggaaagctgattccaattcccaattatgtactctaatatctacatccaaacagggtgttagaaacatgtgaacagtaggactgatatatacatggggaagaacaaggtgcggtgggataggtcgaaggttggaaacttgtggagagaaattttcgctacaaaacattatatatgcaaatataggtagcaaacatgcatgcctctataacagaacatacaatttgttggacgtttacttagataaattcttttcgcgaccacacaatctgtaccgtcatgtcttggaatcgggctcagttgaatgcatattgttctaactcatatgagcacgatctctgagtttttcatttggcagctataacaccacaaaatcctaattttggatttaattgtcatttccttatttctaaagtagacactgctaaggaagtcttgagtttcacatcttgaacaaatggaacttcaccgctcccaaacggacctatggtctctaaagcttcgcactggtctctgagactcagacaactcgtgtcccatcataacaagcatttaactcggacaacatacaagcatacttaaaaaattgtaccaaataag

SEQ ID NO: 56129 - DNA, 967 bp, Zea Mays
tctaaggctgatgggccctcagttacttccatgggaccaggatgatccaagtcagtctcccgaccctcgagatcgcgctccaaggtcgacgaggcatgggatgacctcaacccagcatcaagcacatcagcacaaacctccatcacaccatcatctgctggctccgataacaaatcctctggaaccatatcctcaagagtctgatcaaaattggccagggacagttcttgtagaccaataagggcagacaaagcaggagaaggaactccactactttcaccgctagcaatgaactgccgactgtttttccgagtcaaaggaacttcatcttcttcctcctcgtcatccacattagcaacacaggcagcacccccattgggatcagcaacagatggagcaccctcattgggatcagcaacagattgggtacacccattggggtcagcgtcagtaaattcagtcacaagcacttcttcagcagcaggaaccgaggtaccaacatcccgatccaaactggatactcgccggaggcgtctctttttctttttctgctcatcagcagaaggatcaggttgactggctcggcaagggcgcctcgggcgagtactggcaggcttctgagtatccaagattgtatcagcctctgggaggggcgccactaccaatgccccagcaggagcagcgtcagaagagcctcagccagcaagtcaagcatggcgcttatctctgcatcactaggattcaggggcacctcaaaatggacctgtcgttcatcatcaggaatctccccgagcgaggcaaccaaggcactaacttcttcagcagagggtcgcactctaaggcccaaaccgccatcagtgacaggtggattcgacacaaaaagggtaaaggctttaggaggaggcaggttccaggccgagtatgccactgggcaccaacatttgacactttgcctctaaggatcatc

SEQ ID NO: 56130 - DNA, 1517 bp, Zea Mays
caacgttcaagcgtagcagcggctgctggcagcaggggcactgacgatggcaatggtcggggcgctgttgtggtggggtaggcagtaacatgagaatgacggtgagggcgagcacgcaaatgatggcggtggtatcacagttcgagcacgggagtagcgaggcaaaacaatagggtcaaaacgacgaccgtgaagataacttcttatttccgacgatttttctaacggtcgtcggacattaagttacttcttatggcttatctgtcagcgtcgaaagttaatgtcaaatgtcgtgcactctcgtacgttaacagctaggaaaggttcacgacacgcgtgtcactgtcagcacgtgtcaccgtgagcgaatggtctagggtgtgagccctagtgaagacaatgtctgtgaaaacgagagcaggtgtctagtgtgtttggccacgccaactgatccgctaaaatatgatggatgaccaacccatctgtttggctcgaagattatggcctcgtctgtcaaatgggaggaccaaaggatgacatgctaacctccccattcacataccacgtgattgatttgcatgctctattggagcggtctcgcggtggcctggatggctagatgtcagatttctatttccccgcgcatgcaagcgagcaggtaaaaatgtgactaggttgcagcaacgcgtacaaggttgtagcaacgcgtacaggctagacgactcgtgctcccgtaggcaaccaatcactggctcacacacggtcaacgtatgtggctagcatgaatatggcgagcaaggtaaccaatcacgtggatagcggagttactcgagcttggctagaagaatgcatccaagggtggctcgacatagagagaattttcatctataacttccaagggacgtgcaaatgccttgggaacccctaggacttgaaaagttgcaagcggcggtcggtcgttcatttatggtactagtacactagctcagatgcagctggcccaaaaccatcactgaactggtggtgattgcttatgatcatgcctccgtggaagaggcagtcgatggcatctttagcgtctgagcaagaaaccaccttgatcgcatggacgagtcacgcgaccacaacaacacgggggagaaactacgccaacatcgtgacacagacacccccaactatgtgatagaagaatgatcgctaccgtcgaccaaccaacctaaggtccatgacccatgcacccaccacatggtccctgcgagcagcacaaacagtgtgacaaaaaaacatggccatcgtgaagcttggccgatttgaaaaactcatgaataatgcacctataccacaccatttccctgagatcgacagtttcctagcgatcttcagtagccctgtgtgtagggcaacccctcctctttatccaacgatctacctccgcttgaccagtagcttgcattgtggttgtctcagtccacctgatccagtaaaaaagagaaaggagaaagagtctctaggctagg

SEQ ID NO: 56131 - DNA, 367 bp, Zea Mays
gttgaatgagcgtatgcttttgagttcttgtttcaatgtcctcaggaatgatggagtgtatgaaccaacatgggatcaagatgaattcaagcctctggacatctgaaccaagaagcctatggtgtgcatgaataaaatggtggttcatcaccttagcatgggaatgcaaccagaagctagatgactgacacgtggtacgaattccaagcatcactatggacagaatacaaggagttagacggtgttctataagtggatggaagcgtcttcaagtctacttttcagcccatcaaacggttcattatttggacgtcccaataaggagttatgcacattttagtaactgctgccagaagctgaaaagacg

SEQ ID NO: 56132 - DNA, 729 bp, Zea Mays
ctttggagccatccgatatggggccttatgaataggttgcgtactcggaatcagtttgattttcaaagctgcatcgtgctccgatggaatgcctggaagctctgctggaaacacatcggcaaagtcacacaccacatggatgtcttgcacccgcaaagcagcctcactcaccaccaccatagagaaaaaattcccaacatcctggaccgatgatccgggagcaattgcgacaacaaggatcacgtgaactttggagaacttcccaaaaataccacctccctacccgacgacgcctgcaataacattgtcttccaaaaacaggatataactgcgcgatactgagataaccaatccatacccaagataacatcaaatgcccccaaggaaatcacaataagattagctgaaaagacctcatcagcaagaatggcggaacaaccctgacaaactgaacaactactaatggagccattagcagaactaaccataattgggtgacccaacctctgcaccgaaagaccagcccgcgacacaaaattcttcgaaacaaacgaatagctagcgccagagtcaaaaagagcatgggccacaaacgaatcaactgagatcgtacctgtcaccacgtctccctgctctctgccatccgcagagggtagcacatatgctccagaaatactcgcataagaggaagctcccggagtgaagttaacagaagaaccccactgagtc

SEQ ID NO: 56133 - DNA, 436 bp, Zea Mays
ctatcattgttgctcgtagctagccgtcgatgtcgtgtctcgcgcttcgcttgttcgacgaaatgcccaagccaagtggatcacactcaactcaagttcgatttgtccaagttgttcagtgtttagtttactcttcttagggtttgttgatgtcatgcttatatgtgtggatacatatgtggtggattgaatagatgtcttagttgcgctcacaatctagaaatagacgtatggttgcttgtatgttgtttgatgaaatgcttgagctaggattcatcgtcattttcgtggatccaagtcaagtttggtgtagttagctatttcgctactcccactagccgactcatgaagtagattgagttagtatgttggtcgcgacgaattccttgctagtggcacatatgtgttgtggttatattaaatatttgttaaaatt

SEQ ID NO: 56134 - DNA, 610 bp, Zea Mays
tgcttcaccagtattgttggtgcaaaagaaagatgggtcatggcgattttgtgtggactacagaaaattgaacaatatgaccataaaaaacagatttccgatgccggtggtagaggagattttggatgaactagcagggactcaatacttctctagcatggacatgacagcgggatatcatcaagtaagaatgggggaaggtgaagagtacaagactgcgtttaaaactcatcaaggacattatcaatttagggtaatgccttttggtctcacaaacgctcctgcaacttttcagtgtgcaatgaacttggtgttagcacctttccttcgcaaatttgtgatggttttcctggacgatatattggtgtatagtcccagttggcaaaaacacttggaacatctcaaactggtgttcgaaaccatgagagagcagcagttctatctcaaaaggaagaagtgtgtttttgggagaaaggagttgacatatctgggacatataatatcagcaacaggggtatctacagacccaatgaaaacagcagccatgaaggaatggcaacaacctacaaatgtgactgaacttcgtggtttcttggggctgacaggttac

SEQ ID NO: 56135 - DNA, 510 bp, Zea Mays
ccagggtgcgctcaacagctagggttacacatgacggagaggaaaccgaagatactgaaactgctctgatctctaaagttatgaggcagttgggactagttgtgacagagggcgcacctgacgaaggcgcccctgctactgaagccgagctagcagatattgaagagggcgatactagtgaagaagagattgactataacatcgttatgccatcgaagctcagccatttggattttgggaagtcaactgtgtctgaagctgatatggctatgatgacgaagttaggctacttcagagaagccgataaggggttaattcattttggtggggaagagactatcccgaaaccagaaaatgatgaagtggtggtttttaagagcttcttcaaagcagggttgagatttcctctgcacgggatgattgcagatgtcttggaaaattttgagatttaccttcatcagctgacccctaacgccattgttaggctcagcgtgtatatctgggctcttc

SEQ ID NO: 56136 - DNA, 719 bp, Zea Mays
tctgcctccttgctatcaatagccatctggtgacaacctcatttccttggctcgggtgagactagctcagtcaccacttcttcacctagtggggacacaaacttaactgtcctcttatcacagccagggctgggcattcggttttacccgacaattcgggtcggttttttcgggttattaaaaattcgggttctaagaaggcggaaccgaaatacagttcgggtatctgataaccgaaaattcggttacccgaacttaggagtcgggtttcgggttctaaccgaataataaccagcagcccatactcataaaccgtgaacacaaacataacaagccaataagcggactcgcagaacacagacagaaggcaccaggcagccacgccacaaaggcacagacccacagttcacggcttcacgccacactacacactagacatttagacttgacagaatgacagacatcaagagttcaagacataggccattcggccagcatgcagcagcccagcaacagcaactcggcaagccagcatccagcagaccagcaccactcaacccaggcgtccacgccaggtcgccagcagcagcagccagctctcaaacagttaagtagcagcactagcaggccaatagtccagcaggaccagcaccacgcgtcgccaccacttcacagctgataactgcttggtacttatctagccaatttatccctaggat

SEQ ID NO: 56137 - DNA, 390 bp, Zea Mays
aaaaaaatgattaatatagcaacactgttagcaccgagttgtattcttttgaatagagatagcaagaggtccgatagtacagttgcccgctcaacccagttgatgagtatgtacgtgtggcagtcacgcatcagactacctgccaaggtgttttactgcttgccgtattttcgtggtacttgccaacgattgctggaatctttgcacaccaaagtgttgatgtcttgatgatctagtacaaatacctatagtttgttgactgtaggagcacccacctgatcccccaccctgaaattggtaaacaaatctttattaatttgtaaaccatttttaatttttgtgaaaccattttaggattgatgataatcatctagaatgatgaataaaata

SEQ ID NO: 56138 - DNA, 715 bp, Zea Mays
gagctggccacggtggctagagttcgggcggcttgggagggcggtggagctctcggttcacggtcaggtctccggtgattgagcgcagtgagcgtgcggggctgaggcaaggatgtccaaggggctgatggccttataggcgcgggcacggggagagcacgtaggtggactgaccgtgcgcggaggcgagtgcgcacgggggttgggcaagcgccggcttaccgaccagggttgaacacgtgtacgcgttgtttctgcctgagttctagcgtgtgtagtcactcgtccgggcctgctcttgccttagtcagtgcacaagacctcttccccttccctcaagctaccgatcttttgtggtggtcaagggatttcgtcgactggatccatagatatggtacactcaggtgggatctgtctcacagcccgaacccgaggcaaatctcttgttttgtcgcgtcaaatttctgaatcttgatgccatctctagatatgttgtagaggggttagtttaatacaaatttgtcaatgggagcccacagttttgaattcaaaatcttcatgaacgcgggcgatctttgcaagaggggctgaaattgagttaggagaatcccgattttctttggggccctcgacttgagtggcttatttagggattttgcaaaatctttttgagccaactttcttactatcttttgtaggttattgttgtataaca

SEQ ID NO: 56139 - DNA, 706 bp, Zea Mays
cttttgccgaggttaaagaggcgatggggttgtattctatccactttgtgaatttgtcaatggcaactagtatgtgggtataccccccttgagctttctggaagggctcaatcatgtccagcccccagcatgcaaatggctaggtcacgggaatagtctgcaactgctgtgcggatagatgctgctgctgtgataagaattggcacgcctcgcacttctggaccaactcagctgcatccttcttcgctgttggctagtaaaacctagacctaaaagcctttcctaccagagtccatgacgctacatgtacaccacattgcccagcatgaatctcatctaacagttgcttcccagtagccgagtgaatgcacttcatgaggactcctcctacacctcttctatacaacaggccccctataatggtatagtgggctgactatctagcaatgcgctctgccgtagccttattatctggttcttccttgtttttatgtatctaatgatgggctctctccagtcattggggtctgcccctgcctgactcagagtgtggcattcctccatatgatctatggcgacactcagtttctgtatttattgaacgaaaaccccaggtggaacttgggcccgactgaatcccagctttgatagtgcgtcagccgctacattgtgatctctttccacatggtggaattctaacccttcg

SEQ ID NO: 56140 - DNA, 302 bp, Zea Mays
tttttgttgagtttctctcaaatcttgtatgccaaagatccttgcatatgctaatataatgttcatgttagcattgcgcctgccacagctcctcataaaaaatatctagcttcttcaaatgctgtaatggtcattgattgttctaaagacctttattgtttgctttgagtccatggaaacaagctagaagggaatggaaattgagaacactggattgtaattagggcaaattcctgctaataatcaaaatgcagaatattggcatattgctaagcacatgatctttgttactactacttgtt

SEQ ID NO: 56141 - DNA, 1979 bp, Zea Mays
gttaggatatccttctctagtgacagtcatatctaccataggggtaggcatgttatggcatatcagcggacaaaagtgcccatgtcattgggtatgatacatttgatatctagagtaacaatatgtacttgataatactttatgatgcactggcacgcccacaaatggctacatagttaatgcacttacctaatagtggtcttgagtagcctgtcatctaagtcgtggtgatagtaccttcgtcaggttgtaatgtttcatgtcatatatttaaacgggagtcatatctaaagtgctagtgttatgggtttgtcaggaatagacctcaaatttggcatcccagtttttggggcagtaatgtccttggcggtgacaactacatttttttgtcttgtgggtggctttatacttagcttttgtaagagtccctttgttcccacatgaggccttcgatcctagggagctctaggcacaacttatcacattacttgaggccagaggccttagggatccgaggactaatagagggcactcgagaccttagaggtttgaggactagtagagagtctcgggcttctaagtgtttatcatgaataccctaagcccttaagggctctaacttttagatcattcatcatgagggccctagagtatgtggtcctacttagatcattctagtcgggggcacctgaaggcacaagacccaaggttttggaccattgcaaactatggttcttgaaagtaggggagtgtcgcgaactttagagtgcctcaggatgtcgagggccttgaggcctttgattgttctggtaggacatggtataaatatcttatttctttggagtgtcccgagatgaagttccctagagggttaggccccttggccaaaggcagagcaggttctcggggcatgaggccttaggagcgatggtcctagtagttaggtctcacaatcatttcttagttaggtctcacaatcatttctcataccaaggttcttgaatgtgtcctggcatcatccggaggttagccttcttcatgtgctagcaagatcacaatacacaagattatcttttacatccacaacccatgtgagatagttgtgtcaacctagagcgagttattcaaactcttactatcattgaaacatttgagttacttaaaaatgttgtctgttataatgggatgcaaaatgaagacaatataaatcacgtatcaatgatgttgtaaaaatatcatgtgcataatatcataatggaagtaaaaaccatagaggcgtagacctcaaattgggaataatccaagttaatattagatgccaagtaatttatgtaatttgtataaagcatcttaacttaaggtagtaatcaaaattgatatagatgtcagttaattcacaaacaaattaggtacacacattgaggatagtcactaagctgtaaatttagtatagatctcacggtagtaactatggtgctatcttgtgtatgaccaatagaaatgtgaattgatgatagtcatcttttaaaaaagatgtagaccatatattctaatttgtgatgttagatacacatgttgaggataatcaataagtgtatacttagtgtagatcccgcagtagcaactatggtgctaacatgtgtatggccaacaaacaaacatagaacatatgtgtgatgcatttaatgagaaaaatacacataaaacatcacatctagaacttaagcgcctagagctttggaataaaaacatcaatgacttaaactaaaataatcaattatataaaaaataaattataagatcatggtgtgtgcattattccaaatatctctcctgaagaacattcctgaagaacatgccctttgaaagtaattctaaccgtctaatccaatccactaatcttatgcttgaatagatgagatcatctcctgaaaaggcatctgttagtgaagaggtgtcgtttcacaacaatatcaaac

SEQ ID NO: 56142 - DNA, 539 bp, Zea Mays
gtgatatttgatgaatattgaatgacatgaatatgtgtatgtgatgttgaatgatgaatggatgatgtgtgatttgtacatggatacgcaagggaatgcaagggaattatggacaccatgaatgacttatttttcggtgggtgagcgggtcacaggaaataaaggcaacttagttttcgtgtcctgaatgggttgtcgataataagtccaatctctatttttggtggccttcgtcgaccctcgaaaatagtagatcttattctcaactgctagctaaggtcatcgaaaatagatgcatcaaattttattccggcagttgtttcccaaccactaaaataatttgtttcgatcatcgaaaataaacgccattttttacggcaaacttctaacggatatcaccgaaaataagttgatccatcaccactccatttaaaataaaataagttgatccatcaccatttcattcctcatggttagttatagttagttaattagtactaatacgaagaatgttataatcccatcaaatttaaataatg

SEQ ID NO: 56143 - DNA, 631 bp, Zea Mays
agaagcttgtcaggcaggagctggaggccgcccgccttactatcaagtccttggaggatgactgcgtcgtcatgaaggtgatgtgcgacaaggccattgataagactgttcatgccgggcagatcatgatgaggagacccggcgtcatggtgcctgaagacattgtcgccgatgtcatggccgcgcctgatgtcgcaagccatccatcttcttctattggtcctacaaaagatgcttccttcaagaatgctccagcgcagtgaattgcctgaaaaacacttgtttatcaagtaagcgtcttttagagagaaagtgtaatgtgagttctgtatgtgtgcaacagttatgtttgaactgattgttcagtcggcggcgtgctgaaaaacatccttgacactataagcaagatatttcttttttcgaagtactcccaattttagttaactattttgctactagggtatagtgatcaccctaatttgttttcgcatgagcatgctgcaccggcttaaggcatttctgacttaggtcgattgctccgttaatagggcatagtgatcaccctacgttgttgcgtgagcatgtcgcactgacttaaggcatttccgacttaagtcgattgctccgttag

SEQ ID NO: 56144 - DNA, 588 bp, Zea Mays
aggtcattagtcccacaatcatgtccaggctcacttaatcggatcatattgggtgcggattgagcatcaagtacggtaggcacgacctcgacaccacgatcatagttttcctcttcatagcgagagccaactaccaaccgctgtaccaccacttccatgacttgcttttgggtcttcatatctgatctaacataactctctcattctcgctaacactcaatcgggatgcacgttgggtggaggacctatgtttagcaccccatcaacggtgatctcgtcaacatcatgctaactgatcttctccttggtcttagcaaccacctcactaaagaagggtctatcatcgaatagcacgaccacatgtcaatgaacttagcatttctataacgatattgttccacaatgcctccatggtatatgcccaaaaaattgtccatctatttgaaacacaaattcaatgttcacaaaccaattatgatggttagtgcctaaccccatccattatgactaactaataacgaattactaatacctaacaactaactaacagataactaataactaactaatagctaactaaaaattaat

SEQ ID NO: 56145 - DNA, 334 bp, Zea Mays
cacaaagccatccaactataatttgacataacaccctcaacttatactaatctagatcttattcaatctaacgtgagtcacttgacaagttaacactagtgaaataagctagctcctactcctataaaccttgttctcccctcatgcacttaaacctaaattagtgcattaagccaactcaaaccatgagtagaagagctatcccaaccaatagagtcatgatggattgcataatctatctgtcccaccaaatgtcaaacaagattttgacctacatcatgtagtctatctcacccatatctatctcatcttgacagattctatcttacctttg

SEQ ID NO: 56146 - DNA, 563 bp, Zea Mays
gcgccatcttggctttgaagagaaggagattttctctcctagtgctcaagataaattttgtaagctgttcaagccttcgccttctggttctcatgtgtgtgctatggctgccatctttggctgagaatttggagatggagagcaggtgaggtctgcggaggtccttacaactctgtaagatctgtttttgtcggattggtcgttctacttcttgtgtcctcatgaatccctcggctattcttatttggaacgtgcgtggccttaataagattgatcgccgtaatgttgtcagggatgtcatcctctccagtaatgctgatattgtttgtttgcaagagacgaaggtcgctattttgacccagcaggtgctcctttcagtttttgggactgtctatgataacttcgtggctctacctgctgttggcactagaggtggagttctggttgcttggaaggggggttcttgtcaggccgtcgcttcaagggttgataatttctcagtttctgttcttttcgctgagcatgaaggtcgtaattggtggctaactggagtctatggtcct

SEQ ID NO: 56147 - DNA, 482 bp, Zea Mays
ctttgctgctcactcgttcctgtgcaacacgccattgtttcttcagttcggatgttgccgtccgttcgcatctcctgattgtggagcaccagcgtaaagcctacacccgtttcctctcccatgcatgttcgactcttctccttccttccccttgaaccgtccgttcttccccatcgccattagtgccattaatggccgccgcccttgctcttcctctgctcttcctcgccaccgctggaggacatcattcctagccgcacgacgccagtctaaacgacacatcctctcctctcgccatcggctgtctgtttcctcttcccttcgagtcgtgtgcccgcgctcgcgtccactctgctgtcgtttcatcagccgccattgatggcgaagctttcagccgtttctacaccgattaatggagttcatcaatcgacaattaatagtgttaatttggccgcgaatttctcccctccgacgacctctgc

SEQ ID NO: 56148 - DNA, 891 bp, Zea Mays
gtagaagcacataatcttccaatcactaccatgtcaacccccatccaaattgactcagccggtggtagaattcgagccaatagcatttgcttgaatgtaagtgtggaaataagggggatagcttttctcgctaatctcatagtaatgggtactcagggaatagatgtcatcctagggatgaattggctagataagtatcaggcagttatcagttgtgataagaggacaatcaagttgatgtctccactaggagaggaagtggtaactgagttagtcccgcctgagccaaagaaaggaagttgttatcagatggctgttgatagcaaggagacagatccactcgagattaggtttgtgttagaatttccagatgtgtttccggaagatttaccaggcatgccaccagagcggaaagttgagtttgctatagagcttcttcctggcaccgcccccatttctaaaagagcttacagagtatctggaccagagttagttgaactcaagaagcagattgatgagctgtcaaaagaaggttacatccggccaagcacctcgccttgggccgcccctgtccggttcgtggagaagaaagatggcaccagaaggatgtgtatcgattatcgagctctgaatgaggtcacgattaagaacaagtaccccttgcccagaatagaagacctgttcgaccagttgagaggagccagcgtgttctcaaagatagatctgaggttaggttatcaccagctcaggatccgaccttcagacattctgaagatggcattcattaccatgtatgggttgtatgagttcactgtgatgtcttttggtctaacaaatgcaccagccttcttcatgaatctgatgaacagtgtattcatggattatctcgac

SEQ ID NO: 56149 - DNA, 465 bp, Zea Mays
gctcctgattgtattctattcaatgtcatgtaatatacaataccatgaaaatgggtatgctcaaaataatataatctactaactttaatcacgaaagaaataattctagtgtctgagtcctactcattttaatagcttacatttaaatttacgataaacttagtgtctacgctccacacattttaatactacattagtcttgacctaaaaaagctatgttctctatttaacttacgattagcaaaactacgacataatattatcgaccttagtatctcataaattctttgtgaacaatcaatacaacactaaactgataaaaatcaaattatactacaatgaaaatatcataaaaacatcttgcaaaaacatttggtttttatagttagaacgtgattaacagttgtccattgggtccgtgccggtctggtccgatcatcgtgtcgtgtttggaccttatttgca

SEQ ID NO: 56150 - DNA, 314 bp, Zea Mays
ctcagatcggacggcctggattaactcgcgagattggcgggcgccagatttaatctgtgccgttcggatcggatccatcggcccagaaaccgcgataccgcttcatcgtgcacaatttgctaaagagaccttatgttttactagaattgaacccgcggtccacctgcgagtagtactgtgtctgcgtgcactttatgctttagcccctgagtttttcagatttcatccgcgcagacctgaggtagtaaaagtcatttcagaatttatttttaaggtaaaaacaattattaaaacttgtataatccctagaaaat

SEQ ID NO: 56151 - DNA, 543 bp, Zea Mays
ctttggtcgttttcggccaaaaataatggccttatgcccattgatcgtcggtgagactcttctattacttagcacacacgtgttttcttgacataaaccaaactattttgattttggtggagaccatttatcggttaaaaaatccatcggttttagccttcgatattaacaaaaactcacgctttggccgttttcggccaaaaatattggccatatgcctaatgatcatgagtgagagtctcctgttactcacccacacatgtttccttgacatatattatattatttggttattggtggtgatcatttattggtaaaaacccataggtgttagactttaatattaacgaaaactcacgctttggccgttttcgaccaaaaatactagcatgatgcccattgatcgttagtgagagtctcctattacttaccccacacatgtttactcgacataaaccaaattatttggtttttggtggacaccatttatcgttcaaaatgcataggttttagccttcgacattaacgaaaactcacgatttg

SEQ ID NO: 56152 - DNA, 578 bp, Zea Mays
gagcaaccgaagtatattggtcgacacggttatgcatcgcaaaatgtcatggccatttgtgacttcgatatgaggttcacatttgtcgtcacaggttggcctggatgagtgcatgatactagagtattacaggatactttgatcacgatcgagataggttcccgcatccacctgaaggtaaaactatattttagttttgtaccatacgttattaatgtgtatcacatgtattgaagtacaaatttgttttggtgcaggtaaatactaccttgtagattctagttatcccaacaggaagggataccttgcaccatataagggtcgtaggtactatacttctgaatggcaaaatgcgaggcgaccagtaggtagcaaagaagtgttaaactttgcacactcttccctccgtaatgttatagagcgatcgtttggggtcgtcaaaatgaagtggagaatcctgctaaatctaccttcattttcgcttaggaaacaatcgaagattattattgcttgcatggcactgcataacttcattcgagacagtgctatacacgatcgagactttgaccaatttgtac

SEQ ID NO: 56153 - DNA, 916 bp, Zea Mays
cctgcccctgaagctccagccgaagctattgatgacatttatcgacatgcttcggggaagaaattatccgtagaagaaatcctggaagccaaacactatgcccaaaaattaaaatttccaaagggacccttagtgtttaacaacactaagaaagatgatttcctgtactgtctctcggacaacaaagaaatatccgtttgccgggagatagctaaaagtattggatttccgaagcttgaagaaggcctttcagttatgtcgaaggatgatcttgctgatagcctcgcgtacaatagtataaaggtatagaagttaactttaaagttggaaagtgaagtattttattgccatgctcaattctttcttcttctttgcagggcttaattcttagtaatgccttgagggcacaaaagagcgccgaagacgaaggttgtacaatggctcgtaacaaccttcgctgagagatgattgaactgagaaatgaaggtctagagaaagacaaaattttgatttcatttgtgaataaaataaaagaagacgaacctaagtacaatgctcaggctgaagcccaaaaagctgaggttgaagaccttcggtgacaactggctgaagctaaggagaactacgcgctcgcacatgctaaccaagagattagtgaatattggaagaataaactagagaaaaatgttgaagagcttcgcgaatccaaggagaagtgttttggaaaatccttggattgtgtgaagaaattaaaaactagcgtctccaaattgggcgcctattcttctgaagaaaattttatctgaggcgaccccgagggcgttattgaatggataagtggagaagccgaagccttcgaggaaatcttgaatgatcgcggggatatttgtgcattttccggtgctcgaggagtctc

SEQ ID NO: 56154 - DNA, 1384 bp, Zea Mays
cgacattctagctcgtccaggggaaccgtggcgatttgcccccatcgtagattaggcggcggtggatgctagttgtcataacatgcgtccatccagcaccccggcgtggctgccctgtccgctaccgcagtgtcccccatcttctaattgtgtgggacattggctgatcttggaagggcttggtcctggcggtggcttctgggaaggtgggtcgagccgaggcagggtggatgccatggcacgcatcgtgacaccggtgagggtcccctcaagtctctccatgagcgaggagcggccctccaccaagttggctacaaggcactccttggctgggttgtgacttgccccactagatggggagctaaatctaccctcttaccttgacaggaggaggtcatggaatgagtcccagacagggtccaacattcccatgatctcagcgcaagcgagtcacagtgcgcatcgctgcccactacttccttgaggggagccgagccggaggctgtcgaagcctctgacaatgtagagcaagtcactcgtcgagggagttggggctttcaatgccctaatcattgttcccctattgttgatgacgaagttgagactcccaaaatggatggacattctggaggcccaaactacgccattgtcgttattggccatccagagcctagagagttcgtcgagaacgtgcaagacccctacctaacacgccaactatcagtgtttcgaacatctactccgacaagtaaatttgtatgtgtgcggttcttggttcggggtggtgtgctcggtggacgcaatgtttatactggtttaggcagaacgtccctacatacagtcttcgaaggctgacaatactggcacctttgttgctcaatgcttgtagtaggggttacaagcgggtgagagtgagaataagagctcccaagtaccttatgcatgggtggacctaaagactatgggactagatcctaaactaagccttggacatcacggtggctcacgccttggctccagcctccgagtcttctagtctcgttgagcgtgtgattcctatgttggtcgttcctcttttatctcgtgatcgacctcctccttttataggccaaggtgggggtcaatcgtcggtagcttcctcaagaaggagctactatgttgtggtaaaaccaagtgttttacccttgtgaagtcgtgttgtccgtatatgacttggtcacccggttgtctctgctcatgctcattatgacggacgacgtggacggcgtggagccctggtgcatcattaccgactctgcaccacgccgacccctaacctctgttgcctaggtatctgtgtgactcagcgtgttgcaagccctatagatggcctgcgcactcagac

SEQ ID NO: 56155 - DNA, 769 bp, Zea Mays
tgtttttccacaaatccgcctcgcgctccttgccaccgatggcgagatcgaattagactgtgtgggcgtgggcgtgcatcaaggcctccgtgggaggcgctcgtccaacgaagagtcagttgtgtggaggtcctagaaggcctagatgtcgtcgccggccgtgaggtcgacctgctcgctgccgcggaactttcaacataacggacgtggcgtcccaatgatgacgacccaccaccagagctcgacgaccatagggatccggggcactggacaggaggtaggagcgaaggcgatcgaggttgtgtgggtggatggtgatggtggacatggggacgaacacggataccctcgtcccggcgtcgatgtagaggcgtgtgtggagataagagagtgtatttaaaaatatatcgggggaggttgaagggtcgttttgaaagctaatacacgacggaaagttgtttgaaaatttatcttgcttgcacggttgcttcaagtggttggtttatatatacttcacatcgaattacagacatgcatcaagttaattcttccctgtaaattataaagttagattcctagagacgatatgagttgtgacttttattccgagcagtcattttctatctactgcgtgataagagaggggcgtcgttgtagacgggtacgggtacggtactcatatgacagcacctacatttgtcggtgatgactgatgaagatctgactgagcaatgaactagttgtagtggtaatactcacatgacagtag

SEQ ID NO: 56156 - DNA, 351 bp, Zea Mays
aaaatggttggtcttctgaattattgcttaggtcatgcttgttagctttcttctctagtcggtctagacacttcttggagcattcgcgaataacatgtccttcatttttgcagtagtagcaaacacctcttgctttgagttctttgtgagttaactttgcttgaacaacagggggtgagggttgattgggtgtctgtatcttatatagccgagtctgacttgattcttctgtttgggtatccatgtgtttcgtggcttttgcttgtggttgaggtggactaatcatgtatccaaacatttttctattccttttgttgttcttcattccattcatcgaatatctctgtgact

SEQ ID NO: 56157 - DNA, 1003 bp, Zea Mays
gttttaaagtcgtaagaggaaaatcacaaagtaaaaaaaaggataaagtcaccatttagcttcaaaacattggtatagagactgtggtccccgtggtctacggcgcacctccaccaccgtgggtgcctccaccaccatgggtgcacacagagatcaccggcgagaagccggaggacgcaaggaacacatgattgtaacaattatgtttctctattctttcttacccccattatccttattaaaaaatgtttaagtaccttgctaagcaggccaacatggtcgccaattcacccacttagcccgtacaacccactcagttacaaccgattctaaaatgaaaacatacttcacttctcgtgctccctttccgacgccgatgcttccctcctttactagaagttgcctcatggatccacctcagtgctgacatctttactgcgcgcaagagttgattgcccccaatcaagaacatctggaaaacatgtccccaggacatcaaagtcttcccaggcagtagcatcatgtggtagacgagaccaagcaaccagaacctgattcctgaatcactggtttgttgcccctccgaaccaatcgtcgatccataatgcacaccggatgcactgccaccccagacaagtccaccaattgagaaatatcgaagaagaccggagtatacttggtataaacgtcttgatttgggagacatgaaacattgtgtggatcaacgttgtagctgggagctccaatttgtaagtgactgacccacccactacaacacagtaaagggtccaaaaaacttaaaagcaatctttagatgagcctagttcaccactgaattctgaacatagggttgcagcttcaaaagcacacggcccccacctgaaactctcgatcaagactgtttttgtcagcttggagtttcatgcggtttcgagcgggagatagtctggttttcaatatctcagagtatgccagccattcctaaaacaactcagccacaaat

SEQ ID NO: 56158 - DNA, 326 bp, Zea Mays
atgcatatgaaagaatttagtatttgcatccccctcttttaggtacttaatcctggacctcaaacgtgcaattgttctttccatagaagcataaacaaaacaatgttgcttcagctttcctagcagccaaaatcatcccctgacaaaaactctattgtcctgtgttgattccaacctatgcatcacctctctagcaagacccaactggtttctcacattacccacctctctatgcccccaggactgcagatgtttagcaagccttctaagtttttgggataaccttaccaaagggcaggttgccaacattggctgattccaggaat

SEQ ID NO: 56159 - DNA, 558 bp, Zea Mays
agacttcttcgtcgcttgaccgccggtgagtattacctcatcgcctccgctactatctgctccacgtgtagcgccgttcagagggttggattgtgcactaattcatttggtcgtcgcgcgtcggcggggtcaccaccgtggttgaccagcggcgccgccgctttacatcgacagggtggaggagtgaagctcagccattggatctctgggtgatggctgtgattagagttcctggtaccgcttcggtgggatgatccgagccgttgattctccatcgggtagatctgcggtgatcttcatagatcaatgatctcagtcgtaggattagaatcgagcgtatatgagcgggccgtgtgtttccattatgggattggctttggaccgttggatctagatccaaggatatgcacgttataccgattcgaaaagagttgcagatctaatcggtgtcattcgctttagattggacggccgagaacctgccatacccctttgtcgcgttcattttgcaaaagaaccctcgcagattcaccaaaacaacccacggttcgtcctggc

SEQ ID NO: 56160 - DNA, 724 bp, Zea Mays
gcacaccgtaaagaagaggatgttgtcaagggtgagataagtaaaacaccgctctcaaattgggataagagattgtagattttagatagtagacattgtgtaatcaccaaggtcagatcaagagatgagaaagataaaggcaacaacaaacggaagcacaacaaaggatggagttaaaaactcgcaagtggcaaagaagaggatacaaccaagggaaaaataagtaaagcacaacacatagattgagatggaagacaggagattttaaatgacaggtataaggtaaacatcaatgtaagatatggaggtgtcaagggtaaagatgataataacgaagagcatagcaaaggatggagttaaggcaagactcgcgaagtgacaaagtggagaaaacaatcaagagtaagataggtaaggttccaacaggagggtttaggtaaaaattcattaccgaaggaagttataaggaaacaacgagattaccacgggtgtgcaaaataaaatgaccaatcatggatcattaagaaacaagggtgttcaagggcacattaattgaaatgtcttaaacagatattggcatataaaggtaagcatatatgaaaatgagagtatgcaagattcaaatggtatgagcataccaataccaaggagtaaaaattgccaaaaagatagagacttaacaatagaataggaaagggtctcaaaaggcagtaagatcatggac

SEQ ID NO: 56161 - DNA, 561 bp, Zea Mays
caccttccctttgctagaatagcaaatcactctgaattgtgggacccaccgaactgtggggttctgagtatatatatagaagcctgtgtcgtgagtatttttcgtgctatctagctggttgcgctgtgtttgccattttgagtttctttgctttcttgagctcgattgacttttgagcttcggcatctgcgcaaccatcatctaaatggctgaggagaataagatcattggccctacgctgactggtttttatgaagctatagagaagaccaatatagaaaaaatcaccaatgagatgttggttgggttgtctgagaattccagcgatagggagaggttcgatgtagagagcgggaatgaggaagttgaaaatcggccgtggaggcctagtcatgttgtttttggaaactcatctattaagcaaggcagatcgaagcgatgaaaggcagatactttcgtgatatttctattgtgagggccggaggggagaatatcgttcctcttcctgaagctaatgaggtggcagttttcagaagcttcatgaagctggtcgtttcccac

SEQ ID NO: 56162 - DNA, 303 bp, Zea Mays
gccagggcgatgaaacacttcggtcgtacctcaagaggtttcagaccatgagaaacctatccccaaggtcactgaggcagcagtgattaaggacttctaccggggatctaatgactcggccttcgtccgagccatactgcagaaagcgtcgaccacctccgaacaactgtttcgagaagcggacctctacatcaccgctaacgagtgggcccaggacctcatcgggggaacgaaacctgcaccaccggcaccgcggcgcgacgcgaaccagcaacccgacaggcattgggagaagaggcctcg

SEQ ID NO: 56163 - DNA, 641 bp, Zea Mays
cttttatttggaacttctagaacgtatgaactccatttatttttgtggggttccctgtgtccgaaaacattcgtttcttccaaaaaaatagagctgtttgagtatttcttcctcaatccaaaaaccgctgccacatcagccagaaccactttaactggccttaggggccaaaactaaactgaattgaaagttgggatactcaaactaacattattagagttagggtcaaaaggctatgatcgacagtcctctacttctgcatgcccctcacaatcaggcggcccttagttatatcgcctaatgctggctgtctactaacaaactgctgcccagtccccctattcttactctgaccaatccccctattcttactctccagatcctaacttgcagtagcagctcccctaacagataactatggcccagaattagatactggtggctgctggcgccttcttgttcctagtttattgctttccaatgaaagtgttcacaacataattgtcgaatattgcaaaaactacattgttaattttgttttagaaaattgctgttatgctggcatgtttgttttattaactacattgtttactttgttgcagaaacttgctgttggtttttgttcccatattactattggc

SEQ ID NO: 56164 - DNA, 354 bp, Zea Mays
cataatagtatcatttggaggtttgtgccatgttgctttccttgtttttacacagttgacatctgggagatgcagaaatgtttttctctgcttcattccatgcataccagcctctatagaaaggcactaacctctacttatgtgtggagatatgtccttgctggttggctaattcttatgggttgtttttctagtgatctgggtgcttactgcttgggggcagcttggaggagaccactcgccattttgcgttttcgatcatcggtgagttgtgcctatgcgcctgatctatttttaatgtgttgtttgttacgggtcgatttttcaccagtgttacgtgacattcttccatgt

SEQ ID NO: 56165 - DNA, 693 bp, Zea Mays
gcaggacagtcaccgtatagcggaattgtcagctgaattcagccgcttacagtacgagatttcagaacgggattcaaccattgattgggccgtcaactctcgttcgatcgcttgggaccgcgaagcaaaagctctagctcgtgtggcagagcttagtgcgtccctcgaaagcctgcaagtgtattgtaatactttacatgaagaagtacatgtattgtatgctcgactgcacccggacgtgccttccgatgttgctgcaatgggagccagaccatcgggaacagcaaatgaaggacctaatggggagttggacctttttaggccccctccttccatgaaccttgctgacaaacggtctcctgcaacaggaaatgaagtaacaaaggatgaagaagactagaatagtatagtttagatattataattatgtaaaataagtaatgaagtcgagttgtacactggaatctgtataattattacattttggtaatgtaatatgatggtgtatgctggcatgttatattttttccaaatgtttctttgtctcagataccatcacggactcgcacacatgatggtgcggggacctcccgcggtagggaggatactcccaacccaccaccagtaccaccgactttggccgaggctatcgctgccctggtcaatgccaccgtcgataatacgcgcttcttg

SEQ ID NO: 56166 - DNA, 496 bp, Zea Mays
tggaggagcagcagcggctgcgatgcggtgcgagcttgtcagttttgtcatgcatggtcaggaggcctggcctggcacccacagaacaaataatgcaattaagcagggccaggcagggcgagtgagatgagcagtgcacacatgcatggggatcctgccaagccgcttcaagttacaggctagctagctagctccaagtacatacatgggtgtactactacgtacgtaccattggtaaccatgcatgcagcgacaagcttctgcattgcagtggccagtgtggggggtgggagcaggaactggatatgacggatgaggagactgctcgatcgcctcccggccggagcctctgctctgcatgacacagcgaattaatgcgtagaatttgaagcagtaacgacgacacgcaatctctcacttagtaagtagtaatgtgatggtccagattaagcagatagtggtcttttttccatgctagctagagctgatgagggaa

SEQ ID NO: 56167 - DNA, 458 bp, Zea Mays
tgtcagtaccgagagcaagaagatggcccgtttcctgaaaggactcaggcctgaactcaagacaattctggctagccaagacttcctcaacttctctcacctttccaacaaggccatgcaagttgaaagggcaaaggaggaagaaaaagggcatcttaaaaggaagttccaggttctccgggcacagcagcaggaccggcaccagaagactcgatcatttgggtttccacccaaggggccaaacttcagtaggccagctggacccactccgtcgcgattcagccagcagagtcagagctcttttcattccccctcagtggcaagcaaccaacccccggcaaatgcatgttggcactgtggtgatcccagtcacttcaagaacaactgtccacagctgaaggtaccagtacccgcctactccaactcggtgaatggccccaagaatacctcgacatcca

SEQ ID NO: 56168 - DNA, 492 bp, Zea Mays
cgtgaatatttttcgtgccatttagctgtttgtgttatgattgctatcttagccttcttctttttgcgagcttgattgatttttgagcttcgacatttgccgtaaccatcatccaaatggttaaggacaagaagattacagaccccacaatggctaggttttacgaagcaatgaaaaagaccaacgtggaaaatattaccaatgagatgctagctgggttgtcttgggattccagcaacagtgacagctttgatatggagagtggaaatgaagatgccgaagatcggctgtgcaggccgagccatgtcgttattgggaagtcaactatcaagcaagggcaaatcgaagcgatgaagggcaaatattttcatgatatttctacagtgagggtctggggaagcatcgttccccttcccgaagttgatgaggtggtggtctttaaaagcttcatgaaagttgggctttgcttcccactacacaagatgttggttg

SEQ ID NO: 56169 - DNA, 1421 bp, Zea Mays
ccataacgcgttttaaaaaacggcctccagcccgagaccgagccagaggccacacttctcttcgctctctggctcttgtctctctctggtgactccctctgttcaccggtgacaatcccctcaccggcgaccgtgctctcgtggtggtgctcctgctcgatctccttagctcctctccctctggtgagctgcccttgcactttcctcctctccccattctctctggtcagtgagctagtgttccaccccttttgatcctcaaaccaaaactgagtcaatttgtgaatccctgtgcatgttgatgtgctattgtgcctccttgaaccctactgcaggtatccctctccaatttggaggtttcaatctctaaaatggccgtttcaccgaaaccctagaaccccgcacgccacgtgctcggtgaaatgcccaaaccagccaaaattgctccaatcgatcccaaattttcaggcaccttcatgacacctccagtaacatatttgccaaatttcacgccaatccgatatcccaggctccaaatttccacaaatccccatttctagcgatcgattctgagccgagtgcccaaattccatttccttcgcctaaaatcaaaccaagcacacacttcactcatatttacccacataaacctatttgtgaagtatcggctcaattccaagtcatttcatgcctcaattccaatttcaaacctcctatggcactattcttcgttcaaacttcgttttcgcgccgtttgacctctctatcaccaaatcactcgatttctgtgtcataccactgtgtgtatgtatttattcaaatttcatatacttatgactatgtaactaatacgtgctcacctcttctgtcatttcagtgacctcgcttactcgtgagcccgtctcctgtcctgcctagattctctctcgtgagatttctaggtatttatcacctcaagtcataatcatttcctctgctctcttctggtgcttagtttttctctctcatgtgcagacttcaggtcaggatggtgcgcacaaagaatgtctcagcgctagggggaggagatgacgaggaccctcctcgccccttcaggcaggtcaaggggaagaccatctacttggagcagcaggaaggccgcaagaagcagcgtttggatagagctgcccgagctgctctagcagcagcagccgccgctaagcaggcagagagaggtggccggctacagatatcatcagatcagattgcttatatagttcatcgactcgcctctcggcctcgctcctccgcaccttctactaccgccactgctaccactcccaccactgctaccactccacctcccacttcgcctactctagtcactcctgcgccatccaccaccttagccatacctaccacctccaccaacttgcttccac

SEQ ID NO: 56170 - DNA, 485 bp, Zea Mays
tagatatatacttttatatatatagcgtcagcgggcgggcgagtggatgcaatgcaattatgcaacggaacggaaaagggtcgatccccgcccgcctcaacggacgacggctttcccttcaataaaggcatggcagcagcggttcgattcgtttcggagatggagacgcatggcatctccggctccgtctcgacctcgaccaggagtccaggagcaagtcgagcagaggcatgcatgcatgcgtacgtgtcgccgatagcggtgtctgacaccatgcacgtacacggatccctgtcagcagcagacacacacacagagggatcgcagttttgggaagggaaccatcggaatgcagatttcaaacataacagcattcatcatcgtctcacgccactctccgggctactgttgggccttcgctatgggccagcgggccgcacttcacatgttcatcaggcgcaaacgcccgctagcttctggccggc

SEQ ID NO: 56171 - DNA, 513 bp, Zea Mays
gccgctattaagccatgggcactgttccgtccggccgccgtgtccgctcagccccagtcgctttgaatctaccctcgccggagttagacacctcgtgatcttgtgccacatgcctcggcactttaaccacgctgccgtgactcatagtaacctatccagtgattgccggtgaggttgccacggttatggccaccaatcgtgtgcaccagtgcccctcttcctctccgaccgccagcgcgccaatccaaaattggaggccaccactcttgaacactataaattaagcatactgctagctccgttagataatcacgaaaccagagcacccgctcctgcctccgattagccaccacagctctccaatttctctttctccccaaatctgttttccgccaccgtgaaagagccctcaccgtggccagcttgttccaggtctgttcatactctctgatcgttcgttttagtgtccttaggttctcctaatgctgctcgactcatttgattgagctagac

SEQ ID NO: 56172 - DNA, 886 bp, Zea Mays
tggatgttgcgtgtatcctgcactgtccgacgtgaatctcatctagcagttgcttcccagtaaccgaaggaatgcacttcatgaggactcctgttgcaccccttctgtatagtgcatcccctatgagggtgtagtgggctgactgccttgcgatgtgttctgttgcggctttatcatccagttcctcttcattctttatatacccgatgataggctccctccagtcattagagtctgactctggctggctcaaaacattgcattcttatgcttgatctgaggaaatgctcgggcgtggcacctcctggacgaaaagtccaggtgggacctgagttcgactggatcctagttttaacaatgtgtttgctgccgcgttgtgatccctttccacatgatgaaattccagcccttcaaatttgtcttccagttttcagacggctgtatagtacttgcccataaaatcattcgagaaatcccattctttatttatctgacttatgaccaccagtgaatcttcgtataccatcaacctcttaatacccagtgatatggcaatgttcaatccatggatcagagcttcatattctgctgcattgttggatgctgaaaataataactgaagagcatatttgagttgttcacctctaggggcaatgaagaggatccctgcgcctgctccctgcagtttcagcgaaccatcgaagtacatccgtcacacttttgcagcctccaggttatctggtacttgttgttcggtccactctgatacgaagtcaactagcgcttgagtctttatcgcaatgcgaggccaaaactcaatgtcgtgagctcccagctcgcaggcccacttggctattcttccaatggcttctttgttgtggagaat

SEQ ID NO: 56173 - DNA, 334 bp, Zea Mays
cggccatcagaattcgaacagagtaggggaggctggggtgaacgtcccgtgggcgctggtttgcagatcaacggctgtgattagtccgcgcgtaccggttcgcctgtatcgatccggtccatccatttctgatctggcgcataggattccatcggagtatattagatcaggtccgtcgatcgttgatccgatgtctcgtgcctcttaccgtttcacagggttggggatctaatccggtgcgtctgtggcagatcgggtggccgatctcgctctgtaacccttcggccagggaattttgttaaagacccccgccaaatactgaattcaacccgcg

SEQ ID NO: 56174 - DNA, 774 bp, Zea Mays
cccgtagcgggagccagtacgcttgtggcccccgaaacaatgccctcttgacacacatgcgtcaggagcacgcatgtacccgactgacgaggagataaggcagactctgttgcccactccaaccatggcagggcacgtcaccacacacatatcgtcttagatgacgccacatcacattggagggatgccggagagtccctgacaacaggataggacgtcacctcgtacgccccctcgtgccctccaacttcgacccatgggtcccaccaggcatcactatagggaaactcagcaccggagtcgctacagtgacccgcatgcggggtagatagaagcgagaccactgtggacaataggttacgccctccttcggatgacaactccctatgcaagaacccccttaaactataaattggaggggggcaaacaatcaaagggcaggagcatctagctagagttcctcactccctccttcccacacttgcacctatgatcggcactacactggactagggcacaagcctgaaccagtataaaccctctgttggaatcccttgagtccacgctagtctccccacgaaacacaaattctattgtgtccccagttccgaaaccacgacagttggcgcgccaggtaggggagtttgttattagtgtgtcaagcaactttgttccctctgatggctcaatcatccaccttcactgttggcgagactttcgccttagggagccgcaccggctttggatcccttgactttcttgccactaccaccg

SEQ ID NO: 56175 - DNA, 691 bp, Zea Mays
acttatctctgcatcacccggactcataggcatctcaaagtgaacttgcctctcatcattgggaagatcactaagtgaagcaactagaacctcaacttcttcgagagagggtcgcactctatgacccaaaccacagtcactagcaggaggattagacacaaaatcgaaaaagggcttggaaggtggcagattccaagcagaatatgcaacaggagcaccaatattttatactttgcctctaaggatcatttccagtcggctcaccaagtccacaacaggaatccttttgttggtaacccgggttgagtcagtgacaccactatacaaataagtcaggtatgctttgtccttcagtggctgaatattcttaaaaacaaagtctgcaaccacagcttcagcagtcagacctctctccttcaacaagcaaatttcagcaagcagaaccttggcttctgttatctccaagtctgtggggaactcaatccaacttgaagcacgaacattcggctgtctccttgactaaggggggagggatttgccatggttttctacaatgaaccactctaaacgccatcctttaatgctatccttaagtgggatgtcaaggtattccgttttccttccacgacgcatctccagactcgcaccacccacgagctggtgctgccccccagccatctcaggccgacaa

SEQ ID NO: 56176 - DNA, 351 bp, Zea Mays
cattggcagccgagacatacgagtcctcctactgtgagctcgaacaacgaatccacagggtatgcaaggacggtcagaattcagccaaggacaggcatgcacacagacagcgctctacgataaggacgccgtggttgagcggtcgcattctaagcaatcatcatcaaatacagcctcgttttctaatttctaaaaagctagccggtgccgagaagcagcatggacaggagatgcttgacagcggggacatgctggctcgctcgctcgctgcccaaagcaaatcgagctgcattgccatccactcctgaagcaaatggaaaggacgaaaaagaaccgacgggtgggttgttt

SEQ ID NO: 56177 - DNA, 660 bp, Zea Mays
ataaattggagataattaagctcaaagtcgggctgtcaggcaatccctgaactgaaattttcagtagcagtgtgatggggtgaactttgagcccgattttgaatggaattcggtaactattttagggtaagctccatggaaaagttgaagatgaactataggtctataactttggtacagagagctagcctggtcaccacacaaaatcaggagtaaatcgagctccaagatgctctgtcaggttcatctgactaattcgccatggtacagtactcgtgtggatcaggacgccagcacagccactttaccgccggcgaccgattgccgccgcgattcgtgcgaccgtcggtccactttgtgctcggggtgagtggataacacccggtgtacgtcgccggggataaagtccgaccataaacaaatccggccaccgtaccgcacacgccgcggtggaaattcgatgggcacgccggtgatcaccgcctctcggccttacgccgcgtgtccgagcctcgccaccgcaccgccacgattcactttagctccccgttgctcaccggaatagctgccacggcgttgaacacgtattcactgcgccggtattcttccttatctccggctgcctgcgttgctcggccaaattgcacgccaccgtcgaag

SEQ ID NO: 56178 - DNA, 360 bp, Zea Mays
ggaccagtgcagttccgatggatgtttagtcaagaaagagaattgaaaaaacttagagctactgtgcggaacaaagcaagggttggggggtgtattgcagaggcctttgcagctaaagagatcacaatcttctcaagtcagtatttatcacacactaacaacgtgaatgctcagtcaacacagtatcatactaatgaagaaagtccttcgaccgaccttagtgtttttctttggaaagggaaaggggtcggggcttctactgcacattatgttgacataagagagcgtaatttcaccatgctctacttgtacaccaacgtgaatgaacttgatccatactttgaaatgtttgattccata

SEQ ID NO: 56179 - DNA, 487 bp, Zea Mays
gcaccggaggccatatcctttccattccataggaaacccacagtagcagccggtaaccgcatcacgctcatgatataattcagctgaccatcgaggaccaggttgaggaggaacatgtgtcccattgggttcaggaagcaggattgttagcatacgaggaatttgttagccttcgcaatagtgggggtgaacatgtgtaggcgtagcttgcagttggaaagggggagaccgaggtagctttgagggaaaccttctctccaggggagaaaggtattcacgcaatgggtggcgactaggttatccatatgcatcagcactatcacacatttggtgtaattgatgcggaggcctgtagctaaactggtccagcatgatcttcaaggcgtgggcagctggaataattcattcgaggaggattaatgtgcgcgtctccatactgaaggttcgcacctggcttcctaggagcaatggggtgcactatgttgta

SEQ ID NO: 56180 - DNA, 391 bp, Zea Mays
caaggggagggaattggatgcagagaccggcccaaaagtcactaaacaaatgtagatgcaatctcttagtcatgatgttcgtgaactgatgtgtagatgcgacatgtagcacttgaacttgccttaaagcaacctcacggacgaagtggatgtcgatctcaatgtgcttcgtgcgacgatgatgaattggattggcagtcatatcgactgaattgacagtagacaatagtcgcagaaggaatccggacatgaagcttctaaagcaactatcatagccagcaacactccacaactgaaacaggacattgtagtctgccacttggaagaccaggagaccaaggtgtcactgagaaaggtgcagaagctcaaggtagaacaccgggagtttggg

SEQ ID NO: 56181 - DNA, 987 bp, Zea Mays
atgaagaagggggtgggcattgaacttgttgtcctggaggtctcttggctgctctttttaaagctttctttcctcctttgaatcatatgagtgtgaagcctaacatcactacacctttaaagtgggagtttcatcgtgcgttgggccaggccatggcactattaaatgggtcgtgccttgggcccgctaggcacaacccatttggccatctatagtcaatagtctagtactcctccctcatcatcgtacctgatctcgtgagtgtggaaaaagatgagagaaaacacttcatcttgtttgaccccacaccacacagtcacatacctcgccatccgcactcacctaatctatgtgtttggatcgtgtttgaataactatcccatttaagcaatgtctacctatatgatatatagaaaccgtagcgatgcactggcaactaactatgaattagtcatgcaggagctcattcagcaaatggcgaatgtgcagtacaccgagaacatgacagaggaacaggttgatgctatggcaggaagtgagactttgcggcagcaagcttcactgttcggagcaacaagaaactataaggttgaagggacattcatctatctcagcagcatatttggatcaaacaattgtcttaccaaaaaatgtaattcttacgcaggtgttgagtaagtccacaaacaggctaagggattcgttgcttccaaaagatgagcccaaacttgcagttcctatgttactgcttattgcccagcatcgatccaagtaagatttttattaacttggtggggccattatcaggcatcttgcctttgttccatgtgtttgttccaaaccatgcaaatggcgatgcagaaatataaatggcgtgattgctaatgatttaccatcaaaggaagtacgtactggagtaggataggtgtcaagccttggctgacattatttattaaattattttttatctggcaaattgtccctttt

SEQ ID NO: 56182 - DNA, 531 bp, Zea Mays
aaaaataattacattgcaggacaaaagatcacttttcaagtgtaatttgtcaacagttagtcggttactgcttgatttccagccagagtggtaatagctacatgaagacaacgaggacgtcaaggttttccttcttcctataggcatcagttacctaaatcgccactaaggtttgttaaaatacagattaaaatacagagggtatgtatgtacgatcacgccacatcacatagttatcgactctactatttaaggattgaatagacgataagaggagatgaatgaggaccaataaaaaatcttggcacttcaacaatcttagcttgattcctaaaagttcagcccaaacctttaagacatcaaaactccacaaaaaaagatttaaaataaaaacacttcaaccaataaatggatgaatgccttgaacaagttaatgtgaagaatatcaaactagcggaacacgaaatggacactaaaattttcgagatgagacaatcaaaggcttatgtgaacagtatggtagtgccgctc

SEQ ID NO: 56183 - DNA, 569 bp, Zea Mays
tcagggttttctctaagtcccccaaactgaattcaaaactcgccacattcacctagttccaaatggacaagtttgcgcctaatcacctcagacacgacctggagtaattgacacacaaaccagcccatttgagacgattagcgcacgcctttgtcgtgaccggagagctgtgatagacacgacttggcactgccgtagctcctagcccgacgtgtatctcggcttggaactcatagagaaaagcaagatcttggtgcaaggaagagatcctacatggaaccttcgctgagataggcactgtagggcagctaaacggacacttgaactcgggcatacgccatcctccatgtgttcgacctatccaggtctcactcaaaccgcgcagtgcacaccacgatgtcggtccgctcggcagtgtgtccaccccgcgcccaaaacctcccctataagaagccactccatcccaactctgcccaatctagttcctcggccaatgtccctaggggctagcgaagctccccagctgcttggaccaaccgaaacctcgccagagaaacctagacgcatcg

SEQ ID NO: 56184 - DNA, 466 bp, Zea Mays
gaggacatgatgttggtcatgccggaagaggtggctttggtcgtagtcatggataagggcacgatgcacgaggagatacaagatcggtgtggtagttgtgtgaaaagccaggacatgtggcatccagatgttagaacaggttgttatctctgtccacaaactagccgctgataattgtatattccttaagtatcatccttgtttttttgtaaaggaccaggacccaaagagaattcttctacgcggtagatgttaagggggactttatccatggccaagcttagagcaatcatcttcatccaagtgcattttcatgaccaccaagccttcatgatcaaggtgccatatcattgtcaataaggttgttagtgagaataaattgccatgctcttccttatggtcaagtgaaatccaagtgtgtgatgtgtgtcaacacgtgaagagtcatcaattacctttacctaag

SEQ ID NO: 56185 - DNA, 400 bp, Zea Mays
ttcttagctgccatgttggggtaatacttattaatctttctaattcctctcttcttctctatttttcttgtgcttttaaggtgggtttgaactacaagatagcttaataaattttcaaaaattcttcaaaacttacagtggcttctcactggcgtataattttttgtctcaagttttggggcttaaaaagtgaggggttctctcgtacaaaattatcaaatattagggcagagggggtgttttgaactacaactcccttttagcagtgggttattctctaggacttatttttgctggaatttagatgttataacatggttttgtacaaattatcagccactaataattattagttattttgctattattttctaaagtttctagacaaaggggtcctttc

SEQ ID NO: 56186 - DNA, 415 bp, Zea Mays
ctgagtcatggtggtcgctggtgaataactccgactgagctcaggagatggcgccacgtacgagttaccctttccccggcgttatccatccaatactgcgcacgaatcgggacagcgattatcaacggcgagctgagctggcgttctgatctgctcggttactgtaccatggcgattgttcttcagtcgcctgaaccgaccatcttctcccttcttgatctctggattctgattagaaacagagcaatctcctttactaagatttgttcaccatgtatcagcctacaaactagctataggattcatgggctaaaaccgagtggattcaagaatatggcgcctcaaacttggcctcacctcactgggaccatttctaacctagggttcagtttcagttttctaatccagttctgac

SEQ ID NO: 56187 - DNA, 515 bp, Zea Mays
gtgaaattggatgaacttgagatcgaatttgagtaggatccaggggttatttgagtttggttgctatagcaaaatgaaagctggagtatagatcaacaactttgttacagatgaattaacaagtcccacacaaaaattggagaaccaatctctttaacctgctttgtcaggcgcactgaagaagtttcccatggtacagtactgaaaaagatcttcaggtgcaatgcacctcgccgccggtgactcttgcgcctggattcacgctggcgctgtgattcgcgcccggtgatacacggataatgactctgggtaaaaagatcttcgccgtggatgaggtcggggcactgtggccgccctattgacgtacccccttgcgtcgtgatgtggccgcgcggctatcgtggtgatgatcgccgttaacccaagcacatcacgctactgaccttgttactacgctgtagtaggtcacggtagatagcccctctgtcgccggggacttaactcagtgaatgcca

SEQ ID NO: 56188 - DNA, 414 bp, Zea Mays
tcagctacatgatttgaaggattgaatgcaataaagtgggggtcccgtggatacgctgctgagtgtcggtcttgagccatatttaggatcggcctctggtctggcggttgcctcagacagtcgaaactacctcccagagagccaaggtacctaggacctagcaaaaaaatcttaccacttgagccaggctgcagttacgcgggtcttagtctggtaaggcccgtccatgtaagcccggtctctagcaccatctatggtctatcccggtaggggactgcccttgtaaacctagtctttggtgtttattacgtatatctcatgtatctagagataaaggaagaattttctctcaagttcaacccttatgaatcggttccatcacaatgctttaatccaagcatgattctctttcta

SEQ ID NO: 56189 - DNA, 445 bp, Zea Mays
attccgcaaaaatctggacctaatagattgtaatggtcttatgcctttggtggatggcgagttagttatggaattctgtgggggctcttttgaaagatggctatggcgaaggggtacacagagattctagccgtcggatgaaaaatctgggatccagattagatcgcatctcactgaactgacatgcgatcaaaaccgtccgatcgacgaccgacgcactggattttaaaatgctgggatctattccctaccagtcaaacctagatcgtcggtcgagatgaccccatgccaaaattgatacgcagatcaaatcttaggcgtacaccttcgatccaatggtccctgatcatcaacccatccatcccctacacacgatagaaccgtcgcccaaccaacggcggggccatcactggagggtcttaactaaggctctgatgctccaaac

SEQ ID NO: 56190 - DNA, 619 bp, Zea Mays
ccttctgctgatgagcagaaaaagaaaaggagacgcctccggcgagtatccagtttggatcgggacgttggtacttcggttcctgctactgaagaagtgcctgtaactgaatttattgacgctgaccccaatgggtgtacccaatctgctgctgatcccaatgtgggtgctccatctgttgctgatcccaatgggggcgttgcctgtgttgctaatgtagacgacgaggaagaagaggacgaagttcctttgactcggaaaaacagtcggcagttcatcgctagtggtgaaagtagtggagtttcttctcctgctttgtctgctctcattggtctgcaagaattgtccctggtgaattttgattagactcttgaggatatggttccagaggatttgttatcagagccagcagatgatggtgtgatggaggtttgtgctgatgtgcttgatgctgggttgaggtcatcccgtgcctcgtcgaccttagagcgcgatcttgagggtcaggagactaacttggatcgtcctggtcccatggaagtgactgagggcccatcagccttagaggtggctaccgcagagaacttggaccccaaggatggtgttgacacttgcccag

SEQ ID NO: 56191 - DNA, 687 bp, Zea Mays
aaatctatttctaataacttttgtaaaactctctctcttacaaaatgataatccacctcaatatgcttggttctagcatgaaagacaggattagctgataaatattttgctcccaggttatcacaccaaagtttagctattctcggactgttaatatttagctctttaagtaagatttgtacccacataatttcagctgttgcattggcaatagccttatattctgactcagtgctggatctagacactgtgggttgtttgcgagcactccaagaaatgagatttgaacctagaaacactgcaaagcctcccattgattttatgtcatcaatactaccagcccagtctgcatccgaaaaggcacttaccaaggttgagggtgacttatgtatatgcagccctaacttttgtgcattgtttgatatatctgagaattctttttactgcagcccagtgaacagttgtaggagcatgtagaaactgacataccttattaactgagaaggcaatgtcaggcctagtgagagttaaatattgtagggccccaactatgctcctatactgagttgcatcattgttgcctagtaaagatccatcatgcaaggatagcttctcactggtggatagtggcgagctgactggtttgcaatctgacatccctacctttttcaataaatctgaagcata

SEQ ID NO: 56192 - DNA, 517 bp, Zea Mays
tccaatcactaccatttcaatccccatccaaattgactcagccggtggtagaattcgagtcgatagcatttgcttgaatgtaagtgtggaaataagggggatagcgtttcccgctaatctcatagtaatgggtactcagggaatagatgtcatcctagggatgaattggctagataaataccaagcaattatcagttgtgataggaggataattaagttggtgtccccactaggagaagaagtggtagccgagttgatctcacctgagccaaggaaaggaggttgtcatcagatggctatcgataacaaggagccagattcactcgagattatcaaggttgtctccaaattcccagatgtgttcccggaagacataccaggcatgccacctgagcgaaaagttgagtttgccatagagcttcttcctggaatcgcccccatctctaaaagagcctacagggtatctggaccagagttggttgaacttaagaagcagatcgatgagctgtcagagaaa

SEQ ID NO: 56193 - DNA, 480 bp, Zea Mays
caaatcattgtaaaatgaggttatatattttgtgagattctcttgaccctcaattttttcttgatcatgatccaacgagaagattcttttttatgttcttaccattagcaatcatatggaagtatctggtgttattgtcactcaaaagaatgtcctttgtcttggctcgttgtaaattctaatttcttcctcccttagaagcttagctaattgatctcgtgactgtgctaagagaatttgctcggcttccgataggtccctaatttcagctactacatccaagtcaattattgttccttgaatggcagctttttttatttatattgtccactatagtttgctgccaaacctctaagatggtgtttgaggacacccatcttgttgttccatcgctgaatcgaatttttgctttgttgggtcgttctagatttcaacgactctcttgttgaattcctcataggacaaccagcagagttcaaa

SEQ ID NO: 56194 - DNA, 337 bp, Zea Mays
gaaaaaaggaaaaagcatgaacagttctggaccggaactagcccaagtcggcccatctacaggcaaaacgcgcccgctcgcgcccgcgctgtcagttttgcagcaacgcccctactggttcaaaaatcagagcagcagacctcggcactatttaactaggtcactgacatttgtgaataagcccttgcacttctatctcttcacagctcgtagtccacgatagcgaacggcggggaaccgagctctggtgagcttgtaccggccggatcctgcaatgatcggtgctcccgtgcggcagacaccaaattggacccctcttaatcatttcccctcactc

SEQ ID NO: 56195 - DNA, 436 bp, Zea Mays
tgcaggctgctgctcgcgcagtcattctaacagatctggctggccaatctgatgttcgattactgatgaattgctcgcatcaactgaattgttacttcacatcacaggttctcccaatcatttgtcatttagggacttcggtttgatggtccaaactagagaaccgtttgattattatatcctggcatttgcaatctaacagggaagtagggaaccattaatcccccaggttataattatgttctgttttcacttcgaacaatctgttaatctctgtcagtgtgattaatcaaacctctgctgctccgtactccctttttttccctttgggttatactgtagttagtcacctgcccacccgtgcactcaagagtcaagacgagcattttcctcacgatcgcacttctgcaaattcagtgacgacaatttgaggtcc

SEQ ID NO: 56196 - DNA, 536 bp, Zea Mays
ctaatgtccatcatacatggcaagctggggtggtttgtatgagggtggccatggggtagcctacaattctgtaactagggggaggcaccatcaaaagcaatgttatcatgatgaagtcgtcataccatatgtcatcatggctagggctttcttgatgtagctctctctgttgtggcttatgcccttgttcattgtcttgtgtgacgtgtcacatctcttcggctacttcatcaatctttttctggagctcaaccagccgaagcatcttctcccttcttctctccacttgttgatgaatggcttctagatcactgatctcttgatccaatagttcgtcctgtggtgttgggctaatagctttcctcttctggcttcgggcctcccttagaaggaacccatcttgattagtgtccagaggagcaaggacagcccctagcgccgctgtcttattcggcagcatgacgaaggtggtcatttgaatcctcttgacgaaggtggtcgtttgagttcaccggaggtgggcgccaatgctagtc

SEQ ID NO: 56197 - DNA, 882 bp, Zea Mays
agctgctcgcccggacgacagggggaaggacccctcgacctccagtaccaaggcaaatgtcgacggggagaaataggaactcgcgctcgtcgccttcctccaggcaaatgtcgacgttttcgcatgggaaccatcgcagatgcctaggatccccagggaagtgattgagcatcatttgaagatccaccctgacgctaaaccgtgagtcagaagcctcgcagacagcccattgagcggcaagacttcattcgccaggaggtccggaagctgcttgacgccggcttcatccaagaggttcatcacccagtgtggctggccaacccagtcatcgttccaaaggcaaacgggaagcttcggatgtgcattgactacaccagcctgaataaggcttgtcccaaggaccctggacccgtatccacttccacgcattgatcaaatcgtggactctacctccgggtgcgacctcttgtcctttcgagatgcctactcaggtttccatcagatccagatgactagggaggatagaaagcataccgcttttgtaacagtggatgggctttactgctatgttgtaatgccctacggtctgaagaatgccttgccaacatttgtacgggcgatgagtaagaccttcggggacctgatcagggacagggtagagatatacgtcgatgacatcgtggtcaagactaggagggggtcaactctggtggaagacctgaccctggtctttgacaagctgcgggcgacgcacaccaagctgaacccggacaaatgcgtctttggtgtctccactgggaagttgctgggattcctggtttcgcaccgggggatcgaagcaaacccggagaagatcagggcaattgaggcgatgaggcctcc

SEQ ID NO: 56198 - DNA, 977 bp, Zea Mays
gactgacttttctcggtggtctgtgagaaggactgtcttgtttgcgcaactgatgatacctttgtgtttggtcaaccaatccatccctaagatcacatcaatcccttgggatggcaagatggttaagtctgccaagaacactaccccacttaaaaggattctgacttgggagcatttgagctgacaaagaaggtctgagttcgggtgaccaagggaatctctagaggggtagagggaatgccatgcttttccacaaaactagtggctatgaaagaatgggatgctcctgaatcgaaaagtacagtagggggagtaaattcaacaaggaactcaccgagcactactcctggagcttgctgagcctcctgagcatcgacgtgatttactcgagcccttccttgatacggggtcttgttctgttggctgatggaggagggcaccttgggggtggatgctgaggtattcttggggccattcaccgagttggagtaagcaggtcctgatggcttcagctggggacagttgttcttgaagtgactgggatctccgtagtgccaacacccattcgccgggggttggttgcttgcaactgagggggtatgaaaggagctctgactctgctgactgaaccgtgacggggtgggtccagctggtctactgaagcttggtcccttgggtggaaatccaaaggatcgagttttctggtgccgatcttgctgctgagcccggaggacttggaatttcctcttgagatggcctttttcttcctcctttgccctttccacttgcatggctttgttggagaggtgcgagaaactgaggaagtcttggctggcccaggatggtcttgagttctggtctgagtcccttcaggaagtgggccatcttcttgacttcagtgctgacgtcatctggcgcgtagcgggccaactccgtgaacttgtgcacatattcactgacagatcttccgtcttgag

SEQ ID NO: 56199 - DNA, 448 bp, Zea Mays
ttcgtcttgaaggtgaggagaccacgcctaagcctcaggataatgatgtagtcatattttgaagcttcttgaatgtcgggcttcggttcccattgcacaagatggtgataggggtgttgaaaaatttgacatcttattgcatcaactgatcccaaatgctattataaggatggggtttcttatctgggctatgcgaagccaaggtgcaaagccaagcgtggaatgcttctatcaaattcatgaattacactaccaaacgaaggcagttggtagagagcaccttcataacaacttcggctgctataactttgtgtgtcgcaaggaagctcaatttccacccttgcataccatagcaaatggtcgaactagtgggcgagagagtggttctacatgaaggtttgcttgaataagaaagaggacatgaagagtttaattcagaatcctatcg

SEQ ID NO: 56200 - DNA, 958 bp, Zea Mays
ctccctctaggtgacttttagaaggaggaggcccacaagagtgcggaactttaatggaaggacaagaaggctaggatctagaagaaatgctgccatgacgagcggtagatacgcagggatcgtgagctaggccgagaccgtcttaactgatgaggaggaaggtgacggtgttatgcgtgcaagctccgaattctcagctattcccgtgggtgatgcctaccttgatgtgttaaagcttgattccttcctggcctttccagatgaggtgacaaacgcctcgtctactggggcgggggtgcaaatttcttgaacctccaggcctcgaccccttggctgatgggttctgcgacctctgccttcctaccctctaagaccatggtatgcgagccatcaaggacattcggtggagaagactcatccccaccgagcgcataagcggcccccaatgttgtgccctcgggagccctcttccctgccttcgatatgggtggtgggcccaatgttctatcatgaggagacgggggtgagtcaccaaccaggaaacaaaggtttgacattacgcgcatgctgagctgtggtccttgccgacctttgcttctcgcccttctatcgtcttgtcgtctgacgtctccctcccccctttggcaatgctcctcgcctctccgcccctttgtcacacgtaaggaaggtcatatttaagaagcgaaaaatggtgtctgccctcggtggggatggcagggtgtcagtgctaccggaattccttcagtcgtcggcccctgtcaaggtcgccatggtcaacactcctggttcgtttctcccgctatctttggcaattcttgtttggtctagatcatgagggctaagggtcattcctcctctgtagcgaacttagaagtctccactgcccctgcctcaagtcactcgctttgtctcaccccgccatggcctccgctcctcg

SEQ ID NO: 56201 - DNA, 1119 bp, Zea Mays
agagttcatcactcattaaaacatacttgaaagttgtacgccgaatgttcttatacgtcctaacactgggatttcatagataattaattatgggtgtcctccaatcacttgcatcagcttcctcaccagccgaatcaatgaagagaactttcctggtaactccgggcagtccgaattctttactaggacagtccgcgacctggggaattggccctatactggttatcagatttttggtgttgtgaaatttccctcgctttatccgataacctgatccatcttgtgccaaattgttagcactgtgattctcaactctagagatgtgctgaatgctgaattcgtcaaaagaatgaattatgcccccaacatttttcaaggtaactatttagagtaccatcaaaacattgatattcgtctaatacctgttggaccaccagctgagaatcaccaaatgccttcacatgttttactcccatacaatttaaaagttccaagccgaacaaaagggcctcatatttggcttgattgttagtgcaataagttttcaatcggctagagaagtcaaaggagacattacttggtgaaacaagcacgatgccaattccttgtccttcattgcaaaccgatccatcaaaatataaagtcctgggagtaacagtgaggtacgatatgtctagtttatgagtatcatcgatccgatgttctacaataaaatctgctacgacctggcctttcatagatttcaatggttcataagccaagtcatattctataagtgcataagcccatttaccaatcctaccactcataatcgggttttgcaacatgtatttaatcacatcggtttgactggcaatggtgcaatgactagacagtaaataacatctacacttggtgcatgcataaaataggcataagcataacttctcgataaaagtgtaccttgtttcagcatccaccagtctccgacttaggtaggtcaccacatgctcctttcctccggtttcttgcgtcaaaacagctccaaaaaccttatcttcagctgcaatgtataatctgaatggtacttttaacacgggagccgaagataaatactttctgatgagatcaaacacttcc

SEQ ID NO: 56202 - DNA, 449 bp, Zea Mays
caaagctaaaacagatgcatacctataagcctagcccgctcggcagcttcttcatcccttttcgcctcttctgaagcatcatgtgattccatttcgttccttttgatggcttcatcagcgacttctcgcccgcccttcaaccatatctcggagtaaaatttcccacctagggtagtagcttcggctgaagggtttttgatatcttcaactgagaaggcaaagtttgactgagccacagccttagtatgatcacaaccagccttctccaagatggacgtggccctccatgcaccagcaaaggcatagaaatttcctcggtcactaagaattttgtcaaaagcttcggcttccccgctgatccattggataactccatcagggtcaccgcagatgaacctttgctcagaggaatacgccccaaccttagcaaagctgtttttttaatttcc

SEQ ID NO: 56203 - DNA, 684 bp, Zea Mays
ggaagatgcctgaacctcgtgttctgcagctgctgccggtaggtgtggctgagcgaccacagggtccgacgggcagcatcgctgacagaggcagcgtaggtggacagcggtatcagggactcgtgagcagacagagtcctgaatcccctgtcacctgcatccattaccctgacatggatgcgagtgatgtaatagcaagcccggggaggctcgctcactcgcctcgtctcatacagggggcggacgtaggtgcctagcgcatgcagcacctcctgcagcaggttggggaagtgcccgtcttgaacattgatgtataatgttcgacaacaggaccaaaccccatgaagttgtcctgctgggcgtagtcatcttcctcattgatgtgtccgtcttctccatcgtcttcgttgtcgtcatcctcgtcatcgccgtctccggagtcgtcggggtcgtcgcctctaggtgcaggtgcttggaaggctggtgacgacgatgctgacgtcgatgacccagctgcgaaggccagagactcagccaacggggtgggggtcggcagctgctcctccgagctgtcctctaggttgattacgttctccactcggacgggagggagattcgctggagcttcctcgactaccactgggtagaccgggatctgccggggctgaggggcgtagctggtgt

SEQ ID NO: 56204 - DNA, 434 bp, Zea Mays
gtgcaattatgtttttcatcattatttttttggaacatgtacaagaccataaccggatgcttttgttgctaatcaagaaaatgatgaaatcgatggagaagcggaatagtaagatggttgtacttggcacctttttgtgagcttggaagtgatgctgcttgttatcttcatatggttgttggaaagctttgaggatgttattctatttcagtttaatttctttgtcgctcttagttcagctcctgcacgagcagtttatctgttgtctggtgttgaaatctgttgggtggtcgggttgaagtcccgtttagataaattgtagcgtctttctggttttttttcatgggggcagttttgaatcaggtttgtttcgttttcccctagaaagtgatcttctctctgttaggtgattgtatagtgtcttttgtctgtag

SEQ ID NO: 56205 - DNA, 553 bp, Zea Mays
aatgtgaatccggcctctatcccatcaagcatgctgatcttgcatctattaaacaagcacatctaagctactcagcacgtcatgcacagtggcatgctcggtttggtcatccctcagtccaagttgtgcggtccattttaagtctccatcatctcccatgtcgtgaagacactagtttgtctactgtctgtaatgcatgtcaattagccaaaagtcatcaattaccatattatagttctattttccatgctacatcgtctcttgaactcatatattctgatgtctgggatcctatcccagtgtctgtcggtggctacagatactatatcagttttattgatgcctttagcaaattcacatggatttacctcatgcatgataggactgatgttcaacgcattttcatacaatctcatgctcatgttgagcgtcttcttgataaaaacattaagtgtgttcagtccgattggggcggtgaatatcaaaaacttcataactgttttctcacttcccttggtattggacatcgtgtgtcttgtccacatactcacca

SEQ ID NO: 56206 - DNA, 834 bp, Zea Mays
ttgccgacttaagccgattgctccgttagtagggcatagtggtcaccccgagtttagtaagcgtgagcatgtcgcaccgccttaagtcattgccgacttaagccaattgctccgttagtagggcatagtggtcaccccgagtttagtaagtatgccaattgacagcgaacaatttgagtgcctttgaagcctttttattgatgatatatttctcaatttacagaatacatcatcgtcccaatagctttggggatgtagctaggggtaaaacttcctgaggtgttctatgttccatgagttcccaatttccgtaccgtccatctgagtgagacgatatgatcccggccgagtgacttcagctactatgaatggtccttcccatagaggtgacaatttgtgccgtccctcccttgttagaattcggcggaggacgagatctcccactgcgaaggatcgatgccgtatggccttatcatgatagcgtctcagagtttgctaataccgtgctgattgaatcaccgtgttcagtcgctcttcttcgagtacatcaacatcctccagcctagtagcttcagcttctgctatgttttcaaagattaaccttggtgccccaaacttgagatcagcaggtagcactgcttccaaaccatagaccatgaagaaaggtgtgtttccatgcagagctcgactaggttgagttctcaggctccaaacaacatacgacagatctctgatccattttcctgcgaacttttcattcttgtcgaagactttctttctgagcgcctccaatatcatcccgttagctctttcaacctgcccgttggctcttgg

SEQ ID NO: 56207 - DNA, 671 bp, Zea Mays
cggtcataggcaggcagtctatttaaagaggacaaggggcgacccttcgtctcccgcccgtccaacaaacagtcgtgatgacttcaatagccgaataagtttccaagaaagggagcagatcactgacacccattagtgtaacacggcaccagaagggaagtaatggcaactgctcaggcgcatcattacccacccgtcgcgctaggttactattttgggacaagacagcgtacacacccattgggcgcacccattgggtgggcaaaccagtttttttcaagattttctgaagcaacgtgatccgcaaaatatatgcaggaattacaaaacaacaaactcaagatcggtcaaacagaagatagccggacctctatcagccagaaccaagtcagcggttgcattaaagccctaggcagagtgtcatccagctagacctctatcggtttggacccagtcggctagatttcagtcagcggatacctcggccagaacaagctcaaccggataggcatcagtcgggcttaatcgttataataaatcagagttctctaagaacaattcgtaaagaccattgagttgattagtactcaaatcaattcaaagctccagggctacacccaatggacacaagagccaaaaagaaaatgctgagctctaaagaaggcaatgaa

SEQ ID NO: 56208 - DNA, 631 bp, Zea Mays
gctccgttagcagggcatagtggtcatcctgagttaagtaagcacgagcatgttgcaccggcttaagtcgttgccgacttaagtcgattgctccattagcagggcatagtggtcaccccgagttaggtaagaatgcaagtcaatcatgaacaaactgagtatctttgaagcccttttttttattgatggcatatttcccaatttacagagtacatcatcgttccgatagcctttgaaatacggctaaggataaaacttcctgaggtgttctatattccaggagttcccaatttctgtgccgtccatctgagtgagacgatatgatcctggccgagtgacttctgctactatgaagggtccttcccataagggcaataacttgtgtcgtccctcccccattagaattcggcggaggacgagatctcctactgagaaggatcgctgccgcacggccttgtcgtgatagcgccttagagtctgctagtactgtgctgattggattactgcattcagccgttcttcctcaagtatatcgatgtcctccatcctagtagcttcggcttctgctatgatttcgaagatcaaccttggcgccccgaacttgagatcggcgggtaacactgcctccaac

SEQ ID NO: 56209 - DNA, 946 bp, Zea Mays
gagcagccaaacgtgcgaatctcgccataagactgtggtgagatctcttccctgcacctagggctacctagttcatgtgagttccaagggaagatatgccctagcttgggagatatgcgggtgccaagatgggtctgtcggcactattcatcccgagacaaaacaagtgtcaactcatgtcaaacggtcttggctttggttcaaacttttccagtgtgttccttaagtaatttgtctcccttttgtcaattggaccccatggatttggcgccagcaactaggtgaacatctatgatctttggaagaaggctggtttttgacttagagaaaaattggttgttcttgggtgttcttcacttgggggctgaatttgagaattttgtgggacctttttggattactttctttaccatttcttgtagatatattaatgtacttaaactttggtaaagggtttaagtcatgaagtggtcatttgattagctttcccactaatcccatgcttggaggtctaatggctcaagaaggggtctaaggtttgagccactttttccaaggtgaagatgtatgaaaatcttgggtatttctgttgtcatgatcattccttaatcaatccatggtttataaggttttagtgcccctcctcccccacttagacacatgtgataatagaccataagtgcatgtattgagccagggccgtgggtacactacaacacatatagccttctatgacgaatacatcgtgacaatagaccaaactgtcataaatctctcctatttatgacgttttgttgggatcgattgacttcagtgacgaaaaggaaatgtttgtcattaagaccaatgcaaaatcatcataaacatgaacgatgtcatatttgtgacaaacaccttttcaatttcatgacaattagctagtgtcactgtttcatgacaatattgg

SEQ ID NO: 56210 - DNA, 531 bp, Zea Mays
cacctcagctacatcaactagcaccaccctcaggggctgggccctccacagcaaccacctctagggttgaagattccttagccacgtccataagagccgggtgactcggatcagcgttttcgtgaggaagaccgccctctaaggtcgacgaggcacgagaaaccattagggttacctcttgcccagcagagtcatgcggcagaagaccatcatctgggacctctgaacaaatagtgggattgacagcttcaggtggctctgatggaatgtcttcggggatgacctcttccagtgcttggtcaaaatcagatattgacaacccttgaaggctgatgagtgctgacaaggcttgcgtggaaatgtcactgcccccgttgatgcccctgtagtgacgactattcttgcagatcagcgaaatttcttcttcttcctcttcttcctcatcaagcataccgccaacaacctgagcatcatcacaaccttcaacattgtcctcggggatggcgctcgccgggccatcgctaaggaata

SEQ ID NO: 56211 - DNA, 469 bp, Zea Mays
agttacccgagacacagcgcacagtgactactggacggcgggtttatttctgtgaaaccgaggggctctttactaaatttacacggcgaaggggtaacttctaatctggaccgttcgatcaaacgtggatggctcggattagatccacgcctcacccgaaccggtacgcatctacagccgttggatccgagatctgcggtctgagtttaatgaagctcgggccacccagaaccgaccgatccgatctaacggtcccgatcgatcacgcgaaagggtacgccctgatctaatcttagccgttcatcgccgaatcgacgggcgcgaatctctctcctcccccccgacctaccaagacggcggcgccgccgcgattcccacccggttgaactccggcgaggtggaatcggtgttccccaggtgctaagcctcaaattgaatcgagatttaccatgcgggaggcgggacgaac

SEQ ID NO: 56212 - DNA, 571 bp, Zea Mays
ttttgtttattttgaatttggttatttgggttggctggatgaccgtttgggacaagcagacttgcttttgtttcttttgtatttggctatttgtgagttgtgactgtctctgtgagctatgactatgagcgactatgaggttgtgataactttgaagtttaaacaattattatgatttcaaaaattcaagtacatgcatcaagcttcttgagttgtttaatttcttttagtctattcgattgcaagtgcatgtgtcatgtgtgcaagtgcttgagtgcgtactaaattacttgattgcatgcatgcaacaagatacttgagtagttgagtgagtattttagtttctcaaacatttacgatgtgtgtacttgttatccgaataaactatttgttaccaacagtattcgtgtctgacttgtccgtattcgaaaggtgaatatccacatccgtaaccgagataatccgtatccgtatctgtatccgaaactatccgtatctgtattcgaatccgactataattatgaaaacgaatacgatatcatcaatatccgtccgtatccgatccgattac

SEQ ID NO: 56213 - DNA, 271 bp, Zea Mays
cgggaatgatatcaaaggcatgactcggaggaacctcagctccatcagcaggcggcagactcctggcatctggttcactggcctctaaagtaactagaacagcaagagccttagatagatgtgtcattgcagcctcctcagattgaactagcggcgacctaacgtggacatccatggaagcagcagaaggggagcctgccccaacaccctcgggggctgggtcgctcccagcaccaccctcgggggctgggtcctccatggcagccacctc

SEQ ID NO: 56214 - DNA, 523 bp, Zea Mays
gtgtctgaaccaacgtacccaggctgtagtggcacgctgaaggtcgacgagacggggatcagcagctagtggttgcacctcagtctcgtcacgctccccgaagcgaggtggaggaatgggcggagcggaaatgggagtgggagggggaacagtggacgctagagtggttgaggtggtgggtatagcggaagtggtggatggctctggagcgacaggagctggtgaagtgggaggtggagtagacactatggcggaaggtgtggagggagcagtggagcgaggccgagatgcaagacgacaaactgtataggctatctgatcagaagagatctgcaactgtccaccccgctcagcctgctctgctgctactaccgctgcaagtgctgcacgagcggccttgtccatatggtgcttcttcctgccctccttctgctcaaggtaaatagtcttccccttgacctgcctgaaggggcgaggagggtcctcgtcgtctcctccccctgacgctgagacattcttcatc

SEQ ID NO: 56215 - DNA, 466 bp, Zea Mays
atcatattgtagtgtctcactctttattctggtatggattctaggtggagtctatacttggagaccttcaccaacttgatcaacgaccaatatccataatggctcgacacctcgactggtgtgggcaggtcttcctcgatagcctttttcccatatatcatcattgggaggatgtttctacctgtcctcattgcttgagtccataaactctattttagtactcatatcatccttccatggatgctccccctactcctaccactgaagctccatccaccgacactcctacatatttcacttatccatatcatccaccatcctcgtatgggtatccatatggtgctcctctatatgaatcatgtggtgctcctcctccatatggtgctcatctttcattccctcccatgtttggtgcttgtccctcatatggtgctcatcctctatttttcctcctataggaatgatg

SEQ ID NO: 56216 - DNA, 502 bp, Zea Mays
acccacttgaatcctaattctattttgcaagtttccatttttattcatctgtgtgaggcctacctcgggattcttccccattttggattatggaggtatctgtatcattgtcggcctgggatggctgggggacagcaccaacttgtgagcggcgccagtctggaactgcgtcgcgagaggaaatcagagtacctcgacaacccggtgaaggatagcatcaaggggtggtgcctcgagtggttcatcgtggagaatcactggaagtcccttccccctcggtcagggaggcagccagatgtccgtactccaagctgggtagaatcttcgaccccttcggaggtaacagaggcaaaagtgttgcttgctgaagtctgtttattgaaagacagaggtttgattgctgaggttgtggttgctgactttgtcttcaagaatattcagcctttgaaagacagggcatacccagcttatctgtatagtggtgtcaatgactctacccggg

SEQ ID NO: 56217 - DNA, 298 bp, Zea Mays
cacctgtccaacacttaacacatctatcagccctttttaattgggttgtcatctaaaccaccaaaaaccacaagagagctttcgacatctcttgtagcatgtttacatcatcttattatacttgctcttagtcaggagatgtttaggagagctatgttatatagacccttctgtgacaggaatagtactgtttagttgaaactatagttgcacataagataatttggttttactgtatagttttgactaagataaaattagaggctacagtctagagagaattttagattgcctaatc

SEQ ID NO: 56218 - DNA, 725 bp, Zea Mays
ctcatggtcatcggaaggtgaggatttgatgaacctatttgctaggatggacgacgagtcttcagaggatgacttagattacttcatggcgttagatttgtctatggcggagtcttcgcctaggtctgcccctaccgcgacagagtctccgtctagagttggcccaactgcgtgacagggcaggagaaggatcagagtgtcgaaatggagtgtgagaatgttgggcgagtcttcgcaaggcatccaagtcccccgaaaatgttatcgtatgggaatggagaagcctcgtccatgggacagaatgcggtcggaggaagggactcgtcagatcatccttgcaccgacaactaggtagcgttttgaggagggagatttacgggctctatttgatggcgaggagcttagactgatgttgtttaattttcgagaggctggcctgatcccgaagttgacatggccgttctttggtgaattcaagtggcaacgttgccctcgccccttcgccaaaggatggctatgggaacttgtttgcggaacggaatatcttgtatacgaatgatagcttcgtgcttgttgtttgtcccgttttcaatttaaggtgtgcccttcgttgttgcacttgtgcttgtccggttgcattagtgggcgtctttggttcagagtggttgtctctcggacgacttcgtgctatttacaaagtgttctggttgtgctgatccagttgc

SEQ ID NO: 56219 - DNA, 905 bp, Zea Mays
gatcatcttgcttgggatagcaagttccaacaaagaccaacataatcaatggtcttcctatctttgttcataagcaaagcttctttgcacaaggtttctttaattcatcctcatcttaagtctcatcctgattctataaatattgtttgctttctcatcttgcttgggatattccgtattcacgtaatcctactgatccttctatggaataccacctttattctcttgtgttgaaccttttatgccttttactaagacatatgcttcatacttagtttcctatacaacacttgacaaactaattagtcctttaatagttttgtcattcaatccaccaaaatcagcgaaggtgttgatgcacttttaatgatgtattgtgtgtagtcagacatttgcatctagtagatcaatagagtgagtgaaaataggcaggtttcctcttagaaagtccccgcaccaatcacaaggtggatgtgttggctctgttttctgttgtgcctagtggataactgcaacaactaggcaaaagttattcatgacctcaatatggttctagatgatctactccagggtgaactacggtggatcaggtggtagattcagcaataagtttaggatccactagggtaagggtggcacgtctaggtccacatcgacatccaccacagattcaatgtccttcgtggttaatttatatcttctaagtcacatcatcaagatttgcctcttcttcattacacaaaacaattacaacatagataaagagaaagataaaggcaaaaatgattttattcccaacaaaatttattaactttattatattaattataacctattattgataactaggttgtggcattaagccacaactcagttgcactcattgcaaaaggaccaactcaaac

SEQ ID NO: 56220 - DNA, 760 bp, Zea Mays
cccctcaataacttagttttggaacggacaggcagggtctatttcagcacatctctaatcaggtagaaaatatgttagcaagtgattattaatgtattgataaacaaacttcagtaacatttatgtacatgcatgtgtgcatagaggcaatgcagtctatgtagtaatgtgacacgttgtcgtggaaaattctcttctctactactatgaagaatgtaagggtaagggggtaaggctgccaccccgttctgccctcccccgtccgttattgtcgcagcagaaaaaaattgctactgggctcaggaatcgaaccctggatgtcttgagcagaacgcctaagctcccacccactagccaactcgactcatgttggtttatattcaatctcaactacgatatctaagtgataagataattcatgcttagtttttcatttggtgaccctgatatgtataattttttacccactatggtatgtttagactattgcataaatttaataaaatctcaaaaattacgcatcaggggcatagttcacatggaaaattgagcattataaaaaatagttcacatgacaaacttgcgcggcaggaaaaaaacatggattagttcacatgaaaattttactcgaaaaaggtggtttagttcacatgaaaaaaaacgaaggagggaaaatgtggattaattacatggtagttttatatgtttaggctccttcgaaatgcagaaattttagaaaaaaatcgatttatgataaagc

SEQ ID NO: 56221 - DNA, 755 bp, Zea Mays
ccaggctgcccacttgggccaaaatagtgaacggtccaatgtatctcgggctgagctttccagagacaccgaaccgaacaactcctttagtaggtgataccctgagaaggacttggtcacccacagcaaattccagatcccgcctcctcacatcagcataactcttctgacggctctgagctgccaaaatattctgacgaatttcccgaaccttttcagaagtctgctgaacccaatcaggaccaaccagggatctctctcccgaagtctcccagcgcagaggggagatacactgcctgccatacaaagcctcaaatggttccatcttgatgctagcctggtagctgttgttataagcaaactctgccagtgcaagatgatcctcccaactacccttccatgacagaacacaagcacgcaacatatcttccatggtttggattgttcgctctgactgaccatcagtctgagggtgaaaagcgacactaagcgaaagcttggtgcccaatgcactatgaagactctcctagaatttggatacaaatttggagtctcgatcagaaacaatagacttaggtaccccgtgaagcctgactacttccttcatatacaagggaaccaaatcagaagctgaatttgtggtcttcatgggaataaaatgcgcagacttagtcaagcgatccactaccacccatatagcatccctgccacgaggggaacgaggtagacccagcacaaaatccatggtgatatgc

SEQ ID NO: 56222 - DNA, 420 bp, Zea Mays
gtgcatgtcgtcctccggatgggctggtggaagaaggtgatcgataaccctccatgtcggtcgtgcgaggtatgtcgttcatgatccgagccagtacactgtcgacctaactaagagtctacatgtcccgagcgaactcaagctacagattccgtgggagaggtagacgatcgcacaggagcctagcgttgcattcagccatctcaagctcacgctcctgagcgatgtggtggttcctgtgcctaccattcatttgcatgtggaatcccctctcgttcagggactcatcaacctcgaacccctcgtccctagaaataggttgagttgggtcctgcttaccgatttcgatggagacgtgcatcgcgcttgcgaaggttcctccccttgtatggtgggctcttcgtcagagatgggatcatt

SEQ ID NO: 56223 - DNA, 684 bp, Zea Mays
gtcctatagaaatatgagtgctctttggcttcacaacttgtgctatacatttgtagatccatctacacatcatcatgatggggatataccattgttaacacatgtggcctcactatttaagccaccctttggagatggattccactgagctccagtagacttcacactagttgtgaagatcatccatgcaattataagaagtacactactaccaagaatgggatatggtgaggtactcactaaaattcaataattcctcctcggtgacttgatctcacatacaatatttgatgttgttgactttatgatatgtgagatagaggacacattcttggatggcatcaaagccaaacgttaatttccctatgcacactacttagttatatcttctctcggttgattaaccatccaaagtgggcactcatattggagaactctacaagagcttattaattttatagacctcggtccaccatcaacacacgtctaggtgtgtgagctcttagtcgcagagatagagatatattagagagatagttgaggagagagtaggagcaaaatgaggtaactcgttaggtacatcaaatagagctttagaatctctttaagataaagtatgccgctgatgataacttggatgaggactaccacataccaccgctttatcctctagtgccaccacca

SEQ ID NO: 56224 - DNA, 363 bp, Zea Mays
gttcgaggtattctatgcaaacacactattcggtcgatgtataactccatatattgatgtgccttgtaggttgtgtgtactggtaggaaatcagctgccttggtcagtctatccacaatgacccatatggaatcatgcctctgagaggtatttggtaatcccatgataaagtccatgttgatatcatcccacttcaaagagggcatgatgagtgattgtaaggcgcctgctgcttttaggtgacttggtttgatcctttgataggtgtcacattcggacacatacttaacaatctccctttcatcctcgtccactagtataggggttttaggtcatgaaacatcttattacttatagggtgca

SEQ ID NO: 56225 - DNA, 500 bp, Zea Mays
aactaaatgccctcggaataaacagctctaatatgaattgttgttgctacgtccgtcgccaacaacgctgaccggcagagcgccccatttttgtacgaacagcacgacgggtaaatttgagcttattacgtgagagacacgataatgcatgctgaggagcgtgacgaactttgtgctgagcggagcgtgcttccgtcagcacgatggaaactttcagaatttcttgtgttttattagggcagaacgctgtaaaagctgaaaaggtcatgtcgtcagaataaccaacaagatagcgactgctcactgacccagacaaggttgattttccactacaagcgacaattcactacgtacgatgaagttaaccaatccttgggcgttgggccaggttaatttcatgagtgtaccattgccgaatctaaccatgcatgatcttcaaaatcacaagtacatgcagctgcctggcaaagaaccagcagttgtgctccgtagctttagtt

SEQ ID NO: 56226 - DNA, 1978 bp, Zea Mays
agtagatgtgtattttatgggatatctgattgcatgacctaatatactttattttttagtcttacaatttgagtgaaatacaccagtggtccaggaacttagggtttagggtaattcgagtgctcaaacttcactgtaacctacaaaacctggtttctagcatactgcttgccgacgtggcagccacggtggaccgcattacatacataattactcgtttcttccccatggaagaaccgtagcctcctctgttcaaatcgattccctagcagctctgccccctcccctagatctaacccgcatcgcacccattaatggaacatccacctccatatgtgaccgatgcagtacaagaaaggtgattgcactcagggccaagacaagcggaaactatggacggtacttctacatctgcccgacatacaaggtcatattgggatttaagtgtgtttggactgtaaactcatgtgtggatttgattttttttgattgatttgtatatgtttgcagcgtgatggtagtggttgtgacttctggtactaggaagatgactatgagcaatatttgatggagaatggccatgttctacataatcatctaccaatattcagccaagcagagaagatgattactggtgaagctgatgttttaggaagttgtggaatgaagagggaagatagaaaagcagatggcctgatggttcaaaagctagatttagtagtagggttacttagttaagattgttgtgccactaaaaataatatcagtcttatgtgtgtgcatttttctgattaatctatatgtaaggattgtttgatgtgagttatggtggtaatgaatgaaaagagtactcagattcattaagcatttgtaaacctcatccccagttcacagaagcattattgttgccatttaagttcatataggcaacatacaaaagcattcatgtttagctagcatttttgttgccctctgtagataacacacacaaaagactgatcaagagcatcagtgcatcatacaaaaacattcatgctcaactattatagttaaaggcattcatcggccttgatcaaactgcatacatctacttcaattcttattattcttggtccttgtttctcccttatttgttggtggttttgcaatcctctttcttgttgtgttccttccttctttggttgctgatgtgaggactataggtcttggcacaggaatgtttgctatgatgaatttacattcgacacagcttgtttaggttcctgtgaaagtagttgactaggaccaacctaccaaaaaatagtgattagtttagttgttaaggtgactatgggtggaaagtgcatttggcagtagctgacctgttccatcatttgaagtagcatcgttgagctcatttctatcatcaaattgcaataatggggttcatcaccatcttgtgtcatctggtccattggtggccccttgactgttatcttgggtgacaacttgattgtcatctagcatttcgttgtaatcaggttgttcatcaggttgtgcctcaggatgagcaggttacacctcaagatgattaggttttggactgacacctagcttcttgatggggaagcctttgtcattatggtcgtcccctttacaatagttgcaagtcattttcacaccatgccttgatagagttgggccatactttccaattttttcatgaggctgcttccttctgcatctcttcggccttccaggttttctaacatagataggaggtgagactgtaggggcatcaactttctcccaactggtcatatctttgcatggcatgatgtttgtaccatgctggcatagaattccagtcaaattccactctctacaatcacaagtcttagctgcaaggtctactatatactggtgatctctgtccacaacttggaaaatcacacttccagaaggtaacacatagcacacattcgctagatccgcaaat

SEQ ID NO: 56227 - DNA, 647 bp, Zea Mays
ccctcctaggaaaccattgaaatcactccattggagaatcaaggagcagaattcaagaatcaatcagacagcggagttctcccaaacaaggcctaataatggacatgttacaagatggtgaggtcctcttagatattataccttcttcatcaatggcaagtcatgtaaaatccaatcatccacacacacatatatgtcaagttcagtgattactggtgtagtagtgtgaggattgcatgtggccggggagataagaataacaacacaaagtgatagcaaaggaaaacattaggtgagggcagtcaacaaggtagaagggtaatgttgcttacaatgttgattcctaagaagttgttaggcacaagactaggtagagagaaagacatggagtcgaagagtagtcgatgcactgccatatccaatacgccgccacatcaacttgacggaagggtagagagaagtgtcatcgagcactcgcttgtgcgaggacaagccgctatatatacacaagcgtaagatgcgtggatggttaccacgcgcatcgtttactcgaagttacgtttatgtgacgtaacacaattgttttatcttaattttttccaactacaaatttatataaggcacacgagaatttgatctaccaaaag

SEQ ID NO: 56228 - DNA, 492 bp, Zea Mays
gccaacggggtgatattggaagcactcaggaagaaagtgtttgacaagagtgaaaagcttgcaggaaagtggatcagagaactgccatacgtagtttggagcttgagaactcaacccagtcgatctctacatggaaacaccacgttcttcatggtttatgggttagagccagtgctgcccgccgacctaatgttcgggacaccgaggttggctttcgaaaacatagctgaagcagatgctaccaggctagaggatattgatgtgctggaggaagaatgattgaacacagtaattcagtcggctaggtaccagcagaccttgaggcgctatcatgataaagtcgtgcgacactggtcctttgcagtgggagacttggtccttcgccggattctaacgggggaaggacggcacaagttgtcaccactatgggaagggccattcattgtatcagaggtcactcggccaggatcatactagcttactcaaatggat

SEQ ID NO: 56229 - DNA, 675 bp, Zea Mays
atttggagttcatatgcattttctacaatttaaacaagttctaacatttatttatgcactaaaaattgatttctgatattaatttctgattttcgatgctctctggattgggcctcaaattccagaaagtgcaggggctacggtgtaaaatatcctagacacagtgaacagcaatatgggacggcgggttgttttttgttttagtcagggtctctttagcatgattaccaagccgaaggggtatcctggattgccagccatccgatcatcaatcgagggctcggattaaatcatgggtggtcatgaagtcgtcatctcccgaccaaatcctagccgccccatcctgaatctacgggtgagattttaagtgggcgagattgatcagggatcgctcgatccaaacccacggcccagatccattcctcgaagcggtacgtggttatctaatctgaaccgttcatttatggatctagggtcgctctagcatcttcaacctcacgctcgcactctccggcggcggcacgcccagactacagcgacgagggacagccgcggcagcgccttcgccgcatagcaccacatgcccaaggtcaagtgttcgctacaaccttacgtcccgagaatggcttatgcgcagttcaaagtgagcacaacatggggaaaactcaccaacgc

SEQ ID NO: 56230 - DNA, 667 bp, Zea Mays
aacctccaccatgggccagcgccggagatcacggaaggtgttcaacgaagtctaatttggtacacgcagctttcacgagggagaagcctggcgacccggttcgcgacgagggatgagagatgcgacatggctttatatcctgggcgaaagggagtcgagcccgtgctccccggatcagcaggagatccgcccgattcctcgcgcttctgttagaacagaacgaaggttgaggatgacccgaccacgagggcccacctgacagtgccagaacacggaatcgggtccccacgttagtgaacggatacaacggagaagctggccgaagcgacccggttttcagcgggttcagtagaaggctggcggctagggtttgagccagcacacgcgcatgttaatgggccaggcaaagtggggaggtgggctgcggtagaagggagctgggccaggaataagggttgcggcccagacagcgagtttctcttttcctttatcttttctattccttttcctttctatttttaattcaaatttgaatcccaattcaaatcaggtctttgaatttcaagatttatttaaaatgaacaaacaaataaatttaccggtcatgcaatgcaaggttcattttattcctttaattaatagtttatttttgaatgcatagctcatg

SEQ ID NO: 56231 - DNA, 860 bp, Zea Mays
gttcccattcactcacgcccgaattggtcaaatggctgctacgatgagcttcacgggtatacagagctgcgaaaacaacactcgagaggtgcagagccttaccagagtggtccggccacggagcgcggagacagtgctcgccggtgacagagaaaggggaaaatggcgtcgcgacggctctgggtggaattgggaggtgggattggggctacacggccgtaaggaactatagtttcaccatgcacactcaatttgggaagaggtggcagaggcagtgcgaattttgagctgcaatcaaactcactggtggagatgtgaacacctcgccatggaccatggtgctatttatagccatagcggtccggctaatgatcagcgaccgtggaaggctttgttcacgcatggcaaccacgtatagaagaggcactgtaagggaaatcgaggcatgggtgacaccacagcggaaatgaccgagccacggcgaccgccgatgggatatctccggccacgcacgactgagctcgcgggatggtgccacgttcaaagtttacatctccgcgatcaaatccccaccgattcatccgagctcattcgattcaacagtgcacagatctttgtttcagatatttcagtgcactggatcttcaaagcttgtctgaaccaacccccttccatccactcaatctcttgattcttgttaaggacagagcaaacttcattaataaagtttgttcacctatcaaccgtcttcaaacttactataggatatttgggtcataatcgagtgaatccaaagatatggcgcgtccaaattggctccattccactgtgaccatttctgctttcaaattcagtttcag

SEQ ID NO: 56232 - DNA, 680 bp, Zea Mays
tatagtgtttagatgagagtcacacggagacgaggtgaacaccaaaatcaatttttggtgacgacgtgattccaaaaaattaagaggacgatatcgcaccttctcattctactttgacctcaaaccattcgtccaacttatccctccattctccgtggttaatagtgctccgtcaccgtcaccttgccatatgccatcctgcttataatggagggaaagcagatctatgactataaccttgaatcgaatgttgatggctacggaccacatcagcccaaagtcatggtgctatagcacgccgttgattagagattgcgttgattattggtttaagaagttttataggtgaaattgttggtaacagaacgtctgctctcaccactacccatacaatcatgctggtttgttagtacagtagtatctctaccccttaaatccacccgttacaaactaagctaagtacaccctgcaaaacatcccacacagtcacaaactaagctaactccacctagcctattacctctggacaaagcccaaactaataaaccaacgtcccagatgtactctctcgtatactaaaacacatcatatggccaaacttatttggatcagttcatctcacgcacaaacacacacgccacagctcacgccaacgcccatgcaaccgccccgcccacgaa

SEQ ID NO: 56233 - DNA, 1071 bp, Zea Mays
gtttgagttcgacttcagtcttttttattatgaagggtccctcccattttggctctagtttttctttaccttctgtccttgtggtccgtataaggacgaggtccccctattcgaactcttttggggtgattgctctatccctccatcttcgttacgacttgatacttgtttaatgactcgagtgcctatgctcgattgctatccaagaggtccttcgtcattgattcatcgatgtctggtgttgagttgggggctattcgaggtgagccatacttgagttcttgcggggccatcgccttggtctcgtacatgagtctgaaaggagagaaaccagttgctcgagactccattttgttcatccctagaggacttcgggtagttgattcctttttttatcttcttgcagcctcttttttaacggtggtaaagattttaccgtttgcccgctcgactatccaattggatcatgggtggtagacggaagcaaagactgtttgggtgcctatggaggcgcagaactctctgaagtcttgattgtcgaattgtttcctgttgtctactattaatttagaggggacaccgaaatgacaaactatgttctgttagaatttttttgtgctgtttttgctgttattgtggagaccgttcgtgcctctatacatttggtgaagtattcaatggcaacaaaggcgtacttgaggttgcccttggatgtgggaagtgggtcgactatgttgaggccccatcgctgtagtggctaggtgtgggtaattagctttgttagctgtgaagggcctccgcctcatggtgaaaacttttggcaagctttgaacaaccgcaccacgtggttggctgtacagacaatgcctaaccaatagaacccctaacgtatgacctaggcggcgagggccctagggcatgagtgacagccgcagacccccttgtgaacctcgagaaggagctccctgcgttcgacctctatgatgcatttgaataacgactgactgatgcctttttgtaaagtcagccttctattattgtaaatccttgacttcgatatttcagtctttt

SEQ ID NO: 56234 - DNA, 608 bp, Zea Mays
ggcatgtgcttcttcaatttctccatgtacccttgagagatccagagtagcgctgtctagatcagtgttaagacctgccaccacacctacaagggtgttgaggcgatcttctgcagcttcacctggaacaacactggtctggatttctccacgaagacatagaggaagatgtatataccctgtgttgtgccgccgctgctgataggtgtggctgagggaccacagagctcttctagcagcattgctgactgaagtagcataggtagatagaagtgtcagagactcatgggctgatagtggcttgaaacctctatttcctgcatccatcactctgatatgcacgcgagtgatgtagtaacaagctcgaggaggctcagaaactcgccttgagtcatatagaggtcggacgtaggttcctagtgcatatagtacattctgtagcaggtttgggaaatgtcccgtcttgaacattgaagtgtaatgctcggtgacaggccatatcccaacaaagttgtcctcctgctcatcgttggcttcttcattgttgttttcttctactgctgcatcgtcatcatcttcaccatcaccagaatcatccggatcgtcgc

SEQ ID NO: 56235 - DNA, 460 bp, Zea Mays
ttacaaagaatctcgtcctcgagatttaagaagatctagagaaaagatggggaaaatctatgcgaagctcttcttctctctcccaagtagcttcatcttctccgtggtggctccattgtactttgcacatctttataaccttattcctcgtgacacgagtcagtgtatcaagaatcttgatgggatactctgcataagtcagatcatattgaacactaaggtcctccagtggtagctgctcttcaggtaccctaagacacttcttcagttgtgacacatgaaagacatcatgcacatccgcaagatgattaggtagctctaattgatatgccacctctcccactcgctttaggattaagaagggtccaatgaagcgaggggaaaacttccctttgactttgaatctcctcatagcccggagtggtgacaccttcaaatagacatgatcaccctccttaaa

SEQ ID NO: 56236 - DNA, 437 bp, Zea Mays
  misc_feature (279)..(298): n is a, c, g, or t
ttcttgcagcgagtaagacagaaaactggttaaactgaaacagttgttgaaccatttgctgttgaaactgaactggttgctgcttgctgttattgctgatcagaaaacaatttttggtgcgcttgaaagtgaactgcttgctattgaaaatgaactagttgctgcttgctgttgttgctaatcataatttttagaaatcatgttgcttgctgctagcatcagaattcttgctgcttcatttcttacagcatgacagcaagcaacaccttcatttgatgnnnnnnnnnnnnnnnnnnnnccaacagcaagcaaaacttggccatgaccgtgttagagaagagagcgaggagggagagggaagggcagattagtcctacacccataatactcaattaaattatgttggccaaaaaaatatcactgtgatgtacaaggtg

SEQ ID NO: 56237 - DNA, 645 bp, Zea Mays
cagatttgtgggctcaacttttgagtcttgtaactttcaaatactagggtttttgccctaggctaccacatcaaagttgtagagcaatcattggagaacaactttgcttaagggtgtgagcatagttgttaagtaaagttgggagataattaagtccaaagttggactgtcaggtcactgggtctgaatttttagacaaacagtgcaaccactgagactttgagcatggattcaactatgatacagcatgagtctgcccatggcatctatgacaaacttgtagctggttagtagctctacaattttgctgcagagcttgggatgagttgtcattggagattgagagtaaatcatgctccaagatgttctgtcagtcgactgaatggcgatcgccatggtacagtacctagctgggatcagatcaaaagatctcaccgccgatgaaatctcgccgtgattcgtgtcaccggtgtcaagattcacgctcgtggtggatggataacgtcgcgggtttaaggatcctcgccgccggtgagctggaagtcactcaggtgactcaccgtggctgccccttctgctttgcggctagagcagattagctcgccggtgaaccaccgcctcccggccttgcgccgcgtggctctg

SEQ ID NO: 56238 - DNA, 406 bp, Zea Mays
cactatctacctacgttgcttcggtcagcaatgctgttaggcgagctatgtggtctcttagccacacttatcggcagcatctgacacgaggtacagacatcttcctctatgtcttcgtggagaaagccagaccagtgttgttccaggtgaagctcgagaagatcgtctcaacacccttgttggtgtggtggcaggtcttaacaccaacctggacagtgctaccctagacctctccagggtacatgaggagctggaagatgcacatgcaatgatttcagacctggaagcacaacttgaaggaaggaacccccttgaagctcaagtcccggccatggctgtgtccccaccccgcaagaggatccgctatggagaaccaggatctatcaccaggctgctttagatttat

SEQ ID NO: 56239 - DNA, 581 bp, Zea Mays
gccagtctgaagatgtcaccatttgaagctttatatggtaggaagtgcaggactcctctatactgggatcagactatagaaagacagttctttgggcctaaacttattcaagaggcagaagaacaagtccgtataattcgagagaacttgagggtagctcagaccaggcaaaagagctacactgataatagaagaagaccattggagtttgaggaaggtgatcatgtgtacctcaaggtgtcaccacttcgtggaatgaggagatttaaagttaagggcaaattgtcccctcgctttattggaccattcagaatcttcatgagagtaggggagatggcataccaactcaagttacctgataatctatctgatgttcacaatatgttccacgtgtctcaacttaagaagtgtctctgtgtccctgaggaacaattaccaatgaaggagctcagtgttcagggagatttgacttacacggagtatcctaccaagattcttgatacattgactcgagttacaaggaataaagtgataaagatgtgcaaagtgcaatggagtcatcatggagaagatgaagctac

SEQ ID NO: 56240 - DNA, 797 bp, Zea Mays
gcaatgcttagtcatgcaagcaaaattgtatgagacctgactacaaaccatacacagaggtactaagtcgaattacaagaaagtgatatgcaacaaaaaggggatgtgttggggaagtctacggtaaatggtacttagatgttcgcataggaacaagaacattagtttcagtacgagcaacattcaccaatcaacatacaaacaacatgacagcaaaataattgaccacttacaggttggtggatacactgaaatgaccactacacgatgacgaatatcaaaagcagacaagagtattcatgtcgtatcctatgatcgataacttaaagcaattttgttggtgtacatgataacgacggatcagttgagcatattaggcgattcggaggacacagtaaaccctagttctccaagttggccatgaacaaataaatcgatctatgtaaacaacttaagtacatgtaaaccctagggtgaatcgaaattaggtttttttgggacactgattgaatcggagatgtagaacatggagcaggggacacgtaccttggaccttcaagctctaatgacgcagatcgggtgagcgtagatctctcggcgaatcgacgaactcccgttgacctcctcccagcagacgcagcaccggcggacagagacgaccggcagcggcgccttcgcacggatcggcggggtggccgctccacgaagcaagccggcggatccgcggccacaacgacctctgatgctcgccgcccggaccaatagaaaggattcggtgccgtgcgcggaaccacggc

SEQ ID NO: 56241 - DNA, 327 bp, Zea Mays
tacaaattgaagttacctccaaaaatgtttgccatccacaatgtgttccatgaatcccaactaaagaagtgtgttcgattgccgactgagatcatagcagaaccagaattggagatagagccagatctattgtaccaagagtacccttccaaggttttggattgcaaagaaagatcaactcgggctaaatcgatcaagatgtataaggtccagtggagtaatcactcagaggaagaggctacttgggagactgaggagttcctgagttccaacttccccgattgcctacctaaggaaattggtacgtaatcatgcccaacccctccc

SEQ ID NO: 56242 - DNA, 367 bp, Zea Mays
cttgggaggaaggggtatggacgtatgaccaagctacgaagataaacttcaaaatgcatgtttggtaccagtactccatgcatgacttatcggcgtatgggctattctgcgcctagtgtgttcatggtaagttcccatgcccagtttgaaaggaagctcttaggttcatttggttgaaaaagggtggcaaatattcgtcgttcaataaacatcaacaatttatctcgcctgaccatccattccgcctagacatcaagaactttacaaaaggtgtcgtagtgacagaccgcccacctgcaacgatgactggtgccaaaattcgtcaacagatagatgggctcgtggccaatacagaaggtggttttgt

SEQ ID NO: 56243 - DNA, 335 bp, Zea Mays
ctccaaccaaacacactctaagagtccagagctgctctagaacctggccacagcgcgtgcgtaggccgtagctttctgttaacttttgtatgtctcgtattattgatttatctagcgctagtacatcgttaacattttggaccagagcatgcatatggtattaattcatagaactattacggccagggacaacctaaccgaggtacaaaaatgaatgacgtgagcttgctagtactgtgaaaatagagaaagtattccacacttgttcctgcttctggagtgagttgtaggcgagtagctagagtggactcgctgagtggcatggctgaatgtac

SEQ ID NO: 56244 - DNA, 378 bp, Zea Mays
gtgtcttgcaaattttcgtgcactaggtgcattgctcagttgtgtctttctagtcgaccatttattttctcgtttgtttccctctttgctctccctgtgatatttaggccttatcgttgctcttcttgcgattaatatatagacaatcagtacaatgaattgactttcttcctgttatatttgtttcctctctgcttctcttgttcaattctttcggcccgttatccattcacggtgtaaattgatttcattgcttcgtgtttgatgagagcaaaccgtattgattcccagcgctatctgatgcaacactatataatgatgaaaccgctgccaaaccagcgctaccattcccttccctcctgataaggactagttttt

SEQ ID NO: 56245 - DNA, 288 bp, Zea Mays
tgcgtgtacaggatcgctttactttcagccagatcgtcactcacagtgatctatatgttttctttaaagattcttgcacatctcccccacatatatatccagcaccgcaaaataataaacgtcaccctggagagaccacttgcattgcattgggtgcactacacatgtggagcaccgttgggccaagccatagcccggtgcaatgcaatccaagtggtccatgaacatgcatgcatgctattcatatatgatcggtccatgctttatagcatcatcacccacataaac

SEQ ID NO: 56246 - DNA, 777 bp, Zea Mays
gttgtcccgatagcttttgagatctagctagggttaaaacttcctgagatgttctatgttccatgagtttccaatttccgtgccatccattagagtaaggcgatacgatccaggccgagtgacttctgctactatgaacggtccttcccatagtggtgacagtttgtgccgtccctcccccgttagaattcggtggaggacgaggttcctactgcgaaggatcgatgccgtatggccttgtcatgatagcgcctcagagtttgctgatatcgaactgactgaatcaccgtattcaatcgttcttcttctagtatattgacatcctccagtctagtagcttcagcttctgctatgttttcaaagattaaccttggtgccccaaacttgagatcagcaggtagcactgcttccgaaccatagaccataaagaaaggtgtgtttccatgcatagctcgactaggttgagttctcaggctccaaacaacatacgacagctctctgatccactttcctgcgaacttttcattcttgtcgaagactttctttctgagcgcctccaatatcatcccgttggctctttctacctgcccgttggctcttgggtgcgccaccgaggcatatttgatctgaatgctcttttgctcgcagaaatcgaagaactctgaacttgtgaagttggttcctaggtcggttatgatgctatttggtattccaaacctgaatattatgtcttgtatgaattccactgccttagccgaagttagagaagcaatgggt

SEQ ID NO: 56247 - DNA, 710 bp, Zea Mays
agaagaaagaagaagaaagaaggggactgaatctctaaaatctgttgtttctctttgtgttgtgctagttgttcttttccagtgactacctttgtgcctaggctcacgtctctagcatggtttagcctaggaccagcacagtaccaccattgaacgattattcagcttgcttttgtaactgacatggtactagtgtattccttgctttagcctacctacaactctacatatttggactatagcttgataggtcgtgttgctgcggcaccgatacacttattccacgtttgcagactcgttggttgctgacccctcctgttgagcaaggtaagaattggtaagagcttgtgtggcaagttgagagtgagcgccttgcattagctacatcctaatagttgtggagtttttagtccttcacttttttatcttgtagcctatgttcgtctgaccatggcaggattggaggttgatgatgcttctcgtaatataccacactctcctcgcaccaagggcatcatacaacactttgtaaggctggtgaagacgcacacggaaggtcttgataatgacttgcaggtgacgaatgaaaagatggggcaattggaggccacacagatcgacacaaacaccaaacttgcaaatgtggaagtgacagttgctcatattgacaagagccttgtcgcaatcttgaggcgatttgatgagatgca

SEQ ID NO: 56248 - DNA, 331 bp, Zea Mays
atgggagagcttgagacggttaattcaaactctatgcttaagctgttaatttttattgtctattcattgacctaaggttgaattattgtgcaatactaatcccatgttcatctcaagtgaaataagttgtagaggtccgtaatcattattggtgaatcaagcaaaggaccttgatgagaatctgcaacttgctctccaaaggatggtacccgtgtatcttaagtacattaagtacattattgataatcagtattgctcttaagttggattgttgtgctacctatccttggagtagttatgcttttgagattgcctgtgttatcaatggttc

SEQ ID NO: 56249 - DNA, 726 bp, Zea Mays
ggggttccaaaaactgtctagatgagtgattttattcgaaggcctttcttagatggaggcatacctcttggcgccacaggagctaaagtcttaaccgcagcttcctcttcattttttcccttcatagtcagtaacatgctagtcagatctgatcccaatggactcaaagctgtgaaaggcaaggattgagtcattacctctagtatctatgtagctccatgagacgaagccgaggcacttcttagagtttcttttctttgctccttctggataaccttcgcaggagttgccgctttgagtaagaattcccttcatcaccaccttctatcacctttggctccttgtcaacatttactcattgtcttttagctttaaccccctagagactgcccttgccattacactgtcaattcttttcctttttaccctagctttgacatccttggccagcatcgggtaatctaggtaatcgaaccctagagcattcagaactctattaagccttttcttctcgtcggttctgaaggacacggtcatcactttgtcttccttaacaagatagttcctgacaatctcattgcacatttcttcaatagcctccaaccaccctgcgcatgggcgtttgaacataggttgttctataaacatataaggtagtgttataagcgtgttaggctctacttccttgttttccttctttggcttcggtagcttcgacattgtcta

SEQ ID NO: 56250 - DNA, 755 bp, Zea Mays
cgaataactggtgcataaatatgtgggagctacccctttccatcccccttgttatcccagccattgcaacaccaaggaacatccaccaagcaccaccatggtgaggatcgggccaccgtctagtcacgtgctcacaacatcgttgggggcttacttgcgggtctaagaactccaccgcgcctctaggattgagctcgaggtcttcgcaggcgaaggggtgctctggtccacgaccaatttctcatcggagtgtgcaccgctacggatccttacccaaccgtgggcagccctcacggctaccccatcaccggtaaggcttgtcttcatagcttcaccctatcctcctcatcgcataggacctatctgcactcgaattggctcgccagagcgctatgtcggggtgctcaccggcgtggcttcgccgagggagcgggcgccgccgggtatcctggtcggtgggtgaagatgactcgtgaaccgtagattgagagatctgcggccaggattagaagatagggctagttcgaccagatcctatctccaccattggatcttcagccgatgcgtaagattagatggtgaggtaacgattcgatacgtttaatgtgggacgcaaaatagcggatcgacggtccagcacactctgtgttgattggccatgtatcctagatctgacggtcgcacgcttgagaccgatttgcttttaatcctcaccgtgcatcaccgatccaacagtcgtgtcacgttcatacccc

SEQ ID NO: 56251 - DNA, 713 bp, Zea Mays
tgtggctacaaacttagtggcttttcgtgtgttatagctccgaccaatcgtgttgtgccacgtcgtatgaaatctgaaattattaattaagcatgagctttcacgttataattctgtttcaatctgttcacctggcattagcttcataacgttctctaaatattgttgcatcatttcacatgttttaattaattaatcatttgtttgtatgttggttactaaaatagcattttaattaaaactaacttataactttaagccacgcttttataaaaatgcgttaacatgattaatatcaactcaaatattttgattcagtactcgcctagtttaattgcgacaggtgtttaacagttctcgtgtgtctcatctcttataatccgtgaatcattatttactcaataccttttgcgttaaaaatctgtttcgactcgtttaagtcacgttaaatctgtaacctcgtcacctacctattagtaacattattttgtcgtgatacacattttaattaattgattgattatttattatctaatagttatgaaagtagcagtgtactaaaactaatttgtagtttatttgctcgttataaatatatattagagtgattgtgccaactcaaacgttttcgactaatatttgtttaatgtaaacgcgacaactatttagtagttctcgcgtgtcgcgcgtgctgttcgcgcacgtcgtagcgc

SEQ ID NO: 56252 - DNA, 380 bp, Zea Mays
acaaatacttttagggaatagatttgaggtgctacaggcgaggatgatgatgagggatcaggtggtgtgattgcgcaacacgtagagtgattggttacgcagcagagggtttcccacagctacgcatgacagaacagagaaaaggagtaagtagctatcgcggaggtcgttgggaggtaggagggcgatcacaattctggcgcagaggctattgcacgagcgcatggtgggggcgagggcaggagaaacggtggccgtgtcagacggagcgcgggttgattaaagaaaagtgagggaggtttgtgaaaaaaatatagcacagaacgactgtcgaaactaatgcttgaatggagtagaggttagacaccaagctatttttt

SEQ ID NO: 56253 - DNA, 683 bp, Zea Mays
agcatgttgcaccgccttaagtcgtcgccgacttaagtcgattgctccgttagcagggcatagtggtcaccccgggttaagtaagcgtgagcatgttgcaccgccttaagtcgtcgccgacttaagtcgattgctccgttagcagggcatagcggtcaccccgagttaagtaagaatgcaagtccatcataaatgagccgagtatctttgaaatctctctttgttgatgatatatttccattatacagaatacatggtcgccccggctgttttgaaatacagctaggggtaaaactttcggaggtgctctatgttcgaggagttcccaacttctgtgccatccatctgggtgaggcgatatgatccgggacgagtgacctctgctactatgaagggtccttcccacgagggtgataacttgtgccgtccctcccctgttagaattcggcggaggacgaggtctcccatcgaaaagaaacgttgccgcacagctttgtcgtggtagcgccttagagtctgctggtatcgtgctgattggatcactacatttagccgttcctcctcgagtacatcaatatcctctagtctggtggcttcagcttctgctatactgtcgaaaatcaaccttggtgccccgaacttgagatcagcaggtagcactgcctccgacccatagaccatga

SEQ ID NO: 56254 - DNA, 378 bp, Zea Mays
aaaatgttcccaagaatgaacttgaatcacatttatacccctgagataccaaaaaccctaattgaaaccctggaaaaccctaaattcaaaccctaggggcctatgtgcaaaaacagtgcacatttggactaaagtgtaaaaactacaatgttaaagcatattaagtcatatggttcacaaatatagggatttgcaagtgaaaccctaagttttggggctatttgcaaaaagtaccacttgacctctatatagcctaagtctgaaatcagtgtgattgcttcaactttgagcccttgtatcttttaaattctagggtttttgccctaggtcaccacatcaaacttgtagaccaaacaagggagaacaactttgcttaag

SEQ ID NO: 56255 - DNA, 674 bp, Zea Mays
ggttcctctttccccatagtccattgagtctctttccctctcgcttcagctcggtgtggtgttgatttcctatttcttcccccattccacatcatacctcctttttggattggtgggaaaatgcctcagaaatagtgaatgggctctccaagaagggtctcaatgcccttatcattttgggagcttggctgatctggcttcatcgcaataggtgtgtttttgacaatgggtctcctagcctgcctttaatcctcaagcagtttgaagatgacaggagtgtgtgggaggctgctggtgccaagggattatcctacctgacagcccctcttcctgctaattgaggaatggaggcatctttgtctctttgggttggtggctgtgttcctatggacctgtttatgtatgcatgtttttggcctccgtaaggagtccttagtttttttattttgtattttttatgttgtatttttggtcttctcatgaccatgtaacctccctttttaatttataaaatggtgcagtcctcctgcgcattcgagagaaaaaaattatacatgtaaaagtaatgagggaagtaccaatttaaatatttgggttcataggttccataaaccacatcgtagtatccatcaattctttccaccaactccaaatcagctgtcaacatatcccac

SEQ ID NO: 56256 - DNA, 326 bp, Zea Mays
agttgctattgcgattttcttttatattaattatcgttgcctagtgtctttgtctttgaagaagaaaatttttataggctactcaccctactctatccatcttgatcctttcaccatagacaacatgcaacatatgtggttggtatgatcttgcaagattaaaagttcctagagtacaacatgttactaaccttgggattagagagagcaactagtccctaggagatggtataatatagagactttaataatatggacctcatgggacttaacaccccttcaaactcaaggtggaagcagagggtcagaagcattaagtttgatca

SEQ ID NO: 56257 - DNA, 499 bp, Zea Mays
cgacattggccagacgccagaggccgaggcccgagggggccaagcgagggaggtggcgaccgtcgaggcgcggtcgagctcggggcagctacgtgaggcaaagtcacagcgaggcgcggtccaacgaacgagctccggtggacgatgacaagagttgtgcgctgtgcgcgactgcgcggggttggcgggttgcggcgcgccgagcatggagctagcggctagctggcgccgcgggacgcagagctggacaactggttgtggtgggcgatgggtggcggcgaccgtggagcatggagactggcgcgtgtaagcttggtgacttgcgtacgagatggagccgctgatgggcttggccgcaggaaaaaatatgtttaacttctttagcggactgagctgaggtatggcgtaggccgtacttggccataaacgggccctctgcccctggtgcaccgtggttctgtcgttctgcttctcgtcaatctgcacctttggttctgcc

SEQ ID NO: 56258 - DNA, 788 bp, Zea Mays
gcggcctacacagttcggtggtccgggcatcctcaacttggagctgtttggttgggccttgtgcatccgttggctgtgcttgcaaaagaacaactcctctcgcccttgggctggatccccatccaggtgccacgccacaaaggcattgtttgatgttgctgttgtcaccatgataggaaatggagaaacaaccaaattgtggactgatcgctggctgcaaggaaaaacagtggctgggtgggttcctaatttgataaacctgatcccaagaagggccaagaagcagaggacagtagcgcaagggctgaggaaccaaagttgggtatcagatataagaggttctctgacagtacaagtgctagttaagtacctgcagctctagagcttagtggacaacctggaactccaacaggatgttccagatcagcacaggtggcgcctgaccggccatggcatatacactagtaagtcggtctatgaggcctttttcacagagacacttaatttgctccttggaaacgcataatgaagacaggggcgcctgagatgcaagttttctatctgtctagcagttaaaatcatgtgttggacggctgatagacttgcaaaaaggggactacctcgccctgctgcatgtcccctctgcgaccgatgagactatgcagcacatccttgtctcctgtgtgtttactcagcaagtctggacaatgatctttaacagattggggctgcttgtcctaatgcctcagccagggatttcttgcttcgcaagctggtggtccaaagtt

SEQ ID NO: 56259 - DNA, 714 bp, Zea Mays
aggcctaaacctagagcaagcgcatgaacagtggtctaactatcctgagcacttcacaatgcacctacattaatcgccatgtgtatcattaagctctttgcaaggggacagtattagaatggagcaccaactccttttatatgtttctaagctcacaccctcctcaaatagcagattggggtggtatttaattgccccaagcccaaaaacaatcgctaccaaaagttgttgcaatctacatatgcatcagacatatcagtgatagcactagacaccagaccatacctctaacaattcgaccgttgaaaaatgaccattagatgcttttctagggtggcactagatatgtgtggtgtttgaatgggggtcactataatgtcttacatgtattcaacatggcttctaatggcttgatagagttgttgatcattcaaaccatcactttatctaagttatagtccacattgcatccatttgtactatacttgtatactagtaaactacattagtccaaatggttgtgttgttcatcacacaccaaagtccaaacgtaatagcccatagggtccatttttcttacaatctcctcctttttttgtgcttgatgacaacatgaccaaattaattaaatattatataaaaaataaaaatgcattatctatttgctaggatgcaatataagagaaagatcatatgatactaaagaatatcatt

SEQ ID NO: 56260 - DNA, 404 bp, Zea Mays
ctactcctatgtatacatcatgttcgagaagcacaggcgggtgcggcagaaagccaagccatgcatggatttgaattgcatgcgatccagccaggtctaggtgctcgcgaaagtagttagggcgtcgcgtgcacgtagcggctgccaggtgggcccgtgccgggcagggacgggagggttttaatggccctagctggcttgtttggtggcgggagctgggcgagttgcttcgtttcgaagcatgtatatgttgcatgcacaccgttgcccactggcaggacgtgcagtgtagctagtgcgcccatggtgaggaaggtgtgagacgtgcacggctgaccagcgcaggggaggggtggctgttatatagtcgattgcttcctgcaccgcacaagcgacacacagca

SEQ ID NO: 56261 - DNA, 513 bp, Zea Mays
tcaaaattatatatgtggtgtaccagtgtatttgggaactgcgtcaataatgtccaaaaccgacactcttaatggcatggaagtgatatgataaggtccgtgttttgagcatatatatatatatatatatataactcgattaaacaattgacatagctagggcctaaccggttatacgcgtgcagaaagttggaaggaaaggaacgggcaagtcagaacgttgaacacacatatgcatgggaatggctagcttgctagtcagtcacatctatgtcctcatcgacatatcatacataccttttgtgctaaataaatatatgtatgatggcattgccgtacatcataagagcaatccatccatgtgtgtttgtttatgcatgcaatgcaattagacaaaagctaaatatcgtgtacaattgggccctccccctgaattatgagtgaggcatgcctggatcgccagatcgatcaccatcatcgattgcaagcggcggcgcccttcgcgtaccggca

SEQ ID NO: 56262 - DNA, 411 bp, Zea Mays
cgagcatgcaacagacttcctttcagaccaccagctccgagaggtagaggaggaagacgttttagtggtggaaggtttggcaatcaacctcgaaagttatactgccttttttgtgacgaggacaagggccacacaacaaggacatgccatgttaccattcaaaagcagaaggaaattgctgaagctgaagctgaagcacgacagagtcagccgaagcaagtcctccacactacttcgtgctattctccttatgtcccagagtatgtaggcaaccaacagcctacgacctctgttgcttcggcaagccattctcaagcttcctaggccccgttgccaccaccaccaccactagcacctttgggtcacagtcagtagctagaagggcaacgccacgctcagcaacaacgtgac

SEQ ID NO: 56263 - DNA, 887 bp, Zea Mays
acgacaggttgatttgaaagtaattcagggtcccttatgcaaaactgacgcggttcagagacacgtgatcatcccaagccatccgatctgcgacgcatgactcagattagagcccaaacgggtatgcgtttgtggccactagatctggaaccatggcccgaaagttgtccacgccggtgtttattcccacccatacgatcatgatcaactagacatcacttattatgtgaaaggggtaaatacctttttaatcctaatcgttcatcttaggagcaacgtcagagcgcccttcttcaccatctcgaaaaccggcacggcggcgatgctctacccacggcggagaactctggtgagcccacggaacacgcgacctagtgccccatgtcctaatccaaatggtgctatgcaaatattggaacaaggacgtacttcttaccgcatatggtggcgcagaaactcccaaccacgtcatatggtagcccacgatggaggttggccttcggcgagaaattgttgtcgtcccgattgatctcgcacccatagttccactgtacaccttgctcatgctcttctcttcctcttgaacttgtcaccgaggctagaccggcgacctaggcggggatcgactgcgactaccttagtgtgaactcgcttggctcgggctcgatcgacgcggtgaggaaaagtatccaggtacttatacccaaagaaggggtcggataacgatggctgccaacgagatccacggaggaggtcgttacgcgagcgcatgagccagatagggaaggaagaatatgagtccgacatgtgggccacatatgtttgtgtctctgagcgaggagggaagcggttgacaagtgggctccatcagtccgtggcggctttcg

SEQ ID NO: 56264 - DNA, 671 bp, Zea Mays
gaatatttgaacaagttttgaaaggtgacctggacttttcgtcggagccctggcctagcatctcagagagtgcaaaggatttggttaggaaaatgcttattcgtgatccaaaaaagagattgactgcccatgaagccttatgtgagtagcatgaatgcatgtaccaatttaataaataattctttccaagtttatttggcctcatctcaaccaaattggctatagtgattgacctgggttttcataggtcacccttgggtgtgtgttgatggagttgctcctgacaagcctcttgattccgctgttctaagccggttgaaacaattttctgcaatgaataaactaaagaaaatggcccttagggtaagtactgataccaacggtctatctctgcattataccgatgctatttgtggttcattttctttgtaattgtaggttattgctgagagcttatctgaggaagaaatcgcggggttaaaagaaatgttcaaaatgattgacagtgacaacagtggtcatatcacattggaggaactaaaaactggcttgcagagagttggtgctaatttgatggattcggaaatcaatgctctaatggaagctgtaagtattccaagctgatcaacccatactcttcgcattctgcacatttttttaactttagtcgg

SEQ ID NO: 56265 - DNA, 1031 bp, Zea Mays
ccaatggtttggaatgcaaaacaaaacattctaggcacaagtatcatgatcattcttgaaaacctgcatatagttagccatgtaaattcatgtctagaagctctttctaactccctgattacatgcctggattaaacttctgttacaggcttacagctttcagaactcatgcatgctattaaccatagaaacagacttcaattttaaaaaaaaaatctcacatggtccttaaagtcatacaaatatgtcatttttagctgtgcacaattgaactttttagacatatggcagctatctttttcacattgatattcgatacctgaaaacagtatgagtagactgtctaaaaaatcatcataatcatattgctatgttttattaagaaacaaatagcgttccctgaggcattatcaatagaaggagcctcaaccacacaagcccgagaagcaagaaaaggcccaaaccctggtttcacccgtactgccacaccataacccaggctggcatccagtaattactatgtggattgccaggaacttctttcaagtgcaaaccaggactagaaccctaactgtcagcctccgtagttaaggtcttaccatcgtgttatcaatgtgtttgctattgctatgttttatatacatatcacaacacaatttttctgataaagtgtgttagagaccatgtagatgcacaaaatagcacttctttctgagtggagaggatctccatcatatgagcagcaactctcttcttaaatttatgaatgcatgttttgattaacctaccaaccattgggcttacattaacgaacaggagcaaatagcaatacaatctgacaagtcactccaccagaaacattaactcatcaaactcagagaaagattgaggagctattaaagtcatcataattggcagatttgtcaaaacaagagacaccatttactaaactgatcatgttagatatgcaaccccgacacatacttgcacagaaggtaacttgtggaaatagaatgaatactataacaaac

SEQ ID NO: 56266 - DNA, 425 bp, Zea Mays
atgtgggaacttaagtagtgcaagtactgggaagcgcaacattgacgagacctcttccagccatgttcggcagaagagctcgaaagttcatgtggctcagtcattacaaaatggcatgacccacgaggatgcaatgcaatttcttaaagaccatgacatcttaggtggtactttaaaattttgtatagccaataagttacttaaagactatcaaaatctgagtacgttctcccgtctggaatcccttgaggaaaggatcagtttcctggaaggaacctggaaattagaatctgatgggtcagtttcctggcagtaacctggaaattagaatctgatccctcttccttaaaggtaagccagtttgtttaggtcttctgtagtcatgtcagttatttatcttgttcttgtgtttttttgctagtcta

SEQ ID NO: 56267 - DNA, 664 bp, Zea Mays
aaccagggatgtatacagtatacagccataagtagatggaaaagtatacaggtggaggggggaaacagcagaactacaaggtccagaaacaaagtcttcattcagcctgttcatttttaatactcaaccctgccgctgcaaatgaacacttgcacagcactgttccttgtgctgctgcagccgcagctggctgttctgaacaggcccaaagcctcagctagcgaggagttaagtcaactgaatccatgcccttttatgggctgggatgtcactagcagttgtagtagttccctacatgcccctgtgggacctcaccgacttgattcagcctgtaaccaaccccaaagaataattgggcattggtagtccttgcgttagtggtcgttggcctttcgctgttcatccagtcatagtgaacagcttatgttgtcttggctgagcccaaccaaatttataaccatgtcaagctagtaggcccaaaagaatcgggaattttttggcccaaattttgcacaggcctaactgaatctagtctgagtgtgtagcttgtttgttgctgcctgcaagtacgtattcttaagcctgtgacctcaaaacatgaaagaccaaatctttagggtctgaaagccaccagttgacatgaagcagtcttgttaccaggctc

SEQ ID NO: 56268 - DNA, 941 bp, Zea Mays
tgcctgtcacgatcgctaggcctaatacatgtaggatgttccggctgtgtggtgaaactttaatcgttgtgggttggacctgcctagtgtggacgaaggagggtttcaagggccattgactccgcgcgccactgaggcatggattcagtttgagcctggggagagcgatcagctccttacaaccgatattactcggggagccgaacatgactctgactggcgtttgcacatgtttctgtatgcagggaacctattcggagcacgtcaacaccatcctgatcgggtataggttaggtggcacgccaggggaaccttgaagccctgccatacgctaggatctaggtcatgccatacgctaggatctgggccgttgaccgaaggaccaggcccgccagccatcccgggagcctctcggctccttgtgttgcctgtcgtctctcgctggtgggtttcagatggcaatagtaagacctattttggttatagcatccgatttgggattagtgcttgttatggcatctagtaagaatattttggttatggcatctagttgtgtaagaatatttctagaccagtgcttgtaagacaattgttattgtaatactattttagatgacatatgctatttggttatggcatctagttcaaccatttttgggttatggcacagttcacccacctatttaacatgtgcattcctcttttctataagtctaatgaaagtctgattcaacattatgctcctaggtttataaggctattaagccctcagatgagaaggcgctctagccattagaaccagttctttacaaaggctattcaacccttcttttttctccgagtctgatggaagtgaacctattctttttagtaagaccaatagcgagaccaacagtagaagaaacatgttctttcatgagcaacaagacccacaatagagg

SEQ ID NO: 56269 - DNA, 534 bp, Zea Mays
atcagatcaatcattgtcgtccactgcggattgcttactccggtggcggctgcacaacaagcccccagtctcttgtggtagcatccatggctccggcggcagatgcatagcaggcccccaatcccttgtggtagcgcctagggctccaccggcggctgcacaacaggccccccagcggtgtgtgatgtgacgacgagcactagacctgcgtacctgcgtggaggaggaatcttagccaacaacgatgatgtcgaactcgccaagataacggcgtggtgtcgaacgaacacccagaacagacagattttgtttagaggatgtaactaatacccgtaatacacgttatagcaatatgatgtccatatctatcagatacccttggttagtgtattggtaagagcaagttttcctctaccaagatgttgggagttcgaatcctttagagaattttttccctcgattttgtagcataatatggtcgccagttaaaaatcatagccaattttcaacatatatattgatttttattaataa

SEQ ID NO: 56270 - DNA, 624 bp, Zea Mays
tgaaaaatatcaaacaacagatttctgatatttcccactatattttttgcatctttccaatgggtttgtatttttctctggtggcctatctcattgttgatctagcaaaattttatttgcccatttttgcattattttgggttactcatgatttatttggaatatgactcattatcatattatatttatttaccctacttaaaatgatgggcttgggtatttattatttttgcagtggggttttggtggttacaagtccactggatttttattatcaattttgggtctggttttataattctaataattgatttctagttggaataatgctaaataaaacatttcactttgaatctgatctggactagatatttctttatttttcctaggttctttgttacttaagcaaactaggaaaaataatttcatccactagtcattaatttctaaggcctttcttattttcctaaggcttgggcaaaaatggcttttaatagatatctccactaaatttttcaatactggagttctcactatttttaaacagtgtttaaatggggtttgaacatctacaaattttcttaggtttagcacagaagcataactaattttccttaattaaac

SEQ ID NO: 56271 - DNA, 1317 bp, Zea Mays
cttgtcatttcaagtgtatgcacatgatggggtgatctaggggtagagttaaaggagaaaataaattaaagaggggggagttaggaggttagggtttcaaaccttggttgggatttttgggatgctacaaacctaccccacttaaaggaatctcgcccttgagatttaggctggatttgagaaaagataagggtattccctcctcatggagtcctcactctcccaggtagcttcctcttctccttctctgctccactgaactttacagagcttcacctctgaggtgcgggtctttctgactgctgaatcaagaatcttcactggcttctcacggtactgaaggtctttctgaatctgcactgtctcttcttcgatgtgactttctggtgcttgcaggcatttgcggagctgggatacgtgaaacacattgtggatgtcggacatggattccggtaattccagacggtatgctgcgggtcctaccctgccaatgatgggatagggacctatgaatcgtggtgctagctttccttttacttggaacctcctgacaccatgcattggagaaaccttgaggtagacgaagtctccttcctcaaatctgagttccctccgcctgttgtctgcataactcttctgccgactctgagcttcgagtaaccttctgcggatcaatgcaactttctcttccgcctctttgacaaaggcagatccttctagtgctttttcccctacgttggaccacatgagaggggtccggcatttccgtccatacagtgcttcgaatggcgacatcttgatgctggcctgatagctattgttgtatgagaactctgcgtagggtagactggattcccaacttctatcaaatgctagcacacatgctcttaatagatcttcgaggactttgttgactctttctgtctgcccatctgtctgagggtgataagcggtactgaaatctagcttggtgcccatagctttctggaggcttgtcgagaatttggatgtgaactgggttcctctgtctgacactatcttccttgggatgccatggtgtctaactatctccttgagataaatccgagcaagggtggctcctccaaaggtagttttcactgggatgaaatgagctaccttggtgaggctatctattattacccagatggaatcattccctttttgcgtccggggcagtccggttacgaagtccatgcctatttctccccacttccattcaggtatcgggaggggttgcaataggcctacaggttttcggtgctcggccttcgttcgttggcagatgtcacatcgggc

SEQ ID NO: 56272 - DNA, 571 bp, Zea Mays
tgttatattaataaacaaaagtggcaaaaataaactgactagtcaaatgcccatgtgttgcaaccacaaacaaaatattcgacaaaatattaatacacaacaattacataaaaacaaatatcacatattattgatctcaatcttataaattctctggcaacgagcaatacataatttcaggggagagcggagagaggttggggacgaagatggtgggggcgggatagagaagtgtgtaggacagcgggttaattcatagaatttcagggggtatttgtaaaagtaatccatattattggcatctttgtttatctgaacattttagtaatctaaaatgacgaatacatacgtagcaaatacatgttaggcacatgaaatattttgtggtttatataggagcaggaaataacctcaaccaaaatgccatgtgtttctattttctaaccagcaggagctttgtacatcaaaaaaatattgcataaatgaatttctatcaagatgataaggagtatcactaagtctctacaacaaataacatcatgtgttaaattcaccacttactgtaactttt

SEQ ID NO: 56273 - DNA, 546 bp, Zea Mays
ttgatggtccacgagcccgcataatgacaagaggagaccaacagccaaactacgaaagtagaaggtcaacattggaatataagcaaactagaacgagtaatgacgacgcttatacttccgtcgtcagaacgggttgcacacactcctccgataatctcagaaacgcagcacgagacccacgcaggaaaggatatcgacacacgacaagattttaccaggggtgaaccgctcctttcaccctaatgttacgctcccttctgggatatgctatctataaatagctccctttgatctataaaagtcgagggtcggtctcaaggagggaggcccccgagagaaaagaacacaagaggacatagaaccgctagtgagatcaaggtagcctttagacgaacaatatatagagacttgagatccttccttctcttggtcgtttctaacgcctaatactatcgatcaggtgtcggtagcgcaagcaatcgaagacaagaagtatggacattctacccaaaacagtataactctttcacccaccgagcacatcat

SEQ ID NO: 56274 - DNA, 647 bp, Zea Mays
aacattttaaaaaacagtagctaaatttggatatccacaactactctatggtcctatttggaataacttcagctccagtaaatttgatggagttcatagagtaggtcgttaagtgctttagaaaatcgtggagctggaattgtaaacgtctagaagacattttgataagtcatttcgtttattatttggattaaaaatattttaatccacctcagagataacggtgaacatcccagggctagaattaccggcaatcgtgaggcagagtgctctgcccacgacgaagcatgggttctatgacggtgtgcagcaacatcgaggaatttcgcacaaccccatgcgtcccgaatccaccgagtacgtgaccagtaggcacggacgcaccctcctcgaccaccacaaacctctctcagttggtcgagtaggcgcagaatgcctacggcgacgtcgtttcacgctacggtggtagcttggaaaccaaccgatggaagctcctaatccaccatgaattaacggggcggctagcttatctagcccttcccagccccgagaaccccgaccaggtttcttacgaccggcgatctcagctcgaagccccacggatcaatgattccatctctcctcccatgcaactcgacaagcgttca

SEQ ID NO: 56275 - DNA, 827 bp, Zea Mays
gatttacgtgggaagtgcttcaactgtttctcaccgtcccaccgtgcggctgactgtggcagtttggtgtggtgcttccattgccgcctgcctaggcatcgggtgcgcacgtgtccacgtcggaagaagactctgcatcacccagcgaaggtgttggtgtggcgtccagttgccaagaaggtcgtcccggagaaagttcctctctgcgatatggaaggtatttcgcgggtcggcggtgatggaatgaagaagatgaagtgcactcgccgtggacagaggcaccgaaggatggaccgggaggatttgggagcacctggtcgggtctcatcgatggcttcatcttccttgccttcggtggtgcacccccctcgttcgcatattcttaggcgttcaaggttgctcgaccaggcggaggagaattttcatcgtgcattgatcgtcaatgttcttggccaagagggtcctgactgcgcccttgtgattttggaggcactcgcctcgaagtatggtcttgaggctgatgcgctccaaatccgacgtgctgcgtccaactcgtacctggctttcttcccctccgtggaacacgttgttcgcgccttggctggtggacattccatttccataccccccctccggctgcatcttaggaggtggtcacatcaggtgttggcctctggtggaggtgccctccctgtgcttatggatgttgaacttggcgggattccagcacacctctgggggattgatacgacagagcatctactcggtggacactgcattgttcagggattacatccggattctgctgatgggacggatatgtcagt

SEQ ID NO: 56276 - DNA, 415 bp, Zea Mays
gcgctactgagggtgatatctcaggtggtgcagttgtaagcacttgaggagctatgcattcggcgataactcgaaagagaagatgatcaagactccggatatataggattgcaagctgcgacaaagaaggagataagtgaagtagatagcaatcacaacttgtaaagggataactctctggtcatatatataaggccaagtggagatccctacaaaatcatctcaccccatcctcatcaacagcaactgagccatcacaaagctcatttgtaatatctatactccataaatcaatacctggccacaacagaacgtagggttttacgcaatttaaagcggaccgaatctgtataaatctacgagcaataccgacgtgcctccacacgtaccatcgaatcacgatcaacgacgtcgt

SEQ ID NO: 56277 - DNA, 272 bp, Zea Mays
gtttactggtatctagctgaccgaatttgtattcaatcactcttcctccaatacgtcaatatcctctagtctggtagcctctgcctcagctatgttttcaaagaccatccttggtgccccaaacctgagatcggcaggtagcactgcctccgaaccatagaccatgaagaaaggagtatttccatgcagagctcgactaggttgagttcttaagctccaaaccacatacgacaactctctgatccattttcccgcgaacttttcattcttgt

SEQ ID NO: 56278 - DNA, 339 bp, Zea Mays
agctgaatgtggaggtaacggcaacggcaagggattcttgctcaatgtcttggaaggaaacgacgcctcatatcttctggaatcctttctctggccagcagcctcctcctgcaattgagcgagaacaaaagcagtatccaaatctcgagggcgctgcaccataaccacagaacgaatatcttcgcgaaggccatcaacgaaacacatgatatggtagagaggatccgaatttggacaataagcgcgcaactgatctatgagctgtgaaaatcgttccacataatcagcgacactggaagtttgcctaatatggaataactgtctaactagaacagcatg

SEQ ID NO: 56279 - DNA, 499 bp, Zea Mays
tcaatatgggacgcagggagtacgaataacgtatggtggtacgtacgtagtagctacaacagagactctactacccctcgatcggtacgtaatgactgatctagctagctagcagtgtatttatatgcagacgggcagcaggacaccacacgtactatgcattgcgtgtcaatgaactgcattgtaatggtgtacacagtaacttggaaccgacaagagaggttcgaggtacaatggggagcagatgaacagtgcgcgcgcttcaattcaatgggaaacagtgtgatgcagcaatgaaagaaggtggccgcgttcaatagattatgctccgggccgggacggccgctcctcccatccgtcgacggagcatgcattgatgggcttgattgggacggctcgccccctcttccgctgttcatccatccgtgcttggtgcactgcaaagcatatacacggccggcgtggagtgtgagtgcgtggagccatctgcaggtcatct

SEQ ID NO: 56280 - DNA, 452 bp, Zea Mays
gtcccgtgggccagaacaagaggtgtcccaggggttgaaacaagaggtgcagtaggggttggtgcgcgggtgcctggagggtcaacgctaatgcacgaggtgcccctaaggccgggacaagatggaaatgatatggtgcaacgaagatgtatatggtagtaaaaattgcaatggagtagtggagatgtgtatgattgatagtgaccaaaacatgacaagaactcgattaaccctaataccagcaacttgacacaaccgatgtaacccaaactcaacaagcccgaactaatcagcaccagtaaaagtctcaaagtgtttatagttaaaaagaaaaccaatctactatttttgtgggtttttctggactataagtaaaaggatgaaaattaaagtctcactgatcaacctgtgctctggtaccacttaatgagaacccaatggtgttatggccg

SEQ ID NO: 56281 - DNA, 459 bp, Zea Mays
ggggggggaccggcgttccgccatggggcacctcggtcggatcctggccagcacaggtggttcaacgggagagagaaagtgtactgggtggccgacgcacgtgcctgggaggctggaggaggaagaaggatggcggatcgtcgatctcatcttcaacggtttggattagatctgagtaacgtttcgcgttaaaccgatctggagcgttgatcggagatcgggtggaggctgagcgttccgcgctatttaaaaccttggccgttggatctagatccaaggatctgcgtagcgtaccgattcagggtaattgagatctaatctgggcccttaaattttgatccgacggccagatctggctgataccccttcagctgataaattcgcataagagaccccgcagatattagttatcaacccgccgtccctcgcaactgtacgctgagtcttaagaagttttgc

SEQ ID NO: 56282 - DNA, 642 bp, Zea Mays
catcaaacgagcatctcgacctcaataaggaaggtaagtctgttgatcaaagattatgtaggtctatgataggttctcggctatatctttgtgcatctaggcctggcattatacttagtgtgtgcatgtgcgctcgttttcaagctatcccgaaagagtgccacctagtggccgttaagagaattcttagatatctggttcacactcctaatctaggcttatggtatcctaagggctccactatcgaaagagtactactgggacttgccaattcctgcgacggtctttggtgcattagagttccaagaaacaaaactgtcttgcactatccactatcgaagcggaatacataacagctggtgcttgctgtgcacaattgctatggatgaagcaaaccctgagagactttggttttgagttcaataaaactccgctactgtgtgacaatgagagtgccataaaactcacaaacaatctagtgcaacagtccataaccaaacacattgatattatacataatttcttaagagaccacgaaccaaagaagatatcaaaattagccatgtgcgcactaaaaatcaactagccgatatcttcgcaaagcctcttgatgagtctaggttttgttctttgaggagtgaa

SEQ ID NO: 56283 - DNA, 589 bp, Zea Mays
ttgtatagagcttgagaaagcctgggactggttagagatgccttcgtggggattcaagtgagtatgtcccgtccccgagtacctagatgggctcgagtccggtgtggcacgtgtcccccttggctacgcaagtgtcctcccttttatatacgcaagtgtcctcccttttatagactaaggggagcacgtacaagggagctaggtctcgataggtgggcatataaatacaataatatgaagtgtgaaacattggataaggttggttgaccaaggtcttctcccacggtgggtacgaatcttctcttggtcatcacgcgtgctcctctggccagacttgctttcatcctgtcttgtcagtgtgtgggtgaaggctcttgcgtaggctggctcattgacttgcttagggaagtaggtggacagtgttgtcctgtcccctctgactatcttttcgcctggtgatgtagtgggaacaacgagggtcatgatgggagttacccacgcgcgacgcagttggtcaatggtctttgccttggtaacatgtgggttattggcgcgcccaaggcctttcatactacacatgtcatccaca

SEQ ID NO: 56284 - DNA, 839 bp, Zea Mays
cgttgatatactagaagaagaacgattgaatacggtgattcagtcggcccaatatcagcaaactctgaggcgctatcatgacaaggccatacggcatcgatccttcgcagtgggatacctcgtcctccgccgaattctaacaggggagggacggcacaaattgtcgcccctatgggaaggaccattcatggtagcggaagtcactcagcctggatcatattgtctcactcagatggacggcacagaagttgggaactcatggaacatagaacatctcaggaagttttatccctagctatatctcaaaagctattgggacgacaatgtactctgtaaactaggaaatatatcatcaataaaaagacttcaaaggcactcgaattgttcactgtcaacctgcatgcttacttgactcggggtgaccactataccctactaacggagcaatcggcttaagtcgacaatgacttaaggcggtgtaacatgctcacgcttacttgactcggggtgaccactataccctactaacggagcaatcggcttaagtcggtgatgacttaaggcggtgttacatgctcacgctaacgtgactcggggtgaccactataccctactaacggagcaatcggcttaaatcggcaatgacttaaggcggtgtaacatgctcacgcttacttgactcggggtgaccactataccctactaacggagcaatcggcttaagtcggcaatgacttaaggcagtgtaacatgctcacgcttacttgactcggggtgaccactataccctactaacggagcaatcgacttaagtcagcgatgacttaaggtggtgttac

SEQ ID NO: 56285 - DNA, 1061 bp, Zea Mays
aaaaagaaatgataaaagtcttgtccatcatagcggtaagtactcaccaatagctgaaatgaaaaagaaaacaaaggttatgtgtagttgtagaatttagcaaattttcctctagcaatcttttcccaggacatacaaatatattactaaattaacaagatgagtctctttttagtaaagaagaataaatatatgcattgcaaatgaagctgcacaaaccaaatataccttctgaaatagtaccagtgccctgacctttgctttttccttctataaatatatctattaataattctagaaacaacatcagaagcacaaagactacccatacaaaaagtaatgtcatgtgaagccaatcataaatgaggaattgactgcaaagtgaatgcgcatggccaaggattatgacgttgagtaccgcatgttctcctccgacggagacacacttatacctggtgctgcacgcgtgagaagaaaagcggaatcaaacaatagagaactgagactaatacagtagcagtagacttcaaattacaccaaaattccaagagagctaggcacctggttcgttgagcaaccattgtgtcttgcacatatccaaatctgaaatagattactcattagcataggccagcaaacagagtattcgattccaactggacctgcatttttaagtgaaatccaaactccgtcacatctctcaaacatggctaaaaaagtccaaatggtaactgtagacgatttatgcacacaaagcatctattaaatcatatatcaagttaaatggtacactccaacagcagtagcaatagcatagcatttgaaaggagaagaaaaaatagattgctaagtatgtatatcgacaagctaatcaaagctagtcaacatgcacattccaacgcccacaaccccacattaatacattatgcattgcttggaagtgtagcatttgaagggatcgaacacttaaaagtatggaccctaaataaaagtttaaacatttatctcagagagggagatggttacctgtagtgagatggttacccaagaacttccgggcg

SEQ ID NO: 56286 - DNA, 773 bp, Zea Mays
ctgcttcttcgttgcatcacgcgcacaagctcttaggcaattgactcaattccaccgaagaacccataaatccctcgtttcctattcttagctccgccgcaaggactccaccgtggtcatcgctcctcgggtcagtatctaccaaattacttcctgttctaatttgactttgatctcctattgctctcgataccgaccaattgaagcctgaccgaagcccttcaccagaacgtgcacctgctctgtaaagcgccgccgtgacaccctctccggagcctcgcgtttctattcacgtctagttcaaatttgtgtatgtgcatcaccactggttggcctgtgaagctttcccaagcttcaattgggtcgttcgcgccatcggttggccggaacacttccatccatatgaccatccgccctgtcaccgtggaccggtagattcgtagtcataacgatgaaattgaattgggggaagtgttcggtagaggttcaattgtgttcctgtcgcccgggcgctccagccgtggcggcatctggccggaataggcccgtcggagatcggccgggagctgtccaccatcagggtcctcaccttgtgaaggattagaacatggaggggttttctgtaatacgtcagtgactcattgaatagtgcttcagttctgcttctggttattcaaaaaggcaaggacccctgtgcaaagtggcacgggcgcgggcacgcttctatccacagattggccgtctaggctgaatgcagcctagcactgttcaat

SEQ ID NO: 56287 - DNA, 498 bp, Zea Mays
gcagttcaaggattagggtcagactttatttctattcgttttttaattaaaattgagcccaaagaaacatttggattgtcatccataggtgcagctgagcatgcgccatttcaattgcgtgcaccatgcaagacgggagttaacttcttattcaggggatctttaaaaggctgttggagaatagtctttgtttacatctcaaatattgtcagagaggtactaatctaagatattgatagctaaatcaattaagagctgttggatatgctcttaactcagggtaagatccaacttatttagagactgtttggaacaaactcaactcaaaagaattagatttggagcagcatattcatcttggatttcagatatgaaactacaactcaggagatctcggacgttaccgttggccttctctgccgccagccattttccacctgcgtcaccagcaatgcagtgcctcggcctctaggtcacctcacctgatgatcagttgct

SEQ ID NO: 56288 - DNA, 462 bp, Zea Mays
atgggtgtgtggcggggtgagtggaggaggactggggctgtggagtcgtcgcgccgtcgcggcttcaccgttcgtgggagaaggtgagtttgtggcctgcgctcgtggggaccagaggagccgcgtagcttccagattgtccggagcgattggacgggaggcagagggagaatggaacagtccagtgctgtcggatcttaaacgtggggttggtaaaaattatggtgacgtgggcgagcgaggttgcagctatgcgtcctgctttaatatttagaagaattgttatatagaaatagaaattggaagctaacatagacatgttatgtgcatataaacagaacagggaaaccataacctggacaaaggcaaagaaagcacacgaaatacactgaagcaaatctattctgatctcttctctttggacacagcaagcgatatgcacaatactcttttacccgtgac

SEQ ID NO: 56289 - DNA, 1068 bp, Zea Mays
attcactgaagtattctctaattccagtcaactgagaggggcaaggccgcaaataaatccattgacacggtctccaagggtgaaaaacattttttaataaaagaatgacatatagtgaaaagtagtttttactgatgggcaaagctaaaattgtttggtaacacagatactaaaacgacatatcttggatcagagggactaactgagcatcgaagaaatggactgaaggtaaatgtagcgaaaatcagaaaaaagtctcagtttttctcagcagctgcaacatcgcctacgacttttatgggttattgagattaactttcaaaagatgcatgcagtcttgatgtgacattgtgtcagtccctacgagctgcgacattgagcagtgatgtacatgtttgggctttacacgagtatcaaatgacctcatttgtcactaaaacaatgggtggattcgtggaaggctatcatagttccataacttgagttctgtgcaggaattcttaaaaactaataacaaattcaagatttacccctaccgactaagaactagtaattctttaatatgcattttttcaagaaggctgaggaagcaaatccttgcatataataatcagtaacacttaatgtaagacaattaatggatgaaaagataagtcataaagattggagactgcgcgcaggagaaaacagaacatctgagctggctactaacagaggatttagtgagctctcttgaccatgtggaactagaaaatgagatctatttgagtccaataaaaggaggaacggaagtggacagattagtatcttaccaaggaagtaaacctatcgttagtaataagtgcagtcaaaccttttatggcatatataggtacacaaggcaccttttgatgacatgcagccaattctcacgcagcagttctccagtagcttctcaattacccccacccctcctctttttttggctagaatcaattgaaacatacacatgtacaaaagatgtcttggccaaacaatttttccatcttcctcttgattactttcttttcaagacaatgtcaatttttt

SEQ ID NO: 56290 - DNA, 507 bp, Zea Mays
gcttgctaatgtcatgtgaaaagaaatattcatatgcctatgatgattgattgtctcttgggatgcttcattgtgatttgctatgtcagatttgtgtgttgaagttgatggctctagttatcaactatcatggattcatgatggaggcatggggtacaagttggacctggggagaccaacaacaatttagcatgagagaccatcatgcaacaatttccacgagatttaggcctaaattgagtgttctgctatttggtagatgcaagatatcctgcattttatatctgatttggcgtttctatccccaaatataccatgcttacccttcatgatctccaaattttttgcttagtatgctagacgtacataatgtgtgcttagtatgttgaaattcttggcatttgaaagttctcattaacaaatgtgctgacagcatactcagtgatcggttggtgaggctgcagtagcgcttggagaataagggactgctgaggccgtgacattcac

SEQ ID NO: 56291 - DNA, 954 bp, Zea Mays
gtcattttagaaaggtataaaactctaaaacttcatcgtgtcgagggaaatcctaactcatttatttcttcccctgtcacgggttctccccgcagctctcacctcttcttctcctgttccacataaggataagagcggcccacaggacgtctccgacctctccctttggatgagtgcgacgtcgtcaaagggtcctatagtagttccatgggtcttctgcatcctcgaactggaggacacctcctcgcagccgactacgaaaacggaaggtaagttggtcgccccttccccttctaatccttcctcttgttcaatgggttctttttcgaggttagggttagaattcttctccctcgaccagcctttcctttctgatcttcaattctttttatttattttataggctaggatagggcaaaggttagaaatcatctaacttgaccaccccgagttcttcttatagtgtgtcgagaacattttttttttcttacaatgtgtagtcaccacgtcccgtcaatcctgcatggctgctcgcgccgtgccacccatgaattgctatccactctacgccatagaagactgtgattcgcacaataggccggccagagcgaacaacggctagagtaaaattagagtagcttgctaggatctctttgtcctacgaggaacacatggataacatcaacaaaatacgtaggtgaaaaaatatttctaacgcgcgaagttttctcctgaaatgtcctcttccactgtgactttgcctaaagtttttgggccgccgtcagcatcaatatttcgactgagatgcattgatcccacctacactacctagtctgcccctactctctttgctaaagtattcaacagcttcatcctcccttgctgctgacacctgtggaagcgacataactccaaaatcttacgggggaccttctgtccatccgccaaactatg

SEQ ID NO: 56292 - DNA, 299 bp, Zea Mays
caaaatcttgatggggtactcagcataagttagatcatcttgaacactaaggtcttccattggtaattgttctttaggcaccctcagacatttcttcagctgagatacatggaatacatcatgaacatccgcgagatgatccggtaactccaattgatatgcaacttctcccactcgctttaagattaagaagggtccaataaagcgagggggtcaatttgcccttgactttaaatctcctcattccacgaagtggtgacaccttgtggtacacataatcaccttcctcaaatttccag

SEQ ID NO: 56293 - DNA, 645 bp, Zea Mays
tgatggatcatattcgtaggcgtccccgagaatagataaaataccagtaagtcaaatgtggatgatattaatcccgggtatatccacacctatatcaggtagaagcattcagaccaatatggttactcatcaacgatttctggcaaactccatatacacaggagtacacaccgaacgacaggttcagtttggcttttgtgtgtttaatagaatattgaggcattacattatatgagcattcctccctctaatgccgagatgttctaaaagcatacagataaaatccccaaccacaatcatctagtttgtggccaatgtatgctattgtggtgatttatttgggaaatcttacgcacattacatataggggttttatgcagtgagctttggacttagattaatgtagtggcatgaatactacatatttgtccttcaacatgaagggttagtctcaacatccagcgagacacgcacaacaagttgcttaatggttataattctgcaaacttattgttattactaccaaatgcatagtcaatcattaagatttagactgatatgcgcaacactattttatccataagggtccttcaggggctcatgcataccattcgtttggagccattagttgacttcagatcaaca

SEQ ID NO: 56294 - DNA, 530 bp, Zea Mays
accttttgaagctctatatgggaggaagtgcaggactcctttgtattgggatcagactggagaaaggcagttctttgggcctgaattgattcaaaaagcagaagaacaagttcgtataatccgagagaatttgagggtagctcagaccagacaaaagagctatgctgataatagaagaccactggaatttgaggaatgtgatcatgtgtacctcaagaatgtcaccacttcgtggaatggggagatttaaagtcaagggcaaattgttccctcactttattggaccattcagagtttttaggcgagttggagaaatggtctatcaaatggagctacttgataatctatctgatgtgcacaatgtattccatgtgtctcaaattaagaagtgtctccgtgtccctgaggaacagttaccaatggaagagctcagtgtttagggtgatttgacttacacggagtatccgatcaagattattaacactttgactcgagttacaggaataaagtgataaaaatgtgcaaagtgc

SEQ ID NO: 56295 - DNA, 387 bp, Zea Mays
tggcaggtttggagtttcctccccgccgcgggaagttcccgcccccgtcatgagcatgagttcttgatgtcatatgaggaagaaaaacatcctaaattattatatgccgaaagtacaccacctttattacattatgatgaactggtaataattatacatactcattagtacaactcaacttccttatttactttacataaggacactacttaaactacactactctaattatcttcgtccttggccgctcctgctccactgccagcctcaggagaacattcatctgtgaggttcatggaaggaggggctccaaaaaggtccaactccccattaggtcctccactagctgctccagatggtccgactcccattgctgcaacctctggt

SEQ ID NO: 56296 - DNA, 473 bp, Zea Mays
gggaaattgaagcagaccttcatctatgacagagaggggtgtagtcatgttgagtcccaagtgatataggctgaatgtgcaacttggaagatagccctaagatatagtcaccctaaagaaagaaacgaggaaaatcttgagcctccctcgaagaagtcatcacaggtaactctacaggccgagaattgctcactaagcatatctagttggatcccaataactcttccaaggtcactcacattagggccaacctagatccaaaataggaactcacgttcaccaatttcctccaagacaactaggacatctttgcttgaaagccattgatatatcgagactcccaatagaattgattgagcatactattaatgtgagtcctaattcaaggcctatcaagcaaaaattgcaatgttttacaccgctgcttccttgggacaatgtgcaactgtgcaagcccctaaatacatggggaa

SEQ ID NO: 56297 - DNA, 404 bp, Zea Mays
ctcgcccctcttcttctggctcctcaccgtcgcgctcgtcgccgccatccacatcgtctccggctcgtcctccaagcctgccaggtacaactcaaaaactttcatgaaccctggattctgatcggccgtgcggatcgccgcgctcgttggcacacgacggactgattgggggtcttgtctcccttgcaggaacaatgagacggaggagaggaagaaggcgcgccgcgataggttcctcccggccgccgaggaacgggaggcgtcgggcaggggagatgaccgggttctggagatgatgcgcagtttcagcttcatgcaggcgaccgaggaggatttcatggagggcatgaccgcatacgagcacaacggcgttggcgacggcacagcgcacgggcctgtcgcgc

SEQ ID NO: 56298 - DNA, 352 bp, Zea Mays
tgcagccacatgagtaagtaaataagtaaataaaattggcatagcatctcttcaaataatgtcaaactagcactgacagttcataatatatcaatagtaaagcaagaaacccatcctatatgtgcagtgtgtcaatttatcattatttcacttgctaggacctacaacctatccctttgataccaactataacaccccattgctcccacacaatgggtgttaccaaaaacccttcccacaaattagaaagcataaaaagatggagacagaaagaaaaaattcggcagcacctcccttgaaagttgcataacgagagaaacacatagtttatacatgatgcaatagaaaggta

SEQ ID NO: 56299 - DNA, 722 bp, Zea Mays
ctggtttctatttcttctccaaaacgaaccctagcaacggcgtgctcgttcgccggccatctcttcaccggaatccatcctaatcgacgacgaccaccggactacgcatcggatcaccatccctgagccttggtgagtctagcccataccttaattgaactaatccggccctggattcacctacccacgatgacggcgatcaccgaggtcaaactgaggcgttcccgacgagtaagcgcagtctagctcatttagttgagccgacaagcatcacaagcatgcgagggtgctaaaacacaaataaggagggtgagtgcggacctgagagcggctagcccagacggggtgattcacgacgacacagatgataaatttgggggaaaacccaaattctttggctatggtggctaatcggagatgagagttagtgtcctgggttcgtaataacttggcgaagtagagtggggcatcaatttatagaagctttaggtggcggcttcgaatttgggaggagagtggagcttatctccctggtgaggcaatcaccgaggctcaccgtggagcgcatgcgttcaccttgcgaccgtcactatctcggggatgccacgatcacggcaatgtggtgaatcaggcgactacgtgtcccttgctgcgctcatggcgagcaccggtggcgatattttaccgaccgcgcgggcaagtgggtacggcggtgactcagc

SEQ ID NO: 56300 - DNA, 599 bp, Zea Mays
gttgtaggtcgcaacagtcgacattggctcctggcacccgaagttggaggtgaccatcgacaatcccaagttcaaagtatagaagatgtcgaatcactaggactgagcgatgttcgatggaacgttgcacaacgtagactcatcgtttctctgttattagcgagcacactctcacctactggaatccccactaatgggctcagtggacacatcatgattgcattagctacatgatgggaaattcaatctagggtcatcacgacctagacccatgttgcggtcaagggtatgcatctggatcttgttctttagttacatcaagatgtttctagtttagtttgccctcctccattgttcctttgcacccaccaccacagttgcggtttgtgtcctcaccgtcacttccttccaaaccacttgccccagtctatcctcctttactaattgacctcttgccaaaactccacttccccaaatttgatgacgagaacccgcaaatgtggcaatcttgttgtgtggaatacttgaacaagtatgtagttaaggagcacctatggattggtattgttgagatgcatttttagagtcatactgcccat

SEQ ID NO: 56301 - DNA, 471 bp, Zea Mays
gaccaaggcattccctgtccctccactcgaggtgcatgctatcgtacggggctccggcctgtggtgttgaaggcgtacaacaacgggtacacgtaccgcgacggaagatactcgcatatatgtgtgacaaacggaaccagctaggtgggtacgacgtactacagttgagccgtcccggccggacttctccatcctctctacccactgtttctgtttctgcttctgcttcactcgaggtcaaggaggatgtgagacgaaacagccacgtcctttggtccttgtacctggtttctgtcgtatcgcacgtacgtacgttctcagcaccaacgagacgagacaaaactcgtcggtctaaacaattccatggccctatctgtcgtgcaggggcaagtggatatggacaagggggtacgttggcgtgccaattgttgggtccgcggctagctagttgccgtcgccagaccccacgac

SEQ ID NO: 56302 - DNA, 520 bp, Zea Mays
gtccactcgatgcttgacacgcagagagcaagtcgcaaaagatgatacttgaagggaggaaagggcacacgttagagtgtacttactatccaaacaacacaattttgtagccatttggtccaaatataggtctaagtattagatgtttcgtttgtacaagacattgtctaggcgatagatgacttacgacattatatagtagatgcttgacatgcaaagagcaagttgcaaaatatgatacttgaagggaggaaaaggcacacgctagagtgtacttggcaacaacggagtatctcacagtaatgggtcacatgtagattagtgtgacagtgttagaacatatattgagcaaaacatttgtcaaatgtcgctaaaaattgtttaccagtgaatatacttgtagcaatattgtgcttcttttttctagttcttattaatcgaacaaataatgcaaatggtcaggtaacagctaatcatatagaatctttagtttcccatgttaaccctgttccgatcacaa

SEQ ID NO: 56303 - DNA, 610 bp, Zea Mays
gtttacatcggccgatcctttggaggagattgacataggagatggtaaaactctaaggccgacttttgtaaacaagaccctggagaccgatcctagagatgagatgatcggtctattgaaggaatattcagattgctttgcttggaattacattgagatgcctggattaagccgagagatcgtagagcatcggctgtctattaaatctggttttagacctttcaagcagagagctagaacatttcgtccagatcttctcccacgcatcaaggatgaaatccaccggctgctagaagctgattttatcagaccttacagatacgcagagtgggtctccaatattgtgccagtagagaaggagtcaggtaagcttagagtatgcattgattttcgcaatttaaatagagcaactcctaaagatgaatatcccatgcccatagccgacacattaatcaataatgcatcaggaaatagaattattagcttccttgatggtaatgccggatataatcagattttcatggccgaagaagatgcgtctaaaacgacctttatatgtccaggcttcattggtttatttgagtgggttgtcatgacatttggtctgaaa

SEQ ID NO: 56304 - DNA, 688 bp, Zea Mays
tccaagcaagagataagacttatcgtacgtggttggtttgtcagacgagaagcgggtgatgcaggacgacagtagaaactattacttatgtgtttcgtgcgtgacgcgggacgaccatccaaactattttatctagtttgttaggcgaggtgtggggaggagaacagacttatgtgtttcgtgcatgacgcaagacgaccatcgaaagtggtgttttgtaggagtagagatattggaggataaaagcagcaaaactaaaagtccctgttcgataaggaggagggaggtactagggagaaagaccccaaaacattttctaagaaaacatcaattgtgctgctagcaggcactagcccaaaaagaagttgttcggagagggaggaggataaatagaaagaagagaaggagaaaacaacagacttgccttcttgagcaaagctatttgttgggttctaacaggtgggaagcaaacacttggaaacagttagggaaaaatagtgacgcgatcaaggaactatagctctcaatatcttgtcaagtgtgtcccatccgagttccggacaagggtatttatagggtaaccaagggcatgggcctaaggtacatgcatgccctcggtacattttcgaaatatattgtacaattaggtaattaaaaaacagtgcagacccagtcctaattacacaca

SEQ ID NO: 56305 - DNA, 304 bp, Zea Mays
cccccgcaaaaatctacgtcgaaaaaagaccgcatcgacggtcttcgacattcgaccaatacaaagtcaccgcgaggggcagcgctagccaccctcgcgtgcgacactccacacaaaagtcgcctaagggtgcagccggactagcacaacaagtgcgaaaaatcgaagtcttcctcaaaaagactatccgtgcaaaagtcgcctaagggtgcagccggactagcacaacaagtgcgaaaatcgaagtcttcctcaaaaagactatccgtgcaaaagtcgcctaagggtgcagccggactagcac

SEQ ID NO: 56306 - DNA, 433 bp, Zea Mays
cacttttccagccaattggctacttggtgcgatagttgatgactggagcctttgtatctttgcgatacgcgaagttataacaaccaaaattttcatgtagcccgtcttctctggccttcgtttggtaatacagctcatgcacttggcagaaagcttcagcatttgggtccatcccttggcttcgaagggcccagatgaagatgctgagcctaacgatagcgttaggggtcagttgatgaagataaatttcaaaattatccaaaacttctcctatcatctcgttcagagaaaaccgtaatcctgctctgaaaaagcttttgaaaaccactacttcatcatccttcggcgttggagtggtttcttctccggcaaaacgaataagattcttttcagcttctccgaagtagcctagtttcatcatcataagcacgtc

SEQ ID NO: 56307 - DNA, 685 bp, Zea Mays
cgcagatgcctgggatccccagggaggtgattgagcaccatctgaagatccaccctgacgccaaaccggtgagttagaagcctcggagatagtccgttgagcggtaggatttcatccgtgaggaggtccgaaagctgctacacgctggctttatcgaagaggtccatcacccagtatggctggccaatccagtcatcgttcccaaggccaacggaaagcttcggatgtgcatcgactacaccagccttaataaggcttgtcccaaggacccgtatccacttccattaatagatcaaatcgtggattctacctctgggtgcgacctcctgtccttcttagatgcttactctagtttccattagatctagatgtctagggaagatagaaagcatactacttttgtaacaatggatgggctttactattatattataatgccttacggtctgaaaaacgccttgccaacatttctacgggtgatgagtaagaccttcggggacctgattagggataggatagagatatacgtcgatgacatcgtggtcaagactaagagagggtcgaccctagtggaagacttgaccctggtctttgacaagctgcgggcaacacacacgaagctgaacccggaaaagtgcgtctttggtgtctccgcagggaagttgctgggattcctggtttcgca

SEQ ID NO: 56308 - DNA, 647 bp, Zea Mays
caaagagtcaagttttctcgttctttataacatattttctaccttgtgtaaaattacatagttttgttttgactggccttgcattgggattaacagaatgttcaacaaattccatggggacactttacttatctgatggtttccatgcaaatatttcctaatctcctagaggaaattggtgagtgtgagtttgaatttggagtccaagttaacccaatgtagatgaccttggtcgagttatcagatcaagctagacttgctctatgagcttggaatcagtcagcaaacttattaatgaggctttattgtgcgggggatcgagatccacaatccttgcttctttaggatgaattttgctaaaaggcttcttttaggctatcacactctgattgcataacctaggactcagtgaggctacaaccttctctatctcaagtgtatgacttctttaagttgcctttgatggtgataactacattagggtctaacatcttgagtaccagataagtatagtgaggtattgccatgaacttggtaagtccatgtatttcaatgataacatgatgagctgcatcaatacccgcctccttgaaatgttaatactcattgcagaacttctctttgattccaaacatgataggcatggt

SEQ ID NO: 56309 - DNA, 507 bp, Zea Mays
agcgaccacgacgcgaacgggttgtagtcgatagcgacggcggtgagcccggtgaggcctttgaagaagtcggaggggatggaggcgaaactgctgttgtgggctagtaaaacctgaagcgaggagagacccgggagcgagggcagcgggccggagagcttgttgtcgaaaacctcgaggcgggtgagctcggtgaggtcgcccacctccgggggcagggtccccgtcaggcctcgcgccccgacctggatcgccgtgacgcgacccgacgagtcgcaggacaccccgtcccaccgcttcggcgagcaggggtcgcccgcgacgtcccatcccagcgtcttgtccgcgccaagcgccttcgccacagcccgcatcgccgccacgtccaacggcgacgtctccgccgtcgcaccggccgccagcgccaccagagccaggaccaagatcccgcaccaccgagaggcggtgccctcgcgccgccgccgccaccgcgcggtgggaaacggc

SEQ ID NO: 56310 - DNA, 612 bp, Zea Mays
gacttggtaaaccactaggcgatgatgctagtcatagacacgcttctgggccgcctgtgcctgctcgagacagtagcggacatcgtcgaggaaggccgcgcggtcctccatctcctgggcgacagcatccacgcgcgtctcgccggggtcataagagcggatggtcagcgggtcgcggccgtagaccacacgaaacggtgtctcatggagcgatgattgataggcggtgttgtaggtgtactcggcccatggaagccagcggagccactgtcgtggacggtcgccggtgaagcagcggaggtacatgacgataacacggttggtggtctccatctgcccatccatttatgggtgaaatgctgatgacatgaagagcttggtgcctttgagacgcatgagctcagtccagaacgcggatgtgaacaccatgtcgcggtctgagatgatagactgtggaacgccatgtaggcggacgatgtcgacaaagaaagcttgtgcaacggtttgggcgatgtaggggtgcgccaacggaatgaagaggcagtacttgctgaaacggtcaacgacagagaggatgaccgtctttccctgcactcgtggcagcacctcaat

SEQ ID NO: 56311 - DNA, 657 bp, Zea Mays
ccgtaatcgaataagtattacgaagtttttaggagccagccctgttgtctactcttgacggctagtattttgtgaactggctcttcgcgcatcgcatattgattattacacagttctcccactcatccgtcttgcgtaacgttttgcaattgccgttcgattcggtaaatcagatcagtcttgtgtttgttcttccctacaggcacattttcatgtcgggcatatgacgttcggtgcacaagcagtagaacccaccatccacttacaccagtacgatcttgttccgattaggtagggtatggaatttcggacagtttttggttctactgctaaactctggtgaattccattcagttccaaaaatatttaaccaaaatttcatagatgtttgaacacttcgtccgaaattttaccgacttccatgattttcggtcctatgatgatcccctccggcgtttatccaaacccggtagggctaacatggatctcaatacccctatgatatactatgcatgattagtgttgggaattaggcgggccggcctaagcctatcgtgctttaggttaaataggtttggacaaaaagaccaaaaaaaagcttttagttcggtctggtctggctctaaagcacgtcgtcactttgttaggctgtaccgg

SEQ ID NO: 56312 - DNA, 648 bp, Zea Mays
aacttccccggatctctggactgcgcaccaaaattaaggaaatgcaggggccctggcgcaaaataattaagacacaacgcacagtacaatggactgcgggttggttactttattctacaggggctctttagcctaaatgccaaggcgaaggggtatctagtgttttcggtcgttggatctcggttccacgcttaggattagatccaaaccttccccaaaccaggttgccatgatggccgctggatcctatatctacggcacggatcttaaataactgagatcaaatcgtattcattggatcacatatctatggtcagtgctcacttagccgaaggggtaagccgctttctaatctaggccgttcattctaatccaacggccaccacactgccctcaacctcccgacggccagggacggcggcgcccacaggtccgacggcggagaccctaccagtgaaccccaatcgcgcactcacgtacaaatcctccgatctgaaaactcctatgcgttgccgagatgatagcgaactcaacggaggaattcttaccttgattccagcaatgaacgaactgccccacggagtttggcagacgcgcggaggtgttcgcaccacggcgacgaatctcaagggctccggccgctactcc

SEQ ID NO: 56313 - DNA, 1808 bp, Zea Mays
attgctgacttaagtcgattgctccgttagtagggtatagtggtcaccttgggttaagtaagcgtgagcatgtcacaccgccttaagtcatcgccgacttaagtcgattgctctgttagtagggtatagtggtcaccctgggttaagtaagcgtgagcatgtcacaccgccttaagtcatcgccgacttaagtcgattgctccgttagtagggtatagtggtcaccctgagtcgagtaagcatgcagattgacaataaacagtttgagtgcctttgagaatgaagtctttttattgatggtgtattttccaattacagaatacaatgctgtcccgatagcttttgagatctagctaggggtaaaacttcctgagatgctctatattccatgagttccctatttctgtgccatccatttgagtaagacgatatgatccaggccgagtgacctctgttactatgaatggtccttcccatagtggtgacaatttgtgtcgtccttcccccgttagaattcagtggaggacaagatctcccaccgcaaaggatcgatgtcgtatggccttatcatgatagcgcctcagagtttgctggtacctggctgactgaatcactgtattcaatcgttcttcttctagtatatcaacatcctccagtctagtggcctcagcttcagctatgttttcgaagatcaatcttggtgccccaaacttgagatcagcaggtagcactgcctctgaaccatagaccataaagaagggagtgcttccatgcaaagctcggctaggttgagttcttaggctcccgaccacatacggcaactctctgatccactttcctttgaacttttcattcttgtcaaagactttcttcctgactgcttccaatatcattctgttggctctttttacctgcccgttggctcttgggtgtgccactgatgcatatttgatctggatgcttttttgtttgcagaaatcaaagaactttgaactagtgaaattggatcccaggtcagttatgatgctattcggtattccgaacctgaatattatgtcttgtatgaattccactgccttagctgaatgaagcaatgggtttgcactctatccatttagtgaatttgtcaatagcaaccagtacatgagtgtatcctccttgagctttcttgaagggtccaatcatatccagtcccccaacacgcgaatggccatgttacaggtatggtttgcaattgctgtgctggtaaatgttgctattttgataagtattggcaagcttcacatctctggactaactcggctgcgtcacttttttccattggccagtagaaaccagacctgaagaccttcccaaccagagtcctggatgttgcgtgtatcccgcattgcccagcgtggatttcatctagtagttcttcccagtagctgaaagaatgcatttcatgaggactcctgtcgcgccccttctgtacaatgtttccccaatgagagtatagtgagctgactgccttgcgatgcgttttgctgcatttttgtcactcgactcctcttcattctttatatatctgatgattggctctctccagtcatcagaacctgaccctggttggttcaaaacactgcactcttctgcccgatctaaggaaatacttgggtgtggtacctcttagacgaaaactccaggtgggacctgagtccgactggatcctagttttgacagcgtgtctgctgccgcgttgtgatctctgtccacatgatggaattctagcccttcgaatttgtcctctagctttcggacggccgtgt

SEQ ID NO: 56314 - DNA, 570 bp, Zea Mays
gccaacactcgtgaagcctaccaaaccctgaagatggattacgataagaagctaaagaagctcgcccccacgaagaaaatccgaaagaagacaagagccaaggatgccagactgagcggaagagggaagcccctccagctctacctccctccaggatagagaacttgtccgacgtcgaggatatgtccctagctagccttgacgaccttctcaaggaatttggggacactttagaaagggagttcggaagcaccttagaaagcgctcgcgtgtagtgcaacttgtggtaactgtatgcttgtaatgaacttgtgtgatgaataaaataacttggttgaaattttttttggcatatgcatagtagtaattctctccccttggcagatggctttggataaaaccacgcctaccgcctccgggattggagccaggtttcccctaggagctgaaggagaagccgatggagaagggagtgagacccacctccccgcacctccggagctaccattagatttagcccaagttctagccaaccaaacccgactcattgaagtcctcactagaagtctg

SEQ ID NO: 56315 - DNA, 681 bp, Zea Mays
ctcttataaatttatttatttattcattttattatttttcctaccaattttgggtcttacaaatcctacccccgttaacagaaatctcgtcctcgagagttgtaagaaaagggacatagagggattggtttgtaattcgacttttagtctataagtggttcaaaaatccagagtctcatttttttatagtcaatagtggttgattaggagagcatagatatccagctacttattatgtaggaattaggctggacatgttgaggtaagaaagatcatggcaagaaaaaagtctttacccaaaatgtttaagtcttgcttcatctcgagattcgctttgactgttatgtccttccttgttgatgttgatcttttcttctccggtcttggtctcactgattcgaggttagtgtatatcatcggaattggggaatatggttaagatagttatgagtgagatagactacatgatgtaggtcaagagtttgtttgatgttaggtggggatagatagattatacaatccatcatgactctgttggttgggttagctcttctactcatagttgagttagtttaatgcaccaatttaggtttaagtgcatgaggggagaacaaggtttatatgagtaggatctagtttatttcactagtgttaacttgttaattgagtcacattagattg

SEQ ID NO: 56316 - DNA, 348 bp, Zea Mays
aagaggtccaagggcaggaaattgtacagagaaggaaaaaaggaataaggaataaagaaaaagaaggaaagagtacaagctataatacaagcaacttgcctcctagagaccagagaaccaagaacttacagtagcagaaaaaacagggttagatctaatcaagttaagcttatgagtgtccataaagttcgtcatccaagaattgaaagtaggggcttctcctctcaagattttaccattttccctttgaaatctcccaaacaaccactgaaaaaatccacgaagaaaggaagccccaacgtatccctgaccttttccatcatctgaaaaaacaagtggtcccaaatt

SEQ ID NO: 56317 - DNA, 400 bp, Zea Mays
tttcgtagccatccaagtagcatataataaggttactgggttgatgtggctacacaaggttctatttttgcgctcccggttaatatatagaatttatccttttaaaacagtcttcttcatacgaaatctccatggagaattggtgacatgaatagtagcaccagagttaatccaccaagaactaggaaattataatttttagcaaccttagcatggcccatgaaaggcactttccacctaggccaaaagttagtccaccttccctgtgcccactgatctgaatctgaagattgacactcgcccgcgttcatccaaggatggtataaaaccatgggtttaggctaataaggggaaaaccctaatcattgcttcgcccacatgtgaccctcttccgctctcg

SEQ ID NO: 56318 - DNA, 644 bp, Zea Mays
gttgagaaacatactaaaaaaaagtttgtgctctattataatgctctccaattgtattaagctcggtgatacatatggtgattagtgaaggtccttcgtgaagtatttagactagttagaccatcacttatgtgcttgctctagatttagtcctagtgcttagtgaggttagcatacttcctaccacagtaccactcgatgcttgtgagtatgtgcgtactattgttgtactcagtggggtttgtagttttatgagaccacaccaaccatatttgtggtgtgtccatcatcatgtagctgagtgctttgtttagtcttttatttagggcttatcgatcatgttgatgaatctcagatttagcacagggacaaatgccatcattttgatgttggtcaatcactagggatggcaacagagaattccccgtcgggttttagctctccatctccgtctccacgaagatttttttccatggagttccccacgaacacttgcagagaatatttcttccccatcactgtttcccacggtgatagatccttgtcgggatccacatcctcgcttaaattataattaagacatgcttcatttgttattaatgtaaaatttgttacttatacacattgttaaatgtaagaaatca

SEQ ID NO: 56319 - DNA, 334 bp, Zea Mays
agagggcagcgcgaatttgactccgactgagcttcactggtggagatgaaagcacctcaccgtggctccctgcgcaaatttataggtacggcggtccaacagatgagcccaggccaaggatagtaacgcaagcgcatgcctaccacgttggaaaagaggtacagtgagggagatggaggcatgggcgacaccgcggcaaaattcaatggtcacggtggccgccggtgaagtctccggctggacccaaagaacggtgccacgtatgcgccgcttaactccgaccctatccatttccgatcgcgcacgaacccggacggcggcggcacggattttg

SEQ ID NO: 56320 - DNA, 574 bp, Zea Mays
ttcttgtactcaaaaagaataaagtggattagcgcatgtgtgtcgactataccgatctcaacaaacactgtccgaaggatcccttcgggctcccgaggatagaccaggtggtggactccaccgctggatgttctgtgctgtctttcttagattgctattccgggtatcatcagattagtctggcgaaagaagacgaggaaaaaacggcgttcatcactccatttggtgctttctgttatacctccatgccgttcggcctaaaaaacgctggagcgacttatcagagagccattcaaacatgcttagccgatcactggggcaagcgtgtggaggcctacgtagatgatgtggtaatcaaaacggagagttcggagaacttcattgaagacttacagctggttttcaacagcctgagacgatatagatggaagcttaatcccgaaaaatgtgttttcggagtaccagcagggaagttgctcggatttatcgtcagccaccggggaattgaagctaatccagataagattgaagctatcatgaaaatggaagctcctcgatcacgaaagaaggtgca

SEQ ID NO: 56321 - DNA, 607 bp, Zea Mays
ggggaacttcctgactcccctgggggtgttgtgccatcctttcggcgaccagcatcttgctcaccacctctgaagccgctgcaatgtataagtacaacggctctcccggctccggagctaccagtattggcaaggacacaaggtgctgctttaactcttgaaaggctcgttctacctcttcggcccaagagaatggaccgaacttccgcaatagcctaaagaagggcagtgctctctcagccagtcttgaaatgaagcggctaagggcggccagtgaccccgtaagtttctagacgtccttgatgcgggccggaggcctcattgcctcaattgcctttatcttctctgggtttgcttcgatgccccggtgtgaaaccaggaatcccagcaactttcctgcggagacaccaaagacgcacttatccgagttcaaattcgtgcgtgttgcgcgcagcttgttgaagaccagggttaagtcttccactagggtcgaccccttcttagtcttgaccacgatgtcatcaacgtatacctccaccctgtccctaatcaggtcaccaaaagtcttactcatcgcccgtacaaatgttggcaaggcgtttttcag

SEQ ID NO: 56322 - DNA, 598 bp, Zea Mays
cggagactgttatggggagtgacattcacgtgtgtagaggaagtgctacatttgcaattgacactgtacgatcctgtagttccaacaatcggttgagatgttgctttcagccagtagccgaaaggcgtttatggttattcagggattcttagcatttattgagatgtggaaatgtaggaacgcgggggattggaactgtctctgtactagaatgtttcaactgaatttgagacaggatttctggcacttgacaattgctcaaaccgacatctactgctattgccctacagttcatctgtcctggacagaaatcaacaaaagagtggcaaagtcctatcactgtttcataccctacatgaatcgggcatggtttttgtggtggtatatgaacatgtaggataggctaggtggtttgagttaattacaggaccatttcatcattcatgaacttttacgggagaagtgcatttttatgcactaggttactaacttactatcatcatgggttcataatgaatcatacaatcaagaaaggtttacattggaacatgcaatgtttttttacatgggagtgacaaggtggatgtgtgaccataag

SEQ ID NO: 56323 - DNA, 381 bp, Zea Mays
gcctcgcgcagtaggcgctgcggacagtctcagctaacagattgaggaagactttgacttagggtaagggatgaatgcctgaccgttgactacctaaggggctttggctgggccagctagtgctcaacgggtctttcatgcgagcttatgcacgggtctaaagtaaggacgagcttttttctatctattaacagaccttttttcagtcaggctcgttccagcctgtgggccacggccttggccaaagcatggtctgatacattatgccgtgttgtgcttgggtcgttcctttttttgtgctttatgcatgtccagtagaccccgtcctaaatgtacaactctacccttggcgtcgccacctccacgcctcctcgctcctca

SEQ ID NO: 56324 - DNA, 755 bp, Zea Mays
aattgagcacaccgtcgggtccgtagggaaatcacgcaccaagccaccaagtcttgcctccaatcgttcaccagagaccgtgaatttctcatcgcccccaatctctgtttccgccaccgtagaaacgcctcgccgtggccagcttgctccaggttagttcaagctctctggtcgtttgttctagcatccttaagtcctcctcaagctcctcgacccctctgattggactagaccgccctgggtcaccgagaacgcccatgttcatccgttgtccatacggtcaccgtggtcagggtgttttagtgctccattagtgaaattaatttagggaaaacttcggttaaggcttgaattaggtgctagtcgacggagagcaccggtctttgcgtgatccggccagtctagactcattggtgctcggacctccgccatgcgacatcgtggacgtatcgctgtgaagaattagaagttcaggggacttactgcaagtgtcagcgactcacagaaacagtgctgtgaccccgcttcagattattcaaatggacagggcctttctgcaaaacctacagcgcgggcgcgcgcgtggacgcgcttctgccctggctgggccggttcgggccggtttcaccccagaactgttcatcattttcctttttcattttatattagacttgggaaatctataagaaattgtagaaaaatcctaaaaataccaaaccaattttgctaggcttctaatttcctatagaatttaa

SEQ ID NO: 56325 - DNA, 912 bp, Zea Mays
ggacccgcctaaattgtctcccaaactcatcagagcaaggccatcagaacagtaacaccgtaaacttccctctgacctacaaacttacttgccgtgggaatgacgaatgaaaccacgacaagttacacccgcgaccagatcacgtatgttaggatagggattagagattgggctcggtcttcttgaccgagctacagaacacactcgacaagagtagcttagccttacatgggatcagtgtatcagatgcaggaaatttatcttcatctgccgtcgccgacttgtcttgaattggacctgttggagaaactaaagtagctagcaccgctccttcagatccggacatagctagctagtgcgtttggttgttggggtggagatgatccgaatgttcggttgatgcatgcatggagcgagacgatgattctgtatgggtaccgataacgattcatgattcagagctgcatgcgcctcaatacaatacaatgcaccaacaggatctgagattgctgcgggctttttgatacaaaggtggctttgcagcagtacccagttcgtttcccataatagttcaccgcgcaaaagcacgccatggattcgtgtccatcacaggcgacgtccgactccgagtgtagacttgttgaaagtggatgggctgttcttgccctttttttttgttgaagagacttagaactcacacaaatgttgaatggtgcaacgaaacacatctactcgagtggcgtgaagctcttaagatagggtttggttccagagtgtcatcgttgttgtttgttggattgatttcatgtaggacggaatgaatctaaaaatagaaaaaaaaattatgcttaaatgttgaattatttgactcatcaaaattttctggacgggagccgttctatctatctggct

SEQ ID NO: 56326 - DNA, 547 bp, Zea Mays
ggtgagctagcagatcggcctaacggggcaatgactggcgttcctgagcggcggacaccaaattagacctactccgagcattttccctaagttaattgcacggttggtgacctactccgccctgcccacgagaacagcgaaggctaaggacctttgctcgtgttcctggcgattggtgagctctcagtccaaattggtggttcggcaagcatcacagagttatgagagtgctcaaacgagggagagggcggcatgaactgacctgaacagtgctggccacgacgagctcggttcttgcggtgcggcagaccgatttgggggcaaacagcgattctccggctaggggggctaatcggagacgggagtggtggctatggcttcgcaatttggagacgaaggtcggagctcggttgatttgagcgaagggagcaaggacagggtgaatttataggcgtgtgaagcacaaccgcggccacggtgataaccattgccggccctagctggcgatcaacgatggcaccgagcacggcactccccttagagcttg

SEQ ID NO: 56327 - DNA, 617 bp, Zea Mays
gcgatgttcaacccatggatcagtgcctcatattttgctgcattatttgatgctgggaataatagctgaagagcgtacttgagttgttcacctccaggggcaatgaagaggatccctgcgcctgctccctgcatcttcagcgagccatcgaaatacattcgccatactttagtagcctccgggttgtcatgaacttgttgctcagtctactcggatacgaagtcaactagtgcttgggtctttactgctatgcgaggccggaactctatgtcatgagctcccagctcgcaggcccacttggctattcttccaatggcctctttgttgtgaaggatatcccctatttgaaacctagtgactactatgactttgtggtcgtcaaactagtggcggagtttgcgagcggttagaagtaccgcgtatagtaatttttgaacttggggatacttctttttagaggttcccagaacttcgctgatgaagtagaccggatgttgtactggatatgtgtgtccttcttttgcccgctcgactactaacgcggtgctcaccacgtgagtcatgcaggagatgtataacaacagatcttctgccggctgatttggtgtggctcggtg

SEQ ID NO: 56328 - DNA, 444 bp, Zea Mays
cgattcatttggctctgtgtctaagtgttttgagtctgatatttctgggagttcgattgcgtggacggaggagtcttcagatgaggacttggattattttgcagcgttagatgtggctacagcggagccttcgccgcgcgtggagggttccgaggagctcccgggcgtgagtactgggtataggcggcgtagggcggtggcgaaacggagagtgagtggattgtcgcgaagcggtaggcgtcatcgtagtgagatggagagtggttgtcttcgcgtggacgggactaataagcgagaattgttgtcctcgccgattggagtgagtgtaggtgagggggagctgcgaaatctttgagggtgaggaattgaggataatgctattcaactatagggagatgggtatcatcccaaaggttgagccaatgtgatgtatgatgccctcgc

SEQ ID NO: 56329 - DNA, 744 bp, Zea Mays
taattcctggagggctcttatgcaaaagtcgctcggctgaatgggtaccattaccagccgtctgattaaaaatggacgcgccagatcttaagcccacacccgcctgaaatggtacgcaacctaagccctcggatctcaatccaatggctaccacgcaatcggctgaaatcattaactatgctttggtctccatcgcccgatcagaatctgatggccacaagtcctccaagtgaaggggtaaccccatcaaatcagggccgttcatcaacgatttggcagccagggtctttcttcttcccccatctggtgccgagccagcgacgcaccgcggccgacggcaaaatctccaccgacgagtggtacccagccaccatggtgatcctatcttaatgccaaaaggtgctatactatgcacatgatgttgtgaactcggttacagggtactcaccaggcacgaacataatcctcatgcgatagtcacagcgatgttctctctctctgcgctctttcttcgataatggccgagatgatcgatggccaaggggtgcaagccggtcacgaatttatacaccaatacagagccgggcggggaaaggagaatttgttgggatttatttaacagaaaaccaagatctccggctctgctacactggtttctcccgcggagtctgctcgatccggtagggtgaagcatctggagaccaggccccaagagcacagctcggtggagccaaccatggatgg

SEQ ID NO: 56330 - DNA, 938 bp, Zea Mays
tttatcgttttgtttcctgatttcgacgataccattacctgggacgctcacgagacttatataatatactatccttctatggaatcaatgtgttgattaatattcgctacatatttatcattgtttattttttatcaatgacaaagcacatgtgcaatcttatatatacctttaagatatgtaaacgtctacttttggtgatgctaataaaagtatagaataacatataatatttttgcatatcaatgtattttatcactatttgaattgcgcacaaatttcatgtcattagtgttaatttgtgagatatggggttgatgatatacatgttgttcgttttcatgtaatcgttgtgcactaatatttatcgaataatttatacgtcgtcgcaacacacgggcacatagctagtcattcgagaagttcaatccattagcagtacaagacattaagagagacgtcgactaagcgtcggcgaacggaccaccggtagagagctccaaacaccagggcctggtcatgactcatgaggaacatcaggttgacctagcccatgatcgaccaggcaagggcggacctgctcctcaatattgtccaggtcctcatcgctttgaccggaggcgaagccatctacaattatggaggcatagatcttgtcaaagtgggagaccatttaccctaggaccatgctactccatgatacacaccctcgacaaccacacgctctacatactccgacagcacccacaattagtcgatcagagagacctcgatcgacgacggaggagagaggtgagcgcacactgagccaacgacccatagaagatcttgaacttcggcgcttcactctgagagcgaggtccctgcctactccctcgaggcaagaggaccatcgcgggcgagcgaaagctctcgcgcctagcctttcgccgtcgtcg

SEQ ID NO: 56331 - DNA, 563 bp, Zea Mays
gagggtcgcactctaaggcccaaactgccatcagtgacaggtggattcgacacaaaaaaggtgaaggctttaggaggaggcaggttccaggccgagtatgccactggggcaccaacatttgacactttgcctctaaggatcatctcaagacggctcaccaagtctgcagagggaattcttctgttggtaacccgagttgagtcgggtaggcctcgatacagataagccgggtatgccttgtctttcaacggctgaatattcttgaagacaaaatcagcaaccacagcttcagcagtcagacccctctctttcagcaatccaacttcagccagcaaagcacctgcctcggctacctcctgatctgtgggggactcggtccagcttggggtgcgaacatccggctgtcttcccgaccgaggggggagagagtttccatgattctcaactatgaaccactccaagcgccatcccttgatactatctttgagagggatttcgagatactcagtcttcctcccgcggcgcatctccaagctagcaccaccaaccaactgatgttgtcc

SEQ ID NO: 56332 - DNA, 698 bp, Zea Mays
tgcctctacccatgatattttccaatcgcgaacgatccgcgggtggacggtggacggtccgcgtcctggaaaccgcagacaatctgttctgtctctcggactgtccagaactagacagggcggactgtccgtggtcactgaccgaacggtcagcggcctgatactcatatttcccatttctccctggttttttatctcgaatttcaaaataggttctttgctcgaatatggacattttgactgttccaaggattagtatgcatgcatatatacatatataattgcatgattgaagttttcacataaattcaatagaattatataagaatcaaaaattcattaaaaatagctaataaataacttagaaagcacattctagagcacaaatactgtgctatttatgtgtactcaacttcaagccacatttgagagatcaatcacattcatttcacttcgcaacttgcaaaatcttgtttcatccaacggttttgtgaatatatccgctaattgatcatccatcccaatagaataaatagagagatcccactttccaacatgatctggtaagaagtgatgtgttatatcaatatgttttgttctatagtgttggaccggattagtagccaatttcaccgcactctcatcatcacacataagaggaacattcttgaaggcaatttcatagtccaatagagttt

SEQ ID NO: 56333 - DNA, 716 bp, Zea Mays
acgaaggaacccccaaatcatgggaattcaattggtgacttgatgaaggattaccaaccgaagcaatccgcaaggcatcactagggaccaactcagtgtcatcagcggaaatcaaaactctgtcatcaggagcgccgacctctaaggcgacttcctgacccaaagctcgtgccgctaccatgcaaccaaaatgcggaggagaagaccctacatgaacatccatggaagtatgagagggagaacccactcggacaccctcgggggctgggtcatagctcgcgctacccatccgagccggatcatctccggcaacaccctcgggggctaggcaaacgctagcgccatccttgaggaccgagctctctgtagcagccacctctaaggctgaaggaccttcaaccacttccatggaaacagagcaatccagatcagcctctcgactcttaagaccacgctccaaggtcgacgaggcacgagatgctgcttgggataactctaacccggcattaggcacatcagcacaaacttccatcattccaccatctacaggctccgacaacagatcttctgggaccatgtcttcgagagtctgatcaaaatttgccagagacaattcttgtagaccaacgagagcagacaaagctagagaaggaacaccactactctccccgctggctatgtagcgccggctgttcttccgaatcaagggaatttcc

SEQ ID NO: 56334 - DNA, 570 bp, Zea Mays
caaatatgctctaaatcttgtcaagccacctttgctactgcgataaggttgggcgaaaaaatgaggataattgatgtgctatgtgaagtggatgtggctttggagatgctaatcgaaagaggggcgtagctccacatcaccctaggttagttcagtgacaaggtattgagacaatatttgccacttgggcaaggctggacagtccagccctgtggtctagacggctctgcccccgcgatcagattaacttgggcgagattacttatcccacatgtgttatcctaacctatccataggaatctgttagatcttgcctagaaacaggtacatacctcctccctataaatataagggatacgaccgattgagaacccccgaacacacttcaatcagaccaatctatttactttctttatcattcatgccataggagtatatgtagtgtaactctaaatgtagttcacatcccaatcatcatcctttttgactcaaagtcgtttggggataccctaggtgtcgtgtcgcccttgggcaccatcttcatctatgcgtcgtctagatgcatcttgg

SEQ ID NO: 56335 - DNA, 554 bp, Zea Mays
cgtgcatggtagattgacgtgtccttattgtgctaaagatatagattgttttcgtcttagtgctggtggcaagatatgttactttgattgccatagatgttttctacccttcaatcaccccttcagaaggcagagaaaagagtttaggaagggcaccagcgtcacgaagggaccgcccaagtgacgtagtgggatagaaattacagaagagcataggaaacttgtcctagacgagagtgggaaaaggtatcaaggttttggtgaggaccataactggactcacatatgtggcttgtgggagcttccttatgctaagtcattgattttgatgcacaacatcgatgtcatgcattaagagagtaacttttgccaagccctcataaatacatgcatggatttccctgataaaacgaaagacaatgacaaggcacgcatggacttagccgtgatttgtgatcatccaacccaagtgcttagagaaaatggaggcaaaccaaaagctgactattgtctgaaacctaagcaacggaaagaagtgatgaagtggatgaagg

SEQ ID NO: 56336 - DNA, 333 bp, Zea Mays
taaaattcagaatacaacgtatatgtgttcactggactgatgatccagaagtcatcatgaagttagaaaattgccaatctaccttgtttggtttgtttggaatggctgaaaacgcaccactgtattaggtctgttcttttcaactgccagtaaggttttagacattgtgtcatcaaaggtatttagtatgagctgcagacgccgtacttgagcaccaactgggcaatacaaatccgttagatgcaaacatgcatgccatccacctctgcatgagctgcagactcgtgaactacaagccttaatcacagtcacacctacagtccaaaataagtg

SEQ ID NO: 56337 - DNA, 483 bp, Zea Mays
tcgatgggggaaatgactgcgacgaacgaactcgaagctttccgcttgggcgccatctcaaccttgctggtaggcgaggcggaagcaataccacaagagagcagagaaggcctagatgcagaaaagcatgaactagggcacggaacgtggaggcgtgcgacagtgcagtacatatggggttttcctaggcccggcgccacttccaaaatgttggcatgccatgtcatcgcccggctgttacttttaaaacgcgggcatgccatgtcatcacccggccgttatttctaaaacgcgggcgtgccacatcatcactcggccgatatttccaaaacgcccgacgcggcccattttaactcagcggttatttctaaaaacgctgatgttaccagacttcacccggccattgtttccaaatcggccggcgcagcctgttatcactcgactgttacctctaaaacgccgacatcgccatcgatcactcgg

SEQ ID NO: 56338 - DNA, 435 bp, Zea Mays
ggagactaagcgttttgcctatagagcgtaatatcatacttcactgtgtgtagtattgataatgtaagcttgagagcttggataaacttgtgagtccgagagtctaagttgggtctgccttgtaccgtcgtgtgctcttccttttatagctcaaggaggcacgtacaaggatactgagccccgacatgtgggcccagaggcaaaatggaaggaaataactaacgcatgtaacgtctgggcgatctccgagcaccataatgtccatagtgcatacaatattgatatgtcgcggctgctttctcggtaacgcacgagtcatgatgagtgcggcagtatgggcgtactgcctgccaatggaatggacaggcacgccgcctgcaggatggcctggtcgccgcccgtcaacggagtggacagggctcattaaatgctgag

SEQ ID NO: 56339 - DNA, 758 bp, Zea Mays
gggtgcattattggtcacacaaagatcatgaatggtagagaaatgaagctgcgttatatgcttagccaattagcttatatactccatacgttacaaattatggtttactttagttttgccctaagttacactttcctaactttagaaggtacatgcgactagcgccattgcccattagtggtagggcgcagattgcggcattgtccaggtggttgggatggcaaccatcgatcacgattgatactgggattgcctcggtcttttacttccatgaatagatgcatgtatttcctttatatagagataacaatcaatagagaatatgtagcctttggcagctccaaataccatcgtgtacagtgtgttcgtgtgaattttgcctccctccgatcggtgttctaacaacccagcaactcgcttaccagccgaccagccgccacaccacatttgcatacctctgagccccttccgtcgagcaccgagacccctgtcccagcctacctgggctccagccattcgaccgtcacccgccctagcatcaatgcctcgcccgctgggtcgtcgctcgcatcgctctcttgcctggcgacaccttttttagtgcagattgcagaggacatgtcgccttggctgtagaataatcgagtaagcgatagaagccactcgtatggagaggtagtaggaagaaatcatgaaacatttttcaccgtcagaattagatcgagcgaccaagaaaaaagaagacatggcattgcgag

SEQ ID NO: 56340 - DNA, 321 bp, Zea Mays
cattcacgtcccgcgtagagcatcgccaaatagttcatatctagtggtcgacgttcaaatcggaacccaaacactttccttacaggagccccacactgctaggctctcctcgcaggaaccccacccctcataacgatgaggaggcgacgccagcggtcagcggagcgtaataactaaatgcatttagattacgatcagtgaagctggtctgaataactttgttgtattacttcgctcttgttggtaggctagccaccgtacggcgcacgagctcggacgcggtggcaagcggcctaggacggcgtgccaagcttattttga

SEQ ID NO: 56341 - DNA, 1149 bp, Zea Mays
ttttctatggattatacaagttttacaagtatttctatacacaaaatcaatttctaaatctctttttcctattttctttaattcttggactggacgcactaatacagagaaggtcgaggtttattctgtaaaatcaaccagacacagacaacacatatgtggactgcgggttgttttgtataaaccgtggggtctcttttgcaaaatagtttcaacgaaggggtatggaaagagaccggtcgtttgattagattcggacagcccagattacatcgcgccaagggttagactggctcgggtctgtgccacacgatccgcaatgcacgacttggatttaaaacatcagaatcacttcgtggccacccatcatctgatcgacggctggggcataatctgcccaaacggcaagctagatctaatccgcaaggtccgtttccggatcaacggtcgtaggcctatcttccttctcgcactacagtagggcggtggcgtgcaggcccccacagctgagcacccgccggtgacagccatcttggcatgccaacgccccaatcccaaaacccgatctaattccgaagaggttgtttccgatccaccctaaccgttcgatccacgatcgatgaccactcgctttcttccccaatcggctgacccagggtggcgccaccaagccattacggtggcgtactcgctggagaggggcgacgccacacccgagcacacaaatttataacgcaagcagtgctacacatagttctggatgcggtgagcaaggtggaggagaccttaccagtgattacgccgcagggactcccacccaccacgcagggcggatcaacagcggtgttcacacatcgttgaagtattccagtcggcctggaggttattcctacccgagaagatcatgagcacaatcccaaaaacgtcacgaagctccccgaacaaccgccagagaccgagcggtggcacgcagttgactacgacccctagcggctgatctgtcccttccccgccatggcgcacaatagtggtcaatgaagacgggatgtaagagatcatggcccaggttttatagccaagcggcggagtccaatacagaagcccggagttcgcggagtacgaccggcgggggcggtcgagttgttgcgc

SEQ ID NO: 56342 - DNA, 304 bp, Zea Mays
gttgcactatgtgatgtttgccagagggtgaaagcggaacatcaaagacctactggtttactgcacccgcttaagataccagagtggaaatgggaagagattggcatggattttattatgggattaccccccacatctactgggtatgactctatatgggtgattgtggacaggctaactaaagtagcccactttattccagtgaagaccacgtatttaggagccaagctagcagaattgtacatggcacagattgtatgcttacatggtgtgccaaagaagattgtgtcagaccggggatcac

SEQ ID NO: 56343 - DNA, 625 bp, Zea Mays
caagaatcttgtcctcgagatttaggaaggactagggaaaagatggggaaaatctatgcgaagctcttcttctctctcccaagtagcttcatcttctctatggtgactccattgcacttgcacatctttatcaccttatttcttttagctcgagtcaaagtgtcaagaaacttgatgggatactccgtgtaagtcaaatcaccctgaacactgagctcttccattagtaactgttcctcagggacacatagacacttcttaagttgtgacacatgaaatacattatgcacattagatagattatcaggtagctcgagtttataggccatctctccaactcgccttgaggtcttatggactaatcagtctgagcgcgaggctacttgggagcttgaggagctgatgcggcagaagtatccggaactttttgctgtgggtgagtattattgattcattaatcttttcttttgtcgttccgatagaagcgtcagaattcgaggtcgaattctttttaaggggagtagactgtgatacccagtttgcaaagaggagaagttggaggtcatttttgctttgttttcttttgttgtttctctctcgggtggtgcgtttttggggtttggaa

SEQ ID NO: 56344 - DNA, 299 bp, Zea Mays
tgtgtgatgagttgtgcaagctgaacctagaagttgtgtcttcaggtgctctaaattatatctcggtggagcccacattgcaagagcaaatagttagggcacagattgaagacaagggtgttcaggtcattaaggaaatgatcaagcagaaagcagaaaaatacaaatgcttctggcaggacagcaaaggaatcctatggtttggagatcgattggttgttcccaaggatcctgagctcagaaagaagatattggatgaagctcacctttcaaaattccccatgcatcctggcagtaat

SEQ ID NO: 56345 - DNA, 328 bp, Zea Mays
gcagcagaatgcatcgcaaggcagtcagcccactacaccctcattggggatgcactgtacagaaggggcgcaacaggagtcctcatgaagtgcattccttcggctactgggaagcaactgttagatgagatccacgccggacagtgcgggatacacgcagcatccaggactctggttgggaagatctttaggtcttgtttctactggccgacagcaaagagtgatgcagccgagttagtccagaggtgtgaagcttgccaattcttatcaaagcagcagcatttgccaggacagcaactgcagaccatacccataacatggccatttg

SEQ ID NO: 56346 - DNA, 293 bp, Zea Mays
atcaaacaaacttttgatctacatcatgtggtttacctcatccatatctatcttaaccatatttcccaaccccgataatatacactaacctcgaatcaatgagaccaaggccggaagagaaaagatcaacatcgacaaggaagggtataacagacaaagcgaatctcgagatgaatcaggacttaaacattttggataaagccttttccttgccataatctttcttacctcgacctgttcagtttatatcccacataattagtagctggatacatatgctctctcaatcttcc

SEQ ID NO: 56347 - DNA, 716 bp, Zea Mays
atagttagccagatgttgcttcagtcattacatggccacaaaaaagatcaattggtcttgagaagattacctccaggtgtcatccatgttgccgctgcaaaagcctctaagagttccatgtcatgtacaatatataggcttgttgttctctgattttatgaaccctgttgaaatttatggatatcctttcttccatggagctggtagcacattaatgtttctatgttcatagccctatgctaaactaccaactattccaaaagcatagtagcttaataatatgctgatagacccatctgagtagaggaccattggagttggctggtaccttctctcaggggtgcgcgtcacctgttcgacagaatgtgtgggtcaatttgcaaatgtctgtcttagcattgggtacttggcagtccagaagttagcctatccaaaagagcacaaccggcatcatcctgtagcagaaatagtttcgtttgtttagtacgccttcatggttattccatagagtggatgcacgttcagtgctttaatttagttttcaaatttcttttgcaccttcaattcatagtgagacatcgagttatagttctagcaaactctctgtatggctgcacctaaacatttttatttgaaggttatttgatattcattttcagcttgcagtttagaaatggtctttggattccctggtagccaaggttattgaagggtaa

SEQ ID NO: 56348 - DNA, 353 bp, Zea Mays
tcttttttaatatgcgctcaagagttttgtgtaatggcacaattcaattccttcataacaacctacccaaattttcagctgtgtctcatttgatcatttctttcgaggatccaaatatcactagatgagctatgtactcctgtcccgaacttttttccctcacggccactgtaagtcatttggtatatttcatttcccaaaggcagaatatcaagtggtgtttagcgccaaagataagacctccatgatatggatggtcattgtgctagataggaacagtcttgacaggtttttgttagttgggtcactaatttgagaaaacaaatttgtattaaatgttccatttgattttg

SEQ ID NO: 56349 - DNA, 981 bp, Zea Mays
ttggaaccgagggatgaagtaaatacacaagaactacaagtagcaaacataatttagcttaggacttgcttggacccaccgaactaatagttaactgctaataattggcgttttgatctaaatatgtttagttgttttttgaatatctaaaaatagtaactatttcactagttagaccaaactatagctagccaatttaggtaaaaactattagcagctccagtggatccaaatcagggcctcactatatatgttagattatttacggtggaactatatgaaatcacgcctggcagttcgttgctcgcattcacggttatttgttttgtccagaattccagtgcatgcaggcgcagcggcgtatggcaaaagaagagcaaggccatacaatatagtacgatgaaccttgtgcttgtgtgccaacaattataagaacctagataaagacaccatataattacgatgaccgtccacgtacaacgcattcgagcccagcatattgcatatacgacctgctttactataaatgacgctacaaccaacttcaaagaaaaatcttcgatttgttgttcttaaaaattgcataaacgcacgcacacaaatagcttctgaaaagaaattgagtgagctgaggggcccgtcttccacaacctctcttctccatcaaccgcgagaatccgcatcttcctttaattgacaggagccatgaccttccattagctaattataagctagggtttgtgagagctagctactcaccttaaatacggcggcaccatcaccatcacatcacaacgaccagcacgcagcagcagccacacaaaactagcatgctagtcacagagacagtaagaggttagtgctagctactcccctagcttagctatagcttgctcttgccgcggcgtgcttgctagcttcattacttgtgcacttgggtgcagtgcctgcagtataatcaagtttagggttaaaagaacc

SEQ ID NO: 56350 - DNA, 873 bp, Zea Mays
attcatgatactgtcactgtgaatatattttttttcacaatttcttgccagatcccattttcatattcaagtttccaccaccatttgcacataaggcaaatattcatgactctcaaatctttaataccaagtccaccatttttcttgtttgcacaaactctatcccatttaacaaggtgatatttctttttatctccaccaccttgccacagaaattttttccttttaatatccagttttctaatggtggtgctaggaaggagatacatcgacatatgataaatgggggaattggataaacaagcattaatcaaagtgatcctcccagcaatggaaagggagcttcccttccagctatccagtctcttgtcaaatttttcttccaaccttatccaatctgcaattctcagacgggaaggactaacagggaccccaagatacatcatggggaaagagcccaattggcaatcaaagagattcacataatgcatcttaatatcctcatccccattgatcacaaaaatttaacttttcataaaattgatttttaaacctgccatcatttcatacatgtacaagagcattttcaaatttctagctttggacaaatcattttccatacatatgatagtgtcatcggcatattgtaacaacatcacaccattagggatcaaatgcctacccaatccattcaaaaccccattagcacaagctttgtccataattctagcgaggctatccgcaacaaaattaaagaggataggcgagagaggatctccctgacgcacgcctttgtagctcttaatatatttaccaatttgattatttattttcacactaacagtgcccccctcgacaaccatatgcatccac

SEQ ID NO: 56351 - DNA, 739 bp, Zea Mays
ccatagtgtagcacacaggctcgcaacatgtcttcgaggatttgattcactctttctgtctgaccatctgtctgcggatggtatgctgagcttcttattgcatgggtcccaagtgactcttggagctactcccaaaagcgtgccacaaacagtgctcccctgtaagtcacaatggtcttcggaattccatgcaaacgcactatttgatcaatatagatttctacatacttctctgccttgtgggtggtatgcactggcaagaaatgagctgtcttggtcaacctatccacgatgacccaaatagaatcatggtgtcgggaggtattgggcaatcccacgataaaatccatgcaaatatcctcccatttccaagatggtatgggaaggggctgtaaggtgcctgctaccttcaaatggctggccttgactctctggcaagtgtcgcattcagatacatacttagcaattcccctcttcattctggtccaccagtacaaagatccgaggtcatgatacatcttgttactaccggggtgcatggagaattttgaaaggtgatcttcatccaatattttctttctgagctcggggttcttgggaacaaccaatcggtctccaaaccatagaatccctttgctgtcctaacggaagcatttgtatttttccaccttctgttcgatcatttccaataacttgaacatccttgtcaccaatctgtgccatgactatttgctcatgt

SEQ ID NO: 56352 - DNA, 361 bp, Zea Mays
ttcctcaagctgtgctaaactttagcaccctactaaagtttagcacatgggatccaaaacatgccctttttctggaagaattaaccctcaataaaaaagcgacatcacagtccacaacgttgttctccactggagtccactcttctacaggttcaccccctccgacaacactcccaaccccaccggtggcacacacaaccctaggcggccctcatggccctacaccccggtggtgggggcaataagacggtcggtggcaatcgtcagaacaattgccatcatcgcaacaagaacgacacacatcaagacaactagccacctatcgtcactgaaacatgtggagctggaagatacgctgcta

SEQ ID NO: 56353 - DNA, 304 bp, Zea Mays
gttcgatatcgccatcccattccacgacttgatgacatgttagatgaattgagtggttctatcattttcaccaagatagatttgcgtagtggttatcatcaaatctgcatgaaacttggtgatgaatggaaaacagcgtttaaaactaaatttggtctctatgaatggcttgtgatgccatttggcttgacaaatgctccttcaacttttatggtcttaatgaatcatgttttacgagctttcattggcaagtttgtcattgtttattttgatgatattctgatctatagcaaatcatttgatg

SEQ ID NO: 56354 - DNA, 871 bp, Zea Mays
tgtggaggtgctacacaaagattcatcaccatgttcacttagataatcccttgtgttgtttgtctaaagtaatatctcattatctccatgttgttcataacctagatctattcttacaattggactggttcaaagtggttcaactgccctagtagcggttgaactagcctgcaccagccaaactgttaatttgactttatttcgaagtttgtggtgggaatttcaggtgtagcctatttagccccttctaggctactttcaattggtatcagagcttcgtgcctcatttatagcgcttaaccgcgtgaggaaatggtcatgtataatccaaggaataacgaatatcctcttatcgaggagctcctaaacacatctagtggtgaggaagtggatcccaaatgctcgacttcaccataaaacccctgtttgggacgacatttgagctgcgtttggccgccagaagccgcatgggcgacccaaacacccaacttcggaagcagcttctcgcggacgccattggacaatggtaggaaagaagtcgcgcccgtgccgcttcacgataaagtggcactcaaaccctttggttcccctaaggtttccccatcccgctcgctatcgcgacacgcctagctgtcgcttctccatggtcgatcaccgatgcctcacaggtacactcctttcgcctctgccaccactcccccttctattccttcctttcgttggagtttggacgcccctccctcatcttaccggtcgttcaccatggatggtaggtgcgttggtgggggactgtggcaccgacgagttcctccggttcttgctttgtgagagggcaacgacgaccgttcatcgggtgagttcttctgtcggc

SEQ ID NO: 56355 - DNA, 747 bp, Zea Mays
cagaatttgaagccgccttccgagaacatcatgtgcccctaggaatcgtccaactcaaagaagatgaatttcgggaattaactcaaggagggagatctattagtgaatacgtccacaaattcacagaattggctcgctatgtgccagacgatgtcaacaaagaagccaagaagatggcccgtttcttgaaagggctaagaccagaacttaagactatcctcgccagccaagatttcctcagcttctcgcacctctcaaacaaggccatacaagtggaaagggctagagaagaagaaaagggtcacctcaagaggaagtttcaagtcctccaagctcagcagcaggataagcaccaaagagttcgatcttttggttttcctcccaagggaccaagcttcaacaaaccagcagggtctgctccatcacgtttcagtcagcagggtcaaagttccctctaggccccctccattgcaagcaaccaacctctagccaatgcctgttggcattgcggagacctcagtcactacaagaataattgtcctcagttgaagacatccatgcctacctactccaactcggtgaatggccccaagagtgccccagcacctgcctctaaggcaccctcctctaacagccagctaagcaagacccagtatcatggcagggcacgagtgaaccacgtcgacgctcaagaggctcagcaagccccgggagtagtgctcggtgagttcctagttgaatttactc

SEQ ID NO: 56356 - DNA, 966 bp, Zea Mays
cgccatacatgcatgagagcacaattgtcaagccgaagcatttaaacctagataagcagctggtgtttcaataaagagaactaaccaagttacacactccagttggctgctgttgctgttagcatagtgacatgtgtgaaaggtagttgaagccacagccatatagcaccaggggaaaatggctactgatcaggcccaatgatatcctgctaatttttgtgggaaaacctattagttgacaacaaggttttgtttccgcttcaatcgggagacatcaacgaagataaatgaagttgcatgggcgttcaagcaggactgtgtgcctgcacatgcacaactagggttgtgaacggacggaatcagtcgggataaatactttctcgtttttatttctttaattcgaaaacggattcaggatcgaaattatctaaaacgggatcggatatgggatgtgtggatgacgaaacgaactaatccaaacagaaatgcatcggtaataacaatcggaattataaaacgaaaacaccgtcatcatacatagtctcatcaatggacaacaaatatatgacaataatatttaatatgggtaacataagtacatacctatagattgataattggtctataaaaacatgtaacaagctagtatcgatgtgtaattcattaaacagacacacacaattgcccaaacatactagtagttcacaaaagtcaaccacgtataacactataactcaaactgaaagctcaaagctcaatatggtcatcaataacattagaatcacggtcaatgtatttgttcacttcatcatcctgctcctggtcattcccctctatgtatttgtcatcctataactttgcatacataaatacgagatataattttacacatagaaatacggaacgcaccatgtgagtgagcatggaagtggacatactgactaacaacataaaacagatgtaccg

SEQ ID NO: 56357 - DNA, 371 bp, Zea Mays
atctaacctaaactagtctaatctagtcatatccaatctaatctagatcctatctaatctaatatgatccaatctaaagtgagttattaaataggttagttaatctggtgttacgggttagacaccgctcccacaaacatatcttaatctaaattaatgtcttagaccaactcgtccgtaaccaacgacctaacctacaccccaggttgcctagttcttctatcctaaaagcaaagtaaaactatgtttaacctacctaccccgtgcaaccacatttgttatcccaacaacttaacctagatagaggattgcataaactatctggtccaacctaacacgaagcaaccaaaccagatctttcaataatacac

SEQ ID NO: 56358 - DNA, 537 bp, Zea Mays
atcaaacttcgatccatcatcttctggatcgctgtctgattcccattcacctttctcattcaacaacattgttcttctacttggacattgagcagcaatgttcccacgaccatggcacttatggcacacaatttctctagtacgagtagaagaagtagcgactaaaacttcaatcgggtctgttgtactagcagcaggccgctgtttatttgcagggtatgaccctatagaacctaccatgttagatgtaccaatgatggagaagacctagctgcatttccttggggtcgtcctacaccaaaagaagcactggattgctctttgtgccatgggacaacattataatgacttgcataagactttccacgtggctcttgctgaatttttctctctgtacgcattggttgatcaactagatcttgcagggtacggtataggaacatctcgacaaatccagaaatctcttcattaagcccactaagaaatcttactatggttgactcgggatcttctctcattctagtccgtactaacaac

SEQ ID NO: 56359 - DNA, 630 bp, Zea Mays
ctccaacgagcaatgaggacagacccctagtggcagggagagcagaggttgtgccgccctcatggccttgatctccccaacgtgtgactcccgctcctcgaaagaacaaacgttgctaacggcgtcgggaagtgagtaccaaagaagtctccaaggtagttcttttgctagagatcccccgtagttcttggcaagagcgagtccccactccgattgtaacccttaacaatcgtcaataaagtgcaatttcgagacctttacctgagtcaggcgtatgaaataagcgacaagccctggcccaaggacagactgactctcctctttttctccagtagctaactttataagcaacaagatgaacacaaggatcatgggtcagccaacgaaggaattagcagaacaataggtagaaatcttcatcgataaaccaactaagttattccatccttccaaactaatcgtttcaatatttcttatttgcgttaaagggtgctcagtgatatatgtcattgtgtcgtgtctccctcccacgggaccctggacagaaaggggggctatgacaatgtaacctgaggctccacaatcgaaccccggggaagagggatgcacatgacgaccctgccctcatcc

SEQ ID NO: 56360 - DNA, 556 bp, Zea Mays
agctcacgggcgctacgattttatagctgaggggagggaagaacaaggggccccgggagggagatggggagtcaggggctgtcggcggctccattgatggcagggaaggggaaactgtcggtagtgggggagaggagaagcggagcgttgctggtgctccaatcaacagggaaacgagcgggcgggtctcagtggcacgagctggcgaacaacggcgtgggagctcgagcggcacgcacgagccagtcggaacagaggagctgcacaaaggttgaagaagagctaacatcaaggccccacaggtaagagagactgaaggaggagagagtggagtggggtggctgggattttcgcggcgatggctccacacgcaaggagagttggcagtgcgtacatgtaacatggctatagcttgaaaaagctcttacaactagaccccacgtgtaagtgagtgaggaagaaaaaagacgggtggtgtacggttgggctattttggctggcgcacaggagattgtttttttatttttatttccaatttttttcatagaatacgtag

SEQ ID NO: 56361 - DNA, 1094 bp, Zea Mays
gaggcactaaagcatttagggcatatgacccaatcaccaagtgtgtaaccataactcaagatgtggtgttcgatgaataagcttgctgggataggtctgatggcaacaagggtggtgaaggagatgtcactaattctagtgatcttgttgttgattaccaggtagctccaaatgtggctagggcaggcattgttggtgaaacaattatggaactaagatttatctaggtgatactttgcttaggaccgaggagctggacgaggagagtctggatgtcgaccattgatgatgatcctttgtggacactttctgtagatgacatcattggaccaacaatagctcctggttatgctgcacacaacatccataacatctgttcatggtggattctgaggagcccacatctatgggtgaggctacacatgaagaagtgtggtgcaaggcaatgatggaggagttacagaccatcaaagaaaacaagacttggacactcactgagctacctgctaggcgtcgagctattgggctcaagtgggtgtatatggtgaagcaaaatgagcatggtcctataatgagacacaaggtgcgcctcgtgggtgatgggttttgctcaacaacatggtgttgattatgaagaagtctttgcaccggtagatcgaatggagacagtgcagctgttactggctatagcgatgtacaccatatggatctgaaaataatatttttgaatggtgaccttctggaggaggtgcatgtacagaagcccctcagttttgtttgacctagtcataaacacaaggtactgacccttcataaatcactctatggtttacatcaggcacctcatccatggtatcacaaactagatccgagactggttgaattggggtttattaggtgtgagtctgatcacacaatctatagaaggggtgtggtgggtgagagactgattgtgggggtgtatgtagatgacttgataattataggcaaaaatagtagtaatatcagagaatttaaattgcaaatgtatgatattttcaagatgagtgatctagttttgctttcttactacttagcaattgaagtaaaacaaa

SEQ ID NO: 56362 - DNA, 469 bp, Zea Mays
ctaatgtacctacacgaacacctccaccctcatacccacatgtgccatatcagtatgcatatgttccaacactttatttatcccaatcaaatgtggggcatgccaccgtacccgtatgggatgccacagtactccgcttgggggggcaccccaaacttctgtatttgataggttggcaccaccagtgcaagaccgattgggttcacctcaatctggtcaccagacacaggtccaacgagattgtcggactactcgaccatgaaggacgaccaattcaacaggggaacatggagagaaaatatctacgagcgccaagaggatgacaggtggagatatcatcaagatagatacaacatatgtcgtcatacaagggaacaataaagggccggtgatttttgataaatctgccaagacaaatgaggagaaagacataggagcaaccaacaaagcagttaaccgaaaatactcc

SEQ ID NO: 56363 - DNA, 772 bp, Zea Mays
cgaacagatcttctattctaggcaaggggtacttgttcttgatcgtgacctcattcagagctcgataatcgatacacatccttctggtgccatctttcttctccacaaataggacaggggcggcccaaggcgaggtgcttggctagatgtatcctttctctgatagctaatcaatctgcttcttgagctcaaccaactctggtccagatactttgtaagctctcttaaagatggggggcggtgccaggaagaagctctatggcaaactcaactttccactctggtggcatacctggtaagtcctttaggaacacatctgggaactcgaacacaaccttgataatctccagtggatctgcttcactgctatcaacagtcatctgataacaacttcctttctttggctcaggcaggactaactcggtcaccgcttcctctcctagtggggacatcaacttgattgtcctcttgtcacaactgataactacctgatacttatctagccaattcatccttaggatgacatctattccctgagtacccattactatgagattagcgggaaacactatcccccttacttccacacttacattcaaacagatgctatcggctcgaattctaccaccgactgagtcaatttgaatgggggttgacatggtagttattggaagattatgtgcttctacccatgatgcagcaatgaatgaatgtgttgctctagtatcaaataacacttctgtaatatgggagtcgactgaaaacataccta

SEQ ID NO: 56364 - DNA, 654 bp, Zea Mays
gggacatgcacaatgagatactattgttccccaacctaatgttttgtcgttcattgccatccatatgcccctgagtgttaaggtccacctgtcaggactcaacatttgacgcccaccgtttgtgcgaagactaaacccacgatgcctcccaagaaaaacacctgggccaactcctcacacaaggattaggcagcgaatgctgccctcaccgctagcgcaaaaaaggcaaggttgttttctctgacgacatcccacaaccatccacaaacaatatcccccaagccgccaccgagctagaagacaaaaaccaccaacccccaagcaaaaatggttgtaatcccctgtgccaagtgtccacacttccagctctgaaatcccaaatgactcaccaccccaacccacatagccacccctacaaatacaaaatatggccagacttgaccagaaacatgtcattagtacccctaggcttcgcaccaacaacaaaccatcaggtccacaagctagggatgcccacctcagattatgacaaagacctacaagcataggtgtacattcgggctgcctggcccgacccaagcccgaaaaggcctggcccgtttgaatttcgggccgacccagcccagcccacgaacctagccctcagctcacggc

SEQ ID NO: 56365 - DNA, 343 bp, Zea Mays
gccatgagtcagaggaaagatagagaggaacccactcaggtgaattttcccccgaatgacccctcgcaccatgctaggggttagacgagccatcaaggagccattcgagtggattccgcgtctgaccgaaggactactctcttcatcaataccacacacatcgcattaactacatctagcaccgaaccactacgtgggagagagccactccgcttcccacgcatgacctataggccctaggtctgatccctctagtgccctacaaagcacgcaagacgacaaagggaatccaagaagtcaggctacaaagaccaagggttggtgcaggtagagacaatcaaaa

SEQ ID NO: 56366 - DNA, 493 bp, Zea Mays
atgggccgacccaggaaggagatgggctcacgtccagattattcgtggcttgggcgtgatcctgttcgcttttcccgcgcccgacatccttgaacaccggggatagctcagaacgattgcgtcgggttctcctcaagataagtgcagtctgttcactattaactaggagataagctggaagagtgtgatcaacatgtacgagggaagtaccctacgatcgtgtatataaggccaagggggatccccatcattttcatctcattagcacctcaccattcaaaagacaccacttgtaaacacctccctcacacaatgtcactccaggaagtagggtattacgctcctcaagcgacccgaacctgctgaaaatcgtctgattctctctttctcgtgcccccgacacgaaccatcaagttacaatctatgacaacgtcctaccccaaagcaccacaagggtacccacgggtgtgcggtcggacactaaacaccgaca

SEQ ID NO: 56367 - DNA, 1108 bp, Zea Mays
gtgaatattagatatttgatgaagttaacaaccccttggaaggaacagacatatcaaataatgatatataggaggacccccaagagcccaatgaggactatgactctaacaagatggtggagatagaagcctcgtaagccctaacacaagaaggacctgcaccagaagaccctaagcctaaggtgccccacctaaaggaccatgcaccagaattacctcttaacctaggatggagaaggaccgtccacaacaatgatggcatgactttatagttcccacatatgttttgtaacatactcgtcgacttagtactaatgaacctccaagttaactacattggaatacaatactaacacattaagggtagtaccagcccaagtagatggtgacgacagagatcaccagtgggacgagtatggcataaggaatacaatgtccacacattatgctctatccatttgaaacaactctgaagcaagaataaatgatgctaccaggatagccatgttttcattcaatgatctgaatcaagggtatatggccagtagcatcaattggtactatccgcaatgcccatccgagagaagcatcatgataatcgcgtgaagggtacgatagtagaagacaacatctagatggacacactagatatctgaagcatcatgataattgcaacccatccaggagaagtagttaagaagatatctaaagagtttcaatgtgtttcatccattgagttggcaggaatttaccaaattgctcttagaattgaggttttctccacaactaacaaaagataaaacttcatgctcatgtgggatctgatcaatccatcttgtagatgtgatctcaagtattcatagcatgtagagaaggaaaaaatgatcaaaatgcccacgctgattggagcaccaaaacacaaaaaactggacataagaagaaaaggagcaaacaactcagaagattgaaccaccaagaacctaggaggtatgggcctccattcccacaaacttcaatggttatagagtcagattacatagatgaatgatttttgtagtgtctaaatcatttgtcactatggaacaaagggtcatcagtaccagttgag

SEQ ID NO: 56368 - DNA, 490 bp, Zea Mays
ttgagatcgataggaggaatgaccgcagcagcagaattctggttcttccgcttgggcgccatcgcaatctcgtcggtggactgagcggaagcaaaatcaaagggaaacagaggatgttcggaggcaaaaaaagtgaggctagggctcagaacatagaggcgtgcagcgacgtgatataaatggggttttctcgggtcagacaccgtttctaaaaagtgcttagtcaccactcggttgttatttctaaaacgccgatgtggctcgatgtcactcggctgttacctctaaaacgccgaagtcgccaagcaccactcgactgttatttctaaaacaccaatgtggctcagcatgactcgggtgttacttctaaaacagcgacatcgctaagcaccactcggctgttatttctaaaacgccgatgtggctcagcatgactcggctgttacctctaaaatgctgacgtcgccaagcaccactcggttgttgcctc

SEQ ID NO: 56369 - DNA, 640 bp, Zea Mays
atttcccgtggattcttccattagaggatgatgatagaaaagtgtcttctcccacaaggatgtaaatgaaagattctcttctaatgggtaaacatggacgaggatacgcaagcattcccataccgttcccgtggggactcgttaaatttacatgtgacgatgttttcatgtaatagtttttataaccgccacaaatcagatccggctgattatgggcaactgagcaattaccagttgaaccggccctaatctcggttgaaccaatattcaacagagatctctttgtaaattcccggttgaacctgaatttaaaattccggttgaacctaaattttccagagaagaatctgaagaattccggttgaaccggtatacacacgaaaaaaaatcaaattttgaagggaaggagggagaaattaaatggtgacttcgcaactcttcaaaacaagaattttgaagcggatagaattagttggtgcataccatccttatctcgcgaaagaaataaggatatggtgatccctattactaagagaagataataagagaatataatcaaagtacttgggtatcttcgccataaaccacatgcagatctttacttttcatcacttggtttcctgttagttcatttatttca

SEQ ID NO: 56370 - DNA, 374 bp, Zea Mays
gcaggctgtacatcccgccagcctcgccgctgctatcagagatactacgagcggtccatgaggacggccatgagggcgttcagcgcacctgcagcgtctccgacgtgattttcatttccctaacatgaaggagttggtgcaggactaggtgtggtcatgtgcagtatgccagcgatacaaatctgagcacctccacccggcaggcctcttgatgccactaccggtgccgcagggtgtgtggacggacgccgcgcttgactttgtggaggccttaccgggcgtccgcgggaagtcggtgatcctcacagtggtggatcgcctgagcaagtattgccacttcatcccgttggcacatccctactcggcagagtccg

SEQ ID NO: 56371 - DNA, 510 bp, Zea Mays
gtctattatgttctagtctttatggtggtcgtatttttggttagctgaattaattttgtcttgaatgtttattttttctcttgcatcatgattatacactgtggattacttttcttttgcatcatgtataaacattgtggtttcctcgttatgcaactttcaagggaggtgctgtcgaatttttcctttctatcttcatcttttattatacataaccatttggggaaagtgttttgatgacatccattgtgtttgggtcaatggggtgttacagttggtatcagagggataggctgtaggtcctagcgaagaaataatgataaattgacacactgcacatataggatgggttgcttgctttactattgttatattatgaattgtcagtgctagtttgatattattggaagtggtgttatgccaattttatttatttatttacttactcctgtggctgcagttatgccacctcgaagggctcgtggcagcccgcaagatcctagtggggat

SEQ ID NO: 56372 - DNA, 398 bp, Zea Mays
catctagcgaatcataagatgcctaaagacatttaccaatcaaagaaatttcttttgggtctcagtatggattttgagaagattgatgtgtggttgtgtgccaacataattgcatgcttttctagaacaagtataataatgagaagaagtgtttgaaatatggatagtacatgttcatagaggttgtagacaaacatataaaaatgtaacaacataaattgcacataagcaactttatcacatgcctcatacacctcgagtgaaacatttatttatcacaaagaaaatagctaggcacgtgagatggaacagagaagggtgtatgtgagaacaaccaagtgatcattctcccttcttatggtgaagcttggaaggctcatataatgtttatgttgact

SEQ ID NO: 56373 - DNA, 739 bp, Zea Mays
tctcttattaaaaagaaatgttctcacattaatacttataaatttcaataaaggttaatttttataagaatctttttattgaatttttgctatagaacttttatttaaggagatgtgacttcaatgttatgggaattcaaaaaaaatattctaatgtaagattttgctgaatttttttactatattctcaaaatgagatttagggtgttacagtatgcgtatgggctaatatctaaacccacgagtttcttaatgggtgataacctgaacccaatgtgtatacgggtgtaggcatgggattttagtacccgtacccgcaaatccatgggttttttaaaccctgcacatataatgaataatatcaaatattcatattcatattcatattgtagcccagtaagcaagattacagctcaagcccagtaacacttgctgaaacctaaaaccctagactcatcctcacttctttccccaatcttggttccctctcccttgtagatgtcactccatcagcctcaccacaccagctagcaatcagtacaggcgcagagcacgagcacgactacacgcctgcacagtatcagggccacctcgcgtctcctcaccctcacggttgatgcgacaccatgtgctgcttactgtaaacatcggcacccacacaacactcactgcctcacttgctaagtaagtgggcggctcgtcgctgcatagtcggcccaacactcactggctcacacac

SEQ ID NO: 56374 - DNA, 568 bp, Zea Mays
gctcggattacagccagtccagaccaagcataggcagcagcaggagggatttctagccttcaaatctgtaaagcttctcctcgactcgatctccaccccagcagtttccgggggtttttgtttttttggtcactgtgtgtgttttgttattcgatctcttcacagtgtcactactctaccacatactgttccatatgtgtttttttgtcgatgtgtaaattgagataatatatatcattggcttcttctcttagacaactagaaacactaaatactaccagatcgttttcctttatgttatacctcaactagtttatgttacatctcttgatcttgctcttaactcttaaccactaaaacatctaaatctgatgagatttacttttcactaaagcgatcatccgtgcctgcttgcattggggaagaggcacgacgatcaaccatactgcagaggcgacattcctttgactgagcccgagatcaaccctaacattcttctccccctggagcaaaaggcctcatctttcaaatcttcaatcccaataaaaatagtacagatagatgaagc

SEQ ID NO: 56375 - DNA, 813 bp, Zea Mays
aacgaggaagaactagacgacaagggcacgacagaatgcttcgcaaggcagtcggcccactataccatcatagggggtctgctatatagaagaggtgcaggaggagttctcatgaaatgtattcattcggcttgtaagtgcaatcaaccctgactgagggttttggtgattaaatgataaaacatacagagtttctaacaagtttgctcctagtatgtatacagttatcctaaagataggaggagcacagattccatatgtacacaaaagggaaagcacatcagattaaaattctacatcatatggcgtgcttcaagtgcttgtgaacaacaacagtttaaattttacaacttttgagtcataggaatcaccgttcaattaagagggatctgcaaaaattaagtaagttattgcgatgtccatcgctttgtcccacagtgccttcataataccacagtcatcctctaagaccttgatatcgcgacgagcaatttcaaactcctgcgaaacaagcttcttcaaggcacacaactctctgatgacagaatctcttgaagatagtaacctattaagtcatgacacttcgttctgagaaaccttcaactcgtctctatggcgatcaagctccaacatagtaaagcgatgactcctcttcaaagtagtaaagcgataactcctctccataagttggggatcattacaaaaggaagaccgactcattatgagtcggccaactgcacccttgatccaacactacattacattactaactaaaaccacattacactactaactaactacattatactacta

SEQ ID NO: 56376 - DNA, 311 bp, Zea Mays
gtatgagactatgatgcactttctttcatatgacagaggtgggacaaggcgtcagccatgagaaggtttcaaaagtgattaacattaaagaattgacgaatgacggtgtttgttgtaaattgtaattgttagtgctaaaaatcatttagaacgttcgagtttgatgctctcacgccgttgacttgtctttctgtggcggacactccataaaagagctgcaacatttggatttcttctcagacccaaactttcatctagactgtatccagacttctcttgctgaaacagttcatatatactagttaattgcc

SEQ ID NO: 56377 - DNA, 603 bp, Zea Mays
ttaggctcaagcccaataggatttctctcttatacctcccactcatactctctcacctcctcaccccgtgagacgccatccaccaggtagctgtgtgccggctactggtcgcctctgaagccattcctactgtcctgccatgctagagctgcatttcttctcatcctcccttctagttctagctgttgtgcgcccatggctcctccctccagatgttgcttcttttccttgctgtagccatcggtgcacaggacacagggaatctcgtgggggcgcaagttgcagggatccatggaagcttgtggacagataggccaaagaggaagctcgctgattctcttctccacctgagctatgtcaatccaagttcaagggagcacgaagatgagctcctcctccagatgtgactcattgctgggtcacactcacacctctttcctctgcaccctgctgcaatattgctttgatgcttgatttatattatataagtatatagtatgtggtatgtatccctaaatatatgtcctggtatgtacaaaatgattatatagactagaccgaccaaggttgattagttggcctggtcattgactgatcgcgatt

SEQ ID NO: 56378 - DNA, 492 bp, Zea Mays
aggccatatcgccatgcgaggagcacgacaagctaggccgatggaacgttgggcagaagcggcgcagcggagaacgaccatgcatatatcgcgcctaatagtgccccgatatgattagatagatagcctgcataaatgcctgccggtgccggccgcctaccgctacgcacgtcttcttgcacacgatcgacacgtctgcagcttttcgtttcggcgcaggatctatcatcgtccgagcttccagtgccgcaggcgccctaccttttctactagcgtacgtaataaaccgcgttcgttaattaactaacaaaggaacagcacggaggaggagtacagcgcagattaaaggccatatactacgactatagtacgagttatggcatatgaaaggagcttgcattgcattggctgtgcctagttcagtaggataaggggtgcgcgcggccaaatcgatctcccatgccatgccatgcatagcgaaagacccacgac

SEQ ID NO: 56379 - DNA, 788 bp, Zea Mays
atttaggaaaaggtttgaccctatttcccttcattggcgtgtgcaggcgtacacccagtacggcgtatctgttgatcactatcccgtattcgggtcactatagaagctccggtgctgagatactttatgaatagggtcatccggcttcttgaggttgtgggtgtgcgtctagggccgtactttgggaggtgcggtcatgttaatagtggccacttggcatgctctcggcctatcgtttaggtgattgaccacaacttacggtgtcatgtttgtcttagtcggcatggacttcacgacgtttgacttgcgtttccaccttgcttctctttcttggttgggaccttggtggtcgtcccgcctcgcggacttgctcggctaggtcctagtcgcccactcgcctcacagacttgctcgataggaacctggttgttcgctccgtctcgcggactttcttgtacgggacgtgggtggttgccctgcctcacgctcttgctcagtagtgaccttgtcggtcgctccgcctcgcgaactcgctcggtatggacctgggtggtcattctgccttgctatcttgctcgacagagacctggtcagccgctctgcctcgcgaaacttgctcagcagggtgacctcgctcggtcaagaaggttttatagggcttattttgggtaccctattcctaggtacctaacgacaacctccaaacccccgagcaattcttatgaactgttttagggttcgttgacagtttagggacagaccttgtctccgaaggtcatcatgaacag

SEQ ID NO: 56380 - DNA, 332 bp, Zea Mays
atggagacttgtgaggttacattcgatgagactgcaccttatccatcccctatctttgagcctgcagatctagattagatgggacagaccatctttgtggacgaggagcacaatgacaccgattggggtgatcccaagccgactccatcggctgccccagttgagcctgcttccactactttggctgatggaccagacatcatttcttctacgacttggggtctagttgaccctgagcctactgagtctggaggtggttaggctgctgtcgagggggaggccacttcctcgagggaggctccacaacatattcagcgttgtcaccctcctca

SEQ ID NO: 56381 - DNA, 358 bp, Zea Mays
ctgggtcgcttcgtcagacgcggcgggaatgtttagtttttaagactcagatatttttgagccacaaccgcgagcaggagcagctgacaccaaaagcgttgctgtcttgacacgatcatctgaaaaagcgcgaaagatacatctgagttggagtccagagtgtgacgggccggcccttagagcaccataaggttgaggttgttcattggatcaggagcaggggtatctgcctcctgcgagacggtgttacacggacggccataaaagtctgccaaggggcacaacaagacgatgagctacgctccaacgctgaatccgtcgcaaagatctcagtgtgcaaattgcacagcgcttcccg

SEQ ID NO: 56382 - DNA, 412 bp, Zea Mays
aatctttccgctagcaaccttcttctgccaatggaggcaataattcttgacaaagacttcaaccgagggctctccaccatacatagttgcttcccacataaactttgccagttccaccatggcgttcggtgtgacatggtgaatttgaacttcaaaacgctgtagcacttcgacaacaaaccgatgcacaggaaagtgaagggcagcagtgaagaatgcctcaaaaacaaccagctcccccttcgactctaggagctctttggctcccagagtgcgccccacaccatccccaaaataccccaagcgttgcatcttatacacgcagctcgagtaagtccttgacatcccaaactccaccatgtgccctggcaatagctccactaccaccgttgaatcactaattgtcttctcc

SEQ ID NO: 56383 - DNA, 354 bp, Zea Mays
cgagattacaattatgacatcgaaccatatacatgtaaactacaaagtcggataagagcaacaccgtcttttctccaacagatttgtgttgcgtgtgctttcagagtcttccttcgtctatctagttgaatacttcgtgtctcgtccatatcacgacactgaagctctcagcttcgccttatattcgtggatgtcaccagaacgaaggtcaccttatcgttcctaaaacaaactcagagatgatcaatgttttaatgctttgaggaccttcggcaaagacagacccctaacagtcgccaatatcatcataactagagagagtttccgtattccgtggatttaaggctatctcca

SEQ ID NO: 56384 - DNA, 312 bp, Zea Mays
aacagaaaagaggaatgagcacctttttaatcatttttgatcaatcaaaggaattttactttttcatattgaatttattatcatgacttagaagcgcatcaatatgaaaatggatatagcaaaaggcatgaattagattctaatggacaagcgcatttatgaaaatgatattgaatgcatacttagttaattttggtccaataaagaatctattcctcacaagggtagaatatgataatttagattaaatacccattgagatgggaaccaaacttaagaagatgagttcccatacctttgcttttacctttc

SEQ ID NO: 56385 - DNA, 287 bp, Zea Mays
tgcgagtacaataaatctggtaagaatccacgaatctacggctgtctttgattcgtgaacaaagcgtgctccaattttttgtagttactggaattgattattgagtcttagggttactgttgcagccgtccaaccacttcgatctggtcgtcacactatttcttattgctatttcaatgatggcacacaaaatagcataggcgtgaccaaacaaaaggccagattaagattaccctaccaatctgtaggtaaaatcatgattacattactcacgtttaggaagggag

SEQ ID NO: 56386 - DNA, 667 bp, Zea Mays
cgacatttggacggagcgagcaagcgtggcccggcgacctgctgatggcggcaggagcaagtatgggaacgaaggcacggacaacaggagcaaatggcacgcctacatccaaacggagcgtgcgagcacgacccgacaacctgctaagaaaattgtagcgtaggggacggagggatggacggtgaaagcaggtggcacgctgacgactggacggatcgagtgaggaaggggaaatggcagcacatggcacgaatgagagagggagataaagagagaaagaatgagtgctaccttttagaaggaataagttggaataaaaaacgctcgatccgcagctgggagcaatggccagaggcttccggaggcttcggggattgtataactggtgcaatagctagacggtaggatctcgtcatggagaaacaatctgacggcttccaaattttggacgacgtgtccaccttggtttgggaggaacgagtcctggtttaatatataaaaataaaacattattttttaaaaaaaaatatacataacgcgcaaacattaaaaatggttcacaatcagatgttgcagcaaacgggcatcgattttggggaacagctagagttgtttccgctgtagcaacaacggcaaaccatctgcacagggggatgctgaactaaac

SEQ ID NO: 56387 - DNA, 546 bp, Zea Mays
gttttttatacttacctccttgataccccttaagagaactgtgctaaagacgttcctttatcgagggacaaggcttgcttataatggatcggttgcaagtgttaagggaagttgaaggaattgacatcgatggaccaaagcaacggtaaagagcaagcaaagttgcaagaaaagaaccaatgaggctacatgatgacttgaagcagatcatatcattcatgggagatttagttcacaggagctcattacatatgagacacatgacatggtgtcatgtagctaggtagagaagctctagagataatacttggctatgatggactagttgcaaaagtaaagggcaagtcggaggacttgacactgatgatttgaagcgacattgaagagcaagcgaagttacgatcgataaaccaacaaaggctacattatgacatgaagtgaattgtatcattcatggagtttggatgcttgtgtaccattatcattggaggagatgaaatggaatgcaaaaggaaaatgtatgacttgtaggattttttattttat

SEQ ID NO: 56388 - DNA, 369 bp, Zea Mays
cccagagaccaaactagcaagagttacaaggccccattaaggatgcctaaaacacagaaaagaaacggatccataaacaagttaagtgtctaccaccactaaccgactagcagcacttaggacttaaatacgactgaaagtaagataaggccttttagcctcggccatctcccacatcttgcactctttccttgctagtctaagaaccacaaccaagatgggagccaatttgtcgaagacatatctattcctgtgatttcgaatcatccaggctcccaatgttactagagaattaagaccttgctatagtaacccacatgcagctccactaacttgttcccaccaagccataaaggaggtatgacccgg

SEQ ID NO: 56389 - DNA, 464 bp, Zea Mays
atttatttgatcgacgacagactagacgtccggtagatggctcttggctggtcttcatttcgcttcgtgcttcaatgcttctgttgattagacttgtacttcaatagctatttttggctttcctccgatctctatcgatatcttccttctgtcttgatacattcattgtgtatactgtatggatgtgactgcttgggaaaatctattgaaaattcctggacgtcccccctaatgggtgtagccaagggacggcttggtgcgctgagcgtttagcaaactgcccttgagtagtaacttgacgtgaccgtggggtgtaaccatatcgtccaagcagttgacctcagtcccatggtgtcgtgttacgtgagacggcgtctgccgcctgacttgtttccagacgatttgaatggcttattgaatacttgcgactgttcagtgaccgtggtaggagatgagtggttgcc

SEQ ID NO: 56390 - DNA, 629 bp, Zea Mays
caccaatgacgaatggaagactgctttactctacatgtataacaacatggaagagatgaatatgtttcttctgtaagtgcaaacttaatttttagtcattgtcgctatccttgtttttcttatcctaataggtttgtttccttgtactaacagtgaatttgattctcaaattggatgactggccatgaacgtgatttgattcgtcgagagggaaaagatggggacctaatttcttgtgttggttttgagatgtagatataaatgacaatatacacccggaccttcgacaattatccctaggagcagtaactgtcagacgttttggtcggtatgatgttaatggttttcattttcgttctacacggttcgaagatgcttatcctctagcagccacaacaaattctggagttgtaactagagctatcgatgatgaagaaaatatgactaattattatgaagtcattaatgatatactcgagtataagtttttcggagataaacaactcaaagtggtgttctttgattgtgattggtttactcgaaatacaacgcgagaaaaccaatatggtatggtggaagtcaaacacaatgatcgattacaaggccacgacactataatccttgcccac

SEQ ID NO: 56391 - DNA, 682 bp, Zea Mays
tttgtctcaaccaacttaactaaagtaacttcggcattacaaccggctcttcagtgctctgcgcaattggagcagtcactcttgtttcagcagctgaagaggtctccccgctaaactcaggcaccacggccggttcaatgtaacgtggtcggtgggtaagaaccttcatcttttttcccgcagccttcggcacaggttcagctagggcggccaaagcagcagcttttctcttcttcctctatccccgcagtgggtagcggtaatcggggtagacgaagcctatggcgtcaaaaactctgttcattctcttttttccccgaccttcgaaggctgtagatagtgcattatcttctgcattggaataagctccaagcagttcatcacttgtagcttcgatacatttcagccagtcgtcgtttggttcatcgaacttatccccaaacctaaatgtatacttcagccggaccaaatcaccttcgctagacttggtgatggtctccttcggcatttcctagctttctacaagcgaccatactctgaatgttatatgctcttgaattaaatttcttgtaccaatgaaggagcagactgtactgaaggccttctgacacgcttcggcggcatcatcaatttcgaccttcggctttcggaggccgaagcgggaccagatggggcgcataat

SEQ ID NO: 56392 - DNA, 547 bp, Zea Mays
gagaaaaaagaaagacggccagggaaaggaacctcaacaggctcctaatcccccagactagacaccgtggccatgagctcttggatcttttttgctccagcgctgcaccagagactactttcatccctaacagccctgagaacttcctgaacattgggcctatgttgctcaaacaagcaagcattacgatgcttccacagttcccaagcgaccaaaatgataaaagaatttagacccttccgcatttccttaggagcagttgagattactgtccaccaccattttgaaaaacggaagcatctggcgccaaggcagtaaggcccaactgaagaaagatgcttgctcatacttgtctagcaaaaacacagctggccaagagatggtgaatgtcttcatcatcttgatcacagagcgggcacacatcagggtggggcaagcctctcttagcaaggcgatcaaccgtccaacaccggttatggaacaccagccaaatgaaaaacttacagcgaggaggtgcccagctcttccatattcttctccaaggtcc

SEQ ID NO: 56393 - DNA, 334 bp, Zea Mays
aatttgcatctgcacatagttttcaattgccacattgaggaattcagcatcctttgggttgtcttttgtatggcccagcagatgttcatcatcaaggacgattgtgaatgtattaaaatcccaatgagcaccgcttaggtccttgagcctacaaaccctgatccattttgacgccacttcctcaaatgattgtagacctgggttcctgtgacttcttggccactgaattcagtcagtgccttggcacagagttgacatggacctccttgaaccctttatccgtttttactccttgcccaaccaagtctgcaaacttcctcaagataaagcctga

SEQ ID NO: 56394 - DNA, 991 bp, Zea Mays
caaaaacagaggaacacaggggcctaagtcacaatttccttaagactcaggcaatccagaggtggactgcgggtttattctcatattttacagggtttcatgtgtaaaacgtctacggcgaaggggtatggtggatccctggccgcaggatcggatagcgatggtccagattaaattgcacatctccgcaaatcggtacggctcgggatccttggattataaatgaacgacctagattttatgaggcttgatctgctccaaaccgtccgatctgagatccatgcacccgcttggatcccacgaagcggtacccatttctaatctacgtcgtcgaattccaaaacagcggtcatcgtgccaccccccacctccatccagggacggcgacggcgtcccaagcagagtggcggcgccatggccggcaatagccgccaagcacccaaagccgcaatactctaatctaattagtgctacacgtccaagaggttaaggcgaagactactggacatgacttactggtggttgtgacggaggcaagctcgaccacggcgtggcacggatcactggcacacgcaaagcaccatcgacgaacacagcgagcccagtggtgttcttcgtccgaggagtccacgcgcgtaaaacccgcggccacggaaaccctccccgattgctccaaggtcaccaaaggcgtcgaaggtagggagcgatgacgacggcagctccttttccccccgctgggcgagcagtgcacggtgggcggactgggttctagggggcgcaacatcgaccaggggttcgatcacgattgtccatggtggtcagttctccatcctctctgttcggccgtgcaggcaataatgctagcatcgaccggattcccccaatttcttcgcgcggcgccccccgatttctctcaccaatgctttgctccgagaagggggaatgctgatttgtccagccagggacgtatcttataggaccgaggagcgcc

SEQ ID NO: 56395 - DNA, 1593 bp, Zea Mays
cagcaagctgcccctatggcttgcccgggtatggaggcataccccccaccacgacgccaactgatgatgtgccaccacccagctcccaatccatcttctaccattgccacattccccttcgcccatcccacattatccaccacctacactgccatctctcaacgccatttcccatactcctactgcaggagttcctcgcttccatcgcctcgaatttgccctatttgacggcaaggaagaccccctccagtggctcaatcgatgtgaacaattctttgaaggtcagcgcacgctggaggatgggaaagtctggcttgcatcctatcacatgacaggaattgcccggacgtggtacacccagctgcagcgcgacgaaccttccatgtcatgggaactcttcaagcagcattgccaactccgctctgggcccccattacgcagcaatcctctcggcgaactggcacgccttccattccgcacaacagtggatgactaccaggagaggttttgggacctgctagcccaaacagctccactgtcacaggagcaaaaggtacatctgtttacggctggacttccggagcgtatcaagatcgacgtggaactcatggcaccacgtgatatcaatcacgccttgagtttggcgcgcgcatatgaacggaggtcacaagtgctcgatcaccaaccgacatcaaccaccaagaccatgcgtcaaacccagcgcccgtctatactagtaccaacacctcaactagcgattcctgcagctcccagtataggacagcagcgaacattcaagaagttgatgcctgccgagatggctgagcggcgtcgccagggactttgttataattgtgatgaacagtatgtccgtggacatcgctgccctaaattgttctatcttgaggtcacggactatgaggaagatgaatctatagaggctgattcagttccaggggacccaacaccagtgatctccttacatgccctcacgggtatccattctgagagtaccttgcagctggaagtacatatcatggggaaagctcttacagccctgttggacacaggatctactcacaacttcatcaaccaagacatggcacgcgctctgaaactggactaccagccaagcccggccctccaggcatctgtggccaatggggataaaatcatgtgttgtaagctctccaacagcatcagcttcattatcggccaggaagactttctgatggatgcttacgccatcccaattgattctttcgacatcattctcggggtcaaatttctgcgcactttggggccaacactttgggacctcgagaatctgtgcctagctttctggagaaggggacaacggattgtgtggaaaggactgggatcagaccggaaggccattaatgtgtacccagcagtgagaacaattagcacaaatatcgcaaccaccaaaccgatgatggatcgtctgctccttcaatttcagaaggtgtttgctacgcctagtgaccttcctccagcaagaaggtgtgatcacaggatccaccttttgccaggaacaacacccgttgcagttaggccatatagttacccaca

SEQ ID NO: 56396 - DNA, 681 bp, Zea Mays
ggtcaccggagtttccacggcaacaccagcggaccggccacgtcgcacggctacaggcgtggtgataagcttccgcctcgaccaaatccactcccccgcgagatctttttacctccccgtggatatccactgcttgccaagaacgaatcacggtgactggcatgaatccgagcgtgcgggttaccgacggcgagggggactgaaccctgagatcttttcgttactgtaccatcaggggcagcatcagttgttttgacatagcgttttgcagcgcaatttgcttcaaatttcatgtagtgacttggccacctctttgtatcaaagttgtagccctacaatccagttacaatcttgctatagcaaccatgctcaaacactcactggattaacttcaaaggagctcccaaagttcaccccatgtcactgtcagtaaaagttcagactttgagctgactgacagccagactttgagtccatttaactacaacttttgtacaacacttatgcctaatgtcttaaacaaagttatactcctttggtagctctacaaatttgatgtattaaccctaggaaaattccttatggactaagagatacaaggctccaaatatgcctcaagatcactgaatttcagacttaggcttatatggcttaagtggtgctttttgcaaataagcccaa

SEQ ID NO: 56397 - DNA, 319 bp, Zea Mays
cacgcacacaaacagtgggaagacctagaggcggcgggctgccatggtgaggtctgccgtctgccatcagcccatcacgcaggacgaataggaagaccatcagttgtgcgatcagcgtagggcgcctagttcggtccggtccggtccactgggccatcgggggcaaatcacaatgaaccagagagtgcaggagctacggcgggagggggtttatgtaaaattgctgctggacgttggatgaggaagggatgatccagattaaaagtgctcacatgtgcacgggagcgccatgagcacgggacacgatcccaaacaaaac

SEQ ID NO: 56398 - DNA, 412 bp, Zea Mays
gaaacatctttgttataagccaagtcaaacaaaacttgaaactggctagacaacggttggtcacccaaccaagtgcttttccagaagctagtcttcaaaccattacccacatcagttttacaatatttgtaaaagatgtcccttaacatcagaagctttttccagaaatgagagtcattttgcttttgcttaacaacaataaggggttttcccttaatatacttactagcaataatcttttgccataaaccattcgaattctcaatattccaaagccatttagaaagaagagagtcattcataacttcaagatttaacacacccaggcccccttgaattttgggagagcacactgacatccaatctgccaggtgaaatttcttggactgtttacccccctgccataaaagtc

SEQ ID NO: 56399 - DNA, 350 bp, Zea Mays
tgggaggtggattcataccattgttcgggagatggtttggggagaacggagctccaccaccatactcccgaggccgatgtgtagcgccgtgtccaatcggatcgttgggaaaactccatggcgcaggcggtcgctcctcttggttgtgaggtgcgccgtggccgccatgttcaagagcatccgtcaagcgatggaggtcggaacgaactgaatcgacggaagtttgaagcgattcaatatatccttcaatccgcggccgccaagattcttagaccgaattgacgttctccaacgccgccatacgcgtagtcgcattggccgcgatggccccgatacgctcctgagccgcc

SEQ ID NO: 56400 - DNA, 1025 bp, Zea Mays
aaagaaccctccaacttctaagtcttcacagggaaaggtccacgacggcggtgggcgcagggacgctccggcgaggttctgggccggccgatcggggctatggctgggttctccgagcggcggccatgaaatcggggctatcctgaccatttcccccaacccaatttagctattgatcaactaaggagctctggccacgatggccgtgagcatggcggctatacggtcgtgttcccagcgattgggggcatctacattcaaattgatggcttggcgagcatcactgagctatgagaagacttaaacaaggtttgaatcggacagagctttaccagaatcggctggccacggtggacttgatttcacggtgttcttcgactgatttgggggaagtatgaaattggggcttgctggtgatcggctgggggcaatactagccgtgggggtgcgcaacgatgttgcgaaacgagttacggactcaatttataggcaggttcgtcggtggtactcaatttgagcgaataacgcggcggccggaggtgaagaagaaagcggcgcggtgaatacgtgtctagaggcgtggcggttattcctgtgagccacggagagcgaagggaagccacggtggtgcggtggaaagcgagagccacgcggcgcatggccggaagacggtggtcgccggcgtgttaatccgctcagccacaaatagggagagagagccacggtgatgtcaccggagttatccccagggggtggctttttacctggcagtcttatcgggctatcggcgacgcgaatcctacagcggtggcgtgaatcacggcgaagatcggtcgtcggcggtgaagacagccgcgctggcggtctgatccggtgggcactgtaccattgcgagtttcagtcagatgaacctgacagtgcattttggagcctcattttctccagtttttatgtggaatttatgtcaactttctgcagcaaagatgtagagctataatccatctatgactttgatacaatgtgcc

SEQ ID NO: 56401 - DNA, 1122 bp, Zea Mays
gggcaacactggaggtccagcccacaagaggggcaagtctcagcatcagcgccaccatccctatcgtggcaaatcctctgactcgggtactttgggaggaagtactcagaggtttcgggctattcctaagccaaggctggggctggtgtgtttccattgtggtgatgcgcatcgccgtgcagagtgtcagtggaacagcaggtgttcaatctacagtcaagaccacaaggatgtggtgtgtaggaggaatcccaatgggaagctcagatgggagccagtgacttcctcctcttctcagggcactatcaacatgatgtcaagcgctgagcaacaattttcagttccacttcctccgcagcagttttatgtgcctgggacttctcagttcgtgctggtgcagggttttcctcagtatctggctgcgcctactcctacaccgactacccctatgccatctcagtttggagctccgcgtctgcctcacccggcagctcagtggggttcttctgttaatttcacttcgggagcttccttttcttcgggtatttccggagcttatgtgctacccgccacgaatggcagagagcaaggagacgtggtgacaggtacgatttcagttgattcgtttgtggcccatgctctttttgactctggcgctagctattcgtttgtttcggaggactttgtgtcgtgggctggtctttcggtgcagaggttgggtcacccaattttggttagttctactaatggctccattagtagctgttcagtttgtcaggggtgttccgtcattcttgctgatgaggtcttttcggccaatctggttgtgatttccttgggggcattcgatgttatcttgggtatggattggttatcccagtatcgcgcagttatatcatgtttttggaagacagtgttattgcaggcgccatcgggtaggaaggtggtattcttgggaagttcccctaagttcacgttatccttgttggtgcaattgcttccggatcaccggtcaaggaagtcgggaatctttttctccatggtggtggagggtgaagctgccttgcgggtggacatccgggtggtgtgtgactttgctgacgtgtttccggcagagcttcc

SEQ ID NO: 56402 - DNA, 420 bp, Zea Mays
tggagattgaactcgatgagaaaggagtagattacactattttatttggttgtaggctccaccaaatcgaactcagcagtggaggcgacgaactcagcagtggaggcagaggtcgaagggagggggagacgccatctagccatggagacgccatctagcttgaccttctcgacttgttcttcggaggtggcttttgcgaaggaagaaattagaaccattaagtagattgaagggcgaggaaaaacaatgaagcaagaagagacggtcgtacagtacctgggggcggagacggtggcggattggggctagggttagggttttgggcggggcgctggaggctgcgggtgaagcggaggaggtggtcgttgaggccgttcgacataggggcggcggcagggagacgacgatccttggggacgg

SEQ ID NO: 56403 - DNA, 315 bp, Zea Mays
gaaaagataaacaatagataagaaagataagcttataaaaggatataattcaactcgtatacaattcgataccgacttgatcctgactccaactagataattgactcggtgcctatcctgtaagctatcacccaacttggaatataaaaggagatgcagatgagcccagtgaggacatcagattagaaaacatctcaatatagctaaaatgcaccacaacaacatacatgatgtagggtattatctcacatcaagagtatgaagttgtataagcactcgtgtttcctatgccttaccttcaactttcgttctcag

SEQ ID NO: 56404 - DNA, 765 bp, Zea Mays
cccttcccacttcggctctagctggccccgggactctgtcctggtggtcctcatgagtactaggtccccttcgttgaattctcttgggacgacagtgttgtcacgccatgccttggtctggacctgatacttgtttagggcctgtagggcgaggacacggtctctgtcgatgagatctttggaggtcggttcgtcgatgtcggggacggctgattcgtttgttcggggggacccatgctttaactcttgcagtgtcattgatttggatccatacatcaggcaaaagggtgtgaacccggttgcttgacactctgtcgtattcagtgcccatatgacttcgggtaattggtctacccatttgccctttttgtcgtcaaggattaatggcgctgaaaatcttgccattggcacgttcgacgacgctgttggattgtgggtggtaaacagaggcgaagactggctttgtgccgatggaactgcagaattcctggaagtcttggctgtcgaactgtttgccgttgtcgactgttagctcagatgggactccgaaccggcagacaatgttttgctagaagaatttttgggcggtcttcgctgttatcgtggagactgctctggccttgatccacttggtaaaatattcgatggcgatgaaggtgaactttaggttcccttgagttataggtagtggcccaacgatgtccagccccaacgctgaagtggccaggtgtgggcgatgagcttggtgaattgcgagggggcgcc

SEQ ID NO: 56405 - DNA, 870 bp, Zea Mays
agacaaccaggaacgaccagtcaacatgagccatgtccacagcagcgttcccagatgacgacacgatgttccctaagctactgtgcagtagcgtttaattggccgagactaggagcttcaccagcacgagagggtgtacaaacatggattagagggacgtgaacggacctgagaatggctggccacgacacgatgtctcacggcggcgttcctagccgatttgggggaaatctggtaaacttgcactctggtggacgagaagggtcggctgagggtggactgggttcataacagagaggcagagcaagggaaacactcaatttatagagagcaaccatgagcgtaacaaatttgggtgtagatggactcgcggcggcgaagagatgagtcaccggagcatgactaccgtggcgctcagtggggtaaggacttagggcggtaaatgggctatccactgtgacctcttgcgacgtggtaacaccctcaagtacatggcatcatcgcgatgagcagtggatgccgatgatggcactttggtcgatcatgaagcaagtgggtacggcggctagcgcacaaactcatatgaggtcacgatattttcacccacccggtaatatccgcgtcgagcgatgcacgaatcttcatggcgagctcgaatcatcgcactcaatcactgggcggcgaggtgctctgcatctctgatattttgctgttactgtaccatgccaactccatttagtgccgcgatagagcaatttgaggagccttttccttcaattttcattcagcaaactaccaagtcgactataacaaagttgttcccctatataccagcttcaactttgtcatagagatcatagtcatttactc

SEQ ID NO: 56406 - DNA, 694 bp, Zea Mays
cgaagcgtagagtgagtgaggtggagggtggccgtcttcgtgtggacggggctggcaagcgggaattgttgtcctcgccagttggggcgagtgtaggtgagggggagttgcgaaatctttttgagggtgaggagctgaggataatgctgtttaactacagggagatgggtatcatcccgaaggttgagccaatgtaaggtgtgatgccatcgctgtatgtatgtaactataatttgtatgatgaggctgtgtgccttcgctgatctggccgtgcccgtaggggacttgtgcacttgatttagcgcgtttatcgtgtcggttcggctgcacccgtagtcggttgttgcacggagggtccggccgcacccttaggtgacttttgcacggatagtcttttgaagaggacttcgattttgcgcacttgttgtgctagtccggctgcacccttggcgacttttgcacggatagccttttgatgaagacttcggttttgcgcacttgttgtgctagtccggctgtacccttaggcgacttttgcacgaatagtattttgatgaagacttcggttttgcgcacttgttgtgctagtctggctgcactcttaggcgacttttgcacggatagtcttttgaggaagacttcggttttgtgcacttgtagtgctaatccggctgcacccttaggcaacttttgc

SEQ ID NO: 56407 - DNA, 371 bp, Zea Mays
agccttagtatgatcgcaaccagctttctccaagatggatgtggccccacgggcaccagtaaaggcacaaaaatctcctcgatcactaagaactttttcgaaagctttaactttgccaattatccactgaatgatctcatcaggatttccgcgaataaatttctgctcagaggaataggctccaacctttacaaagctgttctttaagttcttagcgcattccaaggatatttcacaacatttttctttggcgactcgaagctcatcggcattcttttgcgctcttgatctttcgatttctcacatctcatgcttcaccacttcaacttcaattttttcagttgcttcatcaacctacctctttagctctt

SEQ ID NO: 56408 - DNA, 684 bp, Zea Mays
agacgctaaggttcacagtagcaagtggttaccattgcactagtcaagtttgttcattagtaaccgagcgcatttgtatttaatcatcaactttcctctgtccaggaggctaaagttcagggttgtgaatgctctcagttcagatgtcgccccctttggtcctgacatgtgcacagacaagcagtagactaatagtagatcgatttgagaatttagactatggtttagcttactccattctactttagctgctagcataatagtgttaactgcccagtatttaaatttatggacaaaaaagatctactactagcataataagatctgctagtagtctgtgcttcatagtagtctgcacataatagtgtcacctccataaacagaattatcaactgaaatgtaatcaactgaaatttaattctgtgatggcaaatattatcaactgaaatgtaagtctgctacataataatctcagctgaactataattctgtgatggcaaatattattaactgaaatgtaattctgttatgtagtataataatctcaactacaactctgtgacaaataactctactcaaatgaaaaagaagtctactcaaatatgtctgtatgttgtattccgaactgaattgaactgaactgaattctgaattctaaactgaactgaattgaactgaattcta

SEQ ID NO: 56409 - DNA, 741 bp, Zea Mays
ctttgatacagacgttatcgactacttcgatgatagccttagggatacgtttcaatatgaacattttgttaggaacatacaaaatacaattatcaagctttgaacatgatcgacaactagactaatgctaaagatagagtatgagaaaagtctcacaatcaaaattgagatcgcaacaaaggcagggatcagagggaaaacaaggatggcttatagggcaaaaagaggggtccaaataacactgtcatggctatgaacaagtcaaagaagggagataagaacaagtcttttgatgagctactgctagagcagtgcccttaccacccacatcataatgactatatcacggatgtaagcaacccagaaatcatggttttatcttgactctgaaataagataataaagacaaaaaaaatgtagacgaagaacatgaccaatacaagcaggacaatggagacttccaacgagctacaaatatggtaaaacttgtctttgtaggagtagctcctcaatgtctaagagaaagactaaacttactatctacgagattatggctgccaaacccacaactttgaccaacttgcggtggtccaaggtcccaatctagttcacgagggtagattagtggacaagcttctccaatctagggtgtagttctgaacctagtggttgcaggagttcaactcaccaaggttctcatcgatggcagtaagggggttaaatttcatctatacgagcatg

SEQ ID NO: 56410 - DNA, 755 bp, Zea Mays
caaagatcaccagatatagagtatctcgttgcgggtgaccttgtgctcggattcgcaccggcatcgcgattcacgcccgatcgaaagcggataacgatcctcgttgaaaaaccgggcgctggggttgagtttgggacactgttcctccctggccgccgtacccacttgcctcacggccggcccatataacctcgccggagttggccacctaccgctcgggttccacgtgcctaaatgcaatacttcatcgcagtgactcgccttagcatgtccggtcatcaccggtggtcttgccacggtgaagtgacacagtaaccctacgctagtgaccactcctttctccgtccgccgcgcgtcttctcaaaattagccgccaccgccgatggaacctataaaatgccgcccagtgagctccactaagtagttgtgcacccagtaaaccatccctcacctccaatcgtcccctacaggtccccaatttgggattccccccaaatccgtcaagaacaccatagtgtgtgagctcgccgtggccagctcgctacaggtccgtccatgtccccctcactctcgtttcaataaccatgtgtgctgtagatgctcaccagtccagccaattgagctagaacacgtaggatcaccgggaacgcctcggttcatccatagtttgagctatcaccgtgggtagagcgattagaagctagaaccatgcaattacttgagggttatggtcgttataggtggaattaggtgtc

SEQ ID NO: 56411 - DNA, 303 bp, Zea Mays
attcgctgcatttcccttgccttgagtggaactccctgaactctgctgattatttgatttgtcagtctattgaggagcttggtaggggcggggaaactagtaccaggggcactcgactgatttgttgaggtgggggcagtagcaggacggataaagacaggttgtttgaaagggtaggagggtggacgtggtgaagaacgattctaattaaaaggttggatcaccaacctttgtctcttctcaggcccctggttgggcctatcgcctccataacccttcgattttcctaggcctgcatatttg

SEQ ID NO: 56412 - DNA, 690 bp, Zea Mays
caatttctggaaaagtcaggggctctagcgtaagttttctaagactcagagcatagtgcaattggacagcgggtttattcttgaaaagtaaagggtttctttagcaaaaaggccaacgcaaaggggtctcagtggttttcggccgcgagatcaacagcagacggcttggattagatccatcccaccgcgaaccggtacgcaaccgcagccacgagatcagatatcgacggtttggatttaaaacgctaggatcacatcgcgactgtccatgtacgatctaacggaccagatcgagacatggtgaaagggtacgtacggactaatcacagccgctgaattacgatccaacgccagggagatctcccccaacctcccgacggcaaccgagcagaggcgccccggccacggcggagccctcgccggcgccatcaaatcccaccgccccggccgcccattatggctaataccacgtgaaaaatgaaattaaaggctaggtgatcacgtagagggcgtctcaccgaggatgaccaagccgaggaggccgaccacggtgcgaggcgaatccgcggcggcgatgtggatacggtgagcaattcaggccgcttcttcgtccagctctccctgatacacccacggtcaccaccgccgtgcaccagagacgatcaccgacccgatctacagctctccgcg

SEQ ID NO: 56413 - DNA, 493 bp, Zea Mays
tgaactatttggcactccctagttttatatccttgacctgcgagcagggttccaccagatattgctcaaggctagcgaagagcacaagaccacattccaaactcatatgggacattatgaattttgtgttatggctttcgacctcactggcgcccctggtacctttcagcgagccatgaatcaaacattgtctccccttttgcgcaagtgtgccctcgtcttctttgacgatatacttatttacagtgcaacattggaagccatcttcaccatttacaacaaatatttgagttgctgtccagggatgaatggaaggtgaagatgtccaagtgttcttttgcacaaaatcgggtctcttatttgggtcatgttgttagtgctgctggtgtcactaaagaccctgccaaaatccaagccatagccaactggccaatcccatcaaatgttaaggagttacggagtttttcgggcctcgtcggatactataggaaat

SEQ ID NO: 56414 - DNA, 338 bp, Zea Mays
caacctcaatccaactatatcgtaactctgaatagtccaattttctctatctcaatagcagaaacgaataacacgaaattcagaagacaaaatccccatcctaggagctccaaacccaggttatgaacgccaaatttgaactggaccaccatcatcccgatagcagaaaacatgagcacaaaatgtagaggacaaaatctatatcctacaagctccacatctcagtcatcagaatgcgaaatttgaactggaccttcgcaaccatcaaccataaatcagaaaccaacaccacgaagccgagtagagaaaatccctattctacaagctcgaaatcccat

SEQ ID NO: 56415 - DNA, 379 bp, Zea Mays
aactgatggtccgtgggcctcgccgcaccgtatgtttctacgcgcttcaaaggatgcgatctgctctgttgcttcgcgctatggctgctttgcaaggctcgtaagtggatgaaaggaaaggaaatccgcgggctctcctttctctgactcggttgctcaattcgcgatgctgttgcaggtgatgtggtgatcacggcttggttcggcatctcggaggttcctattaccgcggtattgtattcaccaatgctactcattctacaagcatttactttttaattgtgctttcacttaaaatgtaattttgtcagttcacagtaccctgtactaccacactagcgaaaagggttttgctcttctttgagtgatggcatttact

SEQ ID NO: 56416 - DNA, 523 bp, Zea Mays
gcacaacagttcatggatcaagtgttcaaacttcacgggttgcctcaagccattatttctgatcgggacatgatctttaccagcgccttctagaaggaattattcaagttggtgggagtagaccttcgcatgaccacaacatatcacccatagtctgacggccaaacagaaagggtgaaccaatgcttggagacctacttgcgctgttttgttcatgcgtgcccctcaaaatggaggaagtggctttcactcgcagagtactggtacaacaccagctaccactcatctctgggatacactccttttgaagttttgtatggacaccttccaaggcaactcggtctggacctgagggattcctgtacagtccctgcgctacaagattggatgcacgaaaggaaactaatggttcagttggtgcaacaacagctcgctcatgctcagcaacgttacaaaacccaagcgaataagcatcgctcggagagaacttttgaggttggggacatggtatacttgaagttgc

SEQ ID NO: 56417 - DNA, 327 bp, Zea Mays
gaggtagagagaatacaacttcgtaaggaggtagagagtatacaacttcgtaaggaggtaccccgaaagggttgatcagtgaagtcctcttgcttcagtgggggtggtggtggtaacagttgatttggatgttgtggtgctggtggaggcgatagagctaggatttcttggtgttgctggtatatatcgtggttttgttggtgaggatggaagtgttcattgtggaattggtgttggttgtactgatggggatggtaggtgtgggcgacaactctttggttgtcagccagttggtttctggccattcgatcttttgttgctttggtt

SEQ ID NO: 56418 - DNA, 529 bp, Zea Mays
caagcaagattgtggaacttgaagcgtagtttgccaaaaggaaccctttcgaagctatcgacaatgccctattctctgtcttatccccactccgcaagaagttttgttatggatcccctggatctattatttgacttcttgcttagattgataggattgctctttagtattaagatgttcgactagatcggtaatggcgatattatattatattatagtggttttctaatccctaatattgctatataacccttgacttcttatacttttgttgtcttgccacccttgcgcaatatctaccttgatatactaaacctttgcctctctatttttctccttgataatgctttctccctaactcacttcatatccttggttatatcatttatcctcactttaatagttcatggttatcttatttcactcttggccaccaacaaatatgtcttgtctaactccttgataattcttacccaactccttgactttataatatctttcttattccaaaccttgtctcaccttttgt

SEQ ID NO: 56419 - DNA, 765 bp, Zea Mays
ggatgaacgaagcaggtggcgaccatgcgctcatcacaggattgctcgaagcatttgaggccgaaggtagatttaaccttgtctcctatgattgaggctgaacatattgtggaacatagggcgagcagtatgaagatgtattgaacacctccttcgactgagaaggttgagcggctgacgaagcaagctctttctgcttgttgattgtgtggtggcatgttcttgtggtgtggcctttatcctcacagcaaaacaagcagaatggcttcctagggggcgcaatgaatctgtcgtcgaagcttctgcctcctcttcctcctctcggagcaggtgggcggaatgtgctgtgagaaggttgttgttgtgagtttgcttgttgttggcctgactgaccttaagactgggtcgctttttcctcgccctgtagtgagttatggatgcttcggacatgccttagatgaaaccttcctccgaagcccgtagcggcttaggcgtgtctgtgtaattcctcccttctttggcagaaatcattgtcagcccttatgtacccgtccatcttttgcaacaatttttcaatggtgtgaggaggcttccttgcaaaatactgagtagctggtcttggcctaagccccttgaccacggcttcgatgacgatgtcatcctggactgtcggagtttgggcgcgaagctttagaaaccttcggacaaacgactaaaggtattcatgtggctcctgggtacactgaaataaagcttatgcagtaa

SEQ ID NO: 56420 - DNA, 298 bp, Zea Mays
tgatttgccaagcagcatctagtatgggaaggggttgaagtaactaggggtacttgtgtctgtcaggtttatactgttggcaaattgtacaagctgccacatatgacttgatcataggtttcatgttcttccacgcaaacaattgcttgattcttcgatatgtaatatgaaatcctgaatgacccccaactggactgtcgtgcaaggtagatataatctgaatctgaagagcttcgcaagtccccacccaaacacggcctttatatctgagaatgcctgattgcaaggtataaggtcc

SEQ ID NO: 56421 - DNA, 632 bp, Zea Mays
caccgtcttaagtcgttgccgacttaagccgattgctccgttagtagggtatagtggtcaccctaagccgagtaagcgtgagcatgtcgcaccgtcttaagtcgtcggcgacttaagtcgattgctccgttagtagggtatagtggtcatcataagccgagtaagcatgagcatgttgcactgtcttaagtcatcgtcgacttaagccgatagctccgttagtagggtatagtggtcaccctaagctgagttagcgtgagcatgtcgcaccgtcttaagtcgtcgccgacttaagccgattgctccgttagtagggtatagtggtcaccctaagctgagtaagcgtgagcatgttgcaccgtcttaagtcgtcgccgacttaagccgattgctctgttagtagggtatagtggtcaccctaagccgagtaagcgtgagcatgttgcaccgtcttaagtcatcgctgacttaagccgattgctccgttagtagtttatagtggtcaccctaagccgagttagtatactgatccatgtccaatcaaatcgagtcagctgatagtcgagagtctaaatgcctttgaaaacgaaaactttattgatgatggagtccccgattacagagtacaatgt

SEQ ID NO: 56422 - DNA, 360 bp, Zea Mays
catggaaacgagaaaggacacacatatgacacgtatatgcttatctactccagatgtttaaggatcttgatgctcttctaggctggacaagatgcgctacggaggacggaggtcggggcttggatacatgcaatcgtgcgtccgggtcctacgtgatatattgccatgcatgttgcatgcatcggacgttgtccttcacgcatgcacacgcgcgtggtcagcaccacactgcccgacgccgagttagacgttcagatttatagactgagtacagagtgacggagcaacggtatgcagtggcagtgaagctcacgaaggagtcaaagcaaggagatgtctcatagcgttgctgcatgcttt

SEQ ID NO: 56423 - DNA, 508 bp, Zea Mays
atctataacaatcttctataagccaccgaaaattatgtcatctcttttatgccatcagtttaatttttcaatcctctatatgccatcgccgtcgatgtacagggaaacgacgtcaaaataaatgcagacagtacccgcgtcgcccccgacccgaccggcggccaagcgcagctcccaccccaagcccgcatcgcctttaacccgaccgccacgactccgcccgcgacctgcggccaggcggcggctccatccccgagctcgtggacgcgtccgcctcggaccgatggctaggcggttgcttcaaccccgacgcaggcagttcccagttcgccacgtacccaggctgctccgcccaaatcccgacccaagctccttccccaatccgtccctgacccgagtacgagcttccgcccgctcgtgagtgctccatgcgcctgcaccatcccacaagtcacgacaaatcaagctagccagaccactgaatttgtaggagcaagaggaatgtgtg

SEQ ID NO: 56424 - DNA, 598 bp, Zea Mays
acctgtgcaggaaattatggtttatttcgatacttcggaggaaatcaatggagtctctatgtttgtttccccttagttgtcgtagtccctcagtggattctgaggaactatataggttttttgatttgaaggagtctttgaatatcgaagatgagctagcgtatttcacacttttagatgaagtgtcatcagcttccccaattgtggatgggggagggtcttcgttagagaatcaaggtgaggaatgattgaagttgcctaattgcggaaaaagaaaacaaggacatctaagaaatgcctaaagattagtttaggtgctgatttgttgatgccgtcggtcgatcccttggggagtgctgctttgccgtgattagagtctttagtgcaagaatttttaatgggctgggatgctagcccatgacttcatgaagacaatattaggcgtttgttttttggtaacgagcttgagttacttttgtttgatatagggagcttggttttttcgaagagggagtgttttagcttctaaacaatgtctcttgttgtaataatgtttgtttgttttcttcgcatgtcttcgatcgacaaattaggtgtg

SEQ ID NO: 56425 - DNA, 530 bp, Zea Mays
actggggaatttctagagagccgatgatggacaggaagggacgaccgacgagcactagagggtgcagcttgaagacgataggatcgatggcgaggtgaagcacatagacaacaagcagtggagggagcacgtcttggggcgggtggctggcgtgctcgctgggaaccgacgtcgagccaggaactggcgtggagcaggaagctcgacgctaagaaaccatgcactagtgcagggagctttaggcctgtgcgagggatatggagaggtggcgtatacgtgaaacttccaggaagccaacatgtacatggcagaggcatgagagatttttgcttaagggaaaggaagggctgagagttggacatgtgtctggaacagtagaagtaacatgaagatgagatagggacagctatgcacctgcgtggagggagcagaagatgtgagggagagagatggcgtgagagagaacacatgttcatctcgccgtctaaacaaagtgatgaagggataaggaaatggagctaacggtagag

SEQ ID NO: 56426 - DNA, 481 bp, Zea Mays
ttgcaatactacagtcatcactacacttaactagggtttcggcctaaaccaatataacccatgtgtcccaagttcattgttcgagtcttagagattcactattcagagtgagtccacgctagcatcccccaccgaacacaaatcttattgtctccccggtgacccatgtgacataacatgccaagttcgaggacctctactataattaactcttctattctttgctggaagagatggaagatttgcttggcatgatgtgggatgtcctaacactaaagggaaatttggggtgtggacaggatatgacgatcccttaaataagattgtttggttcggggttagaggttgggataggactatctcagtgttgtcttgtctatcactcaaaattggagggacaagaggagatgtggctgtcctagctatcctacctatccgacaaccgaacatacggtagaataagagtggaggtcaatatgta

SEQ ID NO: 56427 - DNA, 582 bp, Zea Mays
acgggacacaggcagtggtgactggtgagtggtggtgtatatatagtccagtatacacgacgacagccaatctgtatttagctctacacggctgcaggtcaatatacttgactgaaacattgtgaatgcctactcgcctgtccttacgatgtgtatgtatgtatgtataccgaaatcaaggtagcacagctccaacacaaccatcgatctgcgcacattgttcgacgcacgcaggacatgagagctagtagtgcaacgctagccttttcctctcggctccgtgaagaagacgtggcaccaatccaatctggtccggactgtaccaccaagcaaatggacagtcacttcttccaccactgcagatctcggggaaggaagaagaggggccactgcaaatgtatgtatcttcgaaatcagatctcggtgccagacaatatgcacgctgtcactgtcaaagagtgatgccgtttctgtggcgcgcatcgtctcaggagctgtgctaatatctgagtgcaggattctagccggccagtagcacgacataaccaatggagcccccgccccattggcgccatctgttcg

SEQ ID NO: 56428 - DNA, 529 bp, Zea Mays
accttgacatccccctcaaggacaacatcaagggatggtgcctcgagtggttcaccatggagaatcacaacaaatccctccccctcgatcaggaaggcagcccgacgttcgcacgcccagctaggtagagtcccccacttatttagaggtagccgaagccaaggtgctgcttgctgaaatttgctcgctgaaggacagagcctgactgctgaagccgtggtcgctgactttgtcttcagaaacatccaacccttgaaggacagtatttatcctgcttacttgtacactggggtcaacgattctacccgagttacaattagacagattcccaatgaagacctgctaagccgacttgatctgatgctaaggggtagggtttcgaatgttggcgccccctcatcttattctgcttggaacctgcctccacagagtcccttctctaatttttttccaatcctcttgttcaagatggaaacccgggccatagagtgcgaccctcctcagaggacattgaggccttgattgctcc

SEQ ID NO: 56429 - DNA, 418 bp, Zea Mays
taaaacgtactcgcgaaggggtatcgcggcatgagagccgtccgatcaacaccggaagcgccagattagatcgccaggggtttgaattggtacgcgccgttggccttcggatccaagatccacgacccgcatttccccccgcgatgacccatcagatccgcccgatcgtatctcaacgacctgggtcccctgcttgaaccggcatgatagaatctaatctcagccactcgtcttctgatctacggtcacgatcgctacagctatgatttatccgttgatcaactctacgccatccaaattggatccgacggcgcagaagctgtctttcccccgtgatcccgatctactgtgcgccccaatctcagtcattggcccgacatccgacgaccagcatccgtcttccaccacgcgattccca

SEQ ID NO: 56430 - DNA, 701 bp, Zea Mays
caccagtgtgagccaggcgtgagcaatcgaccgacgcggcggccccttctcatcggagtgtggcgggtgcgaaggatccgcacgaacgtggccgagcatcttctcagggctattcaaccggtatggctcctctccctggaattctcattatcgtggttatctggagcgttgaggttaggatcagattgtggcttaggggggcctgcaattgctcaccggagcaatcttctccgtcgtgtgtttaacagttcagtggaccggcttcgtccccttgcccgagcaagttgattagggtcggtagattcacaccaatgggcgcttagacaccgcattgatcatagtgggctggggcgaggcaaatgcctatgacggtgctacccggcgcgcctccacctctctgtccgcgcccaggaatgaggttgaagacgatgtcgccatcgtggattcggagatgaccggacgggattaggggtagtgttggacaggaggatagccgtgggatggtagatatgcggtgcggatttaatcggaaataccttctgggtcgatttaatcacgactgtccgtgcttcatctagcggcccagattggtggatacctcttcgccgtgtacatttcttaaagagcccctctggaatttgagattagaacccgcagtccagggctgttgttccctgtgtctggcgaatattgccccgagc

SEQ ID NO: 56431 - DNA, 732 bp, Zea Mays
ccaccgcggtgcgggcgacgtggattttgtgcctccgatgaggtcctgggccagctcatctgcagtgatgtagatatccgcctccctgaacaattgttcggaagtggccggtgcctttgaagtatggctcggacgaaggccgagtcgttggatcctcgatagaagtcttcaatcacagccgcctcaacgacttcgaggatgaggttcctcatcgttcgaaaccttttgaggaacgataggagagtctcatcactctagcgcctaatggatttgaggtcccatggatgtgccgatttactggagagagagcagaagttcacgataaatcggcgactgaagccaccccagtcgtcgatgcagtgtcgaggtaggtgtcggagccactatagcgcatcctgctctaggacaatgggcaagtacgctgtcatcatgttctctgttgccccaacagcccaggcggcggtcgtataaacgaccaactagcctcccgggtcctgcttaggctcgtacttgtcgacgttggagaccttgaagttaggaggccattggattgcctagagacgaggagaaagtgcggagactccatacgtatccttttgccgatgttcgccgtcggtcctagggagggagtcggtgctaggtcgtctcgaccgtccccggaatggactactggtcgaagctgccgccgactcaattcgtgtggcatggcttcgcgctggtacaccgtgatct

SEQ ID NO: 56432 - DNA, 427 bp, Zea Mays
cactagagagtgccgggcggggtaactccggtgggtcgaccaccgcgggagctctgctccgccgcaccgtggtgagttgaaaggacagaaggatgcaggggcgtgctcagccgtttatcacggctgagattggaagaaccataccacttcgcgtgtttgatctggtcgaccggatctggataagataaagaaaaccacatcattggcgtggtggattcttggccgcggatcctggattgaacggccgaaatcacatactggtttgatttacaataaatcttatctagaccgttttattttagatctgccgcccagatgagctaggaccccttcggccagggattttttcgtatgagtccacaggtttctagataatcaacccgtagcctggatcaaccagtacataacacaagcaaacaagaagaaa

SEQ ID NO: 56433 - DNA, 604 bp, Zea Mays
gcggtgcaaaagctggaagacaaattcgagggttttgaatttcaccacgtggaaagggatcgcaatgcaacaatagatgcattgttaaaattggggtccagtcgggcccaggtccacctaggatttttgtccaagaagtacatcaaccaagcgtcaccgcagagcatgctgaagaatgcaacgccttagaacaagtagaaacagatcccaacgactagagggagccaattgtcaggtacataaaaactgaggaagaaccggatgaaaaggtcgtggcagagcgcattgcaagacagtcggcccactataccatcatagggggtctgctatatagaagaggtgcatgaggagtcctcatgaaatgtattcatttggctataggaaggcagctattggatgaaatccacgcaggacaatgtggcatacatgcaacatcaaaaacattggtagggaaagccttcaggtccgggttctattggccaacggcaaagaatgatgcggcagagttggttctggaatgtgaagcatgacagttcctatcaaagcaacaacacttgcccacctagaatttgcaaactattcctataacctggccctttgcgtg

SEQ ID NO: 56434 - DNA, 466 bp, Zea Mays
cttgttgcgaaatacccactttgtcccaatcacattttccttgggtctcccactaaggatcagacttcattccgtgtgaagttattgagctcctcttgcatggcaattatccaatttgaatctcctcgtgcttcatctaccttgagtggcttaagagaggaaacaattgagtaaaatttacaaaaaagtgtcgatctagaatgagttgttaccactattttggtgctacccaagatgttgtctatggggtgatccctttgcacactttgatgaactcgaggatgtggcactagagattgatgttgaatacacccatcatcctcttgttcttgtggagctccaccatccaccacttcacaaatcattaatgcttggcatctctgtggttggatgggttcttcttgagttggatgacttgaagttgatggctttacttcgatggagggttgatcatccaccacccttg

SEQ ID NO: 56435 - DNA, 687 bp, Zea Mays
gccagaatactagtacgaaaaaatcgaagaactccatacagaagcctacgggagcggcttgatcaactaaagcgtgcagcttcatcacacaaaagtatggttacatacatacagcgagggcatcacacattacattggctcaaccttcgggatgatacccatctccctatagttgaacaacattatcctcaattcctcacccgcaaatagacttcgtagctccccctcacccacactcgccccagccagcgaggacaacaattcccgtttgccagtccctttcacacgaagacaaccaccctccatctcaccacgatgacgcctatcacttcacgacaactcacccactctccgtttcgtcaccgcccttcgccgcctacgtccagcactcgcacctggaagatcctcagcacccatcacatgcggagaagtctccgccatagccacatccaatgctgcaaaataattcaagtcctcttccgaagactcctctgtccacacaatcgaactcccagaatcatcagactcaaaacacttagacacagaatcatcagaatcgtcttcagcaaccacgatcgaagccgccacaaaattatcattgttagtagtggttgcgtgcgcaggcccagacctaagaacctgcgcagcaacagaggttcagtatcacacagaaaatttacacacccc

SEQ ID NO: 56436 - DNA, 409 bp, Zea Mays
gatgaaagcggagcggtcagggggtgagcttaccaacgacggcggccgaagagtctctgcccacgaggtgggggtatcccgcggcgagcttctcacaccggtgagaaattccacccctcctggttactggcggcccctaaatcctcctctaccacctccgccgtggcacaacgaagcgccaaagcttgacccggttggttgaataggcgcgtaggtgccaatccacggtggaggtcacgcaaccatcactctgcggcaacgcggcgcccatggtggaacatacccgatttataatcaactggtgccaagggaggggctgcgtggtggttgttaccgagacccatggaaatcttaacaaccggtcaaagaacgcctataaccaggccgacgttcatggcggcgaagtcag

SEQ ID NO: 56437 - DNA, 758 bp, Zea Mays
cccagtgtcacctagggtttctctcagtgctaacccaagaatcaacatttcatgtgagccaaattgagcatgaagcatcaaatttacttaagaataaaagatgtactaagtgtatatctaaagaatcatgttccaaacaaataagattttcaagaagggaaaaatgttgaaaccctaacaccaaccctaatcaagctatctaagtagagataaagaaaaggggtaaaagaccatgaaaaatataaaatcatggcttaggccaattataaacattgaaatatactaaataagctacaataaagattatggaagcttggccaaaatagtttaataaaaactccaaacaagcttttcaagttgaggttcaatagggatttctgaaattcagatttctgaaattctgcccttaagccaaagaccgagtgtgttcaccttgatccctagctcaaatcctaatgactccattgacaaaaatgtgcctaactaacccctctacctcataccagaagatggcatcgggacgtgtgctctggacacgtcaaacccgggatcttctctctgtgcgcggcagtgagacaaacccgatttctctcctctctttctcttgatccagtcagcaaaacctgcaagcctccacacacaaacaacagaggaatgtcaggggaggagacctctcaacgggatcatggccataatctcaaagatttggagccaatccgcgcttgaactcgacctctctctgcgctgtctcgtgctcg

SEQ ID NO: 56438 - DNA, 322 bp, Zea Mays
catacttagccccttttgattaaaatatttatcgctacaaacaatcgttacagtttagtaactaaaaaacattcactgcatctaacaatgaaccatccaccacatctcatggtaaactcttttaaaaccatcgtgagcttcgctcatgacgttttatctttataaacactaacctatgaggatcccaatgacacttttaaccgtgagcactactgattaactagtttctacactgtacataggtttgaaaaggctagcttgatagataaggctcatccccgccttatatgttatgctcatatgccatcaaattctaatatgg

SEQ ID NO: 56439 - DNA, 742 bp, Zea Mays
agctgtttcacttgcgtccccagccattctgcgcgcggcgatggtgaccatgctacgtctctcacatccatccatgacttgctggatgaaatgccccatttgggagttgcccgaacagcatcccatgccaagcacacgtagactggtatgggtcgacggtgaaacgacttaaaaaaagtttacggatgcagaaatcaataataatcacaacacccatatatattagtagaccttgggtacatttttaacttagaaaacaaattattttaagaaagactagatcaacgatatgacaaatagatagcatgatccagcaccaaaaacaaatttgactgggttaacaagcacaaaagcagacatgactgggttaacaaggcctcgagttcaggtgtgttacaatcttatcttggctgtgtcctttcggcctatgctatgtctatcctgcaattagaaacagaacttccagaatgctctcgatatgccagtgcaagtggctttctttaaaggtgtgcctttttcagccacaaaaaatcatctccaaaggtatgccgagtatagacttggctggggtgcaaagaagagcaaagcaacgcatggttttcttcgcggtgcgttgctttgccacctgtctctaatcgcgatctattttattgcttacctttacatcttcatcataaagtaaaaagttggtcagagtcagacaatcagaatggagccagtccaggagctgaggacaagccaa

SEQ ID NO: 56440 - DNA, 467 bp, Zea Mays
cttttttgtctggctcttcttcattcttgatatacttgatgatgggtgctctctagttagttggatattcttctacaagcagtatctcatgctctatcaccttgcactcttctctcgagtcttgcggagtactaggatgatgtatctcctgtacaaaaacaccaggtggaacctgagctctggtggaacaaagctttgatagtggatcgatcgctataatgcaatctatatccacatgatgaaacttcaggacttcgaacttatcttcaatctaacggattgcagcacaatacttgctcatgacctccatggaataatcccaatctttgttgacctaacttatcgctaatagagaatccccatataccatcacccgcttgtccctgcaagttctcgttcttgtcaaaaaccttcttactcgatgcctccaagatcatgccattatcttcctccacttgaccattgac

SEQ ID NO: 56441 - DNA, 561 bp, Zea Mays
agaaggcggaaaaatacaaatgctttcgttaggacagcaaagggatcctatggtttggagaccgattggttgttcccaagaaccccgagctcagaaagagaatattggatgaagctcacctttcaaaattctccatgcactccggcagtaacaatatatatcatgaccttagatctttatactggtggaccagaatgaagagggaaattgctaagtatatatctgaatgtgacacctgccagagagtcaaggccagtcatttgaaggtagcaggcactttgcagccccttcccataccatcttggaaatgggaggatatttgcatggattttatcgtgggattgcccaatacctcccggcaccatgattctatttgggtcatcgtagataggttgacatggacaactcatttcttgccagtacataccacccacaggacagaaaagtatgccgaaatttacattgaccagataattcgcttgcatggaataccaaggactatagtatctgacagaggagcaccattcgtggcacgattttgggagcaattgcaggaatcac

SEQ ID NO: 56442 - DNA, 403 bp, Zea Mays
cggctgtttgttaatgcaagaaggtcgagtaattgcatatgcttcaaggcagttacgccgacatgaggaacattatcctactcatgatctggagttagctgcggtggttcatgccctaaagatctggcgtcattatttgctgggtaatgtctgtcatatttatacaaaccataaaagcttgaaatacatcttcacccagtcagaattgaatatgagacagaggcgatggctcgagctaatcaaggattattaattagaaatccattatcacccaggaaaagcaaatgtagtggcagatgcgctcagtcgcaaggtttcctaccattgtataacagtgaagacttctgacattacattatgccaggagatggagaaattgaacctggcaatgattcaacatggg

SEQ ID NO: 56443 - DNA, 445 bp, Zea Mays
taattcggtcggtggcaaagtgcaagtagataaaatatgctcaaatataagggtggaaataagggggatagggttccctagtgacctaatagtaatagacacccctggggtagatgtcatcctagggatgaattggttaatgaagtatgaagcgaatgttagctgtgacaagaggaccgtaacattgaaatccccgcttggagaggaggtagtggctgagctaaggatgcctaagacagtgaaaggagattgtcaccagattttggttgatagtaaggaggccaacccgctcgaggctatcagggttgtgtcggactttccagatgtgtttcccgaagaattagcgggcatgccacccgagagaaaggttgaatttgctatagagcttatccttggtaccgcccccatttccaaaagagcctatcgagtgtttggaccagagttg

SEQ ID NO: 56444 - DNA, 365 bp, Zea Mays
aacaattacacatgtagaacttcagttccagacatatatattagatttttctaatttgttataatttacaaattactcagttatgaaacatgatgtagctaatacacattgatgacttcaatcccatgcctatatgtgaaataacgctactgactactctttggcaggtttaattctgtttgctctacggtttcagtgcagattcttatgtttttgtgttttcctgtcagttcatatagtaacaagtatgataatttggtgcagcaattaattagtaatgtgacactctgagttaacctgcaaaggtttagctcagaaaaagggccattcagtttttcttagaatcgttgtgtgttgtcatgtgg

SEQ ID NO: 56445 - DNA, 518 bp, Zea Mays
cgtattctaccatgtcattggcacgccagccgtccgcaacccagagggcctccaaataactaacgacacctagggccaccgcatagtcaacctcatcatgaccgaagactggcgggcaccaataaccctgttcctgcagggatattaccatccaagcgatatcaacgaagccaagcgcctcaaacaccgaagccgagactttgcactcattgagggacaactttacaagaagggggtcagtcaacccatgcttaaatgagtcaccgagatcgaaggcgtccagatcctgcgcgaagtccacagctgaacttgcggctctcacgcggggcctagggccctagctgccaaggtgatccgtcaaggcttctactggcctgctatgatctgcgccacgaatcgggtcacaaggtcgtgcgaagcctgccagaagttttctccatgatcaggaaacccttcgcaattcacaaagctgatcacccacacgtggccccttcagcgctggggcctggacattgtcg

SEQ ID NO: 56446 - DNA, 425 bp, Zea Mays
gaatagctcgcctcagagtgaggcacgaagctgtaacaaccaaagttgttgtggtactgcttttttctggtagccttcgtctcataagatagcccatgaatgttgcagaagcattttgcatctggttccagtccttggctcctcatggcccatataaagaccccactttaatgatggcttcgggagtaagttgatgaaggtaaatctcaaaggttttcataacctcgaccaacaatttgtccaggggaaaccgaagtccggctttcatgaagcttctgtaaactaccacttcgtcagcttcgggaagaggaacattatcttcccatccagccctcacaattgagatatcacgaaagtacctccccctcattgcatcaatctgcccttgtttaatagttgattttccgaagacaacatgactcggt

SEQ ID NO: 56447 - DNA, 990 bp, Zea Mays
tatatacaaggggagggttcaagccaaagggcatgtcccttggcgagataactgccgcaccccttgggaattgatcacatgtttcattttctaacagctatcatgggccaacttgaacctgttgagtcagcattgccgacgaaggtgattgcgcgcaacactcacaaccctcttcaacctcgatgataatgttactggggaaatggacaacgccctaacctcgaagatggtgttgcagaaggatgggttttgatcattgtagtactttagttagcacttgaacgaaattgtcatgcggccctatggtttggaggtgtagttgcacatagagttgtgatcatggttggagtgatagttttgatctttgttttctagaaggtttcaaggatggcacattcacacttgcatcgcggtgaagttaggagtggcatgaactgtgcagacattttgtcgcatggtagtgatgatcctggatgatgttttggtagcaatgaccctcgctgatgttttttaagtccaacactgttgagaaataaagggaactgtggtaggggcgaagccagctaagaatgtcgccggtgacgtgaatactagatgatagaatcatttgcattgtaaagtagtatattataatgtttcttcattggttttacgaaatctattggtacgtgtcagatgacaccaataaatgcctctggctccgcccctaaactgtagaggaagtgtcattgtagtttgctttggatttacgacacgtgtccactctaatcttaaagcaacaaaacacctagcttttgttgctataaaattagtgaagtggacacgtgtcacaaatctgaagtaggttaccaggccgattctccaaagtcggttgcaagattttttttcccaataaaggggtctaagagaaactccaaaagcctagctaaatcaactagtattgataaaaataaaaaaaggatggtgaaaatatgatccaacaaactcttc

SEQ ID NO: 56448 - DNA, 1392 bp, Zea Mays
attcaataaggaactcaccgagcactactcccggagcttgctgagcctcttgagcatcgacgtgatttactcatgcccttccttgatattgggtcttgttctgctggctgatggaggagggcgccttgggggcgagtgctgaggtattcttggggccattcactgagttagagtaagtaggtcctgatggcttcagctgggggcagttgttcttgaagtgactgggatctccgcagtgccaacacgcattcgctggtggttggttgcttgcaactgagggggcatgaaaggagctctgactctactggctaaaccgcgacggagtgggtctagctggcctaatgaagcttggtcccttgggtggaaatccaaaggatcgagttttttggtgccggtcttgctgctgagctctgaggacttggaatttcctcttgagatgacctttttcttcttcctttgcccattccacctgcatggcattgttgcagaggtgtgagaagctgaggaagtcttggctggctaggatggtcttgagttctggtttgagccccatcaaaaagcgggccatctttttgactttggtgctgacgtcatccggtgcgtaacgggccaactctgtgaacttgtgcacgtactcactgacagatctttcgtcttgagttagttcccggaattcatctcccttgagttgaacgatcccttggggcacatggtgctctcggaaagcagtttcaaactctgcccaggtagcatctctgatggcaacattgaaggtatcccaccaggctaaggccattccggaaagttgatgagcggccagttgaacacgctgattttctgggcatccgatggcttccagcttccttttaatcatgcgcagctaatcatcagcatcgaggggattgctagatccggcaaacatgggaggcttgagcctcaggaaatctcccatcctgtcttttggtcttccaccattcggacgttgattttctagacttctagtgaggacctcgatgagtcgggtttggttggctagaacttgggctaaatctaagggtagttctggaggtgcggggaggtgggtctcacttccttctctaccggcttccctttcagctcttaggggaaaccctgctccaatcccggaggtggtaggcgtggttttatccgaagccatctaccaggggaagagagtcactattatgcacatgccaattcttttttttcaaccaagttattttattcattacaccaatacattacaagaatatagctactacaagtcgtactacacgcgagcattctctgaggtacttccgaactctttttctaaagtgtccccaaattccttgagaaggtcatcaaggctagctagggacatatcctcgatgt

SEQ ID NO: 56449 - DNA, 494 bp, Zea Mays
gatggagtgacccgagtagcgctatagatggccattgtagcatcggcggtagactcgagctcctcaggccatgcaaggtgggggacgacttctaatgattgaggatggcctttaggtgcccatagcgagggctcaggccatgcaagacgttgaggacaagactctcatccatgagataagccctaaggacacaaagagagtccgtcaacgtcttcatctgacgacaatactcggtgatagaaaggtcccctgaacaagttggtggaaggcagcctccaagtatagcttccaggcccagtagttgtcgcagaagtgagtgtcgagcgcgacccagacccgttgggcagtgttgtccagctcaccggtaatatcttgcagctcagcggtgatggtgccgaagatccaggtgagcaccacctggtccatccaaaacaaggactcagacgactcagtggtgacatagaggatgtggtcttcgagggcgtagatacgca

SEQ ID NO: 56450 - DNA, 815 bp, Zea Mays
attttttctgacagtgacttggatgaactttgggagctcttttgagaataatccagtgagtatctgagtgtggttactatagcaagatcaaagttgaattatagatcaacaactttgtcacaagaggataaacaagttatcacataaaaatttgagatctgggccctgaaacttgctctgtaagacgctctgatggtgatcaccatggtacagtgactaaataagatcacagtttcagccccctcactgccggtgatctcgcgcccggattcatgtcggcatcgtgattcacgcccggtcgaacgcggatgacgatcctcggtgaaaaatcatgcgctagggatgagcttgggacactgttccaccctggccgttgtacccacttgcctcacggtcggtccagatagcctcgccggagttggccgcctgccgcgcgatggccacgtgccttgaagctttaccacgtcgcagtaagccgctttagatagctggttcgtcgccggtaagcttgccacgatgaaagccacgcatcccttgcgccagtgatcttcttgctctccggacgccagcacgtcatgccaaaattaggagccaccgctctgggatactataaattgagcacacctccagctctgttaagtcatcacgaagccagggcacccgctacttcctccaattagccaccagagagttcgaatttctttgtctccccaaatcagttttccgcacccgtgaacaccgcgccggggccagacgtctacaggttagctcatgctcttctgcatgatgttctagcctctctcaagtcccctgat

SEQ ID NO: 56451 - DNA, 940 bp, Zea Mays
ccgctccgtccgtctcgctcgagcctgtctcaggtagataagacagtagcaactaaaaacagggagggaacacatgcatttaatgtgtgtacctaccccacgccacggaagcagagcaaactagctgataatatagcaatcacgtctagcgcaatagcatgattacgtctccgctatagtgcgcgcacgctacctgccatccctcgatgggacacctaatacgacaagagagcagactggccctcaggcgcaaaatctccacctcgcccaaagcagagttcggcccgcgggcacaacttctgcctcgcctgaccccgggcccagacttcgagtgatttctctgcctcgcccgatgataggttcggccctctagtgaattctccgcctcgcccgagcttggcctcggccacctgctcctccacgattcctgcagacggccactctgccaaactgtggcacacgtcacgggatggctcgtccaacacctcgagaagacttcttcctcgctcgagtagggttctgacctcgataagcgccgcagggaatcttggagtcgtcccacgcaaagatgctgatgcaccccgtaagaagcctttagcccatacccgggcgctgttacaacaactatggaatgggcagccactccacagggggcttgggtgtacgaacagtccctcggtctctgccttagctctcagcgggaaaccaacggacgcaagtcaacaacatagtgcaccgtcacatcggcttgcagggcgacaagacatctctccttcgaatacaacacccggcctcactgaggatgccccatttcatgtataaatagggcagtagagtccctccaaagggacaacaaaccatccagccagacaacaggacaatcagacaagcaacacaccaacgagcactcagttctccactcagtctactcgatcttaga

SEQ ID NO: 56452 - DNA, 520 bp, Zea Mays
ccatcagacgccgccaacggcgacggtgtcaaaaattgtctttgccgagactgccgaagccgaaggcgccgcaaccgaagctaccggagtggaaaccactgaagctgaaaccggcgaagccgaagctaccggggccgaagccgggaccaccgaagagtcgaacctagaaaccacacttgaggttattgacaatatactcctaaaaatggctgaagaagaagctgttgtggctgcggtgaacacggcaactgaaaaggggaaagagcatattgatgaaatttcggaagaaggagattttaacttttaagatttgcttggacaagagttaacagacgccgaaaaagaagagttgaaaaatatgccatatcttgcggatataaatcaggggctatgctatttggtggggtcaacgaagggaaactaagatgccttcggaaccgcaccgaggccaaaattgttagaaccctctccaaaagcattggcttgccgaagctagaagcggacatgtgccgttatcaac

SEQ ID NO: 56453 - DNA, 1349 bp, Zea Mays
aggcgcagaaccataccaggttcgcctggccatggaagggctatccacggcggcatagagattcaatttggggaaaccccgaattgcagcgctatggcggatgattggagatgagagtgggtgctttggcttggggataacctaacgaagctcacagaggcatctatttatagagatcgaccgtgtgcacgacgaatttgagcggtggatggctatcggtaagaaacaagatgagtcaccggcatggtgattcgtggccttcactgtggcgacctccccggcgatcatcggacatgaataatactggtgattgcgacatggtaattgctgaggcacgtggcgttcggtcgacgggcagccaactccggtgatgataatctcggccgaccgcgcggcaagtgggcatgacggccggaccagctagcgaccgaaacttatcccaccactgatcttttcaccccgccccagtgttatccactcctcatcgagcacgaatctcccaggtgaaacatggatcccgacgcgagctcaccggcgacgggtgcactgcacctatgatcttcttcagaccactgttcattctgaatctcccttcgaagttgcctgacaacccatgtttgagccacaattactccctgctctaggcagtaacacacctaccttcctttgacaaagttgtactccaatatatggtctccaaccttgtcacagagacccaagtcttaactccactggattagtcacaacttgactccaaagttgatccaatgtcactgatcatccaattttcagactgttttagtctgacagcccatctttgggtctaattatctcccaatttcttatgtaaccaaggcttaatccctatagcaaagttattgcccttttaaagctctacaaacttgatgtggtgacctagggcaaaatattcataacttggaagatatagagctccaaagttgagctaatcccactgaaattcagacttagcccataggtttcaaatatgacccttttgcaattaggtccaaatctcaaggtttaggttgcaactcttcataattgtgaaccatatgacttaagagaccttactttcatggtttttgcactttagtccaaaagtgcactaattttgcacttagccccctagggtttttgtttagggctttctagggttttatttaggtccattcctagtgacattttatgactctttcaattgagttttaaagttttctcctattcaagctttgtttggtctattaagcccaatctagggttaggtaccctactctagggttttatccacaaaatgtcatatcaatacaacttgtttgaaatttttgcct

SEQ ID NO: 56454 - DNA, 700 bp, Zea Mays
atgagctacaacccatcgacaaaagagcacctagtgatgctaaacccttcacactatcgcattagacaagcaaggatcagcctccactaatcatctatccagacgaaaccatagtttttaagcaaagcttattacaacgcctgaaaataaaagtgcagctacgaagctaacaagtcggatttaactagttcaccaaaaggacaacccatagattgagcgatagccaaccacagaaaatgcgccaaaatcacccttcatccagaaatgtggcaatctctcggacaccacccaaaagaccgacacatcacttcacttgctatctttctgattagccggcttacttagaccaccatctctttttccttctctctctgacaaatagcccaagaatccagccaaaaagcaacagagaaatattatgttagcaggatcaaggagaattttatcaccaaaaaaccaatcatttctggttctccagatagcccaacagctccacacctaaatatcattaaattggagattctgtctttagatttgttcagccatctgtcacaaagatccccaatgctttttggaatgaaatcaatatttaaggcaatttgaatcactctccatacaaatctagcaatggaacatttaaagaacaaatgttcaatcgattctagacctctacaaaaacaacattcactagagccatggc

SEQ ID NO: 56455 - DNA, 304 bp, Zea Mays
ctacttattaagtaagcaatagtagtctgcctctgacgtgttctgcctctgacgcgttctgccaacggctgttctgtctccgttagtcccgcgcaacaaaataaacaatacatgcacaagtttatgtgctacattctgttccgttccatctctctcaacgttccgtcccatctctcttagtgagcaacatagaatccacagctgcccttataagccatgttccattactctcaatggccaatgtggcactaataaaatagatggcacacacatgtggcagcggttcgtgcggcccaataatttt

SEQ ID NO: 56456 - DNA, 383 bp, Zea Mays
ttcggtttgccctgctcgcccctgtttgcggtcgcccttctggctggtggtgtcctttggcagatgcatcttcaagttgaattcggtctcggtctgtcatcttctccaggctgctcttggtgggctcgccaaggatttcgaagtgcttcagctggctgaccgcgtttttcgattttcggtttcctcgatggcggtgggttttcacatttataacttgggctccattgagcgtaaggagttcaaagcattcttcaacctctggaatcgtggtggacccaattggaagcatgaattcaggctttttttggatgaggaagctgcctcctggtcgatggtccgggtcaagaattctccgtcgtatgcggacgtggttaagctccctc

SEQ ID NO: 56457 - DNA, 402 bp, Zea Mays
gtccagtttccgagggtccaatttcggaaatagtttgcaccatggcggcctcgtcaaatttctttgaagatttaccctctgtgataggagcttcagcagaagcaggagtcaatgtcttcacagattccataacagcatccagcacgctggccattcttcttttccttggagttgttgcggggatgcttgatggcttcggcaattctattgtgcatggtggactcagtgcttttaacttctctgtcgccttctccagttttggctcttcagccggttttgtcctagcttcgactggcacagagcgacttggctctgcaataggagcggccctctcaattagcttcggcacgtcggccgtttcaatgcgcctgggccgatgtgtcaaaactttaaccttttttt

SEQ ID NO: 56458 - DNA, 381 bp, Zea Mays
gtttgtcacaatcgctggaaccagacctgaggtgctaggtctggaaagtctagaagaagtggctcgtagtttcgacgtcgacattaattcaatgacaatccatcattccttacctgaggacttcctgttgttcctccctgactaagaaacgacaaccatagtgctcaacgttggcaaggtatttaggggtcctcgtttcagtttactgttcaaaagatggtcaagattttcacatgtttcctcttcaaccttgcctcacttggtggatgtggagatccgaggaataccacaacatgtttggtttcgttcaactgcggaaatcatcctaaagattcttgtttcattgaagaaatccatccggacaccttgatgaagagggat

SEQ ID NO: 56459 - DNA, 655 bp, Zea Mays
gaagctggaaaaccgaagctgaaattcttagagtgaaactccccaagctggaatatcccatgttcaggtgtgacaaagagagtgtgtcccacatgtcaacacactaaaaaatggtctagtgactttgaagctgttcactttagattaaaggtagttgttcagactgtagtctatattgacaaaaccttacaatagaaatcgtttcggataaaatccaaacgaatggctcttttactgcagcctaatagacgggtcctcctggtatttgttttttagacttttagttgcacagagaagaaatttggaagcatctggtagacaaaatcactcgttcctggcctgataccttactaatttttgcattagctgtcgtaacaaactacgaatcgtgacatcacacgtatatattttgttcattagcatttagcagcaagctttcgccgctgccggcttcaaggagtggttaggttttgcatccttacgttggagggtaacgatatttttaatttgatgaccctgtcatccatggaccttatcacccgaatatatgatatatatatatacaatacacctcgacgatggctccaaaatgaatcgcgcggttgagccactacaaacaagagccagcgcaccggttttaaggttcttgctaggc

SEQ ID NO: 56460 - DNA, 1139 bp, Zea Mays
aaagatggcatacccaccggtactacgtcgaccatccaaattaccagcccaatctgtatctgaaaatgtgctaagtagcaatgatccatccttgataaaacgcaagccataatcaattgtgtcccggagataacgaagaatgtgtttaactgcagtccaatgcactgaagtagggcagccatatattgacaaacacaatttaccgagaacgaaatatatggtaaagtcagcgatagatactgaagtgctccggaaaaggatcccacaacactcctataccgagtggagtcctctggtgataaaggttctccattatctgttagagtaatcttttcagcggggaccatcggtgtaacaacaacactagcagcatgcatattagctcgggaaagatcatgaatgtatttgtgttgtgttaaagtgagactgtcgatatgatgatgtacttgaacactcaaaaatagctcaggggtccaagatcttttaccgcgaaatcatctctgagttgcccaagcaagcgatcaatggccaccgaagaggaactaatgatgattatatcataaacatatataataaaatagatcttgatgccacctttgttaaaaagaaacagagttatatctgcttttgaggccgaaaaatccaaggcaagtaatgtagtgcttagccgagagaaccatgcacgcggagcttgtttaaggccatacaatgacttatcaagtttgcaaatatactctagacagcacaatcctcaaaaccaggtggttgcttcgtatagacgtcttcatcaaggaaaccatgaaggaaggcattttgaatatcgatttgctgaataacccagccacaagagacaaccaatgatagaagaagtggaaatgtagtgggctttacaaccaaactgaaggtgtcatcataatccacaccatattgctgcttgaatcgtctagcaaccagtcgagccttatagcgatcaatcgggccattaggtttctgctttattttgaagacccatttgcaatcgaccacattcaagccaggtcgaggaggaacaaggtaccaagtagcatttttaatgagagcacaatactcatcatcatccatagccctctccaaaaaggttcattaagagcaacaatgtg

SEQ ID NO: 56461 - DNA, 1151 bp, Zea Mays
ttctccgcaaccacatctgatataagtttgtcaacttccaacattgtggctgtgagttcttcagcttcggcttcgccagcatcttcaatatccataggaattgctgctttcaccgccgaagatgaaggcggcgtttgctcaatcgcttgcattacgttcacaatccgccgtttcttttgccctccaaccttctcctccgcagccgaaggcactttcatcttctgtaaaaggttggtcaattccgatcccagaggacttatcagcttgaatggtggggatttagtcattaccttcaacattttgaccacctcgactgcagtgggtgacgaagggctcaaggtttccttcgacgcttcatctaccttcggttcaacataaggtatctcatcaagtttccttttcttaggggcttgcgccttcggctccggcgttgctttcactttcttcagagccttttcgtccgccttcacggacaaggcagcttccctgctcagaatgctgacaactcttttttctcttcacccccctgggcccttcatcaagtctttcatagtctggatactcgaaattcagtgcatccattacccgattcgccttcgtttcgcccgggtgctgaaggcagcagtcatcaggttatcctctttcttcgtgtaattgccgagaatctcattgcacatagtttcaatcatttctagccattcaatgcatggtttcttgaattgcttctcaaatttgaaatggtaggggagtcgaacaagttcgtatttctttcctccttcctttttcttcggcatcccccaaccactaaaggtcggaaaagtcttgtttgccaggtattcctgtactaaacctttggtgctaatttcggcagccaccactctgaattcaacctcggccagctggcacggggagccgagttgcatatggcacaatggccttgtcatcccaaagcttaatctcataggactcataaccatggtcataaatttttccctcttcttctcgtcagcttttatgtagaaccactcatttgtccacccagtcggccacttggtgcggtagccgattaccggggctttggtgtcctttcggtacgcgaagttatagcatccaaagtttttgtgatggccatccgccctggccttcgtctg

SEQ ID NO: 56462 - DNA, 304 bp, Zea Mays
tgaacttggaatcttctttagttactatactatggtgaattccattcagttggtctgacagagctcctttgagggcaattcgtgccagattttgtgtagtgacccgaccaacactctgtatcaaagttgtagcgctacaaaccatcttcactttttctatagcatcactaatcagatccccactggatcatgcttagaattgagctctaagttcatgcaatcccactgttagtctgacttcagactttaagtagtctaacagcacgactttgggcacctttttctccaaatttctcataacaac

SEQ ID NO: 56463 - DNA, 777 bp, Zea Mays
caaaggtaactgcatcaccaaaatcaatgtactcggcttgctggctagcatgggaccaaaatatgcttaaaatcttcccttctttgtccagttgaaagtctgaaaaaaattgtggattatctttcttgcataatgaaaaaaagataatagctttgacacatcatttgcatttctttccctttgccatgcttttttcctgtcaaaaaatgtaatgattatgcactatatctaatttaacacattacgcttgtttcggtaatatataataccattattgtcaatgcataatacacttacaggttactcatgtcctgcacggttattggaacgttttctggaccaccatgcatctctgaaacaaaatccataatgcaatgttgtggaatcctgctttcttgcatcgcactaaggaactccatatattcacgatcatgcgttttgttgcattgtaattgccctttttctgtatctttcttcaagaattcatgattatgctcatagtttaccagatcaattcggactgaaataacattctctttagcatcatcgtagatttttttaagtttcatcccagctttgcactgtgttcgttttgaacatgtgttatgtatccttggatttccagctaccctttcagcattctttccttccattgaacaattcaaccatttacaattcttctgctccctatatttcttcaacggaaatccaacctcgtatgcatattgactataaaaattatacgcctcgtccacgttactaaatgtcataccgact

SEQ ID NO: 56464 - DNA, 539 bp, Zea Mays
gttgggtgctgagcaggcgtagtagctggctgtgtgggcgctggaatccacagggcagtagctgggcgggagaaccagtcaaagatcgtggggcgagcctagagtgtcagcgtggagggtatgtgtggtctggtggttacaccaaatttcaaatgtttggatcaaaagtgctcgtagcatataagacaaggtcgtttatatgcctggataaccagtcagagagttgtgtgggcgctggaatccacagggcagtagttgggcgggagaatcagtcagatagcgtggggcgagtctagagtgtcagcgtggagggtatgtgtggtctggtggttacaccaaatttcaaatgtttggagcaaaagtgttcatagcatatatcgacaatgtcgtttatatgcctggagaactacttagagagcatggggcgaaactagagtgtcagtgtggagagtatgtgtggtctggtgtctcaaatgttttgagcaaaagtgctcgtagcatatatcgacaaggtcgtttatatgcctttttagtttcct

SEQ ID NO: 56465 - DNA, 374 bp, Zea Mays
caacaaagagcgaggatgagagagttgtggggtgcacaaaaccacctatctaaggactggaaccccagccccgtcaaaaccgctggtacatgggctcagcaaacccgcgaacatgcctcctaaacatgcatacggagagcccatgtcatctttgcttgtgggccgtttgtcccgtgaataccaaccggtttgggtgatctcagatgaggccttaggctctgtttgggaatataggtaatagccacctcggccagttatcatcggtgggggcaaaacctgcaatacatctcccctatctagtgctgcccagtggggcttgactgccctatgaccatttgggtgtcttgtgatcgttctaatacatgtgtgttcaa

SEQ ID NO: 56466 - DNA, 893 bp, Zea Mays
ataccattgtattgttgttactcttggctgagctggtattctgaaggagttaatcaagattattgagtatatgatatgagacagaagccctcaaaatgagtaatgaagatgtggcacaaggattgggatccttcattggagcctgatgtacttgtttataacttggtgaggattgcctcttgcccttttatttttttctttttacctaatttcctatttgcagtaatattttccttaaaatatatttgtcttgtcccttgatgttgttggtgttcagtgcacatgttctgtcacagcagtggaaaggcgtattttgggtgttctagcaaatgagaattggtggtttaccatctgcagctacaggagcaacatttgggttggacatggaagtaagcttcattttttgtaaacaaaaaactacaaaccgactaaaagctttatgctgcttgcattgcagtcttgctgggttgtgttgttgctacttgttggagcgatactacatctgctaaggaggatgacagagtgtggtgaagtgctgcctggaatacgcatgtagtgtggtgagtggagacatgctgtgtgcactctacgaagcagggttgtgctgtatttttgaatcatttaaatatttggttcctttactcttatctttacaattgtgtgcctagcattggaatggacacaatatttaccttggtgtatgatgtgtcaatttttggcttgctatttcttttgatgctctttctagaggtttgaccattgtcgcgtctcatggtctccaagcccctctacaacagccccagtcaacccctccgctttcgtccagttcaattgacactttatttaaagttgcattgccatatacatcctccttttctattgtacggtgtcac

SEQ ID NO: 56467 - DNA, 297 bp, Zea Mays
ctcgacgccaatcaatcaaagtttaccaaagtcccaccaccagaacactccgttgctccgaagaatgccgccgtatgcaccctctctgtcgatctgcttctctatccccgttcggcctaatctcaatcatgtacctagttcctggtgaacccgtaaagccttcccaaccttcaattttagctttgatcccattaatcatctggaacgctatctccagggtcggtccgccaccgtgacatgaacaagcttcaaattaggtcaaatctctaaaattaaatgagggcttttgctctgacc

SEQ ID NO: 56468 - DNA, 350 bp, Zea Mays
ccaggatatcacactggtggggcagcgaaccagtctggtgcacacgaggaaagaacagtttttgctggtttttatcaatggctaattgaggggtttggggctgtaaataccccactaacaggaaaattacaagaaacaagagttgtgcaaacattctcatacactagtgcaacacctccgcttcatcccaagagatcaaagtgcctcaattgagtataaatattcttactagtgaaagagaaggctagtgtgcttgtgtgatctgagtcttggtgttgtgttgtgctctggtgctattgtgttttgtattatcttgtaaaggctagcaagagtctccgagtttgtggagt

SEQ ID NO: 56469 - DNA, 368 bp, Zea Mays
cgacaaacaagtcctaatgctcgaaataagaggaaagaagcacgactttatactcaaatacccaaatgttcaggcctcagtagccacaaagaacaaacacacatacttagggtaactatggtatctagacttagacgtcggcagcgccctcggcggttttcccgaccttcggcagatgtcttagtacttgaagcagttacattttgctctcaggcaaataccattacaaacgggactccagctccattccctaaggaatgaactacctccacaccagaggggctgcgagataacaaattccaagcagctcgtcggcgaccacaacaccaacagcgacaacgacctccacctcgggcggctagacagca

SEQ ID NO: 56470 - DNA, 305 bp, Zea Mays
atgtcactaagtgcaaagaatacattgtgttagcaactcctccagctaagtctcagatggaacagttcaagaaggcgcatgcacagtttctgcaagcaacctctcaagtggtagctagactccaacaagttgatttaacagaatttatagcacatgagcagactaccggtaaccatatgacatcaaccacaacatcaccctcgatagttgacttagaaaagttgttacaggcacaagctctgataatacagaaagcatctcaactcacctcctcataccaacaagtgttggcaagtcgaaacgtc

SEQ ID NO: 56471 - DNA, 587 bp, Zea Mays
ggcaacttaacaccagcatcgtccgaggcagcagcaacggacgactccacaagatcaaggtatgaattttcaacaggcacagggccttgctgcatccatacctcctgaagttctgatccaccccaacgtatgtacctagagctgcaggttttcgtgtcttctttatcaacaactcacagcagccaacaacttccatttacatcaaagcaacagtgcccagcgccacttcagtgcggcagcaatggcattggcgtcctgagtggtggctgcaatgggcatactgagcccaaactacctcaccgatagccaacagctgctgacatttttaatggaaccaacctctccacacctccagcatgggacaccaaatacttcactcggagatttatcaactgcgatgaagcaaacatctacaggtcttccaggctgcaagaattcgaaacaacacagcgcatgtactagctaatcaagcttatcactacacatctatgtacactcagcatacgagggcttcttgctccaatcaggctcatgtaaacagctgtcccttggcctcgtttggttgcaccgggatcagagagggctga

SEQ ID NO: 56472 - DNA, 722 bp, Zea Mays
cggagggaaattaaggcttgattctgattcgtaaaactagttggttatggtcttctcttcctgttttccccttaattacatgctagcttgctgtcgttgttcttgatggtgtcgttgccacgggtggagtagataattaagacgatgagaggtatagctagcgcggtggtgatcgccatgaggacgaaggataatgagatgttaatcgctgtggatctcaatcatcatatattcgttgttagtggtatataagatctttccttttcctgctgctttaacgtgaaatctatgtcgttagggtttcgtagattcgttggttgataggtttaggcgcttctagctagctaatctcgtaatcaggccctcatattttcccggattgcacatcgtaatcaggccctcatattttccctcatattttcccggttgataggtttaggcgcttctagctagctaatcgtacgtgttggatgctgtttatggctggttttatgtatcaaaaatcatgaaaaaaaatatatattcaagtatcagtatctttttatcgatcggcgtcaactaattaagatcacatttatatatatatagcacttttatatatgtatggtggttgtttgataatgaatctgcgttgtctgaattgtggacaagctaagataaatgcagtcagatttactgtagcttgactccttgagtccactttaccggtagcgcttgatcac

SEQ ID NO: 56473 - DNA, 341 bp, Zea Mays
gtcaaattagctagaattaagggttaaattttaaacatttagattttagttaactaaagttaaatgtggaacttcaaaccatcttagctcacctgtgaaattttagttaactgaagttaagtatgttgaactttaaaccaccatcttagctcacttgcgaagtgggaatggcagggggtagcagtggcatggcaggagaccagtagtggtatggctggcacacgtcgaagcgagaaaatgggcgaagtgataagaaagggatctgatagacgacagtggaagaaaacattaagcactcacatatgggtccataagttaggccgtatattagggaactacag

SEQ ID NO: 56474 - DNA, 448 bp, Zea Mays
agaaaaaggaaaaacatgaacagggttgggctgaatctggcccgagccggcccagcatcggaagaacgcacccgcgcgcgcgtgcccacgtgctgactttgcaaagaagaccctgaccttttaaacaactcgaaagagtccgcaacactatttgtttcagtagctgacgtttgcaaataaaccctcatgcttttatttcttcacaatccgaggtccccgacgtcgcacgacgaagaaccaagctcctgcgaacctgtaccagccaagataagcaatgggcggtgccctaactttgttgaaccctaattcaacacctaatgagcgtttcccctcgatcaatttcagagttcgagctctaaatcactctgtccacggaggcagtgcaaaccacgggtgagcatgggtgttcccgacgatctagcgtgttctagtttaattgaatgggtcg

SEQ ID NO: 56475 - DNA, 944 bp, Zea Mays
aaaaatagtgagattgtttgctggccaaagcccatggttttttcccttttgtgttggagtgttttccacgttaaatctgtgtcttcactgtgtttgatctactttgtgtcgtactgattcataacaagtggtaccgaagcaagttcttgtgatctgtgtgctaaggcttcctgtctcggcacacgtgtgtcgacgataatgaagtacgatcttccgctactggatctcgacactcgtttctcactgcgtcaagtgaagatgcagacgattctcttgaagtctgatcgcgacctagatgatgccctagacgggtttggcaagaaaaacatcaggacatggactgatgagaagaggtgcaaggatcgtaaggcgctggcacatattcaccttcatttgtctaacaatatctgcaagaggttttgacagagaaccaccgatgcgttgtggttgaagctgttggcgccggctgccgaaatggctacgccgacggcgattagcacctatcggcgatcttacaaactcgctctcgctgtcatcactctggaacgcgaatgctgggaacacgggaacagttttacaccgcaccaagtagcaaccttttccctgacttgctttttctgttttattttgatcgatgtttacactgtcttcacgatccgctatccccgccacgccatgcatgttgtgacgtgcccgcctgaatcgtgggaccgtttttcatccggcgtggtggtggacttagtcaccaccttgtgaacgcagcacaagtcatggcacatacatcgtttgatacatcatgcaacagctaactatgactagaatgtaaacgtgctcatgcaattaatctatttacatcatgtccaagtgtgcacgagattgagtttaacatttcaccccctaatcccgctgcacctcgacaacgcctagctgttgacgaagctcca

SEQ ID NO: 56476 - DNA, 400 bp, Zea Mays
gtttatgtgaaaagtgtatttgttttatgcaatgtgatgggattcatgattatatagggaatatatttattgatgtgacgagtagtttagaaaatgctagttgcatggaggatgtattgttaagacataagtgacagagttcacatattagtggtcgcgccacattgattgaagtatctcgagtgcacgccacaatatggttgtatgcgagacagggttatgtgcatgatgagtttagtaaaaatccatcggtgtcactggtgttaagttgaagtttatttgcgcgaggaaagaaataatgtgtttaatacttagaactcttagtcgatagtagaaattgttttggcttatatagagaggtggtgacatgccaaagtagtcattgcttcctctatatctt

SEQ ID NO: 56477 - DNA, 486 bp, Zea Mays
aatccgtgccggtaccgtccttgccattagatcgagggtatacatgcatgcagcatacggtgtttggcaaacaatcaggtgctggtattggtaaccaaggtgatggtttgatggatgaggtgcgtgggaagaactgcacgctagtggtttctcttccaagtttcaatgtactatacaaataaaaaatgagattctatcgtgtggaaaggacccggccggcaggccacagtgacctacctaccagggagctattaatgaagatgctctaccatcattaactgctaatgattagcttatgacaaagttaacacgcctcaccgcgcgcatatgcatgcagtcggggtaacatgcagttcatcacgccggccggcttctctcgtgaggcacgcgcgcgtacggcggctcagcatatgttcaccgcgaatcacgtacggatcgacgataccaaatgcatgcagcgccaacgcatggttgccgttgatcgat

SEQ ID NO: 56478 - DNA, 479 bp, Zea Mays
ggcaagccgacgtatatgctgtctagcgggttgtgttgttgctctggttaatcaacttgttagatggccttagttaagctcgtaatcccggtgatttgcttgttttggtctagatacgcatgattatggtcgtgggtaaaaagtagtagtgctcatgtgatgtctaatttaaaacgcaaattattgggtgatcatcgtgaagaatgcgttgttaattggttgtagtaattttagtgcactaaatgatttggataaaatttgtaagcctacttgctagtcctcatttaattaatttaactctaagaagtggtaaagtgctagaatgattcaagtctctagaatgcggtaattcttgaattatatagaagctagaatttattgattgttgttttgggctgcacgcattgttctcgttgtgttgtttgtttgataaatgaaatcatgttttttatagaaaaatcatatagaagagttgtaga

SEQ ID NO: 56479 - DNA, 611 bp, Zea Mays
gttagtcatggtgaaccctgagtggagatgtgcgttgatgtggtggagtgttgaggacgatgccgtgaggatgatgttattcatgtacaaaagtaggtaggtggctcgatctccatatatgtaaacaatgagagacgcttcagacttggaagtggtgaagttgattgttagacaaaggtatatgatgtaggaaaatctgatgtcttccattgagcccttaagcgtttatatagagtacatgacgtgggagataagacaatccacaaatacatatggtagtctatgagacacaatatctagactatcaaatatactctaaaacatatggcaggcaattagacataatctgcctactgaccgggcaccagatcctgatggttttactaattttacaaatcctgttgggtggtcatcaaatctgatcttatggctgcaatcatctccttacaacaaggtgatacccgaaaattggagctgttggattctaccttcctaacacatccccaataaggctaatgtcatgatggccaaagactttcgacccatcgacctagtgcatagcttcgctaaaccagtcactaagatgatggctaatcgcttgtccttggatt

SEQ ID NO: 56480 - DNA, 450 bp, Zea Mays
atgatttacactaaaattcatacccatttacgctgttttggttcacattttacgctgaaatccgcctgagctcccacacacgattgactccatatcttctgttccgatatataaagtaacttccagcttcgtgggcgcgctaatcacggtgctgtgtggacccacctgaatgaaccaatgaaagatttgttgccgctctcctggtatgcaagtctgaaccattaaatatgctagcataaacacgagtaggaaccaactacctgaccagcgaacacgatgttggcccaccttcgtccatcccaactcgacccaaccacgtgcgcaccttgtgtttacgcaaaacataacatatgtttacacatgcataaacgtgccccacaatcacgcggacgcacgcgccccactggcccgacctgaccatgcgcgtgaccactaccctggctggggctt

SEQ ID NO: 56481 - DNA, 480 bp, Zea Mays
gcaattgaacaagttcatatttcttctttgttccctttagcttcggcataccccagtcacttgacgtcagagatgtcctgttggccaggtattcttgcaccaggtctctggtgctgatttgttcagccaccaccctgaattctactgcggccagttggcatggtgaccctaactgcatgttgcacaggggtatggtcattccgaagcttaaagtcagcgggctcatgaccatcgtcatcagtttccccctcttcttctcatcggccttgatataaaaccattcactcttccagctggttggccacttggtgcgataactgagaactggagccttcgtatccttgtgatacgcaaaattgtagcaaccaaaaatttcatgtaaaccgtctgccctggcctttgtttggtagtgcaactcgtgcactcggcagaatgcttcggcatctgggtccatcccttggcttcggagggcccagatga

SEQ ID NO: 56482 - DNA, 561 bp, Zea Mays
gttcttcagcgctctgtgtaattgaagcagcctgccttgcttcggcagttgaagaggctccttcgccaaatttaggcaccacagccggttcaatgtaacgtggtcggctggtcaaaaccttcatctttttgcccttcggctcagctgcaatagccgaagcggcagtcttcctcttcttcttttgccctcgtagcggataatggtaatcggggtatatggagccaatcgcatcaaagaccctgttcagtcttttcttccccagcctccgaaggctgcggacaaagcattatcttcagccttggaataagctccaagtagctcatcactggtagcttcaatacacttcagccagtcgtcgtttggctcatcgaacttctccctaaacctgaaggtatacttcagtcggaccagaccaccatcactagaatcggtggtggtctccttcggcatatcccagctttccacaagtggccataccctgaaggatatatgctcttgaatcagatcccttgtgccaatgaaggcgcacacagtgctaaaagccctctggcatgcttcaat

SEQ ID NO: 56483 - DNA, 330 bp, Zea Mays
acattgtctatagataaaaccgataaagcaacgtcatgatcatcggagagaagagtatgagaacgatcataatgagatatgagacagatccatatttaatacttgagagtgggttatagaagataacaagatgacggggtagatctcgatgaatgatccagagattcgtatgataaagccacaacatgattcacagggaaaagattaccagatttaggtgaaaaagagaggtcatcaacccagatggcttctaggttgagcagaggagaatttaaagaggcttctggacaagatttccaaaaagaatttgagactggatattgttttgcg

SEQ ID NO: 56484 - DNA, 803 bp, Zea Mays
gtgacaggttctgtatcctatggaatgattaatattctagaatcattattttctctttccacctaatgatgtagttggaggatcatcaatagctatatcttcctcgtcatcataatcctcatcttcattatcttcgtcgtctgaatttccaggaggtatattataggtgtcacgtggctgcattttaacaaccaagtgccaacctttgatcagattgtctttgacgaaaaagacttgagaagcttggctagctaatacaaatggctcatttgtccgaagtagacatttaaagttcacactaacatgtccataaacatccttctttatccctctttttttattgaatatgtcaacccacttgcaacgaaataatggcacacgtcttcccccaagaaattgaagctctattatctcttgttaatatgccataatattctgcattctcactaattgtacttccctctgccgaaacaacaactctgctgttctgtgtgcaccgatttttgtcacgactctctatgcgaattctgaatccattaatatcataacctgcaaaacatgtactgttttgcaaagggcccctagataaggacagaaggtcttccatttgctcacttttatcatgttcatacaaattatgtatctgtaaagaaggcacataaattacttaatcagctataggaagaaaacaataagatatgaaaatatcactatatgagttaactgacaatacttataccttattcataaaccatggaatgaaatttttggcccaggtggatgtatattgtggcaatgaagac

SEQ ID NO: 56485 - DNA, 298 bp, Zea Mays
caggggcagcccaaggcgaggtgcttggccggatgtaacctttctctgacaactcatcaatctgcttcttaagctcaactaactctggtccgggtatcctgtaagctctcttaaagatgggagcgatgccaggaagaagctatatagcaaactcaacgttccgctctggtggcatacctggtaagtcctttggaaacacatctgggaattcggacacaaccttgatactctcaattgggtctgcttcactgctatcaacaaccatctgataacaacttcctttctttggctcaggcgg

SEQ ID NO: 56486 - DNA, 969 bp, Zea Mays
gttattcactaagaagcacaattgcagtatgaagtgagaagaagcaacattcctagaatatatccattttgaactggagctgaaggaataaacgatgggcacatctgcatgtctataagaatcaaggaggcagacatagatccgaggtgtttgcatttggaggatgggatcataagaagatgattgtttttgtggtcgttcttgccccatgatgagcacaaactgagtagaagtgcaagaaccagcgagcttgaagcaaaccctagcatggaggacatacatttcgaagagtcatctggccgactttgcacatccatgagcgggagtggaggcggggcgcacgaagcatgaggctagatggaaatcgtaatgccaagcgacacacagatagaagggttttcgtacctcaatgaatcagcgagaagatgaagattgggtgcgccgatgaggaaagcaggcagacaccttgctgtgaaactcgcgggcgaggatggcgcactgaacggaggccgtcgacgacggcgctctcaccgacggagacgatgataactccccttttctatttgacgacggcgcgaccacttaccggaaagttcgtctggtttggggaggcagcgcactcaagaacaatacaccctgagaagtgagaaggcaagacatctgcttttttcaggagccatgaccgttggatgtgtatcttgcgagtgatattaaagcggaagacgtggccacatgagattcacgctttgtagctttaatatatagaaatagaatggcaatccaacagagggtaagaaaagtgtgatgtggcaaaacaggctgcaagctttgcgtcgtcgttgaaaaatgtattgtgggattagaagcttttactagactctacaaaatagtagagggaaattagattgggtacaaaaagatggtacataatagttgcgctagttttactttcgaattactggaaccaat

SEQ ID NO: 56487 - DNA, 313 bp, Zea Mays
ttctccagttttgcttgcctttgggtgcattgcttgcttttgatcaatccttttgatagcttcaactggataccactattgttcattagatcaccattccatttatccttccaagccatgtgcttagttatcccacttaggtctctaattaaaatccacttgtttgattgatctgagtgtcgtgaactcaatttaaatgtaaaccttgactacatatttgagtacattttctttctaccatttgatcttcaattttcattaagtgtttagtcttgatcttcacttggagtaccatttatgccaaatatatcat

SEQ ID NO: 56488 - DNA, 465 bp, Zea Mays
ccgccccatccgcctaacacgctagccggtagtctcctagccaaaggctagggtttgattccccagagtactttgtgatgttgatgggaggcccaaagcgttgcggtactgttgcccgaaggatgtgacggctaaaacttgaagtcctgatagtggggggctcagacttcggtccttatcagggttgaagcggctcccgcggcgccaattgtacagatggtcattgtctggctccttccgcattccctcactattgccttggtcaggcacactttgcgcccttccgtctgaggtgctggaggggtgaggcccacgccgtgtcttcctcgggcgcaagcggttacccgtccaggcatcatttctcgctggtgtagatgtggtatactagtcagcccctggctcctgatgtggcgacatggaactcttgggctcctgctacgcggcgaggctgatgttggatcggtg

SEQ ID NO: 56489 - DNA, 770 bp, Zea Mays
tatgagggtgtagtggcctgactgccttgcgatgcgttctgctgcggctttatcatccggttcctcttcattctttatatacccgatgataggctccctccagtcattagagtctgactctggctggctcaaaacattgcattcttctgcttgatctgaggaaatgctcgggcgtggcacctcctagacgaaaactctaggtgggacctgagttcgactggatcctagttttgacaacgtgtctgctgcctcgttgcgatccctttccacgtgatgaaattccagcccttcaaatttgtcttccagttttcggacagctgtacagtacttgcccatagaatcattcgagcaatcccattctttatttatctgacttatgaccactagtgaatctccgtataccattaacctcttaatgcccagcgatatggcaatgttcaatccgtggatcaaagcttcatattctgctgcattgttggatgctgaaaataacaactgaagagcatatttgagttgttcacctccaggggcaatgaagaggatccctaagcctgctccctgcagtttcagcgaaccatcaaagtacatccaccacacttctggagcctctgggttatctggtacttgttgcttggtccactctgatacgaagtcaactagcgcttgagtctttatcgcagtgcgaggtcgaaactcaatgtcgtgagctcccaactcgcaggcccacttagctattcttccaatggcttctttgttgtggagaatatccc

SEQ ID NO: 56490 - DNA, 605 bp, Zea Mays
ccaacgggaagcttcgaatgtgcatcgactacaccagcctgaataaggcatgtcccaaggacccgtatccactaccgcgtatagatcagattgtggactctacttcggggtgcgacctcttgtccttcttggacgcttactctggtttccaccaaatccggatggctaaggaggataggaggcataccgcttttgtgacagtagatggactatattgttatgttgtaatgccctacggtctgcggaatgccctgccaacttttgttcgggcaatgagcaagaccttcggggacctgattcgagataaggtggagatttacgtcgatgacatcgtggtcaagactagggaagggtcgactatagtggaagacctgaccctggttttcggcaagctatgggcaacccgcaccaagctaaacccggagaaatgcatcttcggtgtctccgcagggaagttgttgggattcctagtttcataccgaggcattgaagctaacccggagaaaatcaaggctattgaggtaatgaggcctcctgctcgtattaaggacatccagaagcttaccgggtcgctagcagcccttagccgcttcatttcgaggttg

SEQ ID NO: 56491 - DNA, 538 bp, Zea Mays
ccccacagccaatcctgacgtggacgagtcaacctccaaggaccttatcgacggagatcgtgttatttccctagagacactgaacaaataccaaacgtagacgaaggcatggtgcgacaacactatcatccctaaagaattccaagaaggagacttagtcctcaccagaactaccagaacagaatcccggggcaagctcgaacccaaatgggaagggcccttcatcgtcaagaccaaaacatcccccaacgcctacaggctcacttcaccatccggcaaagacttagagcacttgtggaatgtggataacttatgcaaattcttcgtctagtcccaaggccttcgcgcctttgtaatttttgcaaacaatatctcagtcaggcctgcactcttttcctcacagggggtgaggtttttaacgaggcgaagccatgtaataaattgccgcaaaaatccccccaagaaaaacaaaagtccaaaacggcattgcggccgccgatgtccaaaaatatcgcagaaccggtcttcggcattcgac

SEQ ID NO: 56492 - DNA, 422 bp, Zea Mays
gaagatggtcccttgcataccgggattcaggagccctcgggagaagtaagaccggtcagtcggggcttcactaacccgaaaaactctgttgtccacctcgcccactaaggagtggacacggatcacttggaagaaggaaataaacatcccgagtcagggaaggaaaacacgtcaagccacctttccgatacatccgccctcaaaggatgatgggaagaagaacaccatcgtgacaactcctttctaccccaacatcctcttcatccaagggagattggagtcagcgcccatctccgacgatgagcgtaccgtgcaaggggaggaacctctccagtgtgattcccggcgacaaagaaacagatgccagaacgtgcggcgacatcatgaagccggggaacgggatctagcgcagcccgtgtccc

SEQ ID NO: 56493 - DNA, 420 bp, Zea Mays
gaaggacgctctagagaagaacgtttctgatgccgaaggtaatactgatggagatgatgccaaagatgatgttggtatcttaagtccaagcaaacctagtcacattaattttggtaggtccaccatgaaacctgatgacttggttttaatgaagaagcttggttatgttggaaggaacaatgatgacttggtaagattcacatgtgatgagattattctagagccaaaggatgatgaagtagtagtgttcaagagcttcttccatgtcaggctttgattcccgttgtacgagatgattgctgaagtattgaaaagatttgagatatatcttcatcagatgacaccaaacgctatagttagaattagtgtctacatatgggctctttgaatccagggcatcagcgtaaatgtcgaaggctt

SEQ ID NO: 56494 - DNA, 563 bp, Zea Mays
aagatgctccgaagtcgttactaaggcaatgtagagctaaagttttatcagcaagcaaaggtgagaaagctctgaagtcgttcctaagggaatgcagagccgtggtctaaaggaaaagctcggaagtcgatactaagggaatgcagagctacgctttgttccgggtgaaaagaagggaatatgtttttcgcctctggctcaaaataccaataaaagttagtttcacacgcaacaaagcacataaacataagtagaaaaaataatgaagagccaagcattatagtacaaaaagtaaggcattaaattacaagaaagcaacatttcaactacactaagagtttgttttacaatcaagtctctccaacctaacgaccaaactaggcttcagtctccttacttcacttcgttttcttcgttttcctcaactccttgttctacaggaaaagaaacaaaagagacatggtaactaactagaaatatccataaacaaagctttcgaagcacaagtttaaagacgaaccttcctggtgtattcttcggcctccgaagcagccagatgtcgg

SEQ ID NO: 56495 - DNA, 281 bp, Zea Mays
tcaggtggcatgcctggtaactcttcagggaatacatcagggaattctgacacaatcctaattgcctcaatcggattggactccttgtcatctactgataaatggtgacaggctccttctagttcaggtaagtacagcttggttactatttcctttctggatggggacaccaacttaactgttctcttatcacaactgacagtggcttgatttctgtgtagccaattcatccctaggatgacatctaacccttgagttcccatgactggctagctgggaag

SEQ ID NO: 56496 - DNA, 290 bp, Zea Mays
ttataggctattactagaaattcatcatcgactacaactaggttgtagcaccattgacgaccttgatgaaacacatggagttacattggatagactaagcagaggaggtcttcaagcatctcaaataggccctaataaccaccccttgttatagatgctagactttagtgccgcttcattatcgatagctacacatcaggcatagggttccatgcgatgctgcatgatcatagtgatagaccgcttacctgcaatgatgactggtgccgaaattcgtcaacagatagatg

SEQ ID NO: 56497 - DNA, 852 bp, Zea Mays
ctgggcgtcaatatctgaagaactcaggggctcaggcgcaagattaccgagactcagtgaatagttccactggacggcgggttgattcctagattttctagggtctcttctgcaaaccggtaaagtgaaggggtacgggcgaaactgagccgcccgatcagaaacggagggctcagattagatctgggttccgcatgaaccggtacgcaatgcaggccctcggatccaagatccatggccagggaacacacaccctcacatccatccgatcccgatcggatggctctcgcgaatttggccgaatcgttatctcacttctaatcaggaccgttcgccgtgcatccaacggcgcccggacaccccccttctcctcctaccccacgacggcggcgcataccacccactcggcggagcatcgccggaggaacacaatccccggcaatatcgtaccaaattcccgaacccgaggttctaagcgtaactaaattgatgatgaatcgaagggagcaattcttacaggcgcggacaactcacactgatcgataggcgttgtggtgtggacgaacggctgtgctcccgctccggtgagagattcccggacttccgatgcgcagcgcaccccgattccgagggatataccctcccggacgtccctccttttgcctagatggcttcacgggttcacgccgacgacgcacgccagaatcgactacggcggcggtggaacaatggtgcggtgaagttcgattatggctacgcgggttctaggtcacgggaaccaaggcgaccgagcggggcactatatgggcgcgacgcggccgaggtgtttcaatggccgaagccggaatccgc

SEQ ID NO: 56498 - DNA, 311 bp, Zea Mays
ctctagtgacggtcttgctgctgagctcggagaacctgaaatttcctcttgaggtgccctttttcttcctcttttgccctttccacttggatggctttgttggagaggtgagagaagttgaggaaatattggctggcgaggatggtcttaagctcgggtcttagccctttcagaaaacgggccatcttcctggactcggtgctgacatcgtcaggcacgtaacgggccaactctgtgaacttgtgaacgtactcactgacggtccttccaccttgtgttagttcccggaactcatcttccttgagttgaac

SEQ ID NO: 56499 - DNA, 463 bp, Zea Mays
gtcaaaatattttggccgctcagagctatcagaagagttatgctgatgtgaggaggcgagactcggaatttacagtgggtgatcaagtccttctgagggtatcacctactaaaggagttgttcggttcggtgtctccgaaaagcttagcccgagatacattggaccgttccctatcttggcccgggtgggcagcttggcttatcgcttgcaattgccggattccatggcaggggtacacccggtatttcatgtctctatgttgaggaagtttttgcgagatccggaccatcaaatcgagatggaaccgattgctgtgcagcaggatctgactttggagtgtcgtctggtgcgtattttggagtcctcaaagcgtgtcatgagaaggagatcaattaaatatgttaaggtcttgtggactaatcagtctgagcgcgaggctacttgggaacttgaggagctgat

SEQ ID NO: 56500 - DNA, 513 bp, Zea Mays
tggagtataacatacgatattgcatatgccatggctagaaagagaagaaaggtctcgcagtggttaaagctatactcagggcgtattacgggtagacgcataactagccattacgtgctctagttccgcttagttccaataataaggattagtcacatgcgctaatagaatcataaccattactacattgacaactcgttatgttcatgttaagagaaagaatgaacttagccactacatttcatgtagttatactaactgatatttaatataggtgtaaagatagttattatctaagcataattaacccacgcctagttattgccgcttcttgatacagttcaatgggtactagcacatttaaatggtgaagagcatcgtcgcacgacaattcgcacacaaaaagtaaatgactaagcgtgacgtttaagtgttgcacgagcgaacaggctacgtgagcgagtgaacgaggccgcggaccgctgttgtgcacgcgagcgaggtgttgctgcg

SEQ ID NO: 56501 - DNA, 597 bp, Zea Mays
ggggacaacatcattcaatacgcatacctactccacgaagggctgcaggtgtacaagagcgacaagaccggagtcctgtcaaagattcaccaactatgattacgcatgcgaccactgttcctgcacgccgtctgccgactttcgatgggacgtacaatacgaccggagcacaggcaagccctcgagcgcaaactccgcctcgcctgaagtaaaactcgaccttgggacaaactctggctcgcccgagcccggtctcgtctacccactccctacaaatcccacagaaggccactccttcaactgtggcacacgtctttgaatccagaacgggttcggttgtgacctcgggcggacttccgcctcgcccaagcccggctctgacttcgatatccgcaacgggaaggcgcctaatgtcatcagacactgcagagctaacacactacttaaggggctttttcctataattagtactgtgtcaaccactatggtatggacaaccccctcgccagggggctcggatgcgtgaccgagccctcggccctggcctcatctctcagcagaaatcgagcaaacacaagtcaacaacaagtacgaaac

SEQ ID NO: 56502 - DNA, 564 bp, Zea Mays
gcgattttcatgttccagcggcagctccagtacgctccaggcgattcacacgttacagaataaattgcgtggaagctaacaaggttgaaatgtcatattagtgcatttttgattggatggttcaatagtcattacacgagttgtaaaacaaaaggacatgatactgcataacgacgagtccatattttcctctacagaatggatagaaccacatgaacatgacttaaacctttatttgcctggacagttgcgcgaatcatgaagaaccaactgtttgcagatcttgcataagcgtggcactcttccttgcttctcccttttgaacagatatctgttggtggataaactgttacttcatttggaatatggcaaccgatgaatgcctcatattcaccctccctagaatgtgtagctgccggcaatatctggtgtagaggtacctctaggttagaaatactagacaataagaagtccatgccttcctcagaattgttggctttttttatcaagtcttcaaacttgttgcgtacatttgctatcttttttctcatcaccggattattt

SEQ ID NO: 56503 - DNA, 420 bp, Zea Mays
caacgaggtacccgatgctcctcatacaactgcaccgtgtacaaagggggcgtagggtaactggcggagttaagcacttcccacaagatggaaggaaagccatcgcgagaaaggaagtcagaactgaaacgagagtctcctccactggcgggggtgggtgaattcatctgcggaagggaatcaaagataaagattatggtggaaggaaaaagaaaaagagagcccggatggttttaaggaaagtgggttagctcaaattttaattcctctttgtgttttataatgcatgcatgctggaagaaacgctgcctctcaaaagaaaatagggtgatttttagggcatccttaaaatataagtactggcccacggggcctacttagttagccacctattcctccctctatgcctaaggcctttcg

SEQ ID NO: 56504 - DNA, 741 bp, Zea Mays
ttccacttccagtgctgtactgatagccttactgtaggtgaggtccaagcatgttgccattttccgctgaagcctgtcattgagccccctcataaaacaattctttttcttcaagtcagtatccacctggtcaatggcatactaagagaggtggttgaatttgttgagatactgcatcaccgtttctcctccttgcctcaaccggataaactcttctagcttcatctggagtactccctccgaaacataatgctcctagaatgccaacttgaattcctcctaggtaatctgatgcctaataggttggattgctgaaaaatttgcccaccaggtactggcaggccctcttagttgctgagctgcgaacaggggcttttgcgtctccgtgcatcaaattaacccaaacttctattccattactctcacccattcgtcggcttctaaggtctcctctgctttgacgaagagcggcatccgagtctcagagaattccaaataggtagtatcacgtggtccttgagggggaactctacctccgcgctgttggaattggttgcccgccatttcacgcaagaagcgcgtattattagtggtggtgttgactagggcagcgatagcctcggccaaagtcggtggtaccaatggcgggttaggagtatcctccccaccgtgggatgtcctcgcaccatcatgtgcgcgagtccgggatggcatctgaggcaaaagaacattcgaaaatat

SEQ ID NO: 56505 - DNA, 279 bp, Zea Mays
caaatctatctaggtcctgcagtcaggggtgccgtaatcaaagcgaccacggggcggcgagcagtaagggtgctgaatcataacaggagcgggagaaccaccatcatgatagtggcgcgctgcgcgctctgcacgcaattctgcaacctccacccaaaccttgcccaactcgtcaagggctggtccagctcggtgttgagcatgacgactaggttgacgatgttgttcagcctgcgattgccctcaccaatgggcgagacaatcacacctccagcactg

SEQ ID NO: 56506 - DNA, 414 bp, Zea Mays
attggcttaagtcggcagggacttaagacggtgcaacatgctcacgcttacttaacttagggtgaccactataccctactaacggagaaatcgacttaagtcggcagggacttaagacagtgcaatatgctcacgcttacttaacttagggtgaccactataccctactaatggagcaattggcttaagtcagcattgacttaaggcggtgcaacatgctgatgtccacttgacttagcataaacatgcttacgatcactcgtcttaaggcgatctctatgcctcacaaaaagaaaaaagaaacttcgaaaccagcacactatatttatttctgcaatcgtgacaactgttgaattcaaacaacagaaaaacaaaaaatagcatccagtaccaagaacacgttctaaacaaagt

SEQ ID NO: 56507 - DNA, 941 bp, Zea Mays
ctttctgtgaaaggccttgatagagtgctgaaccaacatgtagttgtcatgaatggagcgacccttgacaaaggcactttgatttgtagccaccagattttgaaggtgtggtgctaaacgattagccaagactttggataccaatttggcgaagctgtgaataagactaattggcctgtaatctccagctgtcttggcatcaaccttcttagggataagtgttaggtacacagagttcatcatccacaatttgcgtgtgttaccttgatgtagggtgataactgccgccatcagaatagccttaattatgtgccaacaagttttataaaatcttcccgtataaccgtttggccccggggctttgtccgagggaaggctagtaatagtggctcggcctcctcctctgtaatgggaaggtccgaggccccaagatcaacatcagcactgtggaaagcctccaaatctagagtgaactcacgcttatggattatattgcatcggagcgcaaatcaacggtgcataaacgttatggtgacgtggacagtttccctggacgcagaagtgcgctgatttcgttttaacagattagctagttgccctgcgaaagcacaatcaggtcatgtggttagttccttctgatcaagttgtttgcacttaatattttcttctgtagaagaacccaagcaaagagcatacagtttggctccgtttttgctttccagattggtgcaagttttaatctatgataccttccagcaaattttatacacatgcactaatagtgaagttttcaccattggttgtccatctacgcattatctcatcctcgacagattcatctttgttggttttttgaatcgcctcctacaaggacacatactcccttatgtcctattgtgttaccacccatgcaaatgcgaaatccaggcattattcttgag

SEQ ID NO: 56508 - DNA, 408 bp, Zea Mays
cgtcgaaggggtacgcaaggactacggtcgtcagatctctagctgacgtaccagatcacaacttaacccataaccgatcacggccaccggatcgcggatctacgaccagatgcaccccacaccgaaacgttacccaagctctaatcctagccgcacaatttacatcctatggctcacacggatccccccattcctctatacttcccccggtcagcagcgtggacaccagcgtccagccacggcggagccatggccggccatagtcctgagcggcaaccagcgcacaaaacccaatacgaagtagtgccatacgcgaaggaaggcaacacgaactaaatggaggggtctcaccttcattgctagcgccaaagctcctgcccacgttgaatggcggccgcgcgacggggg

SEQ ID NO: 56509 - DNA, 715 bp, Zea Mays
ctgaccgcggccccctcctctcatctgtctgtgccaaagtcgagtgcatcacgtgtcctgagagatgaagagagagagagaatagacgtcgtagctgtcgatctcgccccgcaccatgtcttggggttcagcttgcgatcagggagcatcactgtgtagaagggggaagggtcggccgaagacatggcttcatggtcagggggcgacttattcaccagcacaggcgctccaccgcagtcatgcctcgcaccagggaccaacaacgccgcacagtctcctccgtcgcattgagccccggtaaagtgcacctcgcgtaaatttgtttccttggctatgttttgtagtactcggtgatggattttggtcaccgggcgttggtatgtgtgtccttgccggtgcgcgccgtcgtgaagcgcgtgggcgctgccgcgcgtgtatactagtggaagaagacgatgtcgtggccacaagatctgaaatggacgaccctgattagatccgaggataacccttcgtcatattaaatccaaaccaccagtctgggatctagcggatctggttgggtctgggagatgggggcattttggccgttggatctagatccaaggctctgtgttatgcaccgaatcgatgtaatgagcttctaatctggtgcgtgggtgatggatcggatggtcctggtcgaagtgtacccctttggcactgcaacttttct

SEQ ID NO: 56510 - DNA, 317 bp, Zea Mays
taggtgacttctttgcaccaggcctccagggatcggttccttgatcgtaagaattctcctacatcaacatcacgggttcatccatccattacatgtacttccttcttatagctttggtaggcaacagttggtagtcggcggcaatgtgcagggattgattgtgacaaaggatgctgccagtaggcaccgctagctgatagcgaacgcagaattttaccagctggcccggtgcatgaatctgttgacattttggtagatggagaatactgatcggcctttcccgcttcctccttagtgcggtagtctgttccttgtgg

SEQ ID NO: 56511 - DNA, 398 bp, Zea Mays
gcggagggtgatggaattgcgaatttagacgcgtacacagacacgagacaatcggtaggttttgttttggcgctgtgctgtgctgtgctgtcgcgctgtggggggattgggtgggtgggagatgagaaatgcggattgatttggttgctttggtcgattaagccgtttcggcagcgcgagttcgcggcatactggtttcgtacccaagggcttgatcgtcgatggtgccgttgaattcgtgctctcatgcccgtggaagcagccgaagtgatggatatatgatacgcggcaactggcatgtgattttcggtctggggattgagagcgacgtttatggtcttggaaggatttggtggcatcggcttcctgtgttatcaatttattatcgtcatctgtgg

SEQ ID NO: 56512 - DNA, 476 bp, Zea Mays
ctggccttcccgtcgcccgatcaagagggaacaaaagggaattggggagtgggtggaaagggcctggtggtgggaggaaggaaggaagcaagtggaggggaatggttagattagcaacgtgctttgcttttgggaggtggtgtggtggtgggtgcgctgctgcgctgttgggtgttggtgttgctgatgtgattcatcatgttcgtaatagtttaatctaaccagccagcggatcattagagtagtgggaggtgggttcgctgcttccactttatttgcttggctttactcggtcgttgcttctctccttccttgccctctacattacattgattttgattatagtgctcctcttgtgacttgtggtgcgcttaaaatggtccgggcatgcgtcacgtttgctgttccagtcatcagtagcaaggctgcaccacaatccacagcgctagtgatccactggatgacatgtacacaag

SEQ ID NO: 56513 - DNA, 867 bp, Zea Mays
gcagccaaggaggtgaagaaggcagaaaaggatgaagtgtgcaagctctcgattgcttgtgacgacgtcattaccgtgcaggttcaggcgcaaacttcactaaaggagcgtagtgtcgaactataggagcctcgcctagctgcgagcgaggtgtgcgactacctctctcctccaccgtcagcccaggcacctctacttgaccggctgtgggcactgcctaggcacgtggagcgtgtgatcttcgaaggagcgttccatgggggtagtctgcctttaaggtagatggtctcccacttcaatgagatcgatgcttagcatgatcgcgaagggctttaccgctgaccggagcgacgaggagctggataatattgaagagcaggtgtgccccacgcttgtttgcttacaagccgggtcgacgtgaagatgcttctaatgcttctaagagtaggcgttatgttcttttcttgttttgttgtctttgtaataaaccctttaatcaagatgggtgaacacttagtcgtgaagatcgcttgtgaacttgcttcttcttgcaaatgttgtatttttcctggggccttgcaccggtctttctggttgtatcacaaccacgaccctttaggatgaagatacgtcttggggagggaccatgaacctatgtacttgtcctctagcccatgagtgggacgtggcgatctggtcgacgtgttctcctttctttagtgcgaaggtgaaggggatatagtgcgtcactttaggggtaaaatctccttaggttctcgatattccacgtgtagctcaaaaagctgtcatcattgtccttgatcttataagatcccgggcacaggatctgggcgatgacatatggcc

SEQ ID NO: 56514 - DNA, 578 bp, Zea Mays
gccagatgtgtatctctcgttcagtttctacactccatgacttgtgactataacatgtgcatggcaattgctacactccatgtcaccatacgaatatctatacgtatatggtggagagtatgggtaaatgaatggaggaggagcatccttggtaggagcttcagtggaaagatgaggggtgttgatggtaggatcatcattaggagaaggaggagcatgtagggatggtcaataggcatatggaggaggatataggtataacaaacagaggttgtgaagtatgggaatgttgatgtgtagaaatatccttgcaagaacgttgtgtgggagaaagatcgttgaagacctaccccacacaggcaagaatgcagaaagttgtggagattggtcgttcattaagtcggcgaaggtttgaaaatttgagctccagcaaggatccattttgaaataaagggtggagtctacaacatgaaggaagacaagcgaaataaagagtgaggggtgtgaatgaacccatacatccctctctacttatattccagattccaagacttcttttgatttttattttatttttt

SEQ ID NO: 56515 - DNA, 433 bp, Zea Mays
taataagagaaaacttcaaaactcaattgaaatagtcataaaatgtcaccatgaatagatttaaatggcatccaaaccctagaagtactaaaaaccttaaatggacccctgagaaaccctggactgaaaccctagggggggttgtatgcaaaatgtgcccatttttggacctaagtgcaaaaactatgaaattagggtatcttaactcatatgattcacatgtatgtggatttgcaacttaaaccctaagttttgggcctatttgcaaaaagccacatttgagctctaatgagttaagtctgaaattcagtggaattggctcaactttgaggccctatatcttccaaattatgaagattttgccctaggtcaccacatcaagtttgtagagctataaaaggggaaccactttgctatagagattaagccctgg

SEQ ID NO: 56516 - DNA, 333 bp, Zea Mays
aacaatggtaattactatcattgttttcaagtcgaaagaagctgaccgacttggacgactaatcgtgaccaatctggattgatcgaatgacttgaaaacaatgattactatcctatcataaatggatccagcatgacgacgatagcatgtagtccgactaaacgtgtgtttccatcagtacaatgtaggaatcaatgccatggtgctatcgtggcaacaaatgagagtgcaagtatggccgaacaaggaagtggggtggatcatacccagtcgaagccaagggtcatttccaatggtaattgttaagaatctttatttaggttacatattttc

SEQ ID NO: 56517 - DNA, 479 bp, Zea Mays
agggacttctacataaagttgtctatgacccagagctccagacactggaccgcgggttgttttgctggtttcacgagggttcttttgaaagattgtttggctgaaggggtaacttgtaaccctggtcgtccagatcagatcggatggtcaagattagatcatcccacgctgaatcggtatgcaacgttagccgctggatcaccagtggacgctttagatttaaaacaccttggtcgattgatacgcgtccgatctaaatcgaagggctactatcagacctggacgaaatagtgtgtccgccagatctggaccgtttcccccaagatcaatggcccatatccaattaagtgaatccagccgccaacaggaaaatcaacgaaccacgcttcttcttctactgatggtgcagggacgccggagcacggacccacggcggcgctactcgccggagcgcccctgaacggccaccccgaccccga

SEQ ID NO: 56518 - DNA, 920 bp, Zea Mays
cagccaacgcatgtgtgcctgccttagctctgccatgcgggcccggttcgccagaaccagcttcttcctctggacatgaatagaatccatggctcgcgcgcgcatcttttccatgccgtgaactctggggatcgaaccaccaaggcgagatttgggctcgggttccaactacttcggtcgtgctcctcggagtataaaatcggggccgctcctacccttattcaccatgctcggcgtgcgcagtggggagtttgggtccgccaggggcgaactgcggattgtgtcgagctctagcctcgatagttggcttggggattcaccgtggcatcccaatggtgcgtgtgaccttcccacccctggaactggatcatgcgccgcccaattgctcgccgaagatcgcgtggcgccgccgaatcgtaccttgtcgtggccagtgtcgctcgaacatcaatgattggtaaggattctcctaatgtattcaccactctccggacatcgcgtagtagtaatcttggtgggtctggatgggggagcgccgaattggggccgctccggccatgggcgccgccgtgaagatggggactgctgtggttcggttgagcggggaggaagaaaaggcatcggtcgttggatcctagccaacggcggagatttgagcgactagataccggttcggggaattgatcggaaccgttgaggaaagatcgagcggttaggattgaagataaagaactccctcggccaatgcgatcgtagccctcgattttaaatcaaacgtttcgggttgtataccggttagagtgtcaacctgatctaatcatggccacccagatcagatcgtgcgactagaatcatacaataccccttcggccgttacgttttgcataagtgccccgcggctttcacataattaacccgcc

SEQ ID NO: 56519 - DNA, 702 bp, Zea Mays
atcacattaaatacataccaattttttccttgtcattcttttttgctatatattttacgctcccccgctcaacaacccctcctcccactgccaacccattccccgatctaatccaattcacactattgggaccagctaacgtgtggacaggtgggcccaatcactcggggggggggggggggggacaggagagctcagaacaacgaaataataggtagagaactgtagcgtctcgttatgcgtgtcccgatcgtgttcagtgcgtgggtatttataggtaaccgagcgggtaggtgggtccccaagtaccattataccaccggttacttgctacattcccaaaatatttctctcaacggggtcattacagtgtagtgaagtagagtaactcagacatactgcggaatctaccccatgaggggccttacaagtgggctcgaacggacacggtgacgaggcagagactgggtcccaccgtaatctggcgtggctttcacctgcgagttgcaccctcgactgcgcgaagtcgcgcccttgacttcgttgggacttggacttcgctgtagagggaagagtctgagccttcgaggcgcaaatggggagctacagtgtgccccccttgtctagcgtggcccttctcttcgtcacctttaaaggccacggtcgaggacctcgacgctggtacgggtcaaagtacccttc

SEQ ID NO: 56520 - DNA, 454 bp, Zea Mays
cgacttaccagaacaagctggccacgggcgggctgttctccacggtgcggcggaccgatttggggaaaaatggcgccgcgacgtccacgagtggaactgagggcggggcttggggatatacggccataaagaaccactgattcaccgagttcaaccaatttgagggaaggaggaggagacagtgtgaattttagtttttactcaagctaactgaagaactgcgagcaccccgccgtggctccctgctctatatataggcacagcggtccggcgatcatttcacgaccacggacagcatcccgagtgcatgccgaccacgtcggtaggaggcacagtgagggagatcacggcatgagtgacagtgcggcgagagttaactgagtcacggtggccgctggtgaagactccggctgggcttgggagatggcgccacgtacgggttatccctccccgg

SEQ ID NO: 56521 - DNA, 961 bp, Zea Mays
tttcactccaagtctgaatttcagtgtaattgcttcaactttgagcccttgtatctttcaaattctagggtttttgccctaggtcaccacatcaaaattgtagacccattaaaggggaacaactttgcttaagaggttaagcattgttgttatgaaaaattgggagataattaagcccaaagttggactgtcagactacttaaagtctgaaatcagactaacaatgaaatgtcatgaacttcaagctcaatttcaaacaagatccattgactttttgtgggagcacaatatagcaaagttgtagttggtttatagcactacaatattgctgcagagatctggatgtgttgccacagaaatttggaagaaatctggccctaaactatggctgtcaggcttattgaagaagcagtgccatggtacagtgtccaaaacagatcaggccaccagcgcggcaacctcaccgccggcgacctccctgcacaaagattcatgccatcaccgtcgtgactcgtgaccaaatcaactggatagcacttggagatcatcgtcgtggataactccggccagtaaagtattccggccaccgtacaagcgttcaccgcgacgaaattggataagtgcaccgatgaccgccgcttcccggccttgcaccgcgtgtccatgcacttccaccgcatcgccgtggcctcctctcgctccccgttgatcgccggagtaattgccacggcatcatacacaaattcactgcgccagtgaacttcccctttctctgaccgccgcgcatctcgcccaaattcacggccaccgctcactaagcgtataaattgaccccgccgcgagctccgtaaggcagtgaagtatccagccaccgctaattagccacgatcgttcgctagagctcgagaatttcttgtttcccccaaactggtctccgccaccgcgaagaacagctcaaccg

SEQ ID NO: 56522 - DNA, 348 bp, Zea Mays
gacctcaaaagattctaccctatccttatggattcatcttgccctaattagcatatttaccccactctagaataacaaccatgagctaatccaaaaatttatttagatcttatctagtctaaaatattcatatcgatttattctagatctgatccaacctaattggttaatctaacctgatgaagtctaaccttaagttgagataacctaaggacagtcacttaacaagttaacactagtaaaataaactagatcctactcctataaatcttgttctcccctcatgcacttaaacctaaaattagtgcattagaccaactcaaccgtgaacgtaagagctaacccaac

SEQ ID NO: 56523 - DNA, 463 bp, Zea Mays
taaggatccattgctgcagcgccaggttatgcaagcatttcatcagagcgctttggggggtcattctggcagtccagttacttaccgacgactgaagcaactttttgcttggtagggaatgaaacatgacgtgcaagcttttgtgtcatcttgtgtggtgtgtcaataggctaagcccgatagaacaaaacttcctggacttcttcagcccctgccaattccagaggcagcatggcaagtcgtgtctttagactttgtgatgggtttacctacatcaggaggttttgattgcattttggtggtagtggatttatttaccaagtatgctcatttcctgggccttaagcatccattcacagcttattcggttgcagtactctttcacaacaatgtgtataagttgcatggaatgccttctcacctgatctctgaccgtgacagggtatttacaagtaacctgtgg

SEQ ID NO: 56524 - DNA, 399 bp, Zea Mays
atttcttggaatatatggtctttttcatggggtagggagtgaggtgtattacatcatatttttatcttagtttcatatttttctctggtggtttacatcataagtatttgggtaaaaatttgtttgctcactatttcacatttttagtccttttgatttttttgaagtattggctaaatccatgttctatttgtttaacccacttattgttatggtttgaggtgtttaccatttttgtagtggcatgttagtggtcaggggtctactgaatttttcttgccactattgcatgtgccaaaatatttttaactatgacttttgttgacttcttaatgcttgagtaaaattataatcttagattacactagaccggggttccatatatttttcctatgttcc

SEQ ID NO: 56525 - DNA, 755 bp, Zea Mays
cactttgtgccccgtctagaaaccgtcagacgcttggagcagataaaccgtgaagaagaccgctgcgctttctgacgtgtgttgctggccgttggaggagcatcgtgcggcaaaaacatgaagagccgacgtggacaaatgggatgcgagatttgctcccgtggttaatatatagaatgtagaagaaagagaaaacaaaaagagaatattttgatgaagcatatctcagtaatttctatcatagaaaatatgataaattttctttttacccctcaaatgggacatcgggtagtacaatcacaatttggcaaagctcaaaattcgtgggtgaactgattcttgataatgaatatgcctaaatggttaaattcggctcatccttggcaaatgaatctggggctcttataaacatatatgctccatgcacaccgagtgggaaattggcattcttgcaatagttcaatatcccatttgcgcttttataaacatatatgcttcatgcttcaatgcttcgattagccaaattgggggtattagagataccacttaaagggcaatccttcacttggaccaataggtaacaacaacctttgcttgaaaaactagataggtgtttcgtatctcaagattggttggctcaatatccagggacacgcacacacaccctcgcccaagatgtttctgatcatgtcccctcggttgtgcaagtttagactggtatcccaaaacctctggtgttccgctttgaaaactac

SEQ ID NO: 56526 - DNA, 363 bp, Zea Mays
gaagaactattttccagacgccatcgcttgggacaagcgaatactgaggcccggggaattgtcatgtctgagcctgctacgtcttcccaggatgtgggcgtgtaacagtaagtactctagagttgggccgtgggccgtgtttagcgtactaatatggtgtcagggttcaattggagtctgtaatggcctggtagagaccggctatatactctgtacttggccagttggcaaatcacgaacagaataatccagagaaacagatccgtaacaaactcacctcgggttgttgcgttccggtgtccctctgacgtactcacgtcccggcggtggctcgccggcggccacgggacgtctcagtctaac

SEQ ID NO: 56527 - DNA, 469 bp, Zea Mays
tttcagtatttattgaagacgccttatctatacattatagtgtaaattacaagtttttgaggtaagccatgtacattcaactatgtgcttctgtagggcattacaaactaccgcatcatatagcccaaatgtcggtttcacaacaagtcattacttacaaaaacggtggaaaaaatctcgcttcatcaaacacacagtttgcatattaacactttagcagcaaaatgacttgccgtcttgcccttgtgacaaaacataagaatcagaaactctgagatgaatcatcgtgccataaacctaaaaaaaccaatgaaccaatgaaacagacatagtatattacaacccatacggtggatgtaataacagaaattcttttaggttccttttgtttttgttctttctctcatggagaaaacctcccagataaaccaagcgacaatgaggaactaaaatcggcaccataaacacg

SEQ ID NO: 56528 - DNA, 784 bp, Zea Mays
gtttggtttgtctcactgctgaattccgagaggaaatcccagatttgacgtggctagggcacgaatctcaatgccatcttcacacacgttgcagaggggttagtttagaacaaatttgtcaatggggacttaaggatttgagctagggataaaggtgaacgtcctcaagttctaggtgagggctgaaatttagaattctgaattttagattttccctagggagcttccacttggatggcctttttggggattttaatcaattattttggccaaacttttataacaattattgtagcttaattagtgtatttcaacttttataattggcctaagccatgattccatgtttttcatggcctttttaccaatttcttccttgctacttaaatggcctaattagggttgttctagggtttaaacattttcccattttgaatgcatgatatgatttaggcatgagtcttaggacaaaagaattagttgaatttttgctctcaagtttttggggtcttttgctcaatttgattcacatgaaataatggttcttgagttagcactaaaaagaactctaggaattactggggtgttacagtgaattttggtgatgtggtgttgctggcggtaggggttggatttcttggtgttgttggtacatgtgaatttgctggtggggatgacaatgttcattgtggaattggtgctggtgatattgttgtggttggtaggtgtgggcgacaactctttggttgtcaaccgatttatttctggccatcctatctttact

SEQ ID NO: 56529 - DNA, 824 bp, Zea Mays
gtggggtttcaccagtgggtgccttaatcatgtcatcccttaattcaccaatggcatacaaaacttctttaaaatacctgctaactgtctccacagacctcctccaactttggtgtatgaccctaaaacgctgattgtggccaactacatgaaggaacatggctacttgttcctccacactactgtggatactatctctaagcaggttcctactcttaagcaactcacggagctggaaaaggggggttcttctcatgcgcaacatgttaacacactccacatcattgaagttgtaaattctattcaagtttccgtgcctctcttcatccattgcactcattggggcataagtgatcctaggtcgtgccacttgacactggacaagtttagaaacaaaaaatgcatacacaacagcaacaagtccaactgccctcactattaacatgcgcctctcatcatcatgatccatctagatgcaaaggaacagagccaagtatcacataaaagctcaccagtagtaacatggtgcagtactagatcataggcatggcaacaaaataagctcagatctagggaccaaatcataggcatggcaacaataagctcagattaattgctataaaatcacaggcatgacaacttaagctcagatctagtgctaatcaatcatagacacggcaacatataagctcagatcattcaagaaatgaagggggggaaggggaggggaaggaatgtcgtctgttataccgaacagcaacaggaagaaggacgaagcgccgagaggaagcagctacaaggcgtgaggaagcagcaatccggat

SEQ ID NO: 56530 - DNA, 499 bp, Zea Mays
cgcgaatacctttcagggaggacaggatggtgactagtcggcagggaggaaaaataatccgcgactccgtgtggccagctcggccgtgcccccgaaaaggagaagcacaagcacaattcggtgcccggcctaaacgtccttgccattgccaaaatcggatgcgactggcaagtggcaacaagctcgctcatcctcttcactttgcaggcgacctgtccaccttcccgtgaatcatgtcatgtagggcgagagacgaagaagtgaccatggcgacgctgacgtacgcaggggttccagaggttcagacggctgccgaagttctcagagcctccaatccggccagcgtgttgttgccgccaataactaccggcgttcccatcatatcatgatacagtatatgcgttcattcactcatgaactccttcgtgacagcgttattagcggctggacgcgttggcgaaggttctcgtcgtattaacttcccggatatgcatacggg

SEQ ID NO: 56531 - DNA, 641 bp, Zea Mays
ttccttttggccctacagtagacagatatagacgttataatacggtactttaaatattatgacacagtaatattctacgtactcaccatgcatcctagtgcctcttttgcctctttcatcttcctactgtgtagaagcttcaacatttccttggcgaattaatgtagtggcgtgtttgcatcgacatgagcactttttacgagtttgttcatgctctcgctacgctgtgtagagaccatcaatccacaataatcatgtttgaaaaaagctggtatccaatcattacgaatttcatacattctggaaagactgatgttatcatgtagatggaaatcatcaatcagcattgcccaggcagtctcaaactcagttacagttaaaggatgatgtattatagattggaaccttgttttgaaatcatcttcctcaaatctagcgtacaactcgtttaaatacgacatatacctgttctgaacatgccacaaacacaaatgatggattgtgtttggaaataccctgcctagtgcaactggcattgctggatcttgatctgaaatcataaattttcacaacattatgcaacacattaccaactataattgcattcaatacaatcatagtagaacgtaataattgttaag

SEQ ID NO: 56532 - DNA, 432 bp, Zea Mays
tcagcggctgtagtggctaattgaaggtgggaatgggtgctctggcttcgtgataacatggtgcagcaaaccgggccatcaatttataggagattaaagcggtggccagtgaatttggtcttgcacggtggcggctggagaaagaggagatcactggtgcaagcgattggtggcatctaccgtggcggctctccggcgatcaccggatatagataacccgagctattgcgacgtggttaagggcctgaggcgtggcgcagtcgcggtgaatgacgcagactccggtgacggccgtaaagccacgtcgctggcgcaagtggtcgagggacagcgaggcacagtaacccaaacccatccacgacgagatcttttcacggctgagcgaaatccactcgcccgaggcacaaatcacgacggctggcgcgaatctgg

SEQ ID NO: 56533 - DNA, 480 bp, Zea Mays
ttctcttccttggtgaaggtcatccctggagatgtgctttcttgattcttcatgtgaggacatgaaatgatgacatgatcatcctcattgcacccaaagtatctcctcactccatcctcactatttatgtgtggacatgaggcaataaagtgacccttcttgttgcatctaaagcacctctcgtttctcatcctccttttgcccttggaggtcacaacatgaacacttgatttgttacctttactcttgttcatgttgtttggtgtcttctttgttgtagctccaggaacatctttgtgatggagtttggtgcacgctttagtttttcccttctcaagcttcttcaacatgcgcccatgaacatctcgaggaggttgagcatggcacattctccacatttcctcttgttccttctaggcgtcgtgtctttgtttatgagcacttgttcttttgaagctacaacttgttgctcaatcaagg

SEQ ID NO: 56534 - DNA, 1803 bp, Zea Mays
gttggtcattcctcaattaatactgttgctcgtccacttgtgttacataataccttgcatgttcctgaaattactaagcatctcctgtctgtccacaaattttcccgtgataatgacgtcttttttgaatatcatccttggcatttttctattaaggatcgccagtcgaggaaaagtctgttggacggatgatgtgagtcgggcctatatcccatcaaggcacaagatcttccagtcctcaagcatgctcttgcaaccagatccattagttactcccagtggcatgcacgtttgggtcatccctccacacaagttgtgtggtctattttacatttaaataaactttcgtcttcttaagtggctacttcatctgtttgtgattcttgtcaacttgctaagagtcatcaattaccatatgcctgttccgttcatcattcttcatctcctttagaactcattttttctgatgtatggggtcctgcgccttgttctattggtggttataaatattacatcagttttattgatgactttagcaagtttttttggatatatttgatgcatgatcgttccgaagcaccgggcatctttatgcaatttaaaacccatattgaacgactccttgacaccaccatcaagtacgtacaatcagattggggaggggaataccagaaaatgcataatacaatttttcgatctcttggcattactcatcgtgtctcatgtccgcacacacaccaacaaaatggatcggctgaacgtaaacaccgctactttgttgagacgggtcttgctcttctagctcatgcgcacgttcctattaattattgggatgatgcttttctcatagccacctatttaattaatcgcatgcctacccatttcattgacaatgccactcctctagagcgccttcttcatacaccaccaaactattctatgctgcgagtatttggatgtgcatgttggcctcatttgcgagcttacaacaagaccaagctttcttttcgttccaaagaatgtgtttttcttggctatagctccttgcataaagggtataaatgtcttgatcgtgaatctggtagggtgtatgtctctagagatgttatctttgatgagcatgtctttcctttccatcgtgattccaaccagtctagttccactaattctcattcatgtgatatgcatttggataacaacagtgttattttgagtaatgatcctctgcgcgctcctttgcctgctaatcctttgcatgtagacaatacagagccattatcctttggattcccaccgtcctctactgagcagctgcatgcaaccttgattggcggccctgattcagttctagcattgcccacatcttccacgtgccagcaggaggagatcccatatgcatcttctttgcctccaacaaccagtgaactcccagttgttcctcctacagtggacacttctgtacatgcacctgttccaactgcttctcctacactggaccgtgtatatatacctgcggcgcctgactcaactatgggaccttctcatccatatggcactcgactaaaacacaatatccgacaacccaagaaacagacagatggcacagttacttattctatggtacggtcctctatttctgagcctaactcttatgttgttgctcttaaagatcctctgtggcgccaagaattggatgctgaaatatgtgctttattgaaaaatgatacatggcaccttgtccctcctcgagctggtcttaatattattgactgtaaatgggtttttaaaatcaagcagaagtcg

SEQ ID NO: 56535 - DNA, 868 bp, Zea Mays
gaactattgctttatatatctaaaatgtagagttttgtctcttgctcctcaaacactacaggtatgccctgtaatcattgtaaaccggtacagagtaatttcatacaaagttttgcccttgtacactgtcttacctgtataaagagaactatcacatacactgtgaaggaatgccttcgttgcaacatccgaaatagtaagctggttctggctgataataagaaaacatgtgtaatcaatccaataatcaatatgacatgaaatcaacaaaaaaattatagctacatagaatcattattgaaccccaaaacacttgaattcagacaaataaattttttatgatttacgtaggtagcactaaattttaccccttcaagtgctgctcttgtaattgtgcctgaagttgatgctctgctaatattctggatgatcccaaagctaatagtttctcctttaaaacagtagctgtagcaccagagtaaagcatgatgtatttaggatttacaaactgcttgaaacatctaatttttacccaaatataccataagtatgatgtggcaagtaaaccaaggattgaaatcagcttagtgttgcataagtagcatgatatgttgtattatttgtcatgtacgaagcaaggttcacatttccacaagggatgcagagtctggttggaagaaaagaaaaggttctgtattataaggtgttgatgcaaaacgaattaagatatagtgctatctagcatctgatccagcggccaataagtttaattaagctttggtttttctgaaagacagcgaccaactggtcaagtacttttatgcaatgagctataggatctaaggtcatatctcattgtagcactgtg

SEQ ID NO: 56536 - DNA, 758 bp, Zea Mays
gaactattggctggaatttgaaggcttcatgaatgttttccaaaatacttggctcagccaaacgaaccttcccgacaaagcaatgaatctgacagccaagtttaagatcacacagaaggctctcaaagaatggtagagatcgttaccaaagattgataaaatcgttagagacatcaagttattaattgagtttattgacataattgaagagcatcgtgacctctccatagaagaatggaacttcagtgaacgcatgcagattaaggttgctgaactacttcacatccaaaaaatttattggaaacaaagggcgtcaattaagtggattacttcaggggatatctgctcaagtttttttcatgcacatgcaacgataaaacacaggaaaaatacaattgtctctctgactgatgacaacgggaccatacactcggagcatgaacacaaagcagattttctttggactgctttcaaaagtcggctaggatcttcagacttcatcggtattgattttgatttgcaaagtctcttaactcctcatgatagcctgcaatggatggactcccccttcactaagcaagtgattgacaacattattaagtcgttaccttcggatagatcgccaggaccggatggattcaatacaaattttgttaaaaaatgctggcatgtcattgcccaagacttttatgacctatgtgacaagtttcatcaaggcgatgtctgtttaaaaagtattaatggatcatacatcattc

SEQ ID NO: 56537 - DNA, 941 bp, Zea Mays
ccagaactttatcagtatgcccagataactgatggggtatgattggatattgaactggagtggagatccaacgacgtggaattctacaataccattctaggtaacaattccttgcatgggtagcatctcaagtccttgtttcctggcgcttaacaacagagatgagcctgttctcccattccttaataatgtagttatcatggtaagtaggccaatgctgatcagctttaccctgcactgtaacaggttcgtcaatgttgattagctttaccctgcattgtaacacgttcaacaacctcatggctcgttcggtacaatgcgtttcagttccaacctgaacgattccaaggcaagtattcagtgaattcggttggttcgctcaaacctggtgaccaatgcatccggttagtttcaatcctgttcgtttcaggtaggaaacagatcaatttgagacattctctcctctgtcatttcaaaaaatcacagttttctaagaagttttccaagaagttgtattccttcgtatatgctgaaaaattaaaataagttttccgttcatacatatatttgatctcaactttctatgagaaggataaagacatagccatctcatatgaatcgtttcgttctattaacaagaagttgtattccttcgtatatctctgtgacaaactttcagtgtccaattttctaatatgttgataattattatcaacactagtaacaaaagactattcatatgaatcttcttctagtagtacacagtatagcaatctcggacttcaatcacccttgcctgaaccaacgggcaagcaagaaaacaaaacaaaaaaaggttgccactagaaccagaaccagcacacggccatcctccactcaagaagacgatggctcttctgatgaacgacaacaagaagacaacgcaggcggtggtcctagcc

SEQ ID NO: 56538 - DNA, 922 bp, Zea Mays
tctagtggtgcaccgaatcgatctggtgtcacctgcctttacattgatttcgcggactgtcagaggttcgatggtgcactagacttgtaccacatgaggtctagtgtacccgaggaaagtgtagattttggggtttatcccaacggataattgaggtgttgggggctttaaatattgtccatttcaaggtacaagagctgtgattgaactcctacaagctagaacaacatctcttagataccaaaagcctcccaagtgcccattagtgataattgtgtatgagatagccgttttagagtggttcttgatagttccttgtgtgagtgtattggagaagtgtgtgttgttgcattcttgtgcttttgtgtattgagttgcaatctctcatccttacatggggtcaaatcgtcatgtctcttcgtgtgtttgcttatgttgtgatttgttcttccctctccctacaagttcgtttgttttgatctttgttctaaatcacttgtgttgctccccaagttaattccacattcataaaaccaacaagtgcaagagaactcatctctcttactcaaattatatttcctcctgctctaaccactaatttggggtctagttttgttttaagtgtttatttttcaggtgtcgcctatttacccactccagaagactatcacatagtaagtttgttgtgaagcgatgttgtttgtacaatagacatcacgatggcaatgtcttcacgcaaacgagcgacctcaacatcttgcactgaactatgacaagaactactcgatgaactccatgacctggacactgtgtgtttctcttctcacatctcttgagtcgatcacactagtaaacatcacaatttatataagaaaagacatgtggatccaattgatatgaaaaaaataaagactctgttggc

SEQ ID NO: 56539 - DNA, 682 bp, Zea Mays
caactttgcaggaatggtccttggaaatgaacgagttcatcgaaactcggcacctcgagtaagttatccgatccacttacatatctatccgaggccttgagggcaaggattggtgtatgtgggcacgataacttggttgggttgtgacagcgatgataaatccactaaagaagcaaaacaaatttattttgatatagagagagtattataaactatacatgagagtattataaactatacaaattttattcttcttcaagtgtgtcatcaatttattgcacgacggtatcaattgaaatgtacattaatattataattgtgtaacaaatcttccctgtattatggttaaaatttaacaatacaagtattttgaattacacaatcagtttttagcaaaatatttgaaaaccatattgaattaattaaataattaaggtattattttttgtttccctcccattattttatttccctccaatttagtttactgacatactatatttccctccgttgttttggatccctccagttcttttcgtagtgggcccactctccatagacatagcaaacttctttcatcttctgcagacctccccaccacttttccttcatccgcgaggggcacaacggagggctctccatccatcgtctagggggctccatccgcgccgtagtcgctcgt

SEQ ID NO: 56540 - DNA, 765 bp, Zea Mays
gatcagaaatgagagatttaggcgagatcaacatctgatacttgagaacaggttatagcagataaccagataacggggcagaatcgatgaaggatccagggattcggatgataagccacaacatgattcataaaggtaacggtttactagatccaggtgaaaagagaggcagtcgcatgagatcgcttaggatgagcagcagaaaggttatgaagatttagggcaggatctatggaatgaaacatggcttggtcatggtttgcgcaactagacacaaacgatgtttttttgacataaccacgtgcttaaggaagtttcggtttggctagctgttaagctatgggggtctacaagttgtgtaggtgcaacttcagggtaaaacacacaagggttagaaaacaccgacacaagaatgaatttgttttttttaagattttacttgctaactacaaggttgtttggagggggtctctttttatgggcaaaacaggcaacaatttttttattggcaaagagggttgaacaattacaataccacctaaatagcaaggcaagagaatcacataacacaacctagcaagacttactaattaggcgagagataaggcaattcttatatttcataacatagcaatacaacacattattcaaaaattcttattattggaataaaggtgagagaagcatgttggagcacaagagacatttataatgcgacaatcatgatgcatgctcattctagtcgtcttctcagacctaactatt

SEQ ID NO: 56541 - DNA, 671 bp, Zea Mays
cgagtacgtcggcgacgtcgacttcctccgcaaccgggagcacgacgacggcgacagcatgatgacgctgctgtcggcggcatcgccggcccgcagcctcgtcatctgccccgaccgccgcagcaacatcgcgcggttcatcaacggcatcaacaaccacacgccgtgagtagagagccccatgccgtcggttcccattgcgcattgcagtttccgtcgatctttggctgaacgactgaacccttgtgtgcttgtattgattgctcagggaggggaggaggaagcagaacgtcaagtgcgtgcggttcgccgtcggcggcgagtgccgggtgctgctgttggccaacagggacatctccaagggggagaggctctactacgactacaatggctcggagcacgagtaccccacgcaccatttcgtgtgatgtgaccacgaggcgaggcaatctcagtccgtgtccaccattgcagctccagctccacagctgccaaaatttcgtgtgatgtggggacctgtttgaatcggctttggctagtgactagttggagcgggaagttaatctagattagctggccttcttgtttggacagattagagtggctaactaaaatgtcgattcttgcataacagtgagggcagatgaagcaatctagatattcatcagcac

SEQ ID NO: 56542 - DNA, 340 bp, Zea Mays
aaatttttcctagacaattctaaagatttaatcaggtttaaattttcaactgcatcattaaaagaagaacctaaatcaacacctattttgctagccacttccattaaaacatcattatcagtattcaaaaccgagaaaggattataggacgaacctttattgatgaaagcatctttagccatagctcttgcagcagccttatcagcaattttcacttcctcagatgattccaatctgctgctccttctcactccttccgtagctacgccttccataggaccaccttttttaccaccagcaatcatgctagcatcctcaacattgctcagatgcaatttct

SEQ ID NO: 56543 - DNA, 661 bp, Zea Mays
cttttataactatcatattggtggggaaatcatatctagctaaattcacgggtacatggaagactacttccttagtacaaatttgatccccaagtgattgaataacaatacccttctttgattcaacactaggtatgcaatggatctcaacaaaagccttgctcatgaaagtatgtgatgcaccagaatcaaaaagaatgacagtgggatgattggcaatggaaaacgtacccatcatcataggctctccttccagggtggtaaccacttgagtatagtaaagtcgtccagttttcctttgatctttgcatgcctaagtgcttgccacatttcccttgccttgagatgtgctttcagaagccttttggaaatttgatttattttgttttggatagggacagtccttgatgaaatgtccggacttcccacagttgaagcagttgttagatgaactaggtaaggcggggaaatgagtaccaggggcacttggctgattgttttgagcaagggcaagagtgggagagatgaaaactggttgcttgaaaggataggcgagtggacgaggaaaagagcgatttgggttaaaagtacgaattaccaacctcgaccgcttctcggatcctcaagaggatccttcacccccttcacacccaaatctttt

SEQ ID NO: 56544 - DNA, 547 bp, Zea Mays
aagagatcgaacgcagagaaggcaaagagagagtggtcgcgttgtgtgctcgttgggggggcttggtgtcgggccaccatggttgtcctggggtaaatcctagccgcacacgtaagttgttgtcgtgcatcttgtgccatcgtcgagctagagaagagaaggaacctgagtcgtcgctgcaggccacaatcgggccatgaagacagggcaaggagatcgccatcaccgtcgccaacccgggtaagaggtgcccaaatcagttcgctcttgtccctgcttcgtttcgcactgggtggattcacatatatgtgtctgactattgaagttgggttcacgctggcgaacctccgcagtggggcgtgtgggtgtcgccgcggtcggaccgtcgggaggtgggagatgaccccagttggcgtcgatttatggtgaacggtgaagatttaccgatgtcgtacccactcgcgttggtgtgtgagatccgttcgatccgaatgagtgtacgagattagaagactgcgtaccgcttcgcgaataaaatctgaaccat

SEQ ID NO: 56545 - DNA, 675 bp, Zea Mays
cattgttatttgagccttacgaattgagtcatctcaaccagttttgtagtcattgttgtttgagccttaagcattggcttggttactgattgctattatcctcggggtggcagcggcgagaacgacgacgctctgccagtggtggcgaagacgccaaagaggaggacgacgctggagagccagctgatcaagtttgaggacgaggacaacgagaaggcaagagcagccgcggatgcgatgagtcctgtgcaagtaagtgggtctctggggagttctttagagcttttcctcgtttggattcatcatcattgggttgctttgtttcatcttgtgattgctaaagaaagagggcttttgtcatacaaagaagattacaaaatagaaaggggcaaagggagcctaagttttatctgaatgatactaggctgtatgttactttttttgagatctgaatttctcatgcttgtagactgtagatgagaacattttagaactgaacaaaaatgctagacgtggtttaattttcttgtgtacttctgatggttgatatcttccttgtacaggatggattgttgataagaaaaccaccaggcatgaggtttccatcaagaagaaatgtgcctatgtctgctgacccagtgggccatctccacaatggcagcagtttcgatgcct

SEQ ID NO: 56546 - DNA, 381 bp, Zea Mays
actagtttggatatttttcttagttgagttttggatgaagtatagtgacattggttaagcaagtattgtgttgttgttgtgttgtcagtgctctttgtggagtttcggcatttcttcgatgaactgtgtcgcgcagaatgttattggcttcttgtcggctttattgctccattagttctgtagaccttctcctttttgtggggtgcaaagaatgtgagattacatgattatcttttcatgatggcaagaacaaggtttaggaagattaggagttttgtttcaatagaaccacttgttttatggtgctttgaggtgaggtgtttgatcttcttatacattcatctatgtggatgtttcaccattgaattaaaaacaattgtt

SEQ ID NO: 56547 - DNA, 584 bp, Zea Mays
ctaaaatcggagttaaaatagagaagttatgcaataaacaagtttttgggctatttatttattagttttatacttaaaatccaattctctggactatatgaatgagatccgggctacaactattaattttataaggactaggggctagcataagaccttgtgaccttgatgtgattactctgaattaccagtggatggtgggttcatttttaataatcttaaggtctcttttgcaaagttgactagctgaaggtgtatgggttgttcaaggccgtcggctcttgcctcgagggtcacgattagatctacgtcccttcgaagcgatacccatgcgggccatcggatcggtgatcaatggccacaatttaagataaccacgatctgatctctactgtccctaaaaaatagatggctcggatgaaacccctaaaccagtacctagttttctaatctgaaccgtccactcatcgaatcaatggtccacaaggttctttcccaccccgacacacaggacatggtggcgcatgcgccccacaacagcgatctagcgggagtcacgtgacacgatgcccccaggccccaaa

SEQ ID NO: 56548 - DNA, 882 bp, Zea Mays
actgccttacggaggtcgaaaacacaagaacctaaggagatccatccaatagctagaacacaccaatagctatgctacagagggaagagcaacaaggtatgaaaaacccttagccccagtcatctcccacatcaatctctcttcccccctatcttgagagctagagaaacattacagacccagccatcaaaaatacacttattccagtgattccaaatgatccaagctcccaaagcaacaatagaattgatacccttcttagcttgaccagtagctgaatctgaagcacttcccaccagttcataaatgaggatataccgggctgtggggttaaattttgcagaccaaaaggttgcagaagctggaaccagaacaccctcgagaaaacgcaagagactagaagatgatccaaggttgcagcttcttggtgacagagggggcaactggttggatgacccagctctcttttagcaagtctgtcaatcgtctaacatctcttatgagttgtgagccagaggaagaacctacacttcggaggaacccaagttttccacaccctagagtaggggccaaaggaggttgagcctgcaaagaagccctaatatgcagcctatgccctcttggctatagaacaaaaggattgttttttgctcatgatattttattaacctttaaggaggtgattggatgtctgtgttagattactgggtttttatttttaatgtaatgcgtcttggcagcccatgtactattactatatatatgttaatcctactgttggcgctgatttggtattctgggtgccaaacaccaggagatgtccacctggcggtgctctctgcggaggcgcagatggtccacgaactgggcgcaggagtggct

SEQ ID NO: 56549 - DNA, 500 bp, Zea Mays
gtagtgagaagttggtggttagaatctgggtgtttggttcggctgctgtggaaagaaactggtggttagaatctaggtgtttagatacgggcatgaacaatactactaggtacatattggtcaaagtctcgaccgtgtacatcatgaacaaggctacaagatagtatttacctgcaaaaacaaagatctagatgtttgataagctggctgtaggaagaaactgatggttagtttgctccacaaataacacatgtgatgttcattataactaatttgatttcatccctaaatagtttgcttccgtgcccgcttaaggtgagaaagtcgtccaacttttcatggacgcgggctgctggccgattcttggccgctgtggtgaagccgctgcgagccgtcgtgcggtggggagaatctggtcacgaagctagctgtttggatgggcttccagcttctggcggccagaagtccaccaaaagccgatcaaacatggcctatatctc

SEQ ID NO: 56550 - DNA, 559 bp, Zea Mays
cgaggagatcgccggcgtaacgtaactgcggcgcaggggagtccggatgccggaagcagggggcagacgtctgccggcaggtcgcagtggcggcgtcctccctagtccctactggtgtggagggagtctggagtctggacaggacggaagggctaggaaggaaggaaggaggcgtgtgaaacggaacgggggctggcgccttgcttgcggagggaaggcgaagcaggagcagctggacctggacgcggtcactgccgctgccgcgtggtgggtgacattagcacacgtgttcccgtgcgtcggccagccctgcctctgaccaacggactccccttcgagttggacttgtttttagctcggcggcgtaggagtaggaggtaggcttcccattgcttttcattctcatcatggatgtgttctgtgttgtctgctttgcttccttctgcttctatcacttgatcgatctggagttcttgcgctcagatccaatgagcaggcaggcaggcacgatcccgactgcaacaacaagtatgggcgtgttcggctggctgcaagccga

SEQ ID NO: 56551 - DNA, 368 bp, Zea Mays
gaatttgaaaaatacaagaggttctttgtaaaaaaaatgacgcggggcgaccgttgaaactgatgatttaatataataaagacaaggcgttttaattccaaagaatggtgagaaatcccatgcaagtggcatgtgtttttttcattttgaaatgttgtcgtcgtggggtttattcacatacactcttaaaatactgtcttgcggatgcttatcattaagttgcatgaagagtttgggacaatgaggtaagttctttgccttcacaatgcaattaactatagggcaagatagatacttgacttgattaactccataatggaagcatcactatagaagagggaagaagtcaaattatatgtagcactaag

SEQ ID NO: 56552 - DNA, 403 bp, Zea Mays
ccttggtctctttctccaccatgtgttgactatgcaaatcagcgagctcacaatcttttacacaggacaggacttcaagcatattaggagttagtcaccatcgtcagtcctcaagcaccctgccaattaaactaaaagtggactctgatgatacagtgaaagcaggcacatttagaacatttttagcaagtatagataacacatgataggtcaactagtgtcgctgccaccagtttagaagattgaaatcaaagtcggattgggtggcggtatcactatcatggtatgagataactcaaatatagcagcaacagtggatgatacagatacaggagtaccaagtctattagataagagaggaatgaaatattctccatagatgtcatcccatgcctccctagcc

SEQ ID NO: 56553 - DNA, 596 bp, Zea Mays
ttctatggcatattgagagagatggttgaacttatcaaggtactgcatcacagagtcaccaccttacgtcaaagaaacaaactcttccaactgaatatgatgccccctaaacgcttgcttgaactctgaccacgtaacaagatgaccttcaagctgaatggctacgaagtttgcccaccaggtactggcgggacctcgtagttgctgagcagcaaacaggggcttctgagttttcgtgcatcggatcaattcgaacttctgttccatcacgcggatccattcatccgcctctaggggttcttctgctttaacaaaaacagggggacgagtttccgagaattccatgtaagtagtgtctctgggggcttggtgttggcctttgcctccttgctgatgaatctgatttcctgccatctctcaaagaaaacgagtattaatcagtagtggcattaatcaaagaagcaatggcctctaccaaaatgggagctacaggtggtgggattggagtttcctcccgaccaccccgagaagttccagctccatcctgactatgagtctttgtcggcatctagagaagaaaacatacttgattatta

SEQ ID NO: 56554 - DNA, 520 bp, Zea Mays
agagaagggggtgtgttatttgagaagaggaggagcatagcaagggcactagatggggtgatcttgccagctgttgtgcaacagttgaatgctgcctccaaaggactgaaccatttgaaagtgacaaagggtatacctgaccagactgaggtgacagtgatgtatagggatcaagaagtgaggaggcatgttgtatacttagagaaaaaggaatgcacatgtaggtagtggcaggtgacaaggaagccatgcccacatgctttcgttgtaatcactacttgcagacaacctcagctagaaccctacgtggacatggctttctttgtttcaatgctaagggcagcatatgacaagggatggcctaacattactgacatgtcacaatggcctaaggtggataaagatttcaaattgcagccaccaatattcaagaggagaggtgtgggaaggcagaagaaaaacagattcttatctcctctagagaggacaagtaaggctagaagacaagttaagtgcgcca

SEQ ID NO: 56555 - DNA, 589 bp, Zea Mays
ggagaagacccccaacatatacagacgtcgataactctaatttcaggcaattcaagcagaaggtcctcaggaatggtgtcctctagcacaccatcaacagcagacatagtcaaacctcgaatgatcataatctctgaggcaacaagttttgaggtgttacttcaatccttggatcgccgctcatgctgaaccaagggaagcatttcttcttcctcttcatcatccccttcctccaccacatacctggtcgtccccacccacttccaccttccacgatatcctctagaccagcaccgaccagattatcatcaaggttcgacgtgaccgatgcagtcactggctgcaggttcgacgaatgatgaagcattttcttcttcttcacctctatggacctgcctaagcgttgattgacatggtcgcttgcatcgtgtaacctcagggttgctcattttcttccctcccccgctcgactgctcgggagccccacccccctactcaagtcatgttgattcagacgattcactagccatcatgccaagaacaacgtcgatctcagaatcattggcagttggtcgtatcaagaagtgag

SEQ ID NO: 56556 - DNA, 536 bp, Zea Mays
gcccatcctccctcggtgcctgttgcaagccgtagagagccttgcgcaggcgcaacaccttgccctccttgctagggatcgcaaatccttgcgtagtcaccattaagaaacaccgacttgatgtccatgtgatgaatgtgccaaccctcccaggctaacagcgcaaggaggagtcgcacggattccatccgtgccatgggggcgaaagcatcgttgaagttgatcccctcttgctgtaagaaaccacgtgccaccaagcaaaccttaggtttgacgatggcgccggcttcatccctcttcagtttgaacacccacttaagggtgatcgtgcgatgaccatgagggagatcagcaagctcccaggtgtggttcgtctcaaccgtgtccatctctgactgcatcgcggcacgccaagccacgtgtttctcggcctccgcgaaagaccgaggctagccatcatcgcatgcaagatgcaactctcccgccagaatgcgagacgccgggcctggcaccgacgagttgaagagaaggccctc

SEQ ID NO: 56557 - DNA, 460 bp, Zea Mays
gaagccgaaaaacggagaattattcaagtgacggatgtgatccatcagacaccgccaccggcgacggtgtcacaaattgtgtttgccgagactgccgaagccgaaggcgccgcagccgaagctactggagtggaaactattgaagctgagatcggcgaagccaaagctaccggggccgaagccgggaccactaaagagtcgaacctggaaaccacacttgaggttattgacaatatactcttgaaaatggctgaagaagaaactactgcagctgcggtgagcacgacgactgaaaaggggaaagagcaaattgatgaaatttcggaagaagattttaactttcaagatttgcttggagaagagttaacagacgctgagaaagaggagttgaaaaaatatgccatatcttgcggatataaatcaggggctatgctatttggtggggtgaacaaagggaaac

SEQ ID NO: 56558 - DNA, 552 bp, Zea Mays
tctaacactttaccatttgttagagtgaaaacgatcaaataaggaccaacgagtcgatttacaattttattcaagtcatttcgtgcactaaaattaccacatacatttaacaagcgtattcaccacataaataacatcatcacacctgacctcgacttaaccgcagaggaagcgatgactacttcggtatgtcaccacctctctacagtccaaaccaatattaactacatcgttcgagcctcatattgtgtaactcttataatttactatctcaaatacaaccatagcacgacatgcacttgagactctttgttcaagttaacgcaatcacgactaccatacacatgtgtaccactttttcccccgcgtacttttaatctatgctaaaaccatactcgtgcacatacctacttacaaacctatgcacaacgacaaaaccgacgaccatctcactacaacatctaacaagagctgtgaatgaaattaaaaggagcatctcaccacttcatcacacccattcatcgcctatatgtgcatgttggggactcgttc

SEQ ID NO: 56559 - DNA, 350 bp, Zea Mays
gtgagcaggaagaaggtttcggaatcaaatggtatggttgaaacaacaactaacaggaatagttcgaacagcaagttcagaattcagagatgctgtgacccaaaaggggtagttgttatcgtcgtgaaggcatgtgaggggatgtggtggtggttcagatagggtaacgtatccaaatgaatagctggaatagcaaggtcagggtatatctggaaagctgagtgccgcggcattttggttgtaaagccaccggagtcgacaccacagccaagccaagctactactccttctgaacttgctgcttgtagctctctttgaaccatgcatcgatgtctctgccacggctcact

SEQ ID NO: 56560 - DNA, 679 bp, Zea Mays
catttttgaggaccagcaagtagcccataatatagaaaaagactttgtcccaggtcagcgcaatgtccactgcctgggcacaaacacagaaagacggcctccgacacaaccaacaaatggagacaaggaacccaaccctatacaaagtaacgaagaagccagaaaagtacccctcgatcctaacctacctagtcacatggtgttaattagcgaaggcctgaccaggcaagaagaggccagtctactcgcttgctttgagaaaaacaaggacgtcttcgtgtggttgtcgcaagacctcgttggcgtaagttgaaacgtcattgagaacaacctaaacattaatctttcaatacgcccccagaagtagagaattcgaaagatgtcagaaaaaaatagaggcatccaaagccaaggtccaaaggctcctataagcaaaatgcatcgaacccatcgactatccaacatggttagccaatgttgtcatggtaaaaaagaaaaatggaaaatggcacatgtgcatagacttcactagtctaaacaaggcatgcccaaaagacaagttccccttcccagaatagacaaaattgtttcctcagctgcatggtgcgaagttatgtccttgctagattgttttttgggttaccaccaaatataccttagggaagaagacttaaccaac

SEQ ID NO: 56561 - DNA, 387 bp, Zea Mays
gtcaaatattggagaaacaaaagtgttagaaattttaagcccttcatcagaagtaacagcgccaaaggcacaaaaaagttctgccgcaactcccaagaggagaaggatggctaatgtactagatgtgttagaaacggtaaagactttgaactctactccttcaaggaaaactgccgaagcctcgaaagcgcaaaccgaagctgaaacaaagccgaccgaaattgaagctacagtaatccaagctggtaccgaagctgggccttcagagcctgctgagaaaaagcctggggaaattgaagaaaaggcaacagaagaaaaggccatagagcaaattttgcctgaaaaggttgccactcctgctctcgaagctttaaaagagagtattga

SEQ ID NO: 56562 - DNA, 602 bp, Zea Mays
gtggcgtaggcgtgtagctagagggtgagccgggtggaccgtcgcataccttataggccgacccaccggaccaccaaacagtctatagaagcctaataaaaaagaatgtgacatcagcttgacttacatcatcgacaaaacaaaaaatatcatgcagatcgttaggtcatttggctcctgtggttctgccacctgacctaatgagagatcgcagccacatgctgtgtgccaccacaacactgtccctgtcgctggcgagcgtcggttgggcacgacacgtctgaatttcctctggcctacgtgtagagcctcagacctcagccagagaaggtaaatttttcctcagacctcaaacagagtgtcgccgaaacgaagaaaaatgaatggtttgaccctaaaattggactttgaaaaggcttatgataaagtaaaatggccatttctccaacaggttatgcgtatgaagggtttctcaccgaaatggtgtgtgtgggttcaatcgatgaagttggtggttaaaattaatgatgaagttgttcctttctttaatactcacaaggtacattgacaaggtgatcctctttctctgattcttttcaata

SEQ ID NO: 56563 - DNA, 572 bp, Zea Mays
tgctccctgtggtgtattgcgaggtgagttaccgaccaccgtgattcccttgtagagagcaccatgtaggatttcgtagatcaaagctccgtgcacgatgtcgggatctggggctctccggacatggcgccaccgcgtctgtactcgcgcgccgccggctgtgcggctgggtgggggagataggcgatggccgttgaatcgtgaatgtgcggcccagattagcctaggcataacccttcgcgtgttttagatcgggccctagatttctgatcgggcggacgcagatcgatctgatcattttaaatccaaaccggccatcagggatccgagggctagggattcttggtggatccatctaatctataccattgattggtcatccaacggctcagatcctagcgtaccccttcgcgggtacctttttctaaagagtccctggggttttgtgttatgaacccgccgtccacagggcatggcgatgagtcttgggaattctttcacgttagtccctgcgctttctgggaattggggcctagtccagacagtgagaaaacttataaaataatttagaa

SEQ ID NO: 56564 - DNA, 596 bp, Zea Mays
gaataatcttcaccggcgttggccgcttactaatcgtgcgtcacgtgcctggaagccttgtagcaagctcgtccatcgccggtggccttgccacggtgaatgccatggtatcacctacgccagtgacttcccctctcttcggtcgccagcgtggcatctcaaagttagccgccaccgccctcggacactataaattgatggtactgctagctctgttgggttgtcacgaagctagagcacccacccttgcctccgattaaccaccacatcgcccgaatttccttttcccccaattcagttctctacgccgccgtgagtgaactcgccgtggccagcgttttgcacgccagttcaagcttccttaattggtgttctagcctccctcatgtccccggtagctcacagacccatttgattgaacttgatcgcactagattgccctgaacaccatagtttcctctcggttttcaccgtcgccgtgagcagacgtgctctgggccggtttagtgcaattggtggagggattagcgtcgtagagggtggaattcggtgtcggtcaagttagggctatggtctttgagcatatcggcccgtac

SEQ ID NO: 56565 - DNA, 408 bp, Zea Mays
cgctactgtgccgcgcaaaaagcttgtcttggtgtcgcgccaaagcaggagaagtcagactaagcaataggatatccacaaaaacgcttataagacacgttccaactctttcaataggcggtatggtactaatcaaacaaatccataacagtgctagcgatttgtgaggcccagcggttcatgtggcccagcgacgagtgcggcccaacgtccctcgcacaacgatttgtttacctaatgcagcccagcttccatatgcgaacgacgcatgtcatcctcttcggcaacctccgcctccgcgacggcgccgcacgcacgagctccactcccgtgacctcctcccccacgacctcaaccagctctgccacttccgcacgctccctgtgtacgccctcactaatcgcccat

SEQ ID NO: 56566 - DNA, 349 bp, Zea Mays
gaacacataacgacgataagaactaccacaaaaaatagttcaccgtaacacaaattgcaaaatgatgagccaaagtatacaaacctttaggctattgtaggcaaggctatctgcaagctaatccttagtcatcgcagataaaccaagttcaagcttcggatacaccatattatccatcatttcatggcaaacattgatctccttattgtctagtagacagtagaggaagtcatcatcattatctcctccgtatactacggatccctggaggtacttcagctccttggcataatattgtgtttcagcaacttgctctaccgatatctgctttcccgaagcatgtcgaaca

SEQ ID NO: 56567 - DNA, 319 bp, Zea Mays
cgctctgggagtctgctgatgctgatgcgaggcactttcgtgataacattcgattttttaacggccatttctcgttcacttctctgtactgttgccttgacagtatgactacaaacatggattgtggtatctacacattttgtgcacatggcatgatgtaccacaacgtaaggtcgtttggtagggaagctggggcggaacataaaaaccttgaactctacttctacgatgacgatcctagcctcgagcatagatattgtaaatgtcgtcaacaacaatgtgagaaagacaaggcagttattaaacaattggttgaaat

SEQ ID NO: 56568 - DNA, 584 bp, Zea Mays
cagcgccccccgccatgcccctgtatctcgcctagcacacgccgcgcccacgcaggcagccgtggatctcgcccccaccgtcgagcttccatggtaggcatcctcttccatactaggcggccatggcatgaacccatcccctatccgcgcccccatcgcacgggccctaatcctagaatggtgccttcctccttctctgtcgcctctgccctactcagaccttcgagacttccactggcgatacacacccactaggtacgtgcaccccttctcctctattcctactatgcaaaaccaagcactcaaactctagttacgtattcaaatatgaagttgttgttccaatcgatgatcaaggagcagacacaactgatcgagctcttattggaattccaaacaccgctccactaaatatttccccataggtgtacgtgcaccccttctcctctgctcctactatgcgaaaccaaccactcaaactctagctacgttttcagatctgaagttgttgttcatagaaaggatcaacaagtactgattttctttctttttttgttgtttaagatttttgggttaattctctt

SEQ ID NO: 56569 - DNA, 403 bp, Zea Mays
ctcggctcggctcgcgagcctgtacaatcattagctaaaatttacagtcattagctaaaagagtaaaagagtaaaacagcaatttacaatcattagctaaaatttgaagcacaatatgtatcattgcctcacattcaaaagagtaaaagagaccacacgtccacaagtccacaacagcactacaggctacaacagtgccatacgcacaaaagtatcatgcaaaatacaaatggtgtcagtgtcattgatgcaaaagaccacagaccacaacacaagtacacaaccactcagctagcatctaagagagtaagagcctaagtccagtagtgagtagtccagtccattgtcctgagtcctttcctgaccagtgaccagactccagagcaccatgcgacagccatcc

SEQ ID NO: 56570 - DNA, 911 bp, Zea Mays
caataattgaaaaatcaatctaaaaagaacattgcgacttattctcaaactggatgggttctcagttttttctcacttggattgctggtggcttagtgggaaaaaatgttactacaaaaaaggatatatttatagagatggaagtatttttttgctaacaatataaactcaatccaccatataatctttgaacttttccctgtataaactcaatccaccatagaatagtcatacccagtctggagcatgagggtagaggagcacggtaggagaggagagaactgagcatacctttgagctgtatgtcgaggtggtcaccattccacagcaaccccacgatggtgatctcctactcgttgttgtcggagtcgacgacgtcagtggagccatatgatgagttgcgcgcgccgtctcttcttctccctttctccctctttgctctccggcgtggtcagcaaaattgtgcccatgccgtttacattgcctcgcagaagtatacaaacaaatggagtaaatgaaattgtgagcgtaaaaaattagccgaaggcataaatgcatttcattggtccataccacagacattttgtgataaaaagtacatcatacatgctaagacattgctttggatgacatatttcttgaacaattccaagttaacataggtccttcctatgtgtatatgcatgaccctaaaagttcaccctactgcaaatatatacaataccatccaggagagtttgccctttcttttctaggaatggctaggtgacataaagcaattttttagttattgcaacaaatcttgacttcatgatctattaataacagattgaagtacacagcgaccaagtcatgcgatcctaaatccaaatcgaagctactctactagatattggtaatccagaagctaa

SEQ ID NO: 56571 - DNA, 293 bp, Zea Mays
gctaggtccccgacgccgttcacgcgcggccgcgctccggcgagcacctgcaccggccgaacggggcaacggctgggttctccgagcggcagacatgaaatcgggactaccctgaccattttccccaacctaattgcaactaagaccaactacgtagctctggccacggtggccgtgatcatggcggctatacggttgtgttcccggcgattggtggcgatataattcaattaagtggggcagtgagcattgtggacatacaagaatgtacgaacaacacaaacatcgacagg

SEQ ID NO: 56572 - DNA, 603 bp, Zea Mays
aaccattcttatttcatttgatatacaattattcagttaaacaaaatataaacgtcgcagggatctaaacgatattaactatagaaatcgaagggtagctaacaaaaaatagatctcgtcttctaccttcagcacgtggccacgatatatggagcggatcgacggttttaacggtgcggacgagctaggcgcagggacggatcttcctagcgatgatgacggtgtttggtgtggcgatggcgatcatagtgacggtacgagctccgcgcagatagcagatagcatggggtgtaacgagctccagcggacatggcgctgatacatataggccggggaaggagagaagataacagggagaggaaacgaaggggtcattgcaattaatggctagtggagagaagaagaaaaatgggaacaacgatttacgatggtggcattctccactgcggtagacgagagggcggctgcgagtggaagagaaaacggaaggccagtgcgtggttagcggcggcgttctcctgtaacgtaaacgtgagagccacggagaggcggagagcaggcagagcataggacggtcctgggccgtggacgtgcgtgtctcgt

SEQ ID NO: 56573 - DNA, 504 bp, Zea Mays
cgggttgcctgaagagatatgtgggtgggcgaggagaagaacgatttgggttgaagggatggattaccaaccttgtccgctttttagacccctgagatgatccttcacacacatatatcatgatttttccttggcccgaattcttggcttcaactgacagtgttgtgctgacagccctgctataggtgagatccagacacgtggccatcttgcgctggagtctgttattcaaccctctcataaagcaattctttttttaagtctgtgtccacttgatcgatagcatattgggagaggtgattaaacttgttgagatgctgcattatagaatctcccccttgcttcagacatatgaactcctccagcttcatctgtagcacccctttcggaacataatgttccctaaatgcttgtttgaattccacccacgtgacatgatgtcctacaggctgaatggctgaaaaatttgcccaccaagtgcttacaggacccctcaaatgttgg

SEQ ID NO: 56574 - DNA, 1871 bp, Zea Mays
tagggtacttaaccttaaaaggggttagaagggtaaaacaaaatccaaatagagaaaaccctaaagcttaagtgaaatagtcatgaaatgttactaagaatggacctatattacattcacacccctgaaataccaaaaaccctaataaggaccctggaaaaccctaaacctaaaccctagggggttaagcgcaaaattagtgcacttttggactaaagtgtaaaaactataatgttaaggcatataaagtcatttggttcacaatcatgaagatttgcaagctaaaccatgaattttggacctatttgcaaaaagaccccatgtgtgttctagggttgagtctgaaaatcagtgatattgactccactttggagctctatatcttccaaaatagtgaggatttaccctaggtcaccacatcaaatttgtaaacctatcaaaggagaacaattttgcttaagagtgtaagcaaggttgttatgaagaatttggagataattaaacctaaagtcaggttgtcaggctgttaaagtccgaatttcagactgacagtgcaactgtagtgactttgggcatgaatttaagcaggattgagcaggaatttgcttaggattgctataacaatattgtacctagatcttagagctaaaactttgctaaagggtgatgatcatgttactgcacaaaatcgggagtaaacagccctgcaaatcgctttgtcaagtgactgaatgggctttcccatggtacagtaacctgaaacggatcagatcaagcgctcagctcaccgccgacgatctccgccgtgattcgtgttgttggcttctcgattcgtgctcggggtaagcgcataacgtctcgggtagaaagatcatcatcgccgttgagctggacaccaatccggctagccgccgtacctcccccttgttcaccgatcgctcgggtaggatctcaccaccgttgatccctcactgccatccgccgcgtgtccaaacactttaccacgtcgcggctaactatgctacgcacgtccggtgatcgccggaggagcagccacggtaatagccacgttgtgcggccaccagtgactcaccccagttcatacctatcgcaatcctcgctcctcttccgattccggtcgacggcctataaattgagcccagattctgcttcttcaccacatcccgcacctcagtaactgagcaatcggctcaatttcaccggagaactcacgcagcccacaaattccctcctccctgtacttaactccaccgtgaagaactccaccgtggtcagcgctcttcgggttagtaacttctcaattgctccctgttctagctcgtttgtagcctcctgttgctctcagtaccgaccaattgaagtttggccgaagcctttcaccggaacacacacctgctctatagaacgccgccgtgacaccctctccgtcgacccacgtttctgtttgtgcccagtccaaattctagtgtgtgcatcacctctggtaaacccatgatgcttccccaagcttcaatttggtcatccacgccattggttggtcgaaacgtgttcatccctccgatcatccgccctgtcaccgtggactggttgattcaaagtctcgatgatgaaattgattgaggggaagtgtgcggtaggggtctaatttggtctctgtcgcacgggagctccaaccgtggcagcatccggccggaatacgctcgccgaagttcggcgagtgctattcctcgtcgtggacctcggtctgcgaagagttagaacatggggggttccgtggaaatcgttagtgactcattagaatagtacagggcacccagttcaggttattcaaaacagcaggggcttattcg

SEQ ID NO: 56575 - DNA, 592 bp, Zea Mays
gtcgctgacaggttgcaaataaaccctccggttttctattcctttacccgatacgtcctcgacggcgatccacgctgggagccgagctccgacgagctagaccggccggagggggccaagaccggcgcctagcttaagactaaaccaaatccatgaccaagggagtatttcccccaacataattgcactaatgatcaagtggtgtgctctggccacggtgaccgtgagcatcacggcaataccgtcgtgttcccggcgaccagaggactcctagcgcaattgtgtgggttgtcgagtatcaccggcgtgcagagaggctagaacaggaacaaagagggcataagcagacctgtggagggctggccgcggtggtgtgtggttcacggcagcggagaatcgatttgggggaaacaagaaattcggacactctggtgatcgattgctagcaatttctggtgattgggtagttgatgatcttgcggaactggtggagggctcaatttatagagagagcaagcggtggtgatcaattcggccgagccgtgctggcggtcagagatgaagaagaagcttggcgcagtgatttcgtgtc

SEQ ID NO: 56576 - DNA, 524 bp, Zea Mays
tgagtgtggggttctgagttgtgttagaagaacaggaattgcccttctcatggtgttcatgatcctcatgtccagagatgtcctgctaggcctagaggtgctttgcctcatgtttctaggcctcaacgagtaagaccacagggtggtcatgcccggtggggtattggtcatgttccatacggctaaggacccttgtggcagtggttgagggaccagtcggggcgcctgaaccggagggtgagtcggcacggcctgtgccttggccaggcatgccctagccatggatctcgcgggagtcatttcaggcccagtggatggacccttccgagttggagcagctgctaactatctcttgattttaccctctatgtcgacgatgcggtggggctctgctctagtcagcgatgcacgagattgatccaaaatggaacatctcacccagagcgaagttgacgatggtggtgaaggtgacagccatggagctatccatagtcgatgttgcaccccctacctggtgcgccagc

SEQ ID NO: 56577 - DNA, 317 bp, Zea Mays
caatattcaaatggagaagatagaaaaatgacaaaaatgaaatcgaagcatacctcatctaagattgccctagctttgttgcatgcaacctctctgccaccttttgtccaaatatgggtaataaatctatttcccacactaaaagctttggtagatactgcattcaggtcatctgcggaaatttcgaagttcagcctattcacaaccttcagatgggtacaccctgccttctcaaagcattgagcacatcatcaggagcaaaactgaccttttctaaaggaatcaaagatttcacgtatttgcctagagcatcgacc

SEQ ID NO: 56578 - DNA, 490 bp, Zea Mays
gtgctacccactaatctcaagtttggggcaccgagattaatcttcgaaaacatagcagaagctgaggctactagactggaggatgttgatatactagaagaagaacgattgaatactgtgattcagtcagcccggtatcagcaaactctgaggcgctatcatgataaggtcatacggcatcgatccttcgcagtgggagacctcgtcctccgtcgagttctaacgggggagggacggcacaaattgtcgccactatgggaagggccattcatagtagcagaagtcactcagcctggatcatatcgtcttactcaagtggacggcacggaaattgggaactcgtggaatatagaacatctcaggaaattttacccctagctagatttcagaagctattggggcggccttgtattctgtaaattggaaaatacatcatcaataaaaatacttcattctcaaaggcactcaaaatgtttactgtcaacctcac

SEQ ID NO: 56579 - DNA, 602 bp, Zea Mays
ttggccttgtttgttctattccaaagcttctctttttgccgaacaacgaagagatcgaaataatgctttatagaacaaattggtatataatatgaggagaaatgtttgccctgctggcagcatcacaaataattgactattgttattagttctctctcaaaagtataatacctaaaaatgttgcataaatcgatacccaatttcagagcagtatgagtaattgggtaaaccatgggcagtgataaaaacgagttggactatacatctctgcatataaaaatctttgcttggcagcattggcctgatgccgtgcactgcactaccaatataaacacacacatttttcctatgtgcttaaaagcacaatgcaacgagtgaatgtctttgtgagcgttagaccctgatggtcattttacttgttgatctgaagtcaactactagctccaaacgacaaatggtatgcatgagcccctgaaggatccttatggataaaatagtgttgtgcatattagtctaaatcttaatgattgactgtgcatttggtaataataacaataagttggcagaattgtaaccatgaagcaacttgttgttgcgtgtct

SEQ ID NO: 56580 - DNA, 351 bp, Zea Mays
cacgtatgtctcgtgctgtgttgtactaatgtacatgtccagctcctccttcaacaagaaaacgtgctgctgcaggtctcgagtccaacacaaggcaaccgggcacctttttatgtataatctttctttgacgcgtgaaatccaaggatcagcagggaacggccaaactaaaagagggaggatagatgcgagtcaagttgggagcaagtgcttatcaagagaagcgaggggcacatcccttttctacgcggataggcaggaatactggagtattactcataagtgtgtgggcgtggcgatgagctagcgcgcatgatcgctcgctgctcatgacgcaacgcggcccctctg

SEQ ID NO: 56581 - DNA, 483 bp, Zea Mays
gtaaaagtttgtcgacgacttcgtcaacaacttcgttagcaatttgcataacatctaaagcttctttcataaccggatcaacttcggggttgtatggctccggtgggggagagaggttggctgtaataaatatatgatggtgagttacaaaggtaaaaacgagcaataaggcaaaaagtttcaaataaaagtacctataatcatggcgcgctcgacagcttcctcagcttgcttagcttcctcacaggtgtcgtgagattctttctcattctttttaatggcttcgtcagccatctcacgaccacccttcatccacacatcggagtaaaatttgccgcccagggtagaagcctcaattgaagggtccttagtattgtcaatagagagaatagattctggctaggccgcggccttgacatgttcacacctagccttttctaagattatcgcaatccctcgggcaccggaaaaagcacaaaaatc

SEQ ID NO: 56582 - DNA, 494 bp, Zea Mays
gttctgtactgtgtgaatcactcgattgggtgaaaataaatttagagagtgtctaaactttataatccgaccacacgcgttattggagaaaatttatgtacggggtttatatttgggattgttcttctagtatattattcacgtcagagaattatgtgtttgaatgacgggtgatatctatctgaatttaaccggatctaatacagactaaaatatcgaagccaatatcattttgatttagtccatttacatccacacaaaaccttaatccccaaagcattatctacatccgtatgtttttctaaaagaataagaaaatttctctcctttatcccatcgttcctttctcttatccagagtacgagatcacacatatttttgtggagactcccttcctcgtgccacctccatacgcacgtgtctcttgctcataggggctgcacaactgggatttgatcttatctcacgcacgctccagctctcggcaacctgtg

SEQ ID NO: 56583 - DNA, 509 bp, Zea Mays
ctagatttattctagcagttggactggttcagagtagttcaacttgcctttatttgtcgtgataatttttagatttagcctattcacccccctttaggctactttcaatcttcgacaccctaaaggtcgatgacaactcgttcaaaaatctcgggttcatcctagaccttctagcaactctggtgtcccacaatcaagattctaaagatccaaatgccatctcgactaatccatgtcaatctaatcttatgacggtgacttggacctgaactcaaccttgacatggacatcaactcagactccgacttcgcaccaactttgaatttggcttatactcggacatgtatgatctatttgaagtatgcttcatgtttatgtcaggacaccaagatggtcacctctcagacatgtagatgacaatgctcatgcaagagctaggaattataggaatcaatataagttgtgcgagtctggcagagttgttcatgaccaaatctagacaatcaatt

SEQ ID NO: 56584 - DNA, 1593 bp, Zea Mays
tttaggatttttctacaattttctaggatttgtttatctctggcagaaaaagaaaaagaaagatttgcaacagttctaggccaattttgacccagacggcccaacgacacaggaaaagggtcgcgcgcccgcgcgcgcccgcgtgctctggctactttgcatagacgccctcgtcttttcagctaaaccgaagcaggttcatttactattgcactaagtcgttgacacattgcagaaataccctcgtacttctatttcttctccacaaatgtcccttgccacggtgcgctcgtcgttcatcacagacgccgcacgggctggccatgaccggcgatggtcgccttgtctagctacaggggaggcataaccgacccaaggttaccctagaacatgctctaattggactaattcgggccaggatgtgcctaaccacggtgaccgcgggtacagaactcagatcgaggtgttccggttgattaggtgaagtcaagctccaagggctgggcaggtaacgatcacaagcacatgtgggtgctgaaacacgaactacaagggcgaggacggacctggaatcatctggccacgagcaggtgattcacggcggcgcagtcgaccgaattggggaaaaaatggcgttgcggtggctctgggtgaaattgggggcggggattgaggctacacggccgtaagaaactatgctttcaccgtgcgcaaacgatttgggcaaaggtggagaggtcagtgcgaatttgactcgatttggttcactggtatgtgtgtgatgaccgagcctcgccgcgaaccatgggctatttatagccgcggaggtccggcgatcacctcatggcacgaataccatcacaagcgcatgccaagcacgtagagaattggtacagtgaggaagaatcacggtgccgaggacaccgtggcggaaaggattgatgcgatggccgccggtgaatcactccggccgagcacaggagatggcgccacgtacgattcacccttttcccggcgttatccgtctataccgtgcacgaatccgggcggcgatcaacgacggcgagctgagctggcggtctgatccatcggggcactgtaccatggcacatcttcgtcagtcgcctgaaccgtcccccttccaccgactagctctcataattcttgtgaataaccaggcaaaattccttaacaaggtttgttcttgatttaacagtcttcaatccttatacaggacatttgggtcaaaactgaggggattcgaagatatggcgcatcaaacatgacctcacctcactggaaccttgttttaaccttaggttcagtttcagttttctgaaactgttctgacagagcaacttgtaacaggtttttctctaatttttgtgtcacaactcaagagaatatctgcatcaaagttgttctcctataataggttaacaaaattaatgtggtgacctagggcaaaaaccctagaattttaaagatacaaggctccaaagttgagccaatatcactgaaaatcagacttagactattaaggacttaagaggtgagttttgcaaataagcccaaaacttagggtttaacttg

SEQ ID NO: 56585 - DNA, 1015 bp, Zea Mays
ctcgttgtggccctttgccctacgttgcgttcttgccctatcgcaacaaataggatgtggtgcttcacagtatcgggcaatccggagctagaataccccatccacgttgaggcagggtcgtttgctcgtatcgtctgagtcggattcaccatgccacacaccactttggttgatggcgatgtacacatcacatatgctccaacttgaattctatttcatcgggcctactgtgcaagctacctttgtcgcttggagctgctgagcatcatctgatcctcttggtcgggtcacagacaagcagttgtatatgtcgttgaaaagggtgctcttttggttactcgtgaaccaccaacccttgagccgcttggtagtacaatgacgaggagggctcaatggtggagttgcatgtgaccgctatttggccccaaaagactaacccttttttgttatttacctcaatagggtcactggagacagtgttatcctaaacggttttagacgaccatttaaacgggtctaaacggtaaatggaggaacatcgtgcagttagggcctaggcggtcttctaaacggttggcttgtttaaatggtcaacgctcgatctaaacggtctaatagaacgggtttaaacgagttttaaatgatgtttagcctatttattgagtcgttttcttgatagggccaaaatgtggtgggctcagctacattggcctgttattgttatgttccctcaccttctctaccccaagattgccttctttcctttggttttgacagtttctatacatgaatatgtattcttcgaacatgttttagttgttgttctatgattaactaatctagggtgtgagtttagttgtcttgaattggtcattttggtgatatggatatgtaatatgttatgtcggagctgttgtccgtttataacaatttttatcgctaaccaaatatatttgtggatttacttatttactcttactgaaatttacttactgcatactaaccattaaccctt

SEQ ID NO: 56586 - DNA, 528 bp, Zea Mays
atcatatttaaacaataataagtaatcttcccctcttatagagacatggcacgcaccaagactacccagcagaaggcgaccggacctcggggtgtacctcagcaccagttggctcctcgacatgaggggagcagtagtggaagtaatgatcccataggggatctggaggttagagttgaacgtctaacgatggaactgcgtcatggaaacaggaagcgtgcgcgtgatagccgccgcatcgctatgttgtcatgagaggtttaccatttgcagtgggagattgtggagcaggataagtctattgactaggttgtaaatacacgatctatagcctaggattgcgaggtgattgcccaagcccaggtggaatagctaagcgtagccctagaaaatctgcaagcatataataacactttgcacgaggaagtgcatgtgatgtatgaccagttgcatccgaacgtgccaccagaggttgcttccatgggagctggaacatcaggagcagctggcggaggaccttatggggag

SEQ ID NO: 56587 - DNA, 1007 bp, Zea Mays
ccctgagcttagatcggagatatccttttggcttgattctttatactcttccctccctctctctcttccctgctagtccgtccctccctcgttttctttctttattgctgtttcgctctcttgtatagtgttgttttttgttttgattgaataaaaagttttcagctgtaggggcttcccctaccgttttcccggtaaaaaagaaaagccggccgtgtttgctgctgcaatggtgagcgaacttggtttctgaaatctgaaggcatggtgagaacgtattttgcgtaaccggggtcattggctgatcatcttggaggatgctaatggattagcggccttcctggctttcttggtcagcaataatatctaactctttggactatgaagtgtcctgatgcggctgactggctgagtgttctcttaccgattgccacacatacgagtaacagacaaggatgaatggtttgccatcttcgttggactgcgaggaaacttggattctgaaggctccacgagaacatgtctgcaacgtcagaggcattgacagatgattttgaagcctggcattcatcatggcggtttgttgaccgacaatgttcttgatgggctttgtgctccctgaaaacaacttctgtcagccggtgaaatgccatccggtgcacttacctactgtagctgtgcattccggcgttcacaggctcacagttgttgtttgaatagaacttgttgttctataactcatctgataatatttgattagtgattattaatttatgatacgatagggcctaattttcaaccatcttcaatgatgcttgaagtcaggttctgcatactaggtgttatacttgagaagcaagaaaccgtgggtgtgagtgtgacaaccagaatgaagtcagcaatgtcctcatttcaacacacaaacattatctatctctattattcatagacagtcatggcaccgagctgcggttgccatcttgttcacgtcactgccttcacaagcc

SEQ ID NO: 56588 - DNA, 349 bp, Zea Mays
agctgagtggtttgggtaggggcagtagttggacgaatgaaaatcggctgcttaaaaggataggaggatggacgaggaaaagaacgattcggattgaaggaacaaattactagccttgatcgcttcttggacccctgagaggacccctcacctccttcacgtccaaacattttttcttcccttgccccgaattcttctcctccaccgatattgttgtgctcacggccctgttgaaggtgagatccaaataggtagccatctttcgctacaacctatcactcaaacctctcatgaagtagttctgcttctttaagtccttgttgacttgttctatggcatactgagacag

SEQ ID NO: 56589 - DNA, 329 bp, Zea Mays
tcttcgccaaccttgaaatgaagcggctaagggcggctaatgaccccgtaagcttctggacgtccttgatacgggccggaggcctcattgcctcaatcgccttgatattctccgggattgcttcaatgcaccggtacgaaaccaggaaccccagcaacttccctgcggagacaccgaagacgcacatgtccgggttcagctttgtgcgggttgcccgcagcctgtcgaagaccagggtcaagtcttccactagggtcgaccttctcttggtcttgactatgatgtcatcgacgtatacttctaccttgtccttgatcaggtccccaaaa

SEQ ID NO: 56590 - DNA, 545 bp, Zea Mays
gaaaaagggagagatgggaagagcaagaccacaaataagaaaagggacgtaaacgacagattcatgagtatcctctgttagaacggtgaccccgcgacaaattggccaaaagtagagcactttcggaagcaaaaccccaatgtcgacaagatgaaggaggtcagattctgagataacggacatgtggttacccgcgaatggcaactggctgttggggtcgatgggcgggatgattgccgcaacagagctttgcctcttccattttggcgccatcgcagtcttgtcggtggaacgaacaggaacaagatctcagggaagcagaggagtggtccgaggcgaaaatgtaaagctagggctcagaaatcaaaaacgcacgtcggtgcgagtataaatggggtttcccgggtcaggcactatttataaaaagtgccaagtcattactcgggaaagcaaaacttcaggcatggctcggcggttacctctaaaacaccggcagcgtcagatatcactcgacagttacctctaaaacgccggtagcattgaac

SEQ ID NO: 56591 - DNA, 666 bp, Zea Mays
tgatgattggctaaaaagtattgaggttatcagcgacgaactacttggagcatatagcggggccgaagatgatgccttgtccgcagccttagggggccgagggaagaaaagatgaaacagagtatttgatgccattggcttcgtataccctgattatcactacccgctgcaaaggcaagggaagaaaaaaaactatcgcttcagccattactgatgtgccgaagggcaagaagatgaaggtactgacccaccggccgtgatacattgaaccggccgtggtgcctgaatttggcgagggaacttcttctactgccgaagtaaaacaagctactccgattgtgcagagcgccgaagaggccattgtagtgccgaaggtgcctacagttaggccagccgaagctgaggatgataaggccgaagagccacaggtggaaaatagtgaaaatgccagaaattttaagtcctccagcagaggcaaaatttctgaaagtgcagaaagctcccgccgcaactcccaagaggagaaggatggccaatgtgctagacgttgtcttggagaccgcaaaggccttgagccctggtcctattaagaaaattgctcaagctgctaaagtccaagccgaggccgaagctgagcctgcagcgcctattgagacgaaggtcgtc

SEQ ID NO: 56592 - DNA, 531 bp, Zea Mays
ccgaggccgaacgggacgccagtgaagattgcgacgccgataccggttaaaatttgaattttgaaagttggaacgggcgtgcataccgccgccatgaacctcaccaatagggtcagagctcgagaactgatgaggcacagaacccggccgagaggaagaagacgacaagcccaggcgattgaacgctgagattctagggcgagactgataacgcccatcagcgggaaacctccaatcgttgcaaactgaggccagattatcaggggaagagcccaaacgtctgaacacagacgttctagcccaaggctgacgctcaaagccactgggagaattaatgttgttacgaatcggaatagcattggcactagtgagagggagcttaacaatatccgcaaaggataaactctttttgccccgcacctgctgccaagaagacgcttcttcctccgaaaagatcttgaattcatgtttccagttaggtccaccataattccagaggttgaagaaagccctgaattccttacgatcaat

SEQ ID NO: 56593 - DNA, 482 bp, Zea Mays
gtttttccttcaatgcgttcgcctccgttagcgcatcgcgtagctctggaaagcactgtggttggtgaacgagaccctggccacactactcgccggagggcaccgccgtgtagctcttgcgccgctgtcctgctcgggagcacggggaagagaagggcgtggccgtttgatccataatcaacgaccacgattggttaggatgggaaacgtaggcagggccataggatgcgatccgaacggccacgatcaaatcgcagatcccctttgggcgatggaagctagaccgtagatccgggatccaaggcccctaatggcgtaccggttcggtaaagtgaggatttcatctgggcccttggtttctaatccaacagctcacaatagatcttacctcttcgaccgtgatattatgctaaagagtccccgcagaacataggaaacaacctgccgtccagtatacagaaacctgagtctcgggaatttta

SEQ ID NO: 56594 - DNA, 295 bp, Zea Mays
ccgggaattcacttgcccgaagaaccccgttatccacttcgcccacaaaggagtgaacacggattacaaataagaaggaagcaagcgttcctgaaacggagctccgtcgagccgtctttccggcaccttcgccctcaaagaaggatggaaaggaattcaccaccgcagcaactcatttctaccctgacatcctcttcattgcggggagattggagtcatctcccatctccgacgacgagccaaccatgccagaggaagaacctccccaacgagaagctcgacgatggaggaacag

SEQ ID NO: 56595 - DNA, 395 bp, Zea Mays
gtttgggaccacaactcgccaaggcaaggactcttaccccgtatatagaagaagggatgacaacaagaagaaagagttagagagcatgatttggacaataggtgggttgtgccatatagtccaaagttactaagaatgtatgaatgtcacatgaatgctaaggtttggtcaagcattaaggccatcaaatacctttacaactacatctataagagacatgatagggtgtatatatttaaatggtgcgacgacgaccaaatgagattgaaagtttcagggaggctagatgggtaggcctacaagaggctttatggtgaatctacatgtttgatcttaagggtatattacccctagtgctacaactgcaacttcatcttctaggcatgcattttgtt

SEQ ID NO: 56596 - DNA, 344 bp, Zea Mays
ctagagagatcaatctttgtcagcgtcgttgccttcctctctagggtggcaggctcctaagacgttttcgctgcttctgtcgctgcacacgtgatgctagcacaccagtatcacaacgttttagccctgcatgtgtggataatgtggagacactaatgcagctgctactgttggtatgcgaagacatatgacttcttccactatatcgatactcttcttacattatacgacgcatctagttataatgatccatgatcctctatttgcatgttgtcttatttgaatatggtagatatactagtgcatagcgtatatgtttagctacattggtattagagtgccac

SEQ ID NO: 56597 - DNA, 404 bp, Zea Mays
gcatgacatggtgacctggagtattctagtcttgacgccatacggcgtctccatgtccagaggaatattatttatacctggaccgacagtgggaggatgccaacagtgcatcggtacgccactacgcagcaagcggatgcggatcggatcagaccctacgcgtttgaagagtttctcctccctgacccctgacaccgtcgtggtattataagcaagcgccgaacggacttgttaaatacggttcagatcataccccggaaccagaccatcatctgatctctgaactgttgttgcaggccacagctggactggaccagtgaaattcactggtatctttgcagtatcagctttgtgcggcaatgtcatctagcatctacctgttctacatgcatgatctctattag

SEQ ID NO: 56598 - DNA, 813 bp, Zea Mays
ttcatacgtgtgcatcaccattcatcaatagacttacctaggtcaaggtacccatctgtgcccctttagagtatgatcaaatggaaaaataaaggttttgtccctaatctatgtgcacatcaactccaatgacacttagaactagtctattgttgtcggggaaaagatccttaggcccctgagggccaccgggcagagagggcattaggaaaaggtctctggactctcgggtgccattggccagcaggagggtaagggaaccttgtaccctgcaaagcacccgccccggataaacatcgaagcgctgagcctgagatcgaacgaggtggagctagaaagggggcgagctaacctaagggaagccactcgagtggattccttgtctggcccaagactgacccgccataagtggccggtcgcattgactacgcctgacaccgagccaaagtagaagagtcggtctgccacccactcatgacatgtgagcccctcggcctgtggcgtactcatgacatatgcgtccttcggcctacaatgcactctgacctattgatactaggtctgagtacgcaaccgttcataggacccgcaacatgacgagtcacgctgagaccccagctacggatgccaggggtcaacgtagcacagaagcgataatgatggcgacagggccccacgccgcccatcataatgagtacgagccaagacgaccgggtgaccaagaagcatatgaacaacacagctttaccagggtaaaacacttagttttaccaccgcatagtagctccttctcgaggaagataccaacgaccg

SEQ ID NO: 56599 - DNA, 499 bp, Zea Mays
gttgatggtgtgggacagtggcggtgcctagaaaggggtaggcgcggacgcagggagagggagtgggatggtgtcagctagagagagggagacattaatatcgagattgagaaggtacaaggactcagagttttcactctatttctacttattgaaaaggttaaattggactctcgattgggaggtgtaccattcaagttaggccctattggttagtttaggtccaacatggcaccttggttgaggccttacccgattaggacccttctttgggcttcattgggcttagcaaggacccatatttaggcctatgacatcactcccccttttcgtataatgtcatctggtctaatggtagacatcaaactagtctgatggtaggcttcaaactatataggcatattcaatggtttgcaacaactagtgctaacacagtactaacacaatagctattgttagacatcagaccgtgcttaatggtccgacgatgcatagtgag

SEQ ID NO: 56600 - DNA, 800 bp, Zea Mays
gccatcctcgccgtgcaatccgcacatcgccgtcgacgacgcacctgcggtcgccaaactaaggtgaggatcatcgccgagccttcggttacccttgtgaatacagtacacctagaatcgtagaggtcagtgcagttgtgggagagcgattgctcgtcgtcgcgcgttgtcactgcagagccgctccgctgcgtgagcaggatccgtgcgcagctgattcctttaagtgatagccctgtgagatttgttagaggatccgctacctagatctcgagttgagggtaggaatcggggctctggatcacgattgggtgttcctccggcgatgctccgccgtgtggaggtatgcgccgccgtcagaagcaccgtgggtggggggaatatatgccgtcggtcgcggattcgcgaatggacggctgggattagtccccgtttaccctttcgcgttgggttgatttggtccgttcatctggctttgaacggtgtagattagatgccacttaaccctccgcgcgcctcgaccggtgccgttggatctggatcgcgtggcgcttagtctggctaggagattttaaatctggtgcgttcacctatgatcgcacggttgtggcgcgatgcaccaccagtctaatctgcgccgtctgttctaatccgacggcggggaaacacccataccccttcgcggctaacattttacgtatgaaccgctctggtttttagaattgaacccgtagtccgtagcccagtggtctgtgtctcggcatatttagcgccagggcccctacacttttcagatttta

SEQ ID NO: 56601 - DNA, 745 bp, Zea Mays
gagctgcacgcaccaacaattttcctccaaagcttccatatcagagagaatggtaatcttcgtagtcttatcacagcttaattaaaacaagaggactataacttggacttctttttgctagttctaatacggagtacctaccaggcccgttttatcagggattcatctcaacttctgtgctcgaggccagtgacgatgcatgcatgacatatcttgtgccaaatatagcgctccgtagaggcctcactgaagatctactatatatctgcttattggaccacgtcatttggtgaaaatcctagctttggtcatcgctagtgtggtaaccacgatcttccactgtatcttgctattggttaactaccctcctagtccttagggcatatacaacaacccggagacggtgcaacggttttctaagtacaagggacataaaaaaactgtatggtacaaccctgagccccagactcataaatgacgtaaagaaacaatgcatatggagaatcatgtagagatgggctcttcgtgaatagcccgtctcttgtattttttagttaaccccctaaagacacatcaagaggccctctattaaatggggggttgtccacgcccttagcatttgcgtgcactggttctggttgttggcaagtgctcgcctacaatggcttgctatgtcatcctctctgccactttagggtcctctgccatatcattggttacgagaccatgattctatttcttggat

SEQ ID NO: 56602 - DNA, 519 bp, Zea Mays
agaatcggtatctccttccttatccatcttgctcgacatactatctcccacgctaggcatatttgcctagggcgaacggctcgatatttccttccatcgcaccctccagcggttacctttgagatcgtatgtgcacaacaccaggcatccaaggtgtcacgtcgtccaaggcatctttcaaggcatcacattgccacggtgctaggaatgaatgaccgcattgttgggaacaaatagactgacacctcaattagtcgtatgtggttgtagacacacgatacagtactagaaacgaaacagagtcggaaccagtgaggacataaaaatccaacgccgctaaggaacgaatgaccacgttgttgggaacaacaaactgacacctgcatcggtcgtatgtggctgtagacacacggtacggtactagaaacgaaacagggtcagaaccggtgaggacacaaaaatccaacgccgctaaggaacgaatggccgtgttgttgggaacaaacaaaccgacacctg

SEQ ID NO: 56603 - DNA, 898 bp, Zea Mays
cattggatgagtgcgccacaaactcctctacaccaaatgcaagtcaaggcattccaataatgtgtgtgaatttaacagcccaatctccctcgatgactgatattatttgcatcaatgtagcacttcagacattttcacatacatgctggaatgccagcaattgcatttctaggataatcaacgacaaatcagtaacaactactcgataatcaccaacagctaaatgtgacctgccgaatctcgcaaccaccaaataactatttaacaactcaacagaaacagaaaattaagagtcgggagctccttctcaaactactatgcaacaacccaaatctacccccctactggttgagcgaccgcgacagcagcgacatacaaaaaccactatgcagcaacaccgacaaggaattaaaaaaaggaagcgaaatagcgcaaaggaagcgacgaggatacggagcttgtaggcgcgcttggtgttggtcgtcatggccgtctaccttcacagcgaataccgcgcagccgggtccaatctcatctcaaatcacgctgacgccacgacgccaccaacgggacccggcagcccttccacatgcaacagctctcgaatgattattgtcacaaccaattaagaacatgaaaactaatatgcaaactgtcttgtaaagtatttttaatgataaaagaaagaaatttagcaaggccaaacatccaattgagatctggtaccagagaaagtggtctttgatgatctagttgctcccaaacccagcctagaagtataagcataactcacagccttacaaaataagcctctcagttcagctgaataaccatcagtttcaatgaacaagattgtatgtaatttttaagcagataatgtgtcattatataagaaaca

SEQ ID NO: 56604 - DNA, 590 bp, Zea Mays
gcgcactatttatagataacacaggggcctcggggtaagatttcctaagacacatagcgtccctgggtgtactgcgggttgatttcctagtaattcgagggctcttttacaaaattggctcggcgaaggggtatgcacgattcccgaccgtgtgatcccacgcgaacggcccagattaaatcactctcacacgaatcggtacaccgcgtggatcactggatccagaccaaaggctaacacgtgaccacgctaccaccaaacgccagccacaggatcaaatggaacagacacgattttaacatagcagatggactcccatccgttagattgcaatcgagcggcccctggtgttttcatctgaaccggcatgttgtctcagatctgggccacccaatcgaatctgatggtataaaatctcccactccctcgtctattcaccgtcgtccatcacaagatcgactgacacaagcttgtcttctacctacaccgtcagagcatggcggttccccgccaccgcgcatagaacacatcggtgaggcactatcccatccattggtgatctttcgccacgccatcagatgcaaaatgaa

SEQ ID NO: 56605 - DNA, 496 bp, Zea Mays
tgtttgcgatctagctgggagggctcggatgtgaccgtctgtgtgctcgccaggcagcgccaccacgtgaggctctgctccgctgccctgcatcatcggaattgggagggtcgtctgtgtcgttgatccataggggcgcggccaggatttgatcgggtggaaaggagatatgggccgtcgatcttgtttggtcggccatgattataacgtagataccccttcggtcgggatcaatctgggtcgttgatcggtatttgggtggccaggaatagattagggcatgggtgtctcttggccatcggatcttgatccatcggccgctagcgagtaccggttcgcgagggcgtagatctaatctggggcgttgagttctgatcgtacgaccgagatctactcaaaccccttcgcacaacgtctttttcaaatgaaaccttatgttttcataaaatcaacccaccgtccagttaggctgtagtctgagtctcgacgctcttat

SEQ ID NO: 56606 - DNA, 1253 bp, Zea Mays
ttcgcagaaaggccctcagggttttggcgaactggagatgggttcagctactattttctggtgtcactaacggtttacagaaaagacccccacgttctaatccttcaccgcacgagatccacgacgacgacagcgcggaggatgaactccggtgaggttgtgccggtggatttacgcaatgaccggtgctcccaagcggctatcactgaattgaaccttccccgagtgtttcccctaacttaatttcagaaatggtgacctgattcgctctggccacggtaaccgtgcggatgaaccaaagaatcatgcgttcccggtgattggcggtggtctagctaaattatgtgggtcagcgagcatcgtagacacataagaatacttaaacggggaagcagaagacatggactgacctggatcgcgctggccgcggtgaggtgctctttgcggtggcggaaaccgatttggggagaacccaaaattcgtgagctttggtgaatgattgagggtgggattgggggctctggtttcgtgatgatgtagcgcagctgcctcggccttcaatttatagagggcttaggcggtggcgcgtaattcggccgagcaattctggcggccggagaaagagaagagcactggcgcagtggattggtgtcctgcatcgtggcaattgctccggcgatcaacggggagcaagagtgagtcacggtgatgcggtagacaggctagagacacgcggcggacaacgacgacggcttaatggcggtgagagtccttatccgagggcggtgagcaaggggagaggtaccgcggctagctggagtggcttccagctcaccggcggcgatgatcttttaccctgcaacgctatccatcaactccaggcacgaatccagttgccggtgacacgaatcgcggcgaagaatcggtcgtcggcggtgaggatcactgaaactgatccaggcggttactgtaccatgggatactccttcagtgcacctgataatcaatctttgggctggattttctcccatatctttatggcaaatcataccaagttctgcagcaaagttgtttctctatagtagctctataactttgttatagcaaccctaggtagattctcactggatcttagtttaaatggctctcaaacttggatcaaagtcactattagtctgagattcagactgtatcagcctgacagccagactttagacttaattatctctagtttcttcttaacaactatgctt

SEQ ID NO: 56607 - DNA, 505 bp, Zea Mays
agaggatgcagctcgtccgccacatttagcccttcatcagcgaacgctaaaatttagagcacgatataccggaccttgttggaggtataaaggaagtttggacaccgtaaatgtagggttcagtaccttttacaagatcttgttggagctagccttatttgtcttaaaatgtacttttacaaaagtatctctactatctattaagttaacagtgtagaccattctcatgcccccgcctctccttctgcgcaccgaggcttctgaaacagcaaacacctccttctgtatcctccacatgacacaaccatacctgctcgcgcacgcttcgccaaccaccggtctcccctcacggcctcaccatttctctctctcgcaaccgtcgactccgatccatatgtcgtcgccccagtgcccagaacctagatcacgctctctctccctctcctctctccctgtgccagtgccgcttctcacaagaggacggccttgggctccaatcgaggcg

SEQ ID NO: 56608 - DNA, 842 bp, Zea Mays
actaccaggacctacacagtacaggaacgacgacgaacagccagaaccttaccggcgtcagtagtgtaggccgagccgcccacggagtggtctgcacgatggagtgcccaggcggtgcgtcagctcccgacacaatgatgcccagaccactaccgaagaaatggggccgccgtggagcgcccttgccggactcccgccctcggtttccccgaactccgaccgaacgcaccagcaacgaacccgaaggtcaccggcgagctcgattctttctctctcttcgatggagctcggtgtgaattcaccaatggcggcggaattggagctggcaatggacggctcagggaactctaggggtgtgtcgccgatgggatttatagctatggcgaggggcaatcgggcctgagagcagacgactgacatggatttatacccccgccgagtgggataagcacagcgaacggcgcaagtctgttgcgccattgccgcgggtgctgttacggttgagcggagggatggggtcttcgcgcagtgggcccacgcaacaaccagccgcggagctcggcgtctgttgcgaggattccggcgtggttctgttgtgtgcgattgaagaggacgctcctgacatcagggtcccacgtgacatacgtacgagcggctcggcgtcaagtttcccaggaatcacgcggcgcaaggagcggctggaggggtgggtccggtttgtctgcgagagaagaatgagggaaggaacaacaatgccactgacaagtgggtcccacacggcagggcacaaagtgcacgcgcaaaagcaggccgcagcaacggttccactgggccgaaatggg

SEQ ID NO: 56609 - DNA, 331 bp, Zea Mays
gttggtacaacaattgtattcgatgacacctcaaatactctatatgggattgtggtcgactatgaaaggatgagtccctactattgttgctgctacaacaatcatttgtgcataactcatgtagtttcactgtgattctggccgaccacaccagtttaaggacctgaacacaactttcattccatttggcaagaaatttcatatgaaaattgaatcattgtgaactagataaactttcacacaacatgcatactagaaaaacgggttattctgcattttattgtaacaacaactactcaaaaaacagttaaagattttgcacgaacacaat

SEQ ID NO: 56610 - DNA, 710 bp, Zea Mays
tgcttcggatgtttcccttatgtcctattattgcaggttttgtattgggatctgaggatgtcccatagacacttgatcatataggggaggacctagaatgaatgacgagggaggcacccaatggcatgagggactggttgacacaatagatcttgaaggttgcggcttcggttcctaatgttggatatattgaggggtatatcgtgaataatttgacgatgtgttgaatactttattcgactgagctatttgggtaacggctgcaaattccttttgattatgcatatttatgtgataggtcttcgtagtgtggcctttgttttccccacaaaatacacagtacaattttcttggttatgagctgaaccttcctccaaagcttcggcctcctctccctcctcttggagctgacgcacgaaagttgctttatgaggattggtgatgcgttcctgattcttatggatgactctgttgccctagagcttgattagatttgtcatcattctaacctggattatggatgcttcgaatatgccttggatgaaatcttcctccaaagcccatggcgactttcatatatctatgtttgctctgatgtattcatctaatttgtagcagcttttccaacaaatgaggatgcttccttgcaaaatattgtgctactgggcctgcacgaagtcccttgataattgcttcaatgataatatcat

SEQ ID NO: 56611 - DNA, 891 bp, Zea Mays
agtcgatttcatctctaccatctggtactaatccattgcaggtccctcttcatatcctgcaacgacgcctggttcagcgtggcagcaatatggttgcgcaggcgaagctcgtttggtccggcctcgacgcagcattgaccaactgggaagatgtgatggctctcaaggaacgattcctaaatgcacctgcttggggacaaacagactttgaaggggaggcggatgtcagcaatgctgacgagaacgacaagctgaaggcagcagacagcaggaacaagccacacggcacgcaagtcagtcgtctaaatactaaagttactagaccgatgtgggccaagtagtggaagtcgtctggctgtgggccgtttttgatccaatagctctatataaaagacaatacgaagaatactaccgagacgccgccgggctctcggtgccatctcccttcttctctgctctctcgccccttctccacgcatcttctctgctcgactgctcctcccttcccattgctaacacgagactttatttcgaaatctcggctgacaaacgtgcaaagttgacttttctagaataaaatgcgattaacatatgtatgcgtccagagacaagcgcgcaatgccccctaacataaaatttcaactttacgaaaatgggtcaaaaagaaaagaaaagaatacaaggcaatccaaacacgatcagtctatccagcgaatcgatcggcgtgaagttgaacccaacccgcgtctgcgtgcgcgtctgctggcggtgggtggtccctgtgattggctgccagattggaatggtcgggccggatccgcttcccagcgtggaccaggccgccgcggtgggttcggtgggtgtcgtcgtctccacgccggccacccaact

SEQ ID NO: 56612 - DNA, 575 bp, Zea Mays
gccagggcctgggctaccttgcttaaggtgattgacaaccactatagccctttatactttattatatttcatggtacactctacgtgcgcacacgtgggttaggactgatgcatgtactgtgtagtggtcttgagtgctctttagcctaagtcgtgtgtcatcacacctagtgtggcctataatgcctcccatcacatatttattgcattgtacctaaaacttatgcattaagcttttgctaaggaatagtcacatgtgcctcgatgtggggtctatgccctagggttgtactgcctatgatgggcctagcacacccttgtgtcgtaagacagggttagacctagtttccctaagcccctcaactcccccgggattcccatgatctctcaagggcataggtcctagccatccttgaagtaagaggttgagaactttagaggcctagagatcaccgaatggccccatgcggctaagtgctccaagtgttatagggggttggttttcctcgagcactccattccttatgacttcggggcacaaggaacattaggatttatatcaataggtgccccac

SEQ ID NO: 56613 - DNA, 454 bp, Zea Mays
tagaggaggttgtgactacgcccttatatagcccgaggattgcatgggagccgaggataacgtgagttggatggggatcagggtccgcaccggccctaagcggtgattccattgttctgttacggaggtggacgatgagtctagcgtcctagacccacctagcggggaaataggcaagcaggcccaccattcagcgcctagataggagccaagcgtggtcgaggcgggatggagggaggtgggccacgcagtaacgtggtttagtgggccaagcgagttggaatcggcccaagcgctcaggtaacccttttctttttttctaatccttttctattttctttatttcctttcttgattcaaattcaaatttagcttgaagttcacactcaaggtttgagttcaacttttaaatgcacagtcaaaactccaagcatgagtgcaaagtttatttact

SEQ ID NO: 56614 - DNA, 307 bp, Zea Mays
ggaagaggaaaagggtcacctcaagaggaaattccaagtcctccgagctcagcagcaggacaggcaccaaagaattcgatcctttgggtttccacccaaggggccaagcttcaacaagccagctagacccactccgtcacgtttcagccagcagggtcaaagctccttttagggcccctccgttgcaagcaaccaacctccagctaatgcctgttggcattgcgaagaccctagtcactacaagaataattgtcctcagttgaaggcatccatgcctacttactccaactcggtgaattgccccaag

SEQ ID NO: 56615 - DNA, 448 bp, Zea Mays
ttcggcctccgaaggctgaaggtggaaattgatgacactatcgaagcgtgtcagagggctttcagcactgtttgctccttcatcggcacaagagatataattcaagaacatatagccttcaaggtatggccgctcgtggaaaactgggaaatgccgaaggagaccaccactaattctaatgatggcggtctggtccgactgaaatataccttcagatttagggagaaatttgatgaaccaaacgacgattggctgaagtgtattgaagctaccaccgatgagctgcttggagcttactccaagaccgaagataacgctctgtccgcagccttcggaggtcgggggaagaaaagactaaacagggtttttgatgcgatcggcttcatataccccgattatcgctacccgctgcgagggcaacagaaaaagtggaagattgctacttcgg

SEQ ID NO: 56616 - DNA, 593 bp, Zea Mays
ttgctgttgttagtttcggattaaagtagcagctgcagcagttggctttaatctcaacttctcaagatggatcgacaaggagcataaaaagtctaaaggcaccgtggacatgggtggggtcacatgacagatatgccgaagaagatccgatcgtcggtggaggataagatagagaacgaacgagcaacgttgagataagctggcgactgagtctggagcggtgagaccaaacaaacacgatacagcagcgtgcgagtatcgtcatataatcattggtgtacgcaaatccacagtcttatacgcaaccaaaactgcgtactacgcagcatccacaaaagaaagaaaaagcacacgttcctggaaacatccgcctagagctagaggcgtgtcataacaatctacctaccagatcagcaccaaacgtgtcagaggcaatttttcagattgcatcggcccaaaataaagggctttttgacctggacgtaagcataagagcatctccaaaagactatataaataacctgtcaagttaaattttagctatttaatatcataatagctctccaacaaactagtcatttaacttgctaagc

SEQ ID NO: 56617 - DNA, 450 bp, Zea Mays
tggagggagccgattatcagatacataaaaatgaggaggagccagacgataaggccacatcagagcacattgcaatgcaatcagctcactataccatcatagggggtctgctatacaggagaggtgcaggaggagtcctcatgagatgcattcactcagctacggggaggcaactgctggaggaaatccatgctgggcagtgtggaatacacgcaacatcaaagaccttcgtagaaaaggctttcaggtcatgattctattgaccaacagcaaagaaagatacagcggacttagtccagaagtgcgaagcatgctagttcctattaaagaaacaacacttacccgtccaacatctgcaaactatccctgtaatcgggccttttgcatgctgggggctggatatgatcaggccattcaagaaagctcagggaggatacactcatatgctcg

SEQ ID NO: 56618 - DNA, 839 bp, Zea Mays
atgggtgtgatcctgttgaagctgaccctaatgggtgtaatcttgcaccaactgacctcaacgagtgtatccgtgcgccagctgatcccaatgggtgtgatcttgttgaagctgaccccaatgggtgtgatcctgcaccatctattgtccgcattttttacgaggacgaagaagaggaagaagaagttccgctaattcgcaagaatagccggcgttacagaggtagtaaggggatagtgatattccttctccagctctgtctgctcttgttagccttcaagatttatccataacagattttgatcaggcccttgaggacgtcattcctgaagatatgctattggaaccgactattgataatatgatgaatgtttgctctaacgctccagacgtgggattagaggtatcccgggtggtatctcgtgcatcgtcgactttggaaggcaatcttcggtgtcaagaggttggtcaagattgcccgactcccatggaggtgactgaggatccttcagcctcagaggtggccgttgcagaaaacctagcccctaagggtgatgctggcggttacccaacccccgagggtgtcgccggtaatgatccggctctagtgggtagcgcaagctgcaacccaacccccgagggtgttgccggtagtgatccggctccaatgggtagtgcgagctgccacccagcccccgaggttgtccgagcgagctctccttcccacacctccatggacgtccacgtcgggtcatctccaccacaatctgatggagtgatagcgatgcatacttcttcagcttcgagcgagggagtcgccttagaggtcggcgagccag

SEQ ID NO: 56619 - DNA, 410 bp, Zea Mays
atctactagctaggttgtactagtaaagtacgctagctagctagttgctagtggagtagtagtagtagtagttaaccgcatctgctgctgtctgaatgcgtacgcaacacacatggccatgggggaggcaaagctgaattcctgtcgagccgagacggggcgcggggggagcaagacgaggaggagcagcagccagggctgacatgacacacaccaggtgaagcaggcgccagattttaaaactcgtcggctgttcccggttcgtctagctaggtccgtgcatgcatgcacctcaccgcggcgctgcatgcagagctcaagtgggattaaaatctagatcatgcgcccgaggaggggaggcggcatttcggcgctgaataaatacttgccagttggagtggaccttcggc

SEQ ID NO: 56620 - DNA, 315 bp, Zea Mays
gcggcaccctccaccagctagcagcagtgaaagctatcttattcatcacgtgttagcatgaatgctactgttttcccctttgttttcaaaacttaactcgattggcgggttaggttagccttgtcagtgactgaagctgagttgtgtagctggacaagtatggccgggcatagctgggcggacaagtataactgggcatcggtgggcaatcaccagaacctgaggtgcgacggcaagaagatctgagcgacgacggccaagtgacagaggagagtacgccgatacacagagacatgagagtttatttcatctagg

SEQ ID NO: 56621 - DNA, 444 bp, Zea Mays
gcgattgagaggtcaaatgacgtgaaaacagagtttgaacgaagaatagtgccatagaaggtttgaaataggaattgaggtatgaaatgatttggaattgagccgatacttcacgaataggtttatatgggtaaatatgagtgaagtgtgtgcttggtttaattttaggctaagaaagtgaaattttggcactcggctcggaatcgatcgctagaaaaggggatttgtgtaaaattgaagcctgggatattggattggcgtgagattttgcaaataggttactacaggtatcgtgaaggtgcctggaaaatttgggattgattggagcacttttggccggtttgggcatttcaccgagcacgtggtgtgcagtgttctagggttttggagaaatggtcattttagatggtgaaaccctccctaaggagatcaagacctgcaggg

SEQ ID NO: 56622 - DNA, 2339 bp, Zea Mays
cgaggatgaggccaataagctcgcgctcatacgcccccagggagcgatgtcgaggtgcaacgggccgactgaagaacgccaccgggtgctggtcttggaggagcacgacgtcgaagccatgcgtcgagggcgtcacactcaacgacgaatggctggacaaagtcggacagcgcaagcaccggtgctgtggtgatggcggttttgagcaccgtgaaagccgccttagccgtgggtgactaggcaaacccctccttgcgaagatgagcggtgaggggcgtgacgatggccccgaatgtcttgatgaacttgcggtagtagccggcgaggcctaggaacacgtgcaccgctcatggggagcgagggatcagccattctgtgacgacttgaacttttgttgtatccatggtgacgcctgcagcggagatgacatgcccgaggtagtagatggaggtggctccgaactcgcacttggagcacttgacgaagaggtggtggaggaggaggacgtggcgtgcacgtgtcgcagttgatcgttccatgtcttatttatcctctaatacttatctccctaacaaacttctgctgcttatcctcttatctaagcaaatctcctactttctagtcacacctaactgcctgctactcctgcgccgacgtgatctgttgctagccgcgtggcctacgctgatagtggtggccccacatgacacaatccgttgacagtattttacccacctgcgtacgttgtgcaaatgtacagcattgaagctaacagctactgcccttctaaaaaaaataaaagtagctagttactgaaccttggtctctctcttatctctttcaccggatgaaagaatatcagaaacaaacacatcttctccttccttatttttcctcctcaacttttgtagaagatggtccttgctgccatggcccatgcagtgaagctgctcaaggtaagaagtcgaagtagacccatcagagctcctcctccactaggaagcagaagctcatctctacacgcagcaacttttcattacaccgccacacaggagcgacaatgtagaaacgcagaagttccagctgcaacgcgtctggctgtcatacgtcactgatctcaaagcatgcgtcctccaacaactggtatcgagatccatagaatgttcgattttgtccagaatgggaagaatcagctgaaactgtgactggtacagacagcacctattatgttccagtctgggcagcggtacaaggcattccatagactgttccaacaggtaccgaaatggaatttacacttacacctatgtcctcaagtgtattagaatcttaagtctgctctttagatggaatcaatatgaccaactcaatattagatttaattaaatcaaaattactgtcagtttttttatgtgctgataaaatcacaatatcaaatgtgtttagcatataaaatatttaaaaatatatacctcactttcagttaatggtctatctgatgataggacaaagagcaccaaatcagctcgtggcacgtattcttcagtgagtcgttgctgcctctgaagaataacatttgttccaggtgtatcaactagattcatctgtgaattagtacacatggagcatcttatgaaaagcaaaatgaagtaaagaagtgaaggaaaatgcactgctgatttggccttgagacagtaatgcaactacagaaggtaaaagaaagtaaggtggaacaagattgtcaattattcttggcaccttcatttacatgtaataggtattgatcaaaaaagccaaatagtcaagtagctacagaaaatgtgcaggtggtacacgttatcaaatgcagattctttctatggctggcagccttgaacagacgttggactgctgatcgtctggctaggcggggattggaacatccagaacagtctttttgtgatcaggaggaagaaacaattgagcacattcttcttagttgtgttttttctagggaagttcggtatatgctgcttagtgctttcaatggtagactgcagcaagttgcaccagggcttcaagataaggtattccaaaactggtggaaactggtggaggtacaagtgccacccatacaaaggattcaacaccctggtttctcttgtgcttggatgttgtggaaacatcggaatacatgtgtctttgataaggctccaccaagcattgccaggctgtgtggtctttggccataattgttatgtaatgtggtataggtcgtctattgttttgtatcttagatgagttcctttaggtttctttgtttttggcatccataaggagtccttgttttttggtctatt

SEQ ID NO: 56623 - DNA, 794 bp, Zea Mays
gtttgcttcaatgccccggtgcgaaaccaggaaccccagcaaatttcctgcggagacaccaaagacgcacttgtccaggttcagctttgtgcgcgttgctcgcaccttgtcgaagaccagggttaagtcttccactagggccgacctcctcttagtattgaccatgatgtcatcgacgtatacctctactctgtccctgatcaggtccccgaaagtcttactcatcgcccgcacaaatgttggcaaggcgttcttcagaccgtaaggcattacgacgtagcagtaaagcccattcactatcacaaaagtggtatgcttcctatcttccttagacatctggatttgatggaaaccagagtaagcatctaagaaggacaagagatcacatctggaggtagagtccacgatttgatctatccgtggaagtggatacgggtccttgggataagtcttattaaggctggtgtagtcgatgcacatccgaagcttcccattcgccttggggacgatgactgggttggccagccacactaggtgatgaacctcttcgatgaagcccgcgtctagcagcttccggacctcctttcaaatgaagtcctgccgctcaacggactgtcttcgaggcttctgactcaccggtctggcgtcagggtcaatcttcagatgatgctcgatcacctccctgggtatcccaggcatctgcgacggctcccatgcgaacacgtcggcatttgcctggaggaaggcgacgagcgtgagttcctatttttcctccagatcacccgcaatgcgag

SEQ ID NO: 56624 - DNA, 477 bp, Zea Mays
agggcgtggtgccctcgcttgtgtatgtgtaagggcttgtaaaatggagttgtgtgccctcgcgtgcctgtgcctgcgagggcgctgtgtactttgtctggtgtgattgattgtgctgtgccagtatgattataattggtcttgctgtcgtttctgcttttgttatactgggtcggctgcgcccttaggcggctcttgcgacagacttcggatttttgcgcgcttgtgcttagtccggctgcaccttttaggcgaattctgcgcggatagtcttcgcgatagacttcggattttgcgcacttgttgtgctaagtccggctgcacccttaggcgacttctgcgcggatagtcttcgtgatagacttcggtttttgcgcacttgttgtgctaagtccggctgcacccttaggcgacttctgcgcggatagtcttcgcgatagactttggtttttgcgcacttgttgtgctaagtccggc

SEQ ID NO: 56625 - DNA, 356 bp, Zea Mays
gtttgtagtagggacgcatatgtatggcctcctggtagctggtacgacgttttgcttgcttctgttatttgttattttcgagagtagtcttatctctaatcagtagcgtgttctatctagggtttagttcataggaatgtggaccctcgagtccgagatagtgaactagcagactgctctctgttgcgagctcactactgagttagtaatttctgttaatttcaggtggcatctagtttagtgtgtacataggttactatcctttgtctggttttgaggtgcattcccttgctttttagcaatttaatcttagagccacactagaaatctcactcttgtttaaaaggttgtctgtt

SEQ ID NO: 56626 - DNA, 854 bp, Zea Mays
tatgttctgctacgtctccatgtcggccgccctgaagaacgttggggccacatatcagcgatgtatgctccgatgcttcaccgaccaggtcgacgcgcaatgtacaagtctatgtcgatgacatcgttgtgaaaaccaaaaaaattgatgacctcatcaacgacctagaggatacgtttgtaaacctccaaaggttccgaatcaagttaaatttagaaatatgtcttagggggtcctaaaggaaaactcatgggtttcatggtgtcagaccaagggattgaaggtaaccaggagaagatagaagccatccaacgcataggtcccatctaaaacctcaatggagtgcaacatttggttggatgtgtcaccacactcagccagttcgtctccagactcggcaaaaaggtatgccaatttacaagctcttaaggaagggtgaccatttctcttggacagccgaagcctaggaggccctcaaccggataaaggcgttcatgacctcaccacggtcttggttgtgcgtgatcccgacgaaaccctcctcctttatgtcacagccactgcctaggtggtcagcgccacgttagtggcggaaaggaaaagcaagggtcacgccctcaaggtgcagaagctcgtccacttcatcagcgaagtactcattgagtccaagacatgatactcctagctctagaagttgttgtatgtgatcctcatcgcaagtgaaaactaatccactacttcgaccagcaccccttaccggtggtgttaacgacaccacttggcgagattgtgcgcaaacaggatgtgtctggatgcatcgtgaaatggtccttcgagctcaacaaactcgatgt

SEQ ID NO: 56627 - DNA, 975 bp, Zea Mays
ttacaaaaaaacatcaaagatcggcggaactagccatagcagtcttcatagacatcgaccgagaagacaataagtctagtcttcacctctgtcttcgtcggcatacacccatacactaccttcaactgagcaacaatatatatggaaagtttgagtacttatggtactcaacaagtgtgataaagatgtcatgaaggctaaagtcaagaaaggttaaactcaattcttttggttaaaatgcttttagttcaaattcatttataaaagcaattatttagcatgtgattctcaactcataaatattcttgtaaataaggatctttcatcaaaccacaaatatataacgaccaaccaaaccatatcttaactaatcatgtgagggtccatgccactcataactgtgagcacgattgtcatgacatttttatctatgtagaggttgtgcatttttcctacaagaaatgactttattccccgccatcgggtgtctggatatctccatctagtctatggttgcaagtcacttgcacaattcactagtgtgcgaccagaagaccactttaggggttttcaataggttcaactagattatacgtgcctggtttcgactaatagaaaagtactcctttcctggaggtccccctcttgtaccaaatggatatcatgagtgcccctcctatctcccacatatcactttttgatggatttggaatacaccactatccttgtaccaccatttggtgtgtaccataactggactccaccatttactatgctaggtcgtgccccatacttggctcgcctcgtggatctacaattttcataggtgatcgctccacaaactggtgcttgattcaggtgataaaacaaccaagctaattaacggtaacccctacatagttcccaaactgataatagccccaaacatagttcatataccatatcacccaaatcctacttttcatattgcgtaaa

SEQ ID NO: 56628 - DNA, 377 bp, Zea Mays
ggaagcgctgggaccgaccgcgcgatggaagaggaaggtaagaggaagggaagaggaagggggagaggaatcgaaccgcgtggaagaggaaggggaatcggccgcgctgaagtatgccgcccgtggaagaggaccactctgttcgtgcgtcgtcggtggaagaggaagcgtagggttagacgcgttgcagtgggggaagaggaagcgtgggatgccagcagccagccgctcgccgcgttgcagtgggggaagaggaagcgtgggatgccagccgctcgccgcgttgggaatggactgggagtggagtagtggagaactggagattgccggccgccgccgtgtaggaagaggaatggactgggtcactgggacttgga

SEQ ID NO: 56629 - DNA, 897 bp, Zea Mays
ccagtctgcataagtctgtacatgcaaccaaacaaatatgtcttgcatgagctcaaccagacgttgctcatcctggctcagctcggatagcccgactgaactactacaggcaaccaatcagacggataatgaagctgcacctgcatatagttgaaaagagtcatgacaaaggaatggaggggaagagcaaggcctcactcatagaaatgaatgaacaagaccacgtagctagggggaggggctagaatctcctcagtactgggagttgcgcagtatccatcatccaacaagccaggcctcacaagagctcaaaggtgaccctggtccaccaatgatcgacaacaacaagccataggggagcatggcaaaggcaagatgaaggctaaacaaaggagatgggacaacatggaaggcaagaggaaaatagggagaatgaggagaacaccacaattaaataaaggccacactacgactcctcatcactctgatcgaggcaaggtgactcgtctaacaaggaaacatgtcgggtccattgtcgggtcgagaatagacaagcgcggagcccaccacctctcgaacaaaggcacgagcaataattcttcctgagaagaacaagagaatacatatgcattagataaagccctaggttgcggtgctttttttcatatgggtccccgagcgactcttcattataatcgcgaactcgggtgctagccatggggtcacaaggcgagaaaactagggataaggggcctaaactgcaactagggaagtaggcccgaacaaaatctagccatccgaatatcttgcaaggatgggggaagagatcccactcgaggaaactaaaaacatccagggagaacgtgctaaggagcccaacggaccaagtcttctgag

SEQ ID NO: 56630 - DNA, 782 bp, Zea Mays
gaacaagatcagattcaatgaacctgtcgctgtcggtgggcgtgcgccgcgatcctcgtcggcgttccgtttcatgcgctctgggtgcggatatcggctggcggtgaaaagatcttgaccgcggatgaggccgtgagctggccgtcatacccacttgccttggggccggtccagatgacctcgccggagtctgccgcttgccgcccggacaccacgtactgagaagcattaccacgtcgcagaaaaccgccttaggtagtctgtccatcgcctgagacattgccctggtgaaagccgcgatagttcgctcgggtgactgacctcctctcttcggctgccagctttcctctcccaaatttggagtcaccgcttcgagcctctataaattgatgccccggcctgattcgccaacttgttatgaagccagagcaccaacccccaccttcgattagccactgtagccggagaatttcattcttcccccaaatcggctgtatgcgccaccgtgtgtcgccccaccgcggccaaccatctcctagtccgctctcaccctcctagtccgtgttacggcactctcgtgtgcatgtgatgcgcgccggcttggccaatttggctatatcgtgctagaacatcgggaacacgtcgggaaagtcgttagctccgtggtgtacgtggaccgaatactacaatggtgtttaggttaaattagtgactcccagtggatcgccgaggttaaaattaggtgtagaccgaattagggcatggattgttgtgtattccgg

SEQ ID NO: 56631 - DNA, 472 bp, Zea Mays
gggtcccttactcccttttaggctttagccttctagatcgttaacttcattcttaaggaagcttctgcgatgtctgtctgtggccattattatgtttagtaatgatatgatatgtatttgttgtcgggtatcagtattattaattgttaacctgttacttgcatgatttatttgtcctcacttaatttactatgtggacgacatttttctcatccttgagtgttcacagtgccattatgattttagttcatggactgttgttataaccttttccatgaacaattaatatgctggcgaatttattcttaattcatttttctgtgcctcatagtccctttctttcacatttgttcctttatttcttttcaaatgccctataatattcactaaattttcactggacctatgcttataaagttattaatttgtttgcatctaacttgtttctagatatttgtatgtgtcatcagca

SEQ ID NO: 56632 - DNA, 597 bp, Zea Mays
caacacaaaatgaaccccaaggtagaatcgcaacgagattgattctacagcgtgcttatacctagtatgggcacatcttcggcgactgcatcctagaacctcgtacggtcgggagcggtgatgtcgccgctgccatggagttggggaaggagccgtcgggtgctacttcatggtcaagcgagcctcggaggccgtcatcctgggcactgatgatttcctcagctcctgctttgatgtggccgacctcgacctagcgaggccacgcatgtacatcgccgccctccacgacttgtgcctcctcctccattctggtttgtgccagagtgattgccctaaacctagatagcttggaaagaaggggaggaagaatcgcgaggggcggagcaacggtcacgacgtcgatgtcaacgtggagagtggaggacggcgacgcgaaggcgcggggctaggagagggtgggagcgaccgtggctagggttgtgcgttgtgtgcggttgaggagatgcgtgcactcggtggtggagacggcatggggtagtggcagttgggatcaatcgagggaaggaccgaaggaggagactttgggcgaagatcgtg

SEQ ID NO: 56633 - DNA, 667 bp, Zea Mays
aacatcgtcgtcatcgtcgtcgtcgtccacaggagagtgagctggggctggagttggtggtgggggacgagcctccagtatgtccatgcgtgtaacaagttcagcaactcgttgatcaagctgctcataggatgtcgagacagagtcctggtattttttaaaagcttctgtcatcgcacgcatcatctccttcaattcaatctgagagacacactcatcgtcgttaagcttaggccccttgtccttgtccatttgattctttggtcctgtcattgttagcacaaaatagaaacaaaaaggtaacaaacaatgtgaaccctacaactatctctcagggtggtggtggtggtggtggaatacaaattaagaagcgtcttaccccgctcttacaatgttcttaccagcactgcaggtggcaaacggtgaccgatgtgactgtccaacgaccgtgggtgtgattgcaaaggagtacctgttctgctcgagagaaaactggagttctgggaaggctgactatatatatatatgtggcacacaagtcagtaacagatagcaatgctgaataagtgttccaagtactcgtcctagttgctggcctagaaaatgtaatagaacagttggaccaaagcacaagaaaggaggtacaagtatctagtagaaatggcag

SEQ ID NO: 56634 - DNA, 846 bp, Zea Mays
gggaaacgagtaccaggggcactcagctgattggtaggagcaggggcagtggtgggacgaataaagacgagctgcttgaatggatctgaaggtgggcgaggcgaagaacgattttgattaagaggtcggatcaccaacctggttctcttctcaggtccttgatttgacctttcacctccaaatccctttgattttccatgcccagcatttttggcttccactgccagtgatgtattgacagccttactgtaggtgaggtctaagcatgttgccattttctgctgaagcctatcattgagccccctcataaaacaattctttttcttcaagtcggtatccacctggtcaatggcatactgagagaggtggttgaacttgttgagatactgcataaccgtatctcctccttgcctcaaccagataaactcttctagtttcatctgaagcactccctccagaacataatgctcccggaatgctaacttgaactcctcctaggtaatctgatgtccaacaggctgaattgctgaaaaatttgcccaccaggtactggcaggccctcttagctactgagctacgaataggggcttttgcgtctccgtgcatcgaattaacccaaacttctgttccatactctcacccattcatcggcttctaaaggttcctctgctttgacgaagagcagcggtcgagtctcagagaattccaaataagtagtatcctgcggtccttaagggggaacactgcctccatgctgttggaattggttgcccgccatttcgcgcaagaagcgtgtattatctacggtggcgttgaccagggcagcaatagcctcggccaaagtcg

SEQ ID NO: 56635 - DNA, 1505 bp, Zea Mays
caaaaaaatagaagcccactagcccactagaaaaccctagtcgcctggacaatttctggtcgatttaccatctagtcggacgactaattgcccctaatcgacggctagtcggacgacctgatactctagtcgagtcgtccggctgatcaaccactaccaggcgacctgcctgactaatcgcgattaatcccgattagtgggacacttgaaaacagtggaaaatttatcaggggaagtggaagggttattttgaaaactgatgcacgatgggagggttgttttggaaaattatcatgactgcttgcacggtttggaccaagtggttggtttgcacctgatacattccctttacacaatatttactaatgatggattttgtagtgcagatgaagactggatgtgttgcacttgtattatgtttaaacataagtgttgatccacctgatgtaattaaaatttccccttgcgcaagattggagtgctggataggtaaacttttagttgactatatatttccaaatttcaaattagttgaaaaaatacagtaaatgaactgcttttcacggtgaaaccatgtctttcttttttatgaattgcgtttctgaatgccagatgagagcatattgttaatcagaagtacacaagtcttttaatcctaggcacattggggtaggctggagatgaaacccagcatgagcaccaaccagaagtaaaaagagaagggaaaaccttatacaaatatacacagcgcatcaacagtatagtaacattattaaagaatctaaatctagacttctagagtcttgttcatggttcattcttgtagatagctcatagctggttttcatgtgcttccatagttccatccaaggaaattctttgtgtgcattcggtccttccaagtaacttctcttttggcatattgctgatttaaagtaaatcacaagaaggaaactatctttcacctacttttttcaaaatacactgttaaaatctatattctgaaaatgagattgtttttctcaatagtttttagaggaatcttccatctgtttaaaatttgaagttgagaattgacatttaattgtaaaggaagtgaatttttctaatgtaagatactgcacctattggctgtggccatggatatataaacttatttattagtccttgggatggttataatgtcaagcaagtgttaccagactttaggcaatgatggtaatttatatttgttgataggtttgcacttcattactgttattaacttattacacttggtgcagttggtttgtgttatgttcatagacctattccttccttttcagaccctttctctatgacacctcttaaagctcttgaaagtattggaaaaacgttgcattcacagtatgagcgctggcaacctaaggtaaagaacatgcttgtctgtttaacttcaatgttattttggtgaggattatttgcatcttcatgtcctatttctagtggcacttgcaggctcgata

SEQ ID NO: 56636 - DNA, 328 bp, Zea Mays
ctgggagacgccacctagatcaattcgaaagcctaagggactcatatgttaacctgccacaacgaaggggtatcgctgcgccgggaccgttggatcaactaccgaccgcccagattacatagcccatttaagtgaaccgtacgcgctactggtcgccagatcttggatctacggtcaatatttaatggaacgtgatccaatatgggccattcgatctgcccaacggttcagatcagatcaccaaaaggatacctccccatctaatcatagccgttaatcgaggatccaatggacacgagttcgtcacccacctcccgagcagtcaccg

SEQ ID NO: 56637 - DNA, 318 bp, Zea Mays
gtgttgggacgaaggccaaaccatacctcgatcatcccctcggttaagcacaccgaaatccaagctaaccttgtttatgagcacagggtccacactcaacaaaagattccgatcgtcatgtacggtcgaagcggatttcatctttgaagaggtctcacggtgttgtcccagcaaaggctcgacattaagcccacgagcccatgcaaagacgcttaatccggtcgccagcaacgacgaaggctctaggacatcggaggcattaggaccctaacccccgggtgaaggccccaggatgacggacaggagttagtcctgaaa

SEQ ID NO: 56638 - DNA, 353 bp, Zea Mays
ggtctacagggtgtttggtgccaaattcaggacctccgagtaatgatcttggaatacaaggggactgcgggttcattcctaagattttagggattcttttgcaaatccgggcgatcgaaggggtaagctccatcggtagtcgttcaatatgaaacctatgctctagattagatcggatcaatatgcactcaccgcaccatgcaagccgtcagattctggatctaaggccgcacatctgccacaccacccatgaatcggatccatcggatcatgaaccaacgaataacatttaacgcgatgaaggggtatcaattatctaatctagctcgcccatgaatgatccaacaaccagt

SEQ ID NO: 56639 - DNA, 676 bp, Zea Mays
aaatcactagtgccaatgtaggtgcacactatgttgaaggccatcaaacatgcttgtgcttcgtttccatgcccgatcgaaggtctcctaatgctgaagcgcgatcgaatggggcactagattacgcccttcaaatcctccatctcacctagatcatttgtaacataaatccattgcttcattcatgagcccaaccatttttctaaagcgtaagcataggacacctcacatcagaccggtacacaaaactatagcatccgaagttgttatgatattgctctttcccaaccgcctttgtctggtaggacaattcatgaatgttgcagaagcagttcacatctggctccagcccttggctcctcatagcccaaatgaaaactccaacttcaatcaaagctttgggagtaagctgatgaaggtatatttcaaatgttttcagcactttgactagcatcttatgcaagggaaagcgaagcccagctttcataaacttttgaataccaccacttagtctgcctcaggaagaggaacaatattctctcctccagccctcactatggatatatcatggaaatatttgcccttcatcgcttcaatctgcccttgcttaacagtggattttccaaaaacaacatgacttggtctccatggccgatcttcggcatcttcgttctca

SEQ ID NO: 56640 - DNA, 439 bp, Zea Mays
ttttttagatgactcgatgtatcctattcagctatatggatcgattatgtgtttctgtcctattcttaaattgctaacaattaggcttattgattttatatttccagtggctaattactgataagatgcccatgggagacatgttacagtaatacagtcttcgtatggcttatggttatgctgtgttgtgtggtatagaacatacctttttctttgttatgaagaagaataatgttttgctcggcaagccccttaactgtgaaggttacgaatattgtgagatgttgctgtctaggagatcaatttgtcatgcttcatttttagatcgagcaatctcatttctgggaggatgattgtacaactattggcatgcttgcacttgtttagctgcctctttctgttccttcatactaatgttgcttttgaacttatctttgca

SEQ ID NO: 56641 - DNA, 761 bp, Zea Mays
gttcatcgcttgtggggtgtggcccttggcgcattggtgggttctaggcgagattacactgcgccggatgccaaccctaggtgatagattagtgcgaagcccagcattcatcgtggaactgcatgggccggatgctgtcgctttcgtgcgggaagtggagtcggaggccgttaagattgtcggtaactatgtgtcgaagactgaaatgttaaggagctaggatattcgcggttccaacactaggttgaaccatgtctttgaattgaataatttgccttatggtccctacctgaagggggactccgctgatgccggcgatttctgatgcaagcaagtcaaaccccggaccgacgaaggcccctcaaaggggaaagctctggtcccggccattctaaagaggaaattaagtatgggggatgatgagactgggtcgagggcgactaggcattttgttgaggagttaatggaaacgtgtgcggttcccggggaattgatgtcttcgctcgagctccaggaaacttcttcgctcatgctgaaggttactgggggtcaatgacctaggaatgatcctataccccgggccactgacaaagttttttacatctcgattggctcgtgatctgagaatttttccttacggaaggaatattggtgttgttgtgtcggaagtgatggagaaggatcaccaagatgctcactgaaagaagcgaagctggtgcgaaccggcgcgaaggctgccgcccaagccatggcaatgccac

SEQ ID NO: 56642 - DNA, 650 bp, Zea Mays
ttttcactgaaataagctaccggttttccttcttgtaacaaaacagcacctaacccaatattcaagttcaaacactttctgaaagtcaagcaattgtaagagtagagcatgggttaacttatctttcaaagtgttgaatgcctcttcttgtggggggcaaacaaaagacacacctttctttgtgagttcgtgcaaaggggcagcaatggagctaaaatcacgcacaaaccggaggtaaaattctgcaagtcaaagaaaacttcgaatctatgtgaccgtcgtcggtgtaggccatctctgaatggcttcaaccttgctgctatccacctcaatgccctgtgaagtaaccacataaccaagaaacgagacacgttgcgtgcaaaaagtgcatttgtccatgttaccaaacaagcgaacaacacacaaagcataaaaaacaacacacaaatgttcttaatgctcttccacagacttgctgtaaatagggatatcatcgaaatagacaacaacaaacaaacctatgaagggtcgtagaacttcgttcattaaacgcataaaggtgctgggagcattagtaaattcaaatggcataaccaaccattcatataaaccaaatttcgttttaaaagccgttttccattcatcaccta

SEQ ID NO: 56643 - DNA, 887 bp, Zea Mays
tagagtacgagccaatcgccactctgacctcggccaaggtagtagaattcatcttggagattatctgggttcaaacttcaccagcgccgaattttttgacttctgtgagaaaaaatgcatccaactcaagtatgcttcaatagcacaccccaaggccaatgggcaggtagaaatagcaaacataatgatactagaagcactcagaaaaagggtctttgacaaaaaggagaagtttgcaaggaaatggattaggaaactgctctatgtggtttggagattacggactcaacctagccgagttttgcatgggaatactcccttcttcatggtgtatgggtcataagcagtattgctaacagaccttactttcgaggcacccaggctaaccttcaaaagcattgcagaggtagaagcaacccgactcgaagaaatcgatgtactagaagaggagcgattaaatgttgttattcagtcagccagatataccagcaaaccctgaggcgctaccacaacaaggcgacccgacactgagcgtttgcagtaggagatctggtgctccgccacatacaatctggggaaggacatcacaagctatcaccaccctaggaaggacccttcatagtcacagaagtaactcggccaggttcatattgactaactcagatggatggtacttcgatcgggaacttgtggaacattgagcatcttaggaagttttacccatagtagcaccataaactctatatgatagactaccatttgtaactctgcaacctcattctcaataaagtttctactctttgcccacatacaattgtactctcgcatgctgctaatggagcaatcggcttacgtcgggattggcttaagtcggtgtcacatgctca

SEQ ID NO: 56644 - DNA, 439 bp, Zea Mays
cggggatatccagaattcctattgtggactaggtcctctgccggacaaacctgtgaggtggagcggcccactaaatcctctaccaagaaaacctacgaggtggagcggtcgaccaactctcgatcgagcatccctacaagatggaggacccaattggcccacatcagctacgataagacacatcatcaccaagacacatttgaacatatgtgcgacataccaaaagcgtgttgggtggtcaccgatggcacgactgtatgccactgcttacaacctctgatgtatcctcgctgccttgtggggtcagtcaaccccagtaatagaaggacctcagcaccagagtctctacaatggtctgtataccaggaaggatgggacagtgctccatcctggtcttaagcctatgcatgctggagggtgacgcagggctcatgacgac

SEQ ID NO: 56645 - DNA, 1386 bp, Zea Mays
ctgcggtggtgtcttcatctagggttgccccgactacggtgaggggcaagagaaggattagagtgccgaaatgaagtgtgcgaactttaggcaagtcttcacaaggcatcggaggcccttgaagtcattgtcgtatgggaaaggaggggccttgtccatgggaaagaatgtggttagaggaagggactcaccggatcatccttgtgccgacaactgagcaacatttcgaatagggagatttgagggctctatttgatggcgaggagcatagactaatgttgtttcatttctaggaagctggcctgatcccaaaggcagagcctatgtaaagtgccgacgttgacatggtcattctttgttgaattcaagtggcaatgctatgggatcttgcttgcggaacagaataccttgtatatgaatggtagcttcgtgctcattgtttgcccgtatttgaattaagttgtgcccttcattggccgtatgcggaatgctttgccctactagattattaaggatgcgttatatttctaatccaactgtacttgtaggtgattttgagttcggatagagataggcatctctcggacgacctcacacccttaggtggtttgatgcacttgttgtgctcgtccggctacacctttgggtgacttttgctcggagtggtcatctctcgaacgacttcgtgctcttagttattaaaatgcacttgttgtgctgatccagctgcacccttaggcaacttttgcttggatagaaatgggtgtctctcgtatgacttcgcaaccttaggtgttgagatgcacttgttgtactaatctagctgcacccttgggagacttttgcttggatgggtcttgtttgtcacacacaacggttgtttatacttgtcgttgtggtgactgtcttgctgtcgaatgccgaaggtcgactccacggtctttttcgacattttgtagtcatgattgtgttttctatgggggattttcttagagctttattacatggcaccgcctcattaaaaacctcacccctgtgaggaaaagagtacgggcacaaccaaagtaatgtgtctgtgggtgttatgggggcgcgaaggccctggcaatggttagtttacaaagaaaatttccttagattatctatgttccatgagtgctcgaggtcttctcctgattatgttgcgattctataggagtttggtggcgttttcttttttatgatgaaaggcccttcccatttaggctcgacttttcctcaggattctgttctgctggtttctgatgaggacgaggtcaccctcgtcgaactctttaggagtaacagtgttgtctcactaggccttcgtttgtgcttgatatttgttcagtgcttcgagggcagcga

SEQ ID NO: 56646 - DNA, 765 bp, Zea Mays
caaagacactccgcacaaagccgcccatgtacacagccggaacaatacaagcgtacgaatacgaccaacaggccacaccaccattacaattacatacacacgacgagggcatcgcctattacacatacacggtgagggcatcgcctatcacatcggctccaccttcggaataatacccatctccctgtaattaaacagcattatcctcaattcctcaccctcaaaaagctcccgaagatccccttcgcccatgcccaccccattcggcaaagacaacaattctctcctaccaaccctgtctactcaaagtcggtcacgctccatccctgtgcgacggtgcctgccactccgcgaaaattcacccacacactgttttcccaccacccttcgccgcctacacccagtactcgtaccaggaagaccctcagcaccctccacacgcggcgaagtctccaccgcagccacatccaacacaacaaaataatctaagccttcatctgaagactcctccgtctaaggaaacaaactcccagacccaccgtcggactcaaaacattcagacatagagccaggcacactatcatcggcgggcactacaactgaagtcttcgccgcaaaatcaatattgtcagtagcggttgcttgcgcagacccaaacgtcggaacctgcgcagcaaccgaggttcagtaccacacagacaaaagttcacatgcaatccctaacccctattcctacacctgcgaaggctcggtcgccgccgtggg

SEQ ID NO: 56647 - DNA, 447 bp, Zea Mays
aactcggtgaaaccagcctacgtagtgctaggtggttttgatgctcaacgaccaaaaccaccatgagtagtgtactccatatgcgctcccacgttctggacaaatgtccttcgagtcctcgaccatgtcggtgacacgatccactctggcatgtcctcacactagtgcatgtcccaagtgccagtcaccacgactagtcatctggtgtctccagtccctcgatcaaggcctagcactcgtccttcgccgctcctagcccatcaacacaaatacgcatgatattcaccctcaccgttgaccaccatccatgtactggacacctacacaccacaagccaaaagacatggttgcacaacacaagttcgtactctggttagtctaagactcacacaaagcactacatatgttgacaatcactcatcatcagcctaaaccataagggacaag

SEQ ID NO: 56648 - DNA, 1173 bp, Zea Mays
gcttaaacgactcaaggtgatcactataccctactaatggagcaatcggcttaagtcagaaacgccttaagtcggtgcaacatgctcatgcttacacgactcagggtgatcactataccctactaacggaggaatcgacttaagtcagaaatgccttaagtcgatgcgacatgctcacgcttacacgactcagggtgatcactataccctactaacggagcaatcgacttaaatcagaaaagccttaagtcggtgcgacatgctcacccttacacgactcagggtgatcactataccctactaacggagcaatcgacttaagtcggaaacgccttaagtcggtgcgacatgctcacacttacacgacttagggtgatcactataccctactaacaaaatagccaactcaaatcgggagcacttcgaagaaaaataactcgttcacatcctcaagggtgttttcagcaccctgctgacagaacgatcagttcaaacatagcacaattacatacacacggaattcataatacacggtttcactaagaagtactaactcaataaagagatgttttcgattcaaacgaatcactgcgcaggagcatttttgcaggaagcctcggctgcaggagtagcagaagaagatggtcgactcacgacagcaggtgcggcaagaacataggtgataatgtctttaggcaccacaatgctaggcctcttcatcaggatccgcccggcgcgaacaaccttatccatggccttatcgcacatcgccttcataacaatgtggtcatcctctaaggccttgatgttgaggcgggaggcctccagctcttgcgtgacgagcctctttgaagcacgcaaatccttgatgacagaatctttggaagacaatagcttaccaagtcgggacgcttcagactgggacaccctcagttcatcccgatgatggtccaagtccgacatggtgaagcggtgactcctctccagaatagtcaaggaattgctggcgtcgcaatatagtctgtccagattgtcgtgagaagcaatgagcgatcgcctctcctcctacaagtaagaacaacactgagcatcaaagcaaagaaagcaaaacagaagcagccaagaaagtttacctcatatgccattttctaggagtcaagttgagcattcaga

SEQ ID NO: 56649 - DNA, 414 bp, Zea Mays
ggagtcgttgctcatttaagtgaactaagctgtgttggtccgtatggatcacaaactcagcatgttggaggtaagatcgccaatgttccattgctaggaggattgccaagtactccttctcgtaagtggagaggccacgagtttttagacccaacgccttactaacaaaagcatggggatgactggcttgcatcaggactgctcctattcccactgcacaggcatctgtttccaatataaactgcttggagaagtctggaagagctagctggacttcgctcagggctgtcttaaggcattcaaatgcagtgtcgtgttcagttgtccagcagaacatggtgttctttttgagtaaattggtcaatggttttgagataataccgaaatgcctgatgaacttccggtagtagccac

SEQ ID NO: 56650 - DNA, 380 bp, Zea Mays
atagcatctaaccagtcatcatttggttcatcaaactggctcctgaatttgaacgtgtactttaggtagatcaaaccaccttggctagatccagcagtagcctccttcggcatctcccacccacttgcgagtggccacactctataagcaatgtgctcctgcactaagtcccttgtgcctatgtaagtacatactatattaaaagcagcctggcatgcttgtatatcattcccaagggcaatggatggcctcctaatgccgaagagagaccatataggacgttgaataatccccttaatatcttccctttcaaccaggtcatttttcacgtagaaccactcctgcatccaggcccctggccatctcttccgaaatgtcgg

SEQ ID NO: 56651 - DNA, 479 bp, Zea Mays
tttagaaacaggtgcgaaataaaaaaaactatagcattacatcgattaaaaataatcttcatatgtgtcggggttagccggatcataactctcatcatcactatcaaccatttcatagtcaacatcatctgaaggcgcaagtttgtcattaatgtcattgccttcaaggattacaaagtcattctcattttgcacctcatcatcctcctcatcaacaaccatttcaatatctacgttcattctgatagcttcggttaagtctatctcaaatcgcacttctagcccatcttcttggaagaactctctatcatatctgtccgggtctaagttataatcttcatcgttaagaatagataatctaccgtgcggcgataccttatacacaacatcccaacccttaagatgttctttcgtttagcacgcatatgggagataatacactcgtgtggcctgttgggccaagatatagacattgtttc

SEQ ID NO: 56652 - DNA, 713 bp, Zea Mays
acaaaaataattaagctctgatccatgaaacataaacaactagcccatcatctatttatctttagcttgccacaatatatatagctgaaaattagtaaaagtggtatagctaggtgctaatagtagctgcgaagaagaagaacgtactagctatatggcgtaaactattcattcatgcatatatgtgacgaataacattattattaagggtttaatatagattggagaagttttgtatatatccttgagaaggatgtctatggaaatccttagccgccaagtaaaggtacgtcgtacatgcatatacgccggccgccacgcaccatgcatgcatgcaaagtctaggaaatctatctatccaccagggcagcatcaggctaggttggtgatttggacacctcgatcgctcattcgctctagctccatctgatctgcctatatgggtctccttcgtcgttgtccacgtatgtttcgtcggaccatcggcaccgtacgtgttgcactgtgagagtctaggtaaaaagacgtatagctaagctagagaagagtagaaggaaacctcaaaggaaatgctcggtaaatgcacacgtgtgtacagtggcggggatacatatggtgtaagggaggctaagaaggaactgattatctttttttctctcttattcttcttttatttttctctcctcatcttcatatggcatatatagtaggat

SEQ ID NO: 56653 - DNA, 844 bp, Zea Mays
aaggagaaatggagatggtgtctctcctacctttgccttagatcgccactattagtagagatgataatgatcaatctattaagattatatagatcggtgggggacgattgaaacgatatgtagacaagtcaattgaaaaatctgcgcgtacatataaaatgtctatcactattcctagttttccacctcgtggcgtcataatcaagacaacattgccaagcacatgggcaataaataggctttcttaattacgaccatattattattagagtacgtcgatgaactcatatccaggacaaccactggcaccgccttcactgtacgatggattggctctaagcacgatcgaacggtctgagcacgacctcgggctgtccggccctcctgcagactgtatggcaccttatgctggactgtctagagccatatcgaactcgccacatggcttgtaggtgatgcctggcacaaccggacaacctaggtctaaccccgaaccgttcatacccttcatggaccgtccggtgccatatgctagacagtttggagccactctatgcccaccacgtgactcgcaggcgatgcccagcataaccgaataggactactctctctcacatgcggcgcatctttgcagcactactctctctctctcacctgcggcgcatcaaagccatagcatgctaccacctatgcatgaggctaaatattttttggtcccttggaagccaaagagattcacccaggcagtaggatgtggtaccggtatgcctaaggggcatatattggatgccaactttgatcgtcttgggatagaaggacataatattgataatcgaccacttga

SEQ ID NO: 56654 - DNA, 588 bp, Zea Mays
gttagtgcaggagagtggagcattgttgatagagtttgtggttgaggactcactagagctagtggaaaactagatgttggataggcaagcttgatgaagtgatgctttgctagcccccctcccatctcccttgaagttgatatagtcgatgatggactagttgaccattgatgtcaagccatcgtccaccatcttgccccatgtctagcctcgctcttcatcgaacatgatgtcgtgcatgatgtgcatgtgctttatcgtaggtcgtggatgaggtatgccttgacgccatcaacatagtcgatgaagacccctagcatactctatccatcaagctagttggcatggttgagcttcttggcaaacaccaaacaacaaaacacatggaggtggttgactgctagcttgcgatcgtgcaagggctcatatgggttttgacatcaagggccttggtgggcaagcgattcagcaggtggatgacagtcatcactaccccgcctcggtagataattgatgtccctttatacttgaagaaggcgtgagtggtggctaccaccatctagttgtgatgattgatgacattgttct

SEQ ID NO: 56655 - DNA, 924 bp, Zea Mays
gacgggcataaaaaaccaggaatcacaggggttgtttcataaaaccgcagggcccgatggtaaataatttacactaacagtggatggcaggtttattaccacaaaacagatggtctcttttataattctgcaggctcgaaagggtacgggccaatatgagccgtctgatttgaaaccatggctcggattagacgctggtcaggctgaaacagtgtactatggtgaccgcgggatctagaatttatgacagcgatttaatggatcaggactccatcctggccgcccgttatagatctacgtcctagatcatcctaacgtgaaacgttcccccagatctaatctagaccgttgccacagagaccaacgaatccactatcccgacgtcgccccaacgcccgagctcaccggaccgaggcggtgccacccgcttccgcggcggagacaactctagcgcacatgcgatcgccctgaggtgctcccttacccgactagaccttgcaacgagatgcggtgaacaacccaaacacattccccgccatattaccttggattgtgcactgtcgtgctccaccgatgaggaatgcggcgagtacaggcgtatgtgagtgatcatcgggtgagtgacaggcaggcccgtgggccgaggctcacgagcgcataccgaatcataacctggtcaggaccttcgccacgctaagttgctcgacagggacttggtctcctgctctgcctcgaaggtttgttcggctagggcttggtcgtttgcctcgcctcgctaagtttttcggtaaggacttggtcattcgctccgcctcgcaggttgtttggctgggacttggtcatacgctccgcctcgcagggttgctctactgggacttggtcatttgctccgcctcgtagggttcctcggttgggacttggtcg

SEQ ID NO: 56656 - DNA, 662 bp, Zea Mays
cacggagtccctaccggccactgacgagcgggcccatctcatcgaataaatcccctcccacacggcgtatctcaacaacgttccgttgagaaatgtgagggagcatgcgccgatcttccctcgcctcgggcgtcatcctgggtgcatatactcgtccctgattcctctatatgtccatcatttgaagaccccaagccagaccagagagttgagaggagcaaacacgtgcaggcgagcgaagtggaggaaaggagagtcggcggggcaaccgctagcaaatcttgcgcccatagccaaagccgctcgcggttcttgctatgggatactcgccagagccacggagggtgagcggtgaagttttagtggcgtgtgggtggtcgcatcgtcggcgattgcacgttggacttcggtgcaaccgtgaatccgccccccagcgtgggcttgcttccccacctcgacactgctggtgagtcctatacctaactattcgtcgggttctagacagtatatagatcattcatagcagagtttgggggtgtaggatctaggacaccgactaaaggggggtgaatagacggttttgactagaataaaatacaatagacaaatttaatcaaatcgacaagagatataaaaatttccagccttgatgaaacaataaa

SEQ ID NO: 56657 - DNA, 718 bp, Zea Mays
gttttagccgtggaaccacgccgccgcaccctcgcctgcgattgccactggtctgcactgtctgggtcgctgcgaccggctacgggagttcgcgtgtcaccgggggtcgcgtaggagtggattgcctcgacatctaccggcctgcggttacccaattcctcatcggagttccggggtacattccgtcgcccgtcgtgccctgcgcaaattacgcctctacacttggtgagataactcccccttgctttgtcctgtgttgatcttctattgcgatcgtgcggggatcgtgtagggctctggtagcttaccaatcgctcggcggaagtagaatttgttcccctcaaccctcctcgccttggctggggcgtgtccctgcacgggggcccatgtgggtacccttatcatgctcgctggaggctccgcatcgtttgggcaatagggctttgagattggtgtcgttctttcgtggattcgccttacgccggtggctgcgccgccgcaaggagtccggctggcggtgtccggtcggcgaaggaagaagaacgaccgtggaccgtcgatctgcttgtgttcggtcacgattagatgttagggtaccggttcggcgggaacaatccggtccgtccgtctctaatcgggcgcataggattcaccgtgggcagtattagatccgggcggttgatttctgatccgacagtcgtgggcgcataccgattcg

SEQ ID NO: 56658 - DNA, 280 bp, Zea Mays
ggaactttcttctggagctgatcccaatgggtgtgactcagctgatgctaaccccaatgggtgcaatccggctgaccttgatgatactgatcccaatgggtgcggtgttcgtattgtcgacgaggatgaagaagaggaggaggaaatccccttgattcggaagaacaatcggcgttatgtagtcagtggagagagtagtgaaattccttctccagctttgtctgcccatgttggtctgcaggaattgtctctggcaaattttgaccaggctcttgaagat

SEQ ID NO: 56659 - DNA, 893 bp, Zea Mays
gagctcaggcgcaagacaagacaaacgacagggaactatagcttcttgttatgtgttcttgccccggtcaatggtcacactctcttaaaacatgattgtacaacggggtagttacagtaccgcagcccccactggttgcacgcacgcaccactagacccaataataacattgacagataggccccgcttggtgtcactacagacccacaactataacaagcacatcctccgccctcgcagccatcacctggaggagccttcacgccctcctgtttatcctcgtattagtggtgtctcggccaaggcttctcgcttctgggcatcccgctcgtgatggtcgaggattcccatgccttcgtctccaatggtcgatggccgatgtcgacgaagttgttataatgcgaagtctctggttgcctgtagcattagtcaagacgattggtgatgacttcgcctttctgaccgagggtcaggtcggccttcggccgaactgtaacacccaaaaattatgattattgagttccagataggagacacacccaccatcagtagtcttagggcccttatccttgtctatttgggtctttggtcctgccattgttagtgcaaaacaaagacaaaaggcaacgaacaaacaaacagtgtgaaccctacaactactcttagggtggtggtggaacacgagttatgaaagtgtcttaccctactcttacagggttcttaccagcactgcaggtggcaaacggtggtcggtgtgactgcccaaagagcgtgggtgtgattgcaaatgagtacatgttctgctcgaaagaaaggtggagctttgggaaggttcactaaatatattgtggcacacaagtcagtaacagatagcaatgttgaataaatgttcc

SEQ ID NO: 56660 - DNA, 1208 bp, Zea Mays
gtcatgtcataccgattttgagtcaagtccaatctaagtcagttgtcaatcaagagtttgaatgcctttggaagatgaaagctttattgatgatgaaatcttctgattacagagtacaacttgccctcgagacttttgaggtatccctaagggtagaacttcctgaggtgctcaatattccatgagttgcccacctcagtgtcgtccatctgagtgagccgataggatcccggccgtgtgacctctgctacgacgaatgacccttcccacggtggtgatagcttgtgtcgtccctcccccattagtactcgatggaggaccaagtctcccactgtaaaggatcggtgtcgcacaacttcgtcgtggtagcgcctcaaagtttgttgttactagccgactgaattactgtgtttagtcgctcctcctgcagcacatcaatgtcctctagcctggttgcctctgcctcagctatgctttcaaaggtcagcctaggtgccccaaagatcagataggcaagcagcactgcctccgacccatacaccatgaagaacagggtgtttccatgcagagctcggctaggctgggttcctaggctccagactacgtacgacagcttcgtgatccacttccctgcaagcttctcgctcttgttgaatacctttttttctgagtgcatctagtatcattccgttggctctttccacctgcccattagctcttgggtgtgccactgatgcgtacttgatctgaatgctcctttgctcacagaaattgaagaactccgagctggtgaagttggatcccaggtcggtgatgatgctatttgatattctgaacctgaacattatctcctggataaactccactgcttttgctgaggtcaaggaagcaattggcttgtactctatccacttcgtgaatttgtcaatggcgaccagtatatgagtataaccttcctgagcttttttgaaaggtccgatcatgtcgagcccccagcatgcaaacgactaggttacaggaatggtctgcagctgctgcacgggcaagtgttgctgttttgacaagaattggcatgcctcgcacttctggactaactcggtagcgtcactcttcatagttggctggtagaaactggatctgaaagcttttcccaccagagtccttgatgcaacatgcacaccacactgcccggcatgaatttcatctaa

SEQ ID NO: 56661 - DNA, 2019 bp, Zea Mays
ctgcattcatgtgcttcaccgttagcctacccactcatatattgtaatttacttcagcaattggcaggcattaatcaatggtccatgtgaaaataaaataataagaaggcatgctgactcaaaagcagctgatgagtaaggataagatcacctcaaaggcctttttgagagaactgtgaagaagcttttcaaattttgaacgagctgacccagcaccaacagcagaaacattaaaagcactgatagccttcctcatggcatcttcatgtgcttctctcaaagaatcctgcaaatgctgataagtcaagaaagtccaaaaagtttggatgagaacattcaggagctcacttattagcaacccacctcttctatatgttttttatggtcaaaagaagaattgtaagtgcccacagcagaatcaaatgccctctggcattctgcctcctccacactctgcataataaatttttaaaagaatcagatagcttccacccagagagaaacgcgatctgtgaaactgtaagccaaaaaaaacaacagaagccacattgctataagcaatcataatatacctgccatgatgaagagattgtagggacagcaccattattaatagcatcaagaaacgattgtgtcaatccagcaaggatgggacctgtcattgtagtagctccaagttgttttggtcttgttcggtcaagaacaaatttcgtgaaagcatccagaccggatctgaactctggacggaaattactcagctgcatcacagaaattaggaattattgcaccaacatcaatctgaaattaggaattattgcaccaacatcaatctgctagaacaatataattatgccagaacgtgcattatgattctggctcacgtcatgaagggacagacataatttgtaaatgccatcaaactgtttaaagtgtaaatatgtttcaagagcaatctacaggttttacaaaaatatcacaattcaaatcagtgaccgaagttgtgtcaaagactgccttattggactggtagtctggtaccatgtaagtatatgttattaccataaaaaaatgtacagttaccgggaaaatgcacaaaataatatagtttgcactgcagcatacaaaagcttcatttgtcttactggtaccttaacccactaccttcaagaaaatttccaaactttttaaaatagtccaatccaatcagaagttcagaatacatggtcaaaaaatatatacaacaatatgtatgtgggtactttgctatttgcgcaaatgagcttaggaaaagtttgaatctaacctgcaacatatgatatttgctgagaattttaagtacaaggccacaaatagcagctgtagttcaaaggaagaaatacttacaggaagttgatcaagacgttggagatctttctcattgttcacaggtcgcacaagtgtaaaacattccctgtccggaaaaagtgcacggatggagtcccgtatcttccagaacaacaaaagaagtataagtatagtccatacgtctagttaccaagcacaagtacaaagctacgttcacccatgaaaatctaccataccgcattctttgcagatatgtcccttcctccaccttgaacaggcctcaatgctagctctaggtaatcccgtggagtaatttttctgttgtcttctgccaaatccagataaaagtcctgtagtaaaggaagcacggtgtcatcggctcgtcgcacaccaaaggtgtctgatgcataacagggcctgaggtttatgtttgacggtttataagatgatgtgcagctagggaacagtcaaagcgttcaacgttcagtatacataattagtataggagaaaagggatgaaatatattactcgcaacaaccaaacaaagacaggcgagaactgcccaagttcggatgcagtggaccttccacctgaggcccggacacgtatgtgctttgtcatctctgtgaccagcgagagacgatccaacgcagattcatctatacctcccatct

SEQ ID NO: 56662 - DNA, 470 bp, Zea Mays
gtgaaacgggcaaggtttgggtatacaaagctcaaattaaagcggatgcagcagtatcccagactactgtttaaagaggcctccctgctgtgctgctgatgctaggcagtaggcaccgcatgaatcaaagggaaggcaaaaaaggaaagattaaaggcaggtgtcacgtgagagaaatgttggaactgtgtgcatatatactgcctttgctttgcccgcatgtggcagtggcgtaatgaacacggtgttcctgctttagcgtagtcagttatgttttgcttatcaagcagaacaaaaactcttgttgtatagacatagacttaagtttgaggcgttttggcatgctggttgctctcttgtacaaaagtcataccaaaccacttatagcttgttcggttaggagtgacttgaggggattaaatctattcctattcaaaatttctctctcaatcccctagagacacccctat

SEQ ID NO: 56663 - DNA, 698 bp, Zea Mays
taatttctgtaaaatggtttgaacgttgggcggagagtcagagcaatttcttttgtattctaccgcacgccagaaagattagtccatctcttcagattttgctttgcaatgatgtgtatgctcttttcttttgacctgtaggcaggcggtggcaggacgataaaaatctctcctgttctccaccagctcaccctaatgtctgccggttggtgatgtctgctctttctgactggtttgttttttctaccgggatgtgaatggttagaaccagccctgattctatgaatcaggagcaatatatgactgaacgaaaatggccggattcagcgtcacagctatgcaaatacaactgatcttcaaccggaagtccgataccactttgttccattttcccctttgccggcgagccgaaccaaatcaggatcgagcaggtcaccgggagtttgatttatgcaacaacagaaatcaacacgcacaatttcgtagtgtcccagcacgtgtcgccgtattctgttgccagaagtgtctaatacgggggcaaattgaagaatttctaaagaaaatataaaaaaagtaacttaaaaatagaatccggcatcgacgacgacgctgacattgccgccaccgccaccatgtccattgctcccatagtcgtcgactttctcctggtctcgtggagctgggctacgtgctcttca

SEQ ID NO: 56664 - DNA, 740 bp, Zea Mays
ttgtggcacgattgtgcggccctcctgctctgctcgccactatgcccttccacggcggtgtgggcatgcgtcctactctctcattcgtcttgcgatcttgcggatgtgtgtatgagaacttgaggactagggtatagatatggtggcttggaggtgctttaaatggcctagatgggcctttaaatagacacttatccatacttttcatttcttttttctattttaacataatagagaatagttaaggtgacagactggattagggaaggtatggaaaattgttgacaaattctatactatttggtctaagtgatatgctattttttattttattatttaattaaggcttcgcctcgtcttacactttatcgcctaaaggtaaaagggagattgggcgccttatgtcgccttactgccttaataagagatgagatatgagataggatgggctgctagagacaacctaagatgagggttttatgaaggagctctttggcactctccaagatgactcagtcttgacaccaggtgcactctcaactaggttagtcgtgcaaggccatgtggttgtggttcttagtcgcctactcaagggcatccctcatcactatccactcttctttctacaacatctaaagcaggatgaggtctttctctagcttcttgaccttttcctccaaggtccttgagccttggaaggggcatgatgcattgatgatgtcttctaagctgcgagcctc

SEQ ID NO: 56665 - DNA, 424 bp, Zea Mays
gaaatacccacagaagaggaagctcccggagtgaagttaacagaagaaccccactgagtcgtcggatgaggcagacacggagctcaaaattgagatggtataggagtagtcggtgcaggagtaggcgcggccagatactaaggaaaaccctgcataggcacgaactgaggagtcccgggcacataaaactgctgcagagggggtggtactgaaaattgctgctcagcgctagacatcatgttgacagtgccctgagaatatgaagaagtcactggctcccatctaagcttcccattgcgattcctcctacacaccacatccttgtgatcttggctgcagatagagcacctaccactccactgacactcggcacggcgatgtgcttcaccacaacggaaacacacttgccctaggccgggcttag

SEQ ID NO: 56666 - DNA, 337 bp, Zea Mays
cttagagattgaatcaagacttggtttaaatataatatttgttgtataacacctgttctccaacttttattaaaagtcaaacctcatatcttgaatataaattaaagtttcactttggtcaaggtagcatcattataatgctctcaattatatttttaaggcaatcggactattttcttgatattttcttggcataaaccctcaataacttttgttgtagagttgatttagagtgttttgggaaagttgtcataacttggttgaatttataaatttgcttttatttaatcgagcagtctcaagcaagtatatgatttatgttttcatgtgagcattt

SEQ ID NO: 56667 - DNA, 681 bp, Zea Mays
ccgaatttgtcctttcgctctttgcactgtatgccgcaggagtttatatgatcgcgatggaaaaacggtggagtagcctgtactgccttatcattacatgcggaggacatggacctaccctagctagcccccgtgcagtgtcactcatcagtgtgcacggtcacaatggatgtgagcttcttcggctactcttcttctctggcaacgaatgcgtacgtacgtacacgtacaaatgcgtactattctgtcgtgataaaaaggaacgtaagagtacaatgccagttgtcaggtcactgcacactgtgattacctgtgccgtgcaagctcccgtaccgtaacagtttccacctctggtcgccatgccatgcttacatgaactggctgcccggcagtcggcagtgatgacagctcacaacaccaaccttccccgtcttcattatctaagcaaaaggggtgagaagaatagggtcgcatcttctgtattgcgacaacaatcctttccactagctcgaaaaaaaatcgagctcaaaccctagctctaccccggcggcggcgaagacgatgccagcacctcaaagcccgcctccgcgttcctccttccctcccctcttgtcccaatcttgtccttggcgtcatgtcgattcgggcttctatgagcactgttcgtccagtctccgcggg

SEQ ID NO: 56668 - DNA, 770 bp, Zea Mays
tgaagagcgacaactccacgatattccttaagatttcgtcccaggtggcgccatacgtccatacccatgtggtcatgtccccccaggccaccatgggagacaggggacgacaaggagtctggccattctcccttgcaggttacgcgcgaaatcgatcctaatcgaacccgccgtcgtaccaatcactcgaattctccgagggcaccaggttttgggctgaattgagcggtcctgtacagaaaatcacgcactaattggggatctcgggttgtaggggagctgcggacaaaccttacatggtgtgttcgtcctctcctctcgtcagttatccacgttggctcctggaacctcttgtcagttatccacgttggctcctggaggaagaacacatttccttgattgtgtcgagtgcagaggtgggggtaggggggagtccactgacctggggacggttgtgccgcgcgttgaagaggagggttcggtgaaggcagccgatggggaggagttggaggatggcagtgggttggtggaggccgccattggggaggtggactccgacggtgcggtgggggaggaggtggagtccgatggtggagtggaggagagagaggggaggccgccagagttggagcgcggtggaggaggctgcgcgagcagtggggtggcggtggttaggtcagatgctctcattgaagaggccgcacgttgggccgcacgttgggtcgtacgctaggcgccgctgggccacacgatgggcctatgatccacat

SEQ ID NO: 56669 - DNA, 765 bp, Zea Mays
tgggagtctgagcccaaacccgagtctaagtcgaaaccagggtctgagttgtagtttgagtcacactcgagtccaagttcaacctgattccaagtctgagcccgagtccgagtctaggttggagttggatcttagtctaggtcgtcgtcatgagatcttatcgacttcgagtttccgtgatggtagttgaatttctaatatcttaattttggggcgccatgtgtgccaaaatatctatgatgagcccaagattttcaagcatgtcaacaatgaatctcagggcgtcgaagatgaattgatctcctaatgcgaacttcatggttgtcattagctctcttcgcgactagccctacctagcacaccaaccgttgaagattactagatggtttttatatggggtagatcaaatgatcgaaagttgatggtaaaggtatgggagacacgagagttgatacaggttcaggctcgtaatgtgagatattaccctatgttttgtgtgtggcgatatgctttgatctggtatgagatatgtcctctatcctcatggggcttcctcatcccctttgatatcccaaagaggggtagcagttataaggtaggcaccaagtcggttaccaagttggagacggaactgaggtgcatataagtcgaactctatctttacaagcgtatctttcatatctatggggatatttgtcataactcttattttgatgagatctttgtcatatttatgcttatagaatcctcctggctttatgcctc

SEQ ID NO: 56670 - DNA, 612 bp, Zea Mays
gttcattcgccttgattcttctttgatttgttttcccctctctttctgacttgaagctcatggcagtcgggtgcgtcgccgcgaatggacaaagcacctagagagcaccaaggccagcgaggcagcgtttgcgaaggggacgaaggcacccggacgatatgtgaggactggtttcgtcgagcgaaatctcgaagcttccgggagagactgaagcacgatggaaagttgattggctgggagatcctggtgaccatcaaagctagatccaacggttgagtttttcgtgctgacgtggataccttcagggaagccgttttgaaccggctttgtaaatatagtaatcggaatctcgaagcttccgggagagactgaagcacgatggaaagttgactggctaggagatcctgatgaccatcaaagctagatccagcggttgagtttttcgcgctgacgtggataccttcagggaagccgctttgaaccggctttgtaatatagtaaatttcttacctgcccgttctgtcattgccaggttatcgatgagtcagtcgttgctcttttgcagccagttttatcactgccatgttatcaatgggcaggtggttgttgttt

SEQ ID NO: 56671 - DNA, 337 bp, Zea Mays
aaatttagcattgcaagtgaatgaaatactgaattgcatccaaagggtcagaatatagggtgcggtttgaattcaaatacaatcttacagatagctaatggacagggtgtatgtatttttgtctagatcgacttaccatctatgtgctgattctttgactatcattatgcattcatacttttgacaacagctgcaagttcggataataactgaatcacagattgctgtgagcaaactaattaataacagccccaaaagttgacaccatttttgtgcccgcacactgttctgtgaatcagaagcagtttgaattatcgagtcctgatgtttttgtctc

SEQ ID NO: 56672 - DNA, 419 bp, Zea Mays
tttccacccagtggttcgtgtcggagtcatgagctgatgtttccagattagtttctcgaagaagtcttagctcagaaagattaacagctaacgacttaatggctgatgttgctaggttgctggctgtcaatacgcacgacctccttgcgcacatcgccagctttgattaccggcccgagatgatagacgagctcgacgtgcagatgaggttcgtcgtgggcggaaccattctcatgctactcactgtcgtcttctatgagattcaggtcagtctcttctccttccctgaatcgggagtgttaagcgcagcctgtacaaatccattcagattgcgtgaaactatgttgttagctgattatggtgtttaccttttctccacatacagtttggatttagttaccaacatgagatatatcttg

SEQ ID NO: 56673 - DNA, 785 bp, Zea Mays
cttcgccggagggcattgctagcctgtacgcgctgggggatgccttcgtcttgacgataaatggaccctcccatttcggctccagcttgccccgtgattctgtccgggtggtccagacgagtatgaggtctcctttgttgaactctcttgggacgaccatgttgtcacgcccaggccttagtttgggcttggtatttgttgagggcctacagggcgaggacgcggtctccgtcgatgaggtctttggaggttggttcgtcgacgtcggggaccgctgatgtgcttgttcggggcgactcgtgatttatctcctgtggcatcatggcctccgatccatataatagacgaaagggtgtgaatccggttgcccgacattcggttgtatttagggcgcagaccacttcaggtagttggtcgacccatttacccttcttgtcattgagaattcttttcttgatggtagtgaagatcttgccgttggcgcgctcgacgacgctgttggattgcgggtgatacaccgaggcgaaggcaggcttggtgccgatggagaggcagaagtccctgaagtcctggctatcaaactgtgtgccattatcgactgtgagctcagacgggactccgaatcgacaaacaatgttttgccagaagaacttttgggcggtcttcgatgttattgtggatactgccctggcctcgatccacttggtgaagtacacgacggcgacgaaggcgaattttaggttgccttgagccataggtagtggtccgacgatatccaaccccag

SEQ ID NO: 56674 - DNA, 1277 bp, Zea Mays
caaattcactagagcaatttggttagcaaataacacggcgcaatgcaaagctctagctctaggctactctagctaagccgcctacacaattctattatcaagagcacaaactaccaaatcggctagagaatagctctccgaactatggagctagcaactatgcaaaatgactagctcaccgaactaaggagctagcaactaaagagtaaagcgaggattgaatggatagttataccaacgtgaagagaagataaatccaattaccgatatgaagtccaattaccgggagatggaatccaatcaatcaatagcaccgggaggaccaatcaaccactcgaagatggtgaacacaatagggacactcgatttttatcgaggttcacttgatcaccatcaagctacgtcctcgttgtgacaaccgacttccttagaggatcacgagctaggcatcagacgccaaccctcactgggtgccattcaccaacacaagagaagggtatacaagtcacgattaatgcactaaaatcgattttggcactccgccggggaataaccgtaagaacccctcacaatcaccaccggtgtggcctcgaaaaatcaccaatcgagcttaacaccaccttgctgcctccaagccgtctaggtggcggcaaccaccaagagtaacaagaaaactagcagcaaatcgatcactaagtgcctctagatgctatcactcaagcaaatgcactaaggatcactcccaactcacttgagatgcacaatcaagcaataggatgagtggtagggtgttgctcaagctcacaagaatgttatgtcaatgaaaatgatcaagagagggagcaagagcaggccaaacgacttaaatagcctccaaggggtaactagccattttctgtttcagggcaaccggaccaaggtcggttgccaaccggaccatcaagcctcggtccggttgctctccgtcagcttctctgagctcaccacgtatgcttgaccgttacctctgcgcgcgaaaaccaaccggactcagggtccggatgcaaccagactaatcagccctggtctcgttgctccccttcaactccacgcgctctgtgcaaacaaccggacgatcaaccggacttagcacagtaaccagccggaccaacaaagactagagtccgactgggtccagagaggttccagaggactaaaaatcaaccggactaacaaccagggtccagttgctcctttgaatttttcccgcgcacacgtacaccaaccggactcacact

SEQ ID NO: 56675 - DNA, 289 bp, Zea Mays
catgttaagtaggagtcgatttcgttaagtgattgttatatacatgttgtgtctcgaacttcgataataatagaccagccgacgtgtatgatgtatagcggcctatactgttgctctagttagccgaattgttagataacttggttaagctcataatcacggcgaattgcttgttgtggtctaaatgtgtatagttatggtcgcgggtaaaagagtagtagtgctcatgtgatgtctaatttaaaacacaaattgttgggtgattatcatggagaatgcgttgttaatt

SEQ ID NO: 56676 - DNA, 348 bp, Zea Mays
gcaagatctaatctaaaccgcccatagccgatcgagtggccagggggtttcttctacctacgcaccagcgcacgacggtggcgccgccggccatgaatccgagcgccaccctcccttagggagcaccaaactaatgtgaatgtgcgctaaaacggagaggagaaagcgacgaacatgggaatagtagttataccactgattaagctcccaggtatcccgtcctcggcgcatggcggaagatccgaatctcgccacggacagcgagcaattacccagggctctggtgaactccgctcgatttgatgaggcgcacgtcttccccaagacgcgaggatcaccaaccgctct

SEQ ID NO: 56677 - DNA, 371 bp, Zea Mays
atgaacggtgaatagttggacgatctgattaatgatcaaaattttgacatcataacgaatgaacaatgaagtaattggacagatggacaaacgaacgaacgatgaatagttggacggacaaacggtcaaatgatgaatacttagatgaacatacgaacgaacgattcaacgatcgcgcgaacgaacggacgaatgatgaatagttggatgaacgagcgatgaaaagttagttaaatgaacggatgaatgaccaaacaaccggacaaacaacgaacagagaacaattcatgtacttgtgttgagcttgtgtgggagtgagagtgagtgggtagccaaggaatgacttgggatggcttgggggttgccccttg

SEQ ID NO: 56678 - DNA, 629 bp, Zea Mays
agatgaagaggaaatcagggacaaattaatttgccaaaagagagcttatagcactaccatacaaatttagccttttggaaagtttaccaagcccttcaaaaaatggcttgctaccattgaaacaattgccaacaagattcttggtaactatatcaccaaagaagaccaattaccgattgaagcctttcaggactagagcaaacgaagggataatcaggtctttgaggcatatggatttaagtatctagactatcccaacatggccttcaaaaaatggcttgctaccattgaaacaattgccaacaagattcttggtaactatatcaccaaagaagaccaattaccgattgaagcctttcaggactagagcaaacgaagggataatcaggtctttgaggcatatggatttaagtatctagactatcccaacatggccaagaacgacaaggccaaagtacaaataaaacgtgaagtgactgtattggaaaaagcggtggagtgtggccttaataaatgaaaacattctaccaacttaacatcgaaggtgaaaattctaaagatagttgaagtcaaaggaaaaaagttgaggaattgattgtcacatagactacaactaacaaatggaccca

SEQ ID NO: 56679 - DNA, 449 bp, Zea Mays
ggaaacccctagtggtggcactcaacaagcctctacaactggtcctcctaccatggtggtggagtcctcatcagagcaagaggacatacctgcttcgtcaggatcaaagaggaagctcagatctgatgtgtggaaggattttgatcaggttgaagttgatggagtagggaaggctaaatgtaaacattgcaagaagaaactttcgggcatcacaaaaaatggtacatcacatttgcaccaacatctaaagtcttgtatttggaaacccctagttggtggaagttggagggaactcgttatcccactttgaggctggttgctagagacatttaagctattccaatcaccacagtcgcatctgaaccaacttttagcacaagtggcaggcttttaagtgactatcgcagtcgtctcactcctaaaatggtggaagctttgatgtgcagtca

SEQ ID NO: 56680 - DNA, 1181 bp, Zea Mays
gccgggcccggaggccgcatacgcgccgccttctctcgacgccaccgccgcggcagccgatgtcgccgctgcgatatcctcctccgacgcggtcacttgggccggcgtctgggcgctgctctcgcgacacagggcccgcatcgcggtctgcatcgccgcgctcgtcgcctgcaccacctgcacgctctccatgccgctcttctcaggtgaggaactagggcgttggttgagacctctcggatgcgcatgcgccgctgacgctgatgctgcttgtttggttttctgaaatgggctggctgtgtgctgtgttcctgttgcagggaggtttttcgagaccctgattgggagggggaacgagccattgtggaggctcttatccaagattgcgatactgtacacactggagcccatcttcaccatcatattcgtgatcaatataactatcatctgggagcaggttatggcaaggctgcggagccagatatttcgaaggattctgatccaaaaggtgctttcagccgacatcccctgttttattaatgcttttttttattctgcattctgacaacattggatgtgcttgtatgaatgatgaattgatatttgctgattacttgcatggctttgttaccttgaccatagctcaaaaaagttatcatcaagtgttttttgtacaccttcagagatataattattctccgtgtcatgatggaatgattcacattgttttccctcttagggtgtagaagcatttaatatagttctactaggtaaatatactacgtagtacgtacctggatgatactggcagcaagttatttaaatattcatgtaatatcaacactccagtgcagtaggcattctatgcatcgatgatgaaaataaatctttaaaacaggttgtgctttagttgcctatttgtgtactagtaatcctgttaatgtatagcctattaactctcaatgtattatgggtctatgactattgctttcatagtcatagtgcatatgtttctttatccatagaatttgttggaggctgcatttctcattacattttcaatttgccactcagcaaaagagtgcatttacttcttgttgttaatagctccttgcttggaaccccgtctaaactttcttatttttgccttttgcagatgttattttttgatcgtcacaagg

SEQ ID NO: 56681 - DNA, 423 bp, Zea Mays
gcattatcgacgtgacctttttgataaattgcagaatttgaggcatggaagtttctgtgttgaggagtattataagaagatggagaaggtcatgattagagccaatgtgtatgaagacgaagagcaaaccattgcacgtttcatggctgggttacaccgcaacattcagcgtattgttgagtttcagccgtaccaaagtcttattgatttggtacatcaagccaccaaagttgaacgccagttgcaacaaaatgctaagagcaccaagcccttgtcatatggtgcacgaaccatgactggtggaagcaaatcaatctcaaggtttactgttgcatcctcagcgacaaaaggttcaactggaggcttgcgatccaatattcaaggcaattctagtggaaagaacagtgctgctccaaacacgag

SEQ ID NO: 56682 - DNA, 730 bp, Zea Mays
caggagtgcccggtggagtgaatatgaacggctctgaatatgatcctcgtcggcgctatgattcatgcccggtggagtgcagataactacacagggtaagaaatatcgcacatgagatgaacttggggcactgtttcaccctatcgccgtgcccacttgcccgacgacgtggccgcacggtcatcgccatggctgccaccgttcattcggtcgtgccatgccttggtctgttttaccacgtcgctttgagccatggaggctaaccagtaatagctgcacgcctttgtcctgtgaacgccacgatagatcgccgccgtgactcatcccctcttctcggccaccagtgcgatttcttcaaattcggcaccaccactgatggaccctataaatcaatgccccagtgagctccgttaggctgttacatgtccagtgcaccagccctcgccttcgattagccactttagcttgcaaattccaaacttcccccaaatcaggtttccgcgccaccgtgcacacctgagagcacctagacgggggggggggggtgaataggtgatcctgtagaattcaacactaaattccaacaaccttgattataaaaatattagtgtgtgttaatcaagtcaatgagacaagctcttgcgaacacagacaatcaaagaaggaacaatcacaagagacacacgattttatcccatggttcggccaagtaacacttgcctacttccac

SEQ ID NO: 56683 - DNA, 473 bp, Zea Mays
ggggttatggcgctgcaggggtgctgtgtcccgagattggggacggacgcgtaccgtcaatctagccaccgacagtctcgattaaatctggcataccgattcggccttgcggcttggtgatcgtcggatgtgaaatggagggacctggtggatggttgcgagaacagacccaagccgtaggatttagatccaacgcttgtgtaagccttccgggttgtgttatgttagatctaatcgtggccgtagggtgaaatcggacggccagatttggcctgtacccccttcgccctggaagttttgcaaataagcccctgaactatgcagaattcaacccgccgtccaccctgtcggtgctctgagtctgtggaaatcttgcgccagaccccccctgcgttttccagaaaatgaggctccgtccagagaattataaaatcagggaaatgaattagaaaatgagtttttaatataaaaac

SEQ ID NO: 56684 - DNA, 462 bp, Zea Mays
ggaagtatgaaattggagcttgctggtgatcggctgggagcaatactagacgtgggggtgcgcaacgatattgcgaagctagtcacgggctcaatttataggcagcttcgtcggtggtactcaatttgaacgaataatgcggcggccggaggtgaggacgaacgcgggtgcggtgaatacgtgtgcaatgtcgtggcagtaattccgatagtcgacaggaagatagagggagtcacggcgatgcgatggcaaggttgggacacgcggtggccaacggcaagggcacggcggcggtgagcactttacccgcgggcggtgagccaggagagatgaactacgactagccggagtggcttccaggtcacgggcggtgacgatcttttaaccttgcgacgttattcacttacccgagcgtgaatcatgacaccggcgacgtgaatcacggcggaaagccaccagcgg

SEQ ID NO: 56685 - DNA, 1123 bp, Zea Mays
tgaacactaatttctcaaaaaggaatccaaaccatgccaaaacaaaaaggaatgagtaaactatagaggaaaagatgacaacaagaaagtagtgttcatgtaccggcaacctgtcccatattaagtggtcatcatctggcttgaggtgatagtaagctgagccaaatgctgctgctacattcccagcataaaagaggaaccatcccgaggcctcccacctcaagctacatgattccacaaaatggcatgttatcaaatttataaatttatttcaagggaacgagtatgctgtcattcctgatataaaatttcttgaagcagcacacctcatagaaaatcagatatagtttaaagctacttgattcaacaaagtggcatgttatcaattagtgaaatttaatccaaggcaatgagtgttgtcatgagtgatagaaaaaattcttgaagcagcacacctcacagaaaaccagattagtttcacatgaagatgcttatcttaagaagtagtaggatcgcatacataacacatttcatttattggcttacattgaagcatatcaacctacttttaattgaacgcccatgactcaaatccccattacccagccattctatactatggcaagattaaattgcacattttgaagcaaagcatttcctcaagcaagcaagcagatggctagaagacatataagcaaaggttctcaacatgattcatgagtgccatctcgtttaacttaaaaatccacaggattagtggaacctcattcggacataatagcaaaaaacaattaatcacctattgcctcctcttgacctcttctgagttctgaagctttcaagcatgactcaaaagatcggactattttacaactactatgccaaaaaacattggttagccaaaaaatttattcaatgtaaggatcatcgatctgttcacttgactcaagtgtaagcaaattactaaactaggactaggacataagacgaacttctttagacatttcatcaaacaaaggtagggtaagtgctaaggggggcacctgacgccgaagcacccgctgtcgtagaggcagaggacgaggcccggaaccccgacgagtagaagcgggtaggcggtgag

SEQ ID NO: 56686 - DNA, 428 bp, Zea Mays
acggcacaacgcaagacaatccttgtggggataggcatatggccgtctcgtcttgctgttcgttcgtgctggccagtggccgctgccggccccggcctccctcctccactcttttactctttttcattcacgctccatgtgttctgtttggccacgagccgagctcgcagtcgcagctgcgtcgcgtctgctttttgagtggatcactgtgaaatgtgaatctgtggccgtgcaatgcgagtgcctagtgtgcgtgctgcgtgctttccttgtttgtttttttttttttttgcttgctttgaggcgcagtggtggcttggctggtgtggatgagctacggctgctttggcaagtgcaaacaaagctctcccccaaagcgtgcttacgcctttagtagttgcagttgcagcctcccgcggacgccccct

SEQ ID NO: 56687 - DNA, 678 bp, Zea Mays
cagtgccttagggcgaagggtgccacacacgggcaaagaccgcgtcacccaatggcggggcccatgcaacgtccggctgtcattcgggaccatttgtaagtccctccctatggtagggtttactgtgtatttgatcaggctgtacttaacatcgctgtaatgaccccatagggtggaatattctggggctgtagcaggtaaccgatggcataattgtacatagaagggtgcacccacccacttggttaccaataaataatcccgcattgtacattgatggaacacgcttaacaagacgccatagttccctgcctactattttgttgagcacctgaataccctctttccctagtgtttgggcccgcttgaccatgtgtcgattggtaccaacaatccactcttgcctttatgttatcctttgacttatcagaaatgtccataattgttgcccaaagtgcctcggtgacattctttttagtgtgtgtcacataaatgttgtgtgaaaagagtaggtcatcataataggggagccgagtcaagcccgacttttgtgtccacatatgttgctcgccatataccacaaaaccaccttctgggttggccacgagaccatctatctgttgatgaacttcggcactagtcataacattgtaggtgggtggcctgtcactacgatac

SEQ ID NO: 56688 - DNA, 386 bp, Zea Mays
gtggcggcaaaaaataaagataagatgggcaagcaagcaggaatcagcaggataggagagggcatcagcagctttacggggacagcaaaaggcagcctttaaatttttattcgcaccaccaatggcctgcaaacgggggagattagacgctgttttcttcaacgggaatgagcatgtgcgcaggggcccgccccgcgcctttctaccaaaagacgcggtccgcgtaaagggcggcagcatctctagtagtcgctgcggtggtggcccttgccgtccaccaccaccaccaccacctatctatgtatctatctcttcactgattccatatattattccgtgcttcctcctcatccattccaacttccccatgaatcagctgctttgcc

SEQ ID NO: 56689 - DNA, 1075 bp, Zea Mays
tcggacttggactaagggatttggacttgaacaccgaaggacttggcccacatggtagaacaagatctgcatacatggtatagataagggaaaatgatgattcacgataagggttatgtctttgtaaaacgtaggatattttgacttataagggaatccacatgtaaaggtagagataagtctccctgtttttagaagggagttagttaggtcgatctctatccttatctagctagcagctggataggctttttgtaaccaaccacacatactttgactataaaaggggggtatcacccatccagggaagatcattcaatcatactgcagcattagacaccacaatacacagaaatagggtattatctcaaactgagatcctgaacatgtctaaatccttatgttccttattcattcaccttcagttctccatcttgtgatctgccatataaattcactgccgaaaattcctcaacacatatgcttcttcttatgcggctcctcatgcattccctccctagtatggtggtcctcccacatatggtgctcatgctcctttttgtctttccctaggcccggtagtgtcaccaaacaaccacaatgatgtagcctccaactaggtcgtgtaatttggttgatcgtagttccaacgacgacagaactagactaagacgaatgatgaacgaattgtaagtacacttaaacctttataagttccacactttttaagtcaagaacaatcataaatttataggtgcatgtgcatggctattgcactctgttaaccccgttcagggcgatggcaaaaaaaaaaggatcggccttttgggagccaaataacaactatatacaactctacccctaaactttcattgccaccgtgccaccaagcagctcaaggattggtggtccacgagcaatcgaaagatgaccctcttaaacgacttctataacccattttctgtggcctacatgagcaaatcagatgaagctatgatgctttaatcagcaaaggagagcttctgcaatagtcctggtgaaacgaacctcaagctagagcacatgtggtttgctc

SEQ ID NO: 56690 - DNA, 394 bp, Zea Mays
aatgcttctcgacgacaagaagggtaaatgggccgacctgctacctgaagcagtctgggcgctgaacacgaccgagtgtcgggcgaccggattcactccctttcgcctgctatacggctcggaggccatgaccccacaggaagtcaagcatgggtccccaaggacaagcgcttcagcctcacccgacgtagacgagctaacctccaaagatctcatcgatggagaccgcgtcttcgccctgcaggccctcaataaatatcaagcccaaacaaagacctagcgtgaccacgcagttgtcccgagagaattcaacgaaggggacctcgtactcgtccgaacaacccggacagagtcacgaggtaagctggagccgaagtgggaaggaccattcatc

SEQ ID NO: 56691 - DNA, 1224 bp, Zea Mays
ggaaccgagacgactgatactacgatcgagggatatcacatgtatactaagcgaatatgaattataatatttaattcggcttaatcatattaacagacaataatcacatgccgagtaaaattactacttagtcccgattagtgtgttgttcgaataaccgttgcttaaatatatatttacttagcgcgagctattctaggtgagatgaatcattagcgtgcgtaaaacgcacgacgacacgtgtgaacagcacgcacaacgcgcgcgaacagcacgcgacgatgagcccaacacgcacgaacaacacgcagacaacacctacgacacacgagaattactaataatcatcgcgtttatactaaataaatattacttcacaaaacatttgaggtggcattaatcatgttaatcggtattttcaaagcgccaattaaaattgtaggataggcttaactagatttctattttaataattatcaactaactaaataattaacgaaagcatgtgtcgcgacaaaataatgctactaacacgcaggatagatgaacgggttcgggggtagacgggcgtcgtctacggatagacgaacgcgaacagcaagccgtcacgcgagaatcgccaaatagatgtaatgtttatactaaacaagtattaattcaaaatcatctacgttaacattattaacgcgtcggcaatgttatcccgaagctaacgcaatttgaacaggtcgaaattgatttataacgtgaaagatttcgcttatttaacgaactaggagcttatacgtaatgaaccatatgcttcgtggactagcaattagtttttgcatgacttaggagaatagtaaattaattctagaataaaagcaggatcttttctttaaaaggcagctgagcgatgtgtcgcaaatttattggctggaaggctggccacgtggagggctacaaagagcacaaccacaacaactcctgagaggatctagtgtggagcggtttctagatattttcctgcatgcaccaaggaacgtggatgtatggcatcattggcatgcatggagcccacaaggttgtttctaaatattgcgtgacggattgctttttcttccacctctcacgaacatgcatggtttcttttccactaaaatcgaacgggtgattacaggcgcgggcggctccagctgagcagactcacaaggagccagggtgtagtcgacggccaccgag

SEQ ID NO: 56692 - DNA, 583 bp, Zea Mays
gtcccgtctgaactcacagttgacaatggcaagcaatttgacaaccaagacttcaaggatttctgtttctccattggcaccaagcttgccttcgcctcagtgtaccacccgcaatccaacggagttgtggaacgcgcaaatggcaaaattttcacagccgtcaaaaagatgctcctcgatgacaaaaaaggcaaatgggccgacctgttacctgaagccgtctgggcactgaacacaactgagtgcagggcgactgggttcacccctttccgccttctatatggatcggaggccatgaccccgcaagaaatcaaacatgggtcaccacagacagtccgtcagccatccccgacgtggacgagcctacttcgaaggacctcatcgacggagaccgcgtcttcgccctacaggctctaaacaaataccaagctcaaacaaaagcatggcgcgaccacacagtcatcccgagggaattcagcgaaggagacctcgttctcgtccggacagcacggacagagtcccagggcaagctagagcccaagtgggagggccctttcatcgtcaagacgaaggcgtcccccgg

SEQ ID NO: 56693 - DNA, 828 bp, Zea Mays
cctagagataatcatagagattagcatatttctttgtattcataatatatttcttaatttaatatccatggtcagagatggcaggaggcgatgtcgggttggcaccagccatggagcagcgctagaacagcgccgaagaggagggcacgcttgtagcggaagaggaaggaagaaaagtctagagtcgtgataccatgtaagtaaactagaattggaggaattatgtattgtattgatagagaagaattacaggtacatatataggggaggagtgcatgaggcaaaaggaaacctcctaaacaggaaaaccgacaggatcctaattgatccatcctggactcctccccaaaactctctctatcctagcatgctatacaaggctcgccagctatgaaagccaagcatcaggtcgctatacaaggcaaggaatattgttatctaacagcgacgacgacggttggcgagttggagtctagcaggatagcctgattgatgtccttcatggcacccagtaggatggtgcatcactggcgcctcctcatctccctcgattgttcttgctccgctgcctgcaggggcgcatggtggcggagacccggttgtttatccatgcatcgctgtcgccggcgcctcctcctcttcctcgttgttcttgccccgctgcttacacgttagttgttcaagacgcttgtcgatagggagggtaaaggcagtgtagtggcagtggctgacgagtcagaggcagcgggatggcctactcgatgtgctctacgacgacgcaaaagaatctaggtgagggagcaaagacaaggaaagaggtggaaattt

SEQ ID NO: 56694 - DNA, 717 bp, Zea Mays
gagtagctagtgctgcgcgcggcttgcttgcaccagcacgacgccacgcactcctgcagtgcgttagctaccgggcctcttgcttgcagacaagcaatgtacagcatatacgctcggatgcatggcagcgtgcacgcagtccgtgtacatgcatgctagcttcatcagttcaggccgacgcaattaggccttcaataaagccagccgagctgcatgtcccttttttctcccatcacacacgtacgcatatatcatacatatatctaatgtaaaaaagaattagagtgctaataactcctctattagaatattttctaaagaaaaccatacgtttgtgcagaataatgcgtcaatgatggtgggattcacctagccatagatggtaaattcggtggacaggatttaatgttaacaacctaatcctttttactctatgtaaaagcaagtagcgtacgtgcatgcatgtgtgcgaatcatgggcagtttgattatttgcgatcgccgtcgccgagacgccgaagcaaacctgacgcccacatcgtcgtgacagatagatctccttttttttagtacgaaaaggggcggcggcagcagcagtggaccgactgatggatgcatggacgaaaggagaaggatatatgcacaaacacacaaaaaagcagcgtcgtttcctactagcactgttccatgtagacacagcgagaagctttggccggc

SEQ ID NO: 56695 - DNA, 425 bp, Zea Mays
gcaccagctactatgtacagtacaacagggcatgtcttgcccttctactcattgccctgcagccctatatggccaggcagtaggcacttgaggagttctaccaactccattgactttgctagaaagagacaaagataggagctaagcaattactcaacaattcttcccctaattgtgatgctccttcttgatctcctccactcccaccttgttcctcaattcctggagccaaagacgcccaaggggcttggtgagaaggtcaccgtctcaccgagctgtcgagccgtctcgacatactcgatcttgatccgtgcttcctcaatgcagcccctgatgaaatggaacttggtgtcgatgtgcttgctgcagtggaggatggggttctttgccaaagaaatggcagacttgttgtccaccagcaggac

SEQ ID NO: 56696 - DNA, 1879 bp, Zea Mays
cagcttcgcatgatgacggggctaccaccttctgcttttgagactgccaggttatgatgttgctgctgaggaagaacaggacactagaggtactcttccttgtatcaatatctccagcaaggtcactgtcactataaccttcaagctgtgcctccttcgtcctctagtagtggcaaccgtagtgaagagtccttgcaatttacctgagcactctctttactgctgccatatgtccagtggtttctcaatgaatctgcttatgtaccccattgagaacgccaaatctggccttgaattcaccaaatagcacagagaaccaacaatgaacctataccgaggagcgtcaacagcagggacaaagcttgacttagcttcaacctgggctccattggggtgttgcttggattgcagcctgacaaaccctagatcactcatctggcttacagtgatccccatctcagattgtgccacctccaggccaaggtagtacctcagcaaccctagattactcatctggaatgtgttcttcattttctgcttgaacttgtcaatgtcggagtggttaccaccagtgattactaagtcgtcgacgtagactcccacactgagacgtcgttctccctgacctcacagatacacaggatgcttagaggcactccacgcttgagcgaggcgtctagtttcgagtatcatgcacggaggggttgacggagaccatagagcgccttgatcaggtggagctccttgtccgcacgccctttgagcacgaaccaggcatgatgcttgacgtacatcctgcaactcgcctttgagaaaggccaacttggcgtcatgtggtgcattggccagccttcactcgtggcgtaggccaacaacaatcacacagagtcaagtcacgccatcagagcaaaaatcttgtcggagtggacaccttgacgttgtacataccccttggcgacaagtctggctttgaacttggtgatgattgatgagcctggcttcatcatgattggtgctgtagccccacttgaggttgatcggtcagaccctaggcggtagttcgacaagctcctaggtgtcattcgttttgatggaggtgaactcattgagcatggtttggtgttagctcttgtgtctcattaaatgtcgtcggcttagcttcatttgccagcaacaactgctcatccaactcatgtgtggtgacccccggtggcatggccgaccctagtacattatcaatgtcacggtaccggagcgggcatcgttgttgtggtttgcgtctagctgctgtgaagtgtcaacaccgggtggcgacacaaactcaattagggacgtgtccttgagtgtgtgtgtgctcagcgtcgcactcctagtgtcatgcgctggtgaggtgtgggttggcggtgctgatgaggtcgtaggtgaaacatcaaccccaattgatgtagttgcgctcgtcattgttgtggtggtgatcgacctagacaacgacatgttaaagttctcgacgatgaagtcttccacttcgacgcatcgtgacgctaggtcgtacacctggtacgccttggagcccgcttcatagttgaagaagatggtgtgctttgctccgatcgtcgagctactttagatctggtgtcgtcacattcatgtatgtggtacacccaaaggtgcgcagatgatgaacgtcagggacactcgcggtccagagctagtaggggggggggtggtgttgccacccacactctttgacaatgagcgattgagcagacaaactgccatagtgattgcctcgccctagaattcgtccgagagtccatttgccttgatcatgctctgagctatccgaccatggtctgatagcagtgctcaatgatgtcgt

SEQ ID NO: 56697 - DNA, 347 bp, Zea Mays
gtagttctgttttttttgcgcaaatagtccacataaatagcgtaaatagtttacagagatagcataaaatccccgcccagccactggaccacatgcacatgcgcagttgcatacatgcagatcttatttttatgatagattcaataattttcattgcatgtatgtaaattttggctgacattttcgttttcattgcatgcacgcaaaaattggatggctctataaatataaattaataataacgataatgacataatggccactatcacttcacgtgtcatgatattcatctttgtcttcctttattgctacatatataaaagggtgtcctttctcttgttcgtgca

SEQ ID NO: 56698 - DNA, 474 bp, Zea Mays
taaatgagcctgaagttggactgtcagactgcctgaagcctgaaattcagattaacagtgtgatgggatgaactttgagctcgattttgatttggatccagtgactttttgtgagtacacattatagcaaagatatagatggatcatagctctacacctttgctgcagaaagttgacatagattccacataaaatcgggagaaaatgtagctccaatatgccctgtcagtcgctctgaataagtggttcccatggtacagtagctgaaacagataaggtcgccagcgcggctgtcttcaccgccggtggctttccgccgtgattcacgtcgccggcgtcacgattcgcgctcgggtatgtggataacttcgcggcgtcaaaagatcgtcaccgcccgtgacctggacaccacaccgactagccgtagtccatctcccctggctcaccgcccgcggtaaagtgctcaccgtcgac

SEQ ID NO: 56699 - DNA, 417 bp, Zea Mays
tctctgatgcagatattcagggcagcaacatgcgagtgcataacattaggctgcccatgcgggaagagacggaatttattcatgtctctaatgagcgggagttctggacgaccgctaacatgtataggtactacaggtaccttaattccttgtccaggatgaccgttctcccgaagggcggaaatcaaatgaacgtccttggggagagtcgagtcttccttctcctctttgctcccaacagtctcgcccgcatcaatgtgtttgacatgatctgggaagagatcgtccgtgcttcctggtctcctttcagagggtgtcttcatacaccctttatcatgaagatgatcgaagtgatcactcagacccacttcgaaaaaccagtcaatcactcccgctacgtaccctactgggttgatt

SEQ ID NO: 56700 - DNA, 369 bp, Zea Mays
gaaggtgtggctccatccgaaccatggatttcattgagtagctttagatagagtagatgaagcatacagagcagaagcaggctatcctccattggtcctctcgagtgagagtatcgatcaaccatggcccaaggtactaagatggggagtttgtattccattaccatgcccaggagtaccaggtctagaccaccccttggccattcacttggacttgagaactactagtgcctctcgagcaaaggagttgaggtttgtaccacttgagtagtggttcctatagagaggggtcccaaggacatatagtttctatacagtgcagcatgaggattttcactctgttatgactcccaacgggatcacccttag

SEQ ID NO: 56701 - DNA, 465 bp, Zea Mays
gtgaacaacatgttgcaatgcaaagttagagaagaataaaacaatctccaaaatatagcaactagcaatccattcggcaatgcacatcaataaaaatcaatatattaatgtacatatgtgtcggtatttagaacctccgctccgacaagtaaatttccatgtgcgcgttctaggctccgaacggtgtgctaggtgggtgcaaggtttatagtggtttgggcaaaacgtccctacaactagtcttcggtggctcccgctactggcatctttattgctcgatgctcgtagtaggggttacaatcgggcgagagagggaggaaaggctcccaagtctcttatgcgtggatggacctaaatactatcgaactagagtcctatgctaagccttggctctggcctccaagtcttcaggtctcattgggcgtgtgcagttgcctttcgtcgggtgtcccctgtcctcgtgac

SEQ ID NO: 56702 - DNA, 286 bp, Zea Mays
ttccggctgcgtcctgtcctcgagtcctggtcggcatctgtggcaaagaacatttgaagtaaacataatgtgccagagaaaaccttccattttacattactataaaaagtaatgatacagactcgatattacataacaggatacattacccattacacaagagttcaacctattatacaacagtacaccctacaatacactactctacttctattacaccattattcctgctttccattactcttggcggcctcatcatcaggtgtgggagtccagacatcaacca

SEQ ID NO: 56703 - DNA, 916 bp, Zea Mays
gcggcaacggttccactgggccgaaatggggagtggtagcccagtggacatcctatttctttttcttttaaaaattcctgttttatctccaaatcagagattcagactaaattcaaattctggttttgatttttttttcagtattgcaaaaatttaatagaattctaaatgtgaatatagttcatactgtttgccttatttatttatttttcttccattattttcactactttgctcctatattttaatcctctaactagatttttaaagttatgcttgtttcacttatttggttgagttttaatgcacaaataaaatctcccaaaatcatgcatagattaattgcttcattagttacttattccctttaaatatgattcttaatatttctcatgcttgggaggcaatacatataaaaagatctatctcgtacttttattgtccaccctttgggtattacactttggtctctgctaagtcttgagccctttgtcatgggaatccgtgcagcgggggcttgggatcggggtcgccggaacaccgcgccgccgtccctgggaagcgcaccactcgggtctgtacaggggtagaagatgggcccgtgatcgttgatcacgtaataaacggataagattagatcttgacttggagcattggcgaccgttggatctcggaattgcggctccgatctgatctggcgatggttgatcggtggtcgttgatctgcggagggacacgcgggattagatccttacgtaccctttcgcgcgttgtattgtgaccattggattcgatctgaacggctctggttacgcgcgcaatataacagtcatggtagttttctagaagagcccctgccctttttacaaatcaacccgccatcccgcgcggtgttctctgtgtctagggaatcttt

SEQ ID NO: 56704 - DNA, 664 bp, Zea Mays
gtttttgtgagtacatggctcaagatcttattcaaggaaggaggatatggtacttttgttcctctgttcctcaacttgattggcgctacaaccggttcgaagcccagtctgctgctagcatggcactgtgggggatggatatccccgggtccacatgcgcatgtaaacacacgaaaacacgtctcgggccacctagcaggcatcccccctggagcgtcctgcagtgggccagccgagagtaaccaggcgaagcaagcccattttgatccagcaaaggcccacgtctgagttaggcgccatgagagcacaagtatgttgggcatgacagttgcgcccacccgacaggctaagcctctggcggtaactcaggcggatgagcgtaggaatttcccaagatgtaggaggacagttcgctacaaaccgggagatatgtgaatggattacgttggtcatttgtgcggggatagctacccttggtcgcatatataaggctaagaggcacccctaccattatcatcttacctcaacccaccgttctcatagttcacagcttttaatctcatcccaatactaagaccaccgcaggacgtagggtgttacgcctctcacgcggcccaaacctgtacaagcttgtgtgtttctcctgtcgtgccaccgcacgaaa

SEQ ID NO: 56705 - DNA, 587 bp, Zea Mays
ccctcacactgtaggattcactgtagtgttaggcagaagatggtagccatgataaattggatgacgataacccaatcggggttaggcacccaagccttagcgaaagtaggatgcgtgagctcgagggagggggagcgagagtcagtgtcatacgaagaggagcaatcaatgaggttgttgaggcatcaaggaaggtgacacgtctagtcgccgcagcagtcatggtagtaggggaggggctagtgatgtagagcacaaggcaggggcattgggggaacgaggtgcacatgatgtaggaccccaagtgctgggagatactttgatgtcaagcattgaaggcaaggtagggagttgtggcggggttggggagatatgatttgagacattcctcgggggtgacagggaactcagaggagaagcattattatcgagcaggaagaaggattggagatgacaaaggagtaggggaaccctatttgggtgagaacgaggagggcatggagtgaggacacgagaaattggcatcttgcagtaaatcttgtggtgaccatagtcgtggctccgaggacagcatacaggatcgcgac

SEQ ID NO: 56706 - DNA, 1405 bp, Zea Mays
attcgtctcttgctgtggatgtttgtttgattgtttcggtaggccttgcagtatataggattttggtgatttcattagcatagccaatcagctgttgatttggtttcccactgaacaaagattcaaggtgcgtgtgttgcaatcggttgtacatatttcacctttgctggctgtttatttagggaaacgacggcaaccattgaagatttgtggtttcctgtttttttttgggagtagatctcactcagctgaagtcgtctctatcaatactggtgaagcctcctagatccaaatgtagcccattgggtttgggagattccaagacatgttgggcactcgagtgcagtagaccatgcagaacttttgagaagatcatacataactttttcgtatgttttagctgaagcatgtgccagctgtgtcgatccatcagcgattacttcaaatatcacaactatcctcctcgactagaaaggcctgctatgtgcagaaggtgccaaaggcttagacctatcttctcatttaatgatgggatgttctccttttatttgttgtttgagcaagtgttagttctggctgtgttagcgtgttctgctgtaccgaggatcttcctcttgttttgctcttcttaatatagtgatgtgcagttccctgcgtattcgagaaaaaaagggagttgctaaaacactataaggagtatacaaaaatgtttgtgctccaacagttctctatttattggtgattaatctttaaagttgtccacgccaacaaaaaataaatgagcctattttctatttttaattgagctggcgatagaaatttgtatcaacaacctttcctagcctcttgggaggtcgaagctgtcgatggaagaccagacggtcacggcgacaggcacacgccatccacataggtccttgtggcgacggcgtgaaggcagcacaggaggtgctcttgcagcaccttggcacaagaggttgtctggcagtagcggcgtcaatgcgtctgaggcggtggagatggatttggggtcacggggtggtgggacggcgcgaagcggtggctggagtatgctttttcgcgtatgacttagcaccaacgttgatttcgggagtcccaacgaggttggtaaatgtagggatgaaactgagttttgtagggagtttgtaaattcagggacctgctttacataactattggaggagagtttttcttgaaaacttcttaaattcatatttagggagttttttacataactattggagatgctcttttgagatattattctccatttttatgttttctgctagaagctttgagactttttgagcaaatgtggtttcctgagatcaacttttctatataacttaatatattatgcatattagattatttgccaaccatg

SEQ ID NO: 56707 - DNA, 313 bp, Zea Mays
cgagaaacatgctcaggcaagatcgtgaaaggaaaaacattgggagctcaggagttctgtacttactgaaactgcaaagtacagtgagactccagagcctgttgcatgggcagcttaaagtcaatgtgtgccacaaaggaataggaacatatattatgttgatgggctatggagctatcttaactctgctaaatacatttttaatcaaaataaatattatttgatatatcaactcacaaccgggcagttagttaggcaaccaattgtgcgagacataaaaataaaacagcagcagctcatttctctagttcac

SEQ ID NO: 56708 - DNA, 700 bp, Zea Mays
gccttgaccccataggggagccacttccaagcgtatctggcatatgatcgtagcaggtcactttgtcgaggccattattggtcaacgattctgacctttgagacgaatttagaccataaactaaggtggtcgtcggaggtctgggggacctcacagactggcagcagaggaggccggagaccttaactcaagatcctcggtgtgtcattagcaaatttaatcaggctctagacaaatcttgcagacacaatactgccgtcccacatgctgtggctcggaggaacgaagaagcgcacacacgcatgcaacatgtaccgacggcttgtcgctccagcattgcatgtatgcttctactaaactatacccagtaattgcaactcgcgtcgtatagtcgctgctctggcacatccatagttctgccagcatgcatggttcttggttcctcgcagtcgtcccacccaccccggccggcgacgacatgtcggacggactgagcaactgttgctatatagcccgcaactaaaatatgagaaccaataatagtccgtgactgcgccggggatgtgtccaaaaatactctagcacgtacggcacacgcgatgcacaaaggcacactttacagcacctctgcgcgcgcgatacctccctactacagccttgttcgattgcaaaagagtcgtaagggattgggggattaaat

SEQ ID NO: 56709 - DNA, 369 bp, Zea Mays
caaatatcgaaacgttgtgccactcattaccggggagtaagtttcatcgtaattgatgccaggtctccgcgtgaacccttgtgctacaagtctcgctttgtatctcaccacctcattgtccgcatccctctttcggacgaacaccaatttgaatccgactagggtaacattgggggtgtgcgggcgacaggcccaaatacttgcctctttgaaagcgagagcaattccgtctctattgcttctttccatttgactcaatctgagcgcttctggcactctgccatagactttggttcaggatcctcagtaatcgcaacagcgatcgtagagacgaaatcagtgttgacaattgtagtcttttggttatat

SEQ ID NO: 56710 - DNA, 452 bp, Zea Mays
cacatatgcttgctaatgtaaggaaggaggtagcaaatcaagtcactgttggccgcactagatccccacctatcttctctctcatttggtcaagaagtctcccatgcttgtagatgaaccttgacaccttctttgccatattgatacaagtactgaaatcttttatcttagcaatgtcttccaacatcaaatccaagcagcgggcagcacaaggtgtccaaaacaaatggggcatcctatccacaagaatcctacctgctgccttgaagttggccccattgtctgtgacaatctggaccacatattccttcccaatcttgttgatttgcttctccaataaatctgccaacatttgagcaatagctacctcacttgaagcatcaacagactcaagaaagaaggtacctactggacttttggcaagaaaatttattatgtggcgttgcctcata

SEQ ID NO: 56711 - DNA, 1664 bp, Zea Mays
aataattgtactgtaggcccgtccttcctcggtagcctgtacggctgtagccattggaccaggagaccatgcacgcatgtgcctgatgctccctgctcctcctgtctctcatcagcgaactgggcgctgcaggcatggagaggccgagagagctagctaggcggatggtgtgcgagccgagctacctctctgaaaaggcctgcgccgggccttcaattcgcttgaattaaaccatgggcagttcaattcgcctgaaacaattcacctacccctatatactggcattctttcaacgcggtcgatcggcgcagttctctctgctcgtatagccgaaaaccatgggcagcgcaccagcgctaggatatactgaaacagtgggtgctgttgctcgctcagctcgctcgggtggtatttgtatcaggaagcagcagcaggccggcttgatttttcatgcatgtgcaatgtgtctactgttgtaaaatataatattaacaatagagatgttagcgtttcgatccgaggatccaaccaactagtgaattagtactgtgtgcctagatctagatgtgtgatgcaaggagacacaagtctttattctggttcggataagagaagctcctccttctagcaaaggagaatgagacttatattacttgcacacaagtggttgtagtatgggatacaagccggtagggagagggagaagttttcaagctcctgttgatgattgaggcaagtgtcaatatcagtcgtagaggtaaaaaccgcgaagtgttcccctccctgaatgaagccatgggctcctccttttatagcctcaactcaaggagggctccgaggagcgccatggtttgtcgcgtaagggagaggagatgtgtccgaacctctgcagccgatatagtcgtcgatacggccttcgtacttgctgttgacttgaactgggaggaggatgtctgatccttgtatttgcatctttgaccatacagagagccgagatcagggtccggggctcggacgcgtacccaagcctgcctgatggaggagttgtccgagtcgtagttattgccacagtgttaagcatggtgaaaagtgtgtggtaattcgccccacatgcctaaagcagacttgacgttcgtcatgtagccatcctgttgccggcagccttcgcagaggagttggtgaagtcctttagtcaatgttacctaggccgaggccaagcttgggcgagacgaaggttcctccctaggccttggtcgagcctgcctcgaggcgtacagtcatattgggaggaggtagcacagttgtcaaagtggcccctgcgggattcgccgggagttgttgtcgggtgattggcaaagccgagctcggacgaggcaaagttttctccgaggctgaggctgacttcaagcaaggcggagttccctcctaagggtgagaccatgctctgtcgtacgcacgtcccatccagagttgtttgaactcagcagacgacgtgggggagcagtggtcgttattcccgcgtgtgcgtcatcgtagttggtgaaagtgatggtattgtggtcatgtcgctccctgtttgactgtagcgtcacatggttaggtattcgcattaaatgtccatgtctccgcgattcccgtgacctttgactgagggcggactcggg

SEQ ID NO: 56712 - DNA, 585 bp, Zea Mays
taaaaataccatttccaaatcatttaatcaatataaaccagtactggactgggcctcatttaaacaggaacacagggggctcggggtaaaatttctaagacacagtgaatagcactctctgtacggcgggttcaattgtggcaaaggacaggggcatttttgtaagattgcgcagccgaggaggtatggttggatgccgacccatggattttgatccaacgcaccatattaaacaaccccccaatcgaagcggtatgcgatcctggccaccggatttcctatcaacgatagagattttaaaccagcgcgatctaatctcagccccacatcaaactaccaacggcctggagccatcaatccccatatctaatctcatccctacgtcctgaatccaacggacacaccgtttccttccccaaagccagacgcggcggcgcatacgccctacggtgacaccatcgccagcgagcagtgatctaggattctagtgcatcttctttaatcttagctagggctacgcgaagctaagtgaacaccgaggatggggtcgggtacataccggtggttagaccacgtagaagcttg

SEQ ID NO: 56713 - DNA, 513 bp, Zea Mays
gttgatgaagatatatctcgaatgtcttcagaacctcaactaacatcttgtggagcggaaagcgaagcccagctttcatgaagctcttaaagaccaccacctcgtcaactttgggaaggggaacggtgctcccccccccccccccgcccgaccctcactatagatacataatgaaaatatttgcccttcatcgcttcgacttgcccttgcttgacagttgattccccaaaactacatggctcggcctccatgaccgatcgtcgacatcttcattcccactctccacgtcaaaactgtcgctatcgctgtaatcctcagacaatccagccaacatctcattggtgatcttttctgtgttggtcttctccatagcttcgtaaaacacagccattgcggggtctataatcttcttctccttagccattcggatgatggttgcggtagatgccgaagctcaaaagtcaatcaagctcgcaaaagagaagaaggctagaatggcaaacacagcgcaaa

SEQ ID NO: 56714 - DNA, 311 bp, Zea Mays
gctgactgaatcaccgtatttaatcgttcttcttctagtatatcaacatcctccagtctagtagcctcagcttctgccatgttttcgaagattaatctcggtgccccaaatttgagatcagcgggtagcactgcctccgaaccatagaccataaagaaaggagtgtttccatgcaaagctcggctaggttgagttctcaggctccagacaacatacggcaactctctgatccactttcctgcgaacttttcattcttgtcgaagactttctttctgagtgcttccagtatcattccgttggctctttctac

SEQ ID NO: 56715 - DNA, 506 bp, Zea Mays
acataattgttgatcgtgaccaaacttcctaaaagcatgtctagtaatagtcgagagatatttatagctaattgtcctaagttcaagtccacacaaaatttccaaaaataatgaaggcaataaggaggcgatattcttgcagcactgtttatctttatggtgaaataaagagcacgcaaatgtacatggcctatgaatgaaggtgacagaataattttgccccctacgcattgagtttgagcatggccatggatccttttccctctcatcatgaaatcaactattatgcaagatcaatatgttgatcaaagcatgtgcccaccaccgtccccaccctctcacccacaccaacatgtaactaaattagttcattatcatgtggaagaaatcaatgtgtgtgtagctcagtagctatgaagctatgcatggcctttagatgaacaacaataattttccctgaattgattttggggtgtcaattcatggatcttttcatctcatcataa

SEQ ID NO: 56716 - DNA, 402 bp, Zea Mays
ctcggtgtggctagcctctgcgacagtgagaactccggtaagaactcctctcatgtgctcgttttcgtctgctcatcgcgtagcaccgaatagccttgaggttagtagtctcgttgcgtggtttgcttctgccgttaatggcgccgccgcgtcgggtatcggcgccgccgtgtctggtagagggaaggaaggagacatgcgtgagccttccgatccaatctggacgactgtgatttgatcggctcgtatcgccttggggtagtgatctaggccgttcatactgagtccaacggagcagattagatctcagtggttttaagtccagtgcgtggatctgtgatccaacggtggcgatcgcataccggttcggatagtaaagcttctaatccaggccgtatattg

SEQ ID NO: 56717 - DNA, 619 bp, Zea Mays
ccaaaggcattgatcgccgcctgaggaaggagcgggtgttcaatctgttttaagcagcaaccagaagaacaccttgagtttaggttggcatttagatctccataaccagaaaaagagagggtgagactgatggttgccgatcaagtgagaatagaccttctgggaggaaaacaaattggaagaggcattacagtgccatttatcattgtgatcatgcaactgaagatttgccaaaatgtcctgaagtgaaagcagctgttcaaacgcttcggcagagaggggagtgtggaacatttcattcggtgaagccaaccttgcttgattaatgttgatgtctttgatggaggcaaaagaccaaagctccgggaattttacagatttacgcagaccatcccaacgatcatgccacaggagagtggaatttccatttccaatctccacctgggcaatttccttgaatatgtcttggattttgagaatatctttccaccagaacgaaccaataggtttagctgaagacaaagaatggctgttgtcggtaccctgaatcagggataccccttactacagtatgaaggcacggtgcccgtacgacaatctctagtcacgcggtgaacag

SEQ ID NO: 56718 - DNA, 808 bp, Zea Mays
gtgaaaccctagatccaaaacatggctaaaattgagcaagaatgaacaaaaattgacaagagaaacataaaccaacctttcttagcaaccttcttccacaaaatcaagatcaaaacctccctgatagaactgagtgcccgatctttcggtgaggtggataatttcgatttggtggaggaggtgactctcgtgatccaactacgaacgaacaggttgtggcgccttagtaatcatagaaccatctccaaatggttattgaccttgctggtggcaaaatcaacctgaacacgaagttctattcctgtgagcaatcaaagaaacaagcaagaacaagatgtaggcaaaactgaatatcaatcactcatgagttggggttcactaggctgtccataggtgctcggtgagcacaactgcagtacatgaagtttgcacaatggctaaaactatcaaagaaaacccacccaaggaggaggcgtagcacctagcaaaatagggaggaggtggtgggtgtccatccttcccacaaggcagagaataggtgcccaatcagccgcacagtctcctacccacaaggcagggaataggcatccaatcagcacacaatctcctgccctgcaaggcagggaataggcgcccaattagccacacaatctcctgtccacaaggcagggaataggcacccaatcagccacctccttgatccccattccttatttaggtggcgtaacaccttattgattatttatttccaaaactaaaagatggaaaggtgacacatcacctagactttattcagggcggattcatc

SEQ ID NO: 56719 - DNA, 1757 bp, Zea Mays
agagtatcagggtagcagaccgaccattcttgcgacatgaaaaaccaatcaagtctctgaagaaggggctccctttgtttattcgaccaagtaaaggagaggccatggagggggatttccaacaggtctagctggctgattgcctcgttaaagctcagcatcaggttaatgtctcccctagcggaatttctattttcaggcctacgcataaggttaaagtccccaacaatcaaccaacgcttttccgagggcatgttaatattggaaaaccagtgaaggaattcaatcttcccaattggggaacagggcgcataaacgttggtgataatccaggattcctccgacgaaatagcaaaaaattcaaccgaaagagcatactcgttttggaagataatattgccaaccagcttcgaactattccaaacagtaattaaaccccccgagtttcctatcgaagggacaaaagcaaactcatcaaaagaattggggcagagccttcttaagtctgccctaacaaaagattccttcttcgtctcctgcaagcagatgatatcgcaattggattccctaatcacacagcgaattccattccccttaaccacggcgttaatacctcggacattgaaacttaaaacagaccagtcagagtaattaatagcattgtgactattcatcatagggattaagttcatcgatgggaaggagcccaaacccaaaaactgggagggcaaaagtgtatctgttgagacaaaacagagcacagccagaaaccaccaagttcgtgaacacagaaatcagatagaaacgccagggccgagacagctaaaaagcctggcgaggttgagacctgcaaaaaacacccacccaaggcagaattaacatatcagttgtcatcatcggaagagtcttgtttcttgtcccccttatcttttttgcctgacttgttggagccaacacagccaggcggattcttctttttcttcagggctttgtcagccaattcctcctctgacagattacaaaagcgctcgcctaagcgcctgatagttttagctgaaagtgaggggggccctcacacttgtgctgacacaacagataattcttcttttggcaagatccttgcctgaatccagcccgggcgtcacgaagcctcttgcttctcctcaggtctgattccacaacagcaatattcggcttggagggggttgggtccgaagggacagaggtgccgtcagcagattcctcagaaacgaccgaatcaagaaacttgtcatccggacacttcctggggatgacaaaagggagagtcacagtctttggctccaacaaagctgaaggaatatctgaagacaggaattttttggaccaactaaaggaatcttcgtgcatcaagttggataagaaaaagggtgcccatttcttgggaacctgcaccgaggtcgctgagcagtcagccggagcaaaaaatctctcccagatcctgtaaaactgggcattccttttcctttctaagaggctcagcaagataggatccgaatgccagtcatgcgaaaacataaagttcaaccccacgttattgtgcccattaacaaaaggctccaccggctgggcatcaggaataactatatccccaggcacaagaggtacatcctgaataggtgggccatcaacctcttggggcccaatcataggatggtcggcaggggcattaaagttgggcaccggccccacagccaccggatcctcaggaatctgcc

SEQ ID NO: 56720 - DNA, 421 bp, Zea Mays
aagatggtgcaatgaatgttggttcatgtgtcaaccccgtgtctatttttatacatattaagaaagggggtcaaagccaatggggtatactttatgcaagaaaatgtagagaagctcgattcatcctctctctctctctctctgacatatctgatccttttctggaggatgatcacggtgatggaggaggaagggaatagcaagcgcaaccaccttgacttcttcaaaaccactgtcatatgaagagtaacaatcaagaattggcacttgacctatccaaggctaataagtataatggatacacacaagcttttctcaatgtgataatgaggctgttaatcaagttattatcgattgtcaagactatcactaagcaaaagctcttcctcacactccaaagggtttcttcagccgttaaaat

SEQ ID NO: 56721 - DNA, 576 bp, Zea Mays
ggtgccggcccgtcaaccggcttgcctgctaaacaaatactgccgaacaacccagtgagacgggctgtcgatcaacatgtctgtcgagcaacccagcgagacggaacggacgaccaacctacccgccgagcaaccgttagattgatcttgatttcagaaacataatagtattaatttcgcattccttgaagtttagataaattggttatgaattttgtatctgctacgtctgctacatacagttaattaagcacatgtttacataaagtcaatgcatatggtggatcagatgccggtaaccaataaccgattatagtttccgttttcatggctactgggcatcgcgagaacactacgggtatgtttggttccctggcccagtgcacgaccaggcccatttgaatcaacaacgccatgtttggttgcctggcccaacttgggagcctgtctgagatgagcccaacacaatatcgtggccaggcccgattggaacgcagataaaccacttcacgattgagcctggctgtcgcggtctagggttcgcagtctctcctctcgcgactcgccgccgccgcg

SEQ ID NO: 56722 - DNA, 636 bp, Zea Mays
cacagcactgttccttgagtcgctgacagtttacagaaatctccctgaacttctaattcttcaccgcgccaaagtccccgatgtcgcacggcggagacctgagcaccggcgagtctagactggccggatcacgcaaagaccggcgctctccgtcgactggcacctaattcgagccttaaccgaagcttcccctaaactaatttcactaatggcgcactaaaacgccctgaccacggtgaccgtatggacaacggccaactgaacgtgttcccggcaatcctagggactctagcccaattgggttggtcaaggagtatcaggggcacacaagaatgttgaaacaagatagcagggagcatgaacggacctagaggtcgctgaccacggtgaggttaatccgagtggtgttcttgagtgagttgggggaaatgagaaattggagctctctagtgaacgattggaggtaagacttggtggcttggtgcgtgattaccctatggagctcgtagtgcgctcaagttatagaacccgtgagcggtggccggtgaattggacgacgacgcgcggcggctggagaaacaagaagttactaacgcgtgcgattggtgtcctattaccgtggcaagctccccggcg

SEQ ID NO: 56723 - DNA, 966 bp, Zea Mays
cagatttgcaattactgagattatacttttcaagaactttctcaatataacttttctgagatagaaaaagagtaccagcacgacgatcacgctgaatttcctttccaagaatcttctttgctgatccaagatctttcatatcaatttcatgactaagttgagccttcaattcatcaatcaatgacttgaaatgagaagcaatcaacatatcatcaacataaagcagtagatacacaaaagatccattaggaaactgcttcaaataaatacaatgatcataattgcttcgagaataaccatgtgcaagcatgaacgagtcaaacctcttataccactgcctaggagcttgtttcaaaccataaagagatttctgcaaatgacaaactaaatgctcttgaccaggagcagaaaaaccttgaggttgtgtcatataaatctcctcgtctaaatctccatgaagaaatgcagttttaacatcaagttgctctaactccaaatcaaaaaagcaacaatagcaagcataactcgaatagaaatgtgacaaacaacaggagagaacacctcatcgaaatcaataccttccctttgttcaaaacctttcacaactaaacgagctttaaatcttgcaggttcaactccagatataccttccttcttcttataaatccacttgcactttaaaggttttttacctacaggaagctcaaccaatttccatgtagaattcttttgaaaactctcaaattcatcattcatagcaactaaccacttggatgaattgtcacatgagatagcttccgaataaaaagaaagttcaaatgcaacattagtttcttgagcagcaatgagagcataataagccatactagcagtgtcacgatatcgatgtggcaaaacaatattccttctaggtctatcttgagcaatagagtgattgttgctaacaggaggtatagaaactgaaac

SEQ ID NO: 56724 - DNA, 442 bp, Zea Mays
ggagaagagagagacagaggcagcgcgtcgaccgtggggcggcggtgggcgaggggcaggacataggggcggggaataggttgcagaaggagattagggtggtagatagtagagagagaaagggagggtgtgtgtgttctatgggctatccattcatctattcctttgggtgaggcagaaagctgggggttgattttaaacaaataaaagaggttctattcactcacctagatggttgcgggtgagtgatgtttcacgatctaatctgaccccttggatcgtgatcgcacgacccaaaacagagagtaccccttcgctgaggaatacttcataaagagcccctctagttagaacaaatgaatccatcgtcctccagctcgccttccaccaactccatcttggggatcatcatagcatcattcccttcatgagagatcttgag

SEQ ID NO: 56725 - DNA, 703 bp, Zea Mays
gtcctttctactgaggggtcgagggtgtctgacgtgacattggtggcggcgtcgccaaccacctcggagatattgctctcccttctcgattccctgactattgaccgaggcccaagggtggctgatgctgaggaggccggtccctcgaggcggcctgaggagccggtcctggagcggacagtgcccctccctagcgacgaggcaagcagtggcgtcgtccttgttgggagggaccccttcaatggggaggcccacgcctttcatggctggatgaggacggcgatccattgttcgtcctcgacaacatggaggagcaggagatgtggttcgagttctgaatcatggctcgagtaagaggatcgagcatcttccttcgtgacatattccttttcgcagggcatgtcatgatgttgtcctttttcttgtcagggcctcatggcaaagttcatggccaagtccgtctttattcaccacgagcgcaatgtctaggactctacagcgccagaagggcttgctggatcgtttgaatgagcagctagcctagaaaagcgcggagacaatggatctcttgatgctgtgcttagagcttagggacgaggtcgcggtcacgcgtcaggaggtggcgcccttggccgaggaggtctacttgctgaaggagaaccttcataaggtgtccaacgggcgggaagagttttggcgtcaa

SEQ ID NO: 56726 - DNA, 598 bp, Zea Mays
atccgtgtgactgggccgcacgatctgtcttcaacggccgagcggccaagataagacttcccctaccctgaaccggtacgcggtcttggcccttggatctaaagtcgacgctctagatttaaaataaccagatcgaattcctacgcgcccgattctggatcgacggtcgagataaaaaacacaaagggtaagagaccaatctaatcccaaccgttgaaccttggatccacggttcacggcgatctccttgcctcacactctctctccatccttcatcccgccccggcgtcgagtatgcaccgccatggcgccattgccgcactgctccgccatggcacccaggcaacaaaacttcggttctaagcacggtacatgtagaggagaatgaatcggtcctggatgggaaaatctcactgaaatccgtcgcatggagttccctggtcagggcggatggtgacccagcagtgacgacggagaaatccaatagtgcccgagagcctatccatggatctgatgccactacgagactccacgtgctccggcgaagcccccgagctaccatcccatcctcggctcttgggcgagttatccaaggtgg

SEQ ID NO: 56727 - DNA, 563 bp, Zea Mays
ccccgccgaaaaccaaagctctcggttggtatccgcacgacatggaaaattcttttagctccaatttttcttcttccgaaagctcctgaccgcccaggtgccaaaggtcgaaatcttttttgcctgaaggaccagaatcaatttccctttctttatctggcgctgtggccacgtcctcctctgcagtaacatctttaactacctctgatataattctgtcaatatccgacattgtagcttcagtttcaccgacgtccttggcttcgatagcagcagcagctttagcttcggcacccgtagcagtcacggtcttagttgccgaagctaaaggcggtgtccgttcaatgccttgcatcacatttactattcgtcgtttctttagttctttcactttctcctctgcagccgaaggttgtcccttcttctgtaaaaattgtgtcagttctgatcctagtggacttagcagcttgaagggtaggggtcagtcattacctttagaatttctgctacttcagcagcagagggcgttgaaggagcttctttccctgccttcggctaagaag

SEQ ID NO: 56728 - DNA, 433 bp, Zea Mays
gaagaatactagtgttgcggcatttgcccctgaaaattcttagggaaaaaacaaaaaaaccctggtcctaaagagaggcgatcatcacaagaatgaaattgtggtcagttggggaagtaagaaccaaagccactgccacagggtagcactccgtcgggcatgaccaccctgtggtccctgttgggacgaaggcgaacacgtccccatcactcgacgattgccacatcaacatatacaagactgaaggccctaaagattaagccccacaagctaagcctaagaacgatgcccaagcgaaggctcaagagctcccttcgccacggcgagccggagtgaagaccactaaaggcttcgaggctcggacaatcaagacgtcgaagaccctacatcttgacgttcctcgatgtaaaaagcggtccatgttcaatccggc

SEQ ID NO: 56729 - DNA, 986 bp, Zea Mays
gttggtcgagtcgattgaggtgagcaaagacccagggcttgagcccttgcaagatcatggcattggctcactctacttgtccatttgttcgaggggtgagctacgtcgacccagtaaacactaatatggtgtttgtcgcaaaactctaggaatttcttccagtaaactaggtatcattatctgtgataatagagttaggcacccccaaagcgatgtacaatattggtgatgaactttaccacatgcccaaaggtaatcttcgtaaccagccaagccttaatccacttggtaaacttgtcgaagatgactaatacgtgtgtgtagcccctaggcacctttctcaagcttaaggacgaccctaggtaaaaacatcattattcgttgatgtctgtcctcgtctaaatctacggtcgtgcttctttaagaccgctgagggaggatgttgatgacgtgagtccgagcatcatcattactcctcatgtacatctgttcccacgccaacttgtggtctttgtagcctgacctctggctttcctttgtcgtgttgcgtgcttcgtagggtgtcggaggactcaggcctaggaccctcgggtcatgaatggtgcctaggcctagggctcataggtcatgagtgaggtttaggtccagtgcccctaggtcatgagtggggcttaggcctagagctcgtagcccatgagtgggaggaggaccgactctctcctatgtagttacgtggtgctaggcagttaatgccatgtgtgctattattgacggcaagagcagtccatcaaccatagtggaatccactcgagttgttccctaacaattcgcctgaccccaatgcctagctccgcctcacctgacccctaagctcggtgcgcaggagtcatctaggggtagatcttttgggcgggcctttcttcatcctccctttgactcgtgccccctaggagcccggagatccgatcctcgacacttcgggtttg

SEQ ID NO: 56730 - DNA, 375 bp, Zea Mays
cacatacatggtgaccgagccccgacaggttggcccgacaatataatacttaaatgtatagaaggtgcagagatggatcctaataggccaagatctcttccgcggtggttggatatcttctcttggtcttcgtgtggatctcctgacaccctacagccttgccccgtctaatcagaatgcaggtgtaggccttagagtaggttgcgacgtagtttggcacgctgctgtgcgtaggagtgtatgaacggtgtcatcccgtcgccttcgcctgttcactcacgccttggttatgcgcgaggaacagtaggggtcatcatgaggggcgtccatgcggtacattgagtcaatggtcttgcctcggtaatgtgtgggtta

SEQ ID NO: 56731 - DNA, 294 bp, Zea Mays
ccacgtctgggcaggcgtagcgtaggtgcctgctgccatcaaccactaccgcgtccaggtccattccaaaagacagcctgtcgtcgagttcatcggagacaggcaggcctaaaaggctagtaagggcctgggactaaccagaccaggtcgtccaacacgctaggcagcccatcaagttggttctcctccacgccgacgccgctatgattttttcccttgcaaaacccatgctcgctaatgatggaaccgagaaaagaaccacagcgttctgactgagacacctgggcaatgagt

SEQ ID NO: 56732 - DNA, 920 bp, Zea Mays
taatttatgagtatcatcaatccgatgctctacaataaaatctactacgacctagcctttcatagatctcaatggttcatatgccaagtcatattctatgagtgcataagcccatttaccaattctaccactcataatcgggttttgcaacatgtatttgatcacatcggtttgaccggaaatggtgcaacgactagacagtaaataacatctacacttggtgcatgcataaaacaagcataagcattaacttctcgatgaaagtgtaccttgtttcagcatccaccagcctccgacttagataggtcaccacatgctcctttcctccggtctcttgcgtcagaacaaccccaataaccttatcttcagttgcaatgtacaatctgaacggtactactacttgtggtgcttttaagacaggagccgaagacaaatattttctgatgagatcaaacgcttcctgttgttctgcccccaggtgaattcggcatcatttttaagccaaaggataggggtgaaggcatcaatcttcccggctaggttagaaataaacctctgtaaataatttatcttgccaaggaacttctgcacttcgaccttacaggtcggaggtcccacattccaaatagattaaattcggtcagggtctatctctataccatgttcatgaatgatgaatcctaagaacttatcaatctacactccaaaagcacatttacgtgggttcattttcagaccatactgacgcattttatcaaaggttttgcgcaaatcagctatatgagaactaaactcagccgatttgactacaataacatcaatgtagacttccacagtgtttcccaacagctcgtgaaagatcaaactcatagccctctgataagtagcaccaacatttttcagaccaaatgtcatgacaa

SEQ ID NO: 56733 - DNA, 694 bp, Zea Mays
cccgctcgagtcctctcctagcatcgaggatgaggaggatgatgatgatgatgatgaggggatggaggtccgtgccggcttcatgatacacccagcccaggtgggttggccgaggcccaacaaattagggttgcccggagcccaacagttcattaagcacacccaactcagggaaaggcctaatcgccccaaaagactagtccaatgggggaagggtgactctccctttcaaagtggcttcctcctcccaagttaagcgaggtgggataattctgaggctcacacggtcgccgtccgactacaattgggccaactgggccaattgtgtctttgccaacgggtaatagtggaggatgtcctcatcattcccaccttcttaaaatgggccctagctctaataccagatgatacacccatcccaggtggggttggccgaggcccaacaatttagggttgcccggagcccaacagttcattaagcacacccaactcagggaaaggcccaatcaccctaaaagactagtccaatgggggaagggtgactctcccttttaaagtggcttcctcctaccaagtttagcgaggtgggataattctgaggctcacacggtcgtcgtccgactacaattgggccaactgggccaattgcgtctttgccaacatgtaatagtggaggatgtcctcatcacttcag

SEQ ID NO: 56734 - DNA, 1573 bp, Zea Mays
tttaaatgttctaaaattccctgtttaaacaaaaaaatcatgaaactatttttattaaatactagggaaaataaggagcctaggaaaattggtctcttatttttaggattttcctaccattttctacagtttttcaaagttctgctgaaaaagaaaaaggaaaagttgaaaacagtgatgggctgtttctggcccgtgacagcccaacactacaggaaactgggtcacgcgcccatgcgcgcccgcgcgctctggtgactttgcagaaaggtcctcggtgttctggctaatctgaaatgagcataagcactattttcaggagtcgctgacacttcgcagaaaggccctccggtttctatttcttctccacgagtacccctagccacggcgcggtccccgttcatccctgccgtgattcgtaccggccatgatcggcgatgattgttcaagctaactatcggaaaggctttacggacctaaggtgacctaagaacgatcctcaatttcgaatggcgctccaagaaagtgttctgcccacgctcagggcggaaaccggggcgtcgagctcacgttcccacacagccatggccgaactgagcaaacggacgccaccgtgagcttcacaagcacgcagaggcacgaaaacaacgcatggattgaatagggacttaccagaacgagctggccacgggagggctataacggcggcgtggagtttcaatttggggaaaaacctaaattgcagcgctacgatgaacgaaaagagatgagagtgggtgcgatagcttgcggattacatggcgcaaccggcctggccctcaatttgtagaagggcaaagcgggggccacgaatttgaggaggacgcgcggcggccggaatgacatggtgagtcatcggcgcggcagacagtggcatttaccggttgagaagctacggcggtcatcgtcgagctagggcggcaagtaacgacgtgtttaacgcagtggaaacgtggcaccatcgcggcgcagaacggcaactccggcgatggccacgaagccacgtcgccggcgtaaaaggtgaagacagcgggctacagtagttcatacccatcggcaaggagatctttccaaggtcagcaaaatccattcccccgcgacacgaatcccatcgaccaacccaactccggtcacgcggaccaccggcgttgagctgtccgagctggcatcctcatccgtgtactgtaccatggggaaaattcagtccaatgcacctgacagccacatttgaagccaagttttctcttgatttttgatgataactcataccaagctctgcagcaaagttgtagagcaatatgccatctacaatattgccataagatgttgccacaaaaagccactgcatctgatttgaaattgggcttgaagttggtggtaattcactgttagtctgaaaattcagaccaaaccagtctgacagcctgacttcaggcttaaatatctctggatttttctcaacaagtgagcttacaaccttaagcaaagttgttctccattaattggtctacaaacttgttgtggtcactttggg

SEQ ID NO: 56735 - DNA, 910 bp, Zea Mays
ggattccactgcatcagagataaagcttgtttgggaacagcagtgccgcaggacctcaacttggtggatactccgtcaacaaaatcttgtggtcatagacagatgagcagaagaaaaataattcactactacgaacaatatagagcaaaagattaactcacttggagattggaaaggaatattggaaggcccaagggaggaggagctggagcatggcttgacgagggaagatcaaccggaacaatcttgagaacactatctggggtgacctcagccccaccagtagatagcaagctcctggcgtctggctcgccgacctctaaggcgacttggccagttaaggccgcagaagcacgtgctgccatcactccatcagaccggattggggatgacccgatgtggacatccatggaagcattagaaagagagcacgcctgaacatcctcgggggctggattatagcttgcactacccataggggctgggtcgctaccggcaacaccctcgggggctggtcttctacagcagccgcctatgaagctaaaggcccttcagccacctccatgggaatcggataactcagatcagtgtctttgcataggagactgccctccaaggttgacgatgcgcgagacaccaatcttgttacctcttgcccggcagaaccaagcaatgaaaacccaccatctaggacctctgaacacacggctgggatatcagcttcaggacgctccgatagtatgtcttcaggaatgacctgctctagtgcttgatcaaaatctgatatcgaaagcccctaaagactgacaagtgtcgacagagctagagagggaatatcgatacccctcgccgcctctatagaaacgattgttcttgcggatcagtgggatttcttcttcttcctcctctt

SEQ ID NO: 56736 - DNA, 441 bp, Zea Mays
attacataaactctaaagattacaggaggctaagaacttaggaaaatgtttctctaagaagtctcgagtctcccaggtagcttcttcttcggtgcgttggttccattgtaccttataaaacttgagagtcctctttcgagtaattctgtccttctgatctagaactcgaatgggatgttctgagtaggttaagtctggttccaaattaacatcagccacattcatagtttgatcaggaatccgaagaaacttctttaactcagatacatggaacacattatgcaccacagataatgattctggtaaccgaagtctgtactcaacttgcccacatcgctcaagaatggggaacaggccaatgtatcagggtgccaattttcctttaaccctgaatcgactaacacccttcattggtgatactttcaggtacacatggtcgcc

SEQ ID NO: 56737 - DNA, 769 bp, Zea Mays
gaaattgcttgaaggtctcgatatggagtatgaaaagattgatgtttgctaggacaattgcatgctcttttggaaggaacatggcagagaacagaagtgcttaaaatgtggcaagccaaggtatgtagaggtactaaatgaagatggggagaaggtggtgacaaaggtttcatataaacagcttcggcacatgcctctcactcttagagtgaaacatttgtttctctcgaggaagactgctatgcacatgaggtggcacaaagatcgtatggacaaaaagatgggttaatggtgcactcgtcagatggtgatgcatggaagtctcttaacacctttgacccagagttcgccagcaattcaagaaatgttcgtatcagctcggcattaatggtttcatgcctttcaatatgaccactacgtcctactcatgttggcatgtcttcaccaacctgtacaaccttccaccttctatttacatgaaatatgagtttatgttccaatgtcttgttatacctaggcctgagcatcctggtgcatgcctcaatgtgatgctttaaccattaattgaagagttaagaagctatggaaaggagtggaagcctatgactgcttcaagaagtagaaattcaatctccaggttccatatatgttgagcaccagattttgcacctgggcatagttggatggtctggccatgtggcacggacgatccgcgccccagatagtccgctagtgtagcctgggcggtccatgattagattaattcaag

SEQ ID NO: 56738 - DNA, 482 bp, Zea Mays
tgtgttttgatgcttccaaagccgactagccacaaggattgccagcatgttaaaccttttcttctgaacttttgatacttggccttcagcactactcaccaatcttggaaattcatatcctgaggccctggtatcaagaactgtagccccactttacataaaacctgctaccaaatgtttctagagaacacgcaagagagcaaaatatgttgggctgtttcatgtagcttgtggctcacaaaagatgttggactgctgataggctgcagaaacgaggactcccacaccctgaaagttgccctctttgtgatcaagaatttaaagatattgatcacctgttggtggggtgtgttttttctagacaattctggtacagatggctcggacaggtcaacctgcagggcctcactccttagccgggcgataagagcactatgcattagtggaagaaggcctctgatcaattgcagggcattgctgcg

SEQ ID NO: 56739 - DNA, 665 bp, Zea Mays
cgaccatcacactcccctgcatcgtcgcccttcccattccctgtgctgctatcgtcgaacaagacaagtaagccatcgcactccgcttcgcccatgtctcatgttcccttgcttcgtgtcacatctgatcagtcacacctggaagagcgaattgggatctagctcatgcattctggagagcatccaagtttttacggtttgaatctaaagtagcccaccgaaggcttaaggctactgttctccgcctgtggtgggtgctaaactctttctaggttccttcttttgcaggtgggtcaaatcggataaagaaaatattgaaaaataatgttagatacatccacttagtatctacattagaaatggatataagtgcagatatacatagtataagttttagcaagtacaaatgacggataacgtataaggtattcctttcccgttttcgttctattttctggtgttttgccatgtttggatttactatagatttggcaaattaaatacgacagcttggcaaattttagtaacaaattaaagcaaaatattattaaaatcatagcttgctaaatctttggtttagcatattttataagctaattaagtagactgtttgttactatgactgaaattgtgctagaaacaagtaaatgctcctgtaagtgcag

SEQ ID NO: 56740 - DNA, 1047 bp, Zea Mays
tcgagacgtcttccgctgctctgcgtgtctagtggtaattccatgacctataaccgcagtagttcttggtattatggggatgaaaatttttgttttgcgctagcgtagcctccccgtaatcctacatttcttctatctagcttctccattaatttagtgatgacattatatccatttaagccaaattctttaatcattttatttttcatggcaatttgttcatcatcatcatttgagaaatcatcattaaataaagttaccttatctccttttgccatgaggcaagttggagtgtaggagtcgtcgtggaggttggtgaagagttgcgagcttgaagtagattggatggcaacgtttgccaccacttcctcctcttcggagctagaactttcttcatcggagttccattcttcaccaatatgggcttgaccatatttcttcttcttgaaatatcccttgttcttgcctccctttttgaacttgtccttcttgtattccttcttggcttcttgttcctttttgttaggacaattcgctataaaatgatcggtttggccacattcatagcatgccctcttctttcctttcctttgaaacttatcatttttccttacaaacttcttgaatattttgatgaacatagctgtgtcttcatcacttgagctatcttcatcacttgatgtctcgaccactttctttgccttgtggtctttgttcttcttgggggtgtcttgattggggcttcttcggattcatgttgttgaatctttgcaaataattgatgaggcatcatttcctcatagtcgtcacaatctcttatcatccttgctagactcttgtccttttctttgtatgctctcatgaatagtctagtgaccttagagtcactccaatcttcacttccaagcactcttattttgtttactaacaccattaaacgatcaaagagtgattgaagtgactcacccttagtccaatcatatctagcaagttctctttccaaagcttcaattctatgtctcttagctttggggtctccttcatgtg

SEQ ID NO: 56741 - DNA, 807 bp, Zea Mays
caataaatgttggagaagccctttgtaccaaaatttcctttgaagcttgaggtgtcaacttagattgtgtcttcgggactttgctccgcttcatagtcactcttctcttcctcttctttgaatcctgaaccatgttgggattgttaggattgaagaagccaatagcatcgaaaacatggttcaatcgttgccttttttgagccgcaaaagcctgttgcaaagcttcagcctcaggtttactataattaccaattatttcattgcattttgcctcaatataatctaaccactcatcattaggctctcaaaactcgtcttcaaacttatacttgtagtgaattctgatcaacccaggttccgtgtctaaagcgtctttttcagacatgttcgacatctcccattcagctgctagtggccatgttttaaaagctaaaaattcctaaacaagatccattgttctaatgtgtgtccaaacaacattgaaagaaattataatagcctgagcttcgaagttgatataacacgttggctttttatatccgaagcttgtgataataagagtctaaatgatttcttttatatcagtctgttcattcaaatcattcttcatgtaaaaccactccctcgcccattcattcggccacttgctttggtatgcaagagctagaaataatgcacaccttcgataagcgaagttgtaactaccaaagttgttgtgaaggcctctagttgcctttgtctgaaagtgcatctcatggacttgacaggaggcttcacataaagcttcaacatcaaattcaacaccct

SEQ ID NO: 56742 - DNA, 403 bp, Zea Mays
ctccaaagtagcagccattgatgtccagctgcaggacatagatgcatttcttgaggaaatcaaagcacgtctagtgcaagctcaagtcactatgaaaagttaccaggatcagcgtcgcagagaagtggaattcagtgtgggagattgggtctggctacggctacaacagtgaacggctgtaggggtcactacggcttctccctccaagttgggaccaaaattttatggtccatatcagatcacacaaaagataggggaggtgtcttacaagttgcaactaccaccaaatgcacgcattcatgacgttttccatgttgctctcttgaagaagttcgaaggcaccgtgccaacacagctggtccccttaccacccttgttacatgggcgggttattccatctcct

SEQ ID NO: 56743 - DNA, 325 bp, Zea Mays
gagatcttctggtagggcccgaatgacacttgcctgaaacttcatgagaaagcaaaaattacgatcttcgtcgggcaccacatccatccaggcctgaagatggagtatccagaggtgaaagaccatatgatattgtggacagagctatgtgagtgtttcagtgtggagaagcatgtgatgctcccgcgggcgcaacatgaatgggccactctcgacttcaatgcagttgaggcttacaacactgtcatccatcgcattgtcgctcagctacatttctgtggccagatagccatagacttagagatgatcgagaaaactctccaaa

SEQ ID NO: 56744 - DNA, 894 bp, Zea Mays
gggctaccagtcgatctgatctttggggcgcccagatgaacctttgaaagcatagccaaagcagaagcaaccaggctagaggacattgatgtgctcgaggaggaacgactaaatgtggtaattcagtcggccagataccagtagaccttgaggcgctaccacgacaaagcggtgcgacatcgatcctttgcattgggagactaggtcctccgctgagtactaacgggggagggacgacacaaactgtcgccaccgtgggaaggaccattcatcgttgcagaggttacacgaccggtatcctaccgactcactcagatggacgacactgaagtggggaattcatggaatattgagcacctcaagaaattctacccttagcaataccccaaaactcttgaggacgagttattttttgtaagcagaaggttttatcatcaataaagtctccattttctaaggcatacaaattcttgatcaacaactgacctaagatgggctcaactcaaaatcagcacaacgcgactcaggttgatcactataccctactaactaagcaatcgactaaagtcagaaacaccttaagtcggttcgacatgctcacgcttatatgactcagggtgatcactataccctactaacggagcaatcggcttaagtcagaaacgccttaaatcgttgcaacatgctcacgcttacacgactcatggtgatcactataccctactaacggagcaatcggcttaagtcagaaacgccttaagtcggtgcgacatgctcacgcttacacgactcagggtgatcactataccctactaacggagcaatcggcttaagtcggaaacgccttaagtcggtgcgacatgctcacgcttacacgactcagggtgatcacta

SEQ ID NO: 56745 - DNA, 526 bp, Zea Mays
cttgagttgttcacctctaggagcaataaagagaatccccgcacctactccttgcaattttagcgagccatcaaagtacattctccatacttcggtagtctctaggttgtctgggacctgatgttcagtccactcaaatacgaagtcaaccagtgcctgagttttgattgccgtgcggggccggaactctatgtcgtgagctcccagctcacacacccacttggctatccttccgatagcttctttgttgtgaagaatgtcccctattggaaatcctgtaactactatgactttgtggtcatcaaagtagtgacgaagcttgcgagcggttagaagtaccgtgtatagcaatttctggacttagggatacttcatttttgagggcccgagaacttcgctgatgaagtagaccagatgctacaccgggtatgtatgtccttcctccacccgctcgactaccaaagtggtgctcaccacgtgagtcgtgcaggagatgtataacaacatatcttctgctggctgattc

SEQ ID NO: 56746 - DNA, 670 bp, Zea Mays
gaggaattcatcttccgcaccatgagattcatcgctaactcgcttggaaatcttaggctcatcctagatctttcagcagttccagcaccatttgataaggattctaaagatttaatctccatctcgagaaagttggattgatacaactgtatgatttcaactcatacttggactcaacttcgaccttgacttggacctagtccgactcaggatgctactccaaccccaactcagtctcagactcacatgatctacttgaataccacttaatgatcatggttaactcggtagatggacatcaagatgatcattgctctaaccttgaagaagataattttgccaggaacagaaggaatcatgaagacttgagagagaggtatacatccattcatgactagatctagatggtggaatttcatggcaccccaacgtagaacattatgccaacaaagctactacttggcaaaatcacactatttctacccaaggacaatatgtaagcatgagtacttgaattagatcaataacatgctagcctatgtggccaagtgtgtcgaggctctggttgcaccaacgttgagtcttggttggcatgagctctcaacagaaccaacttagaatgagctagaacaatcgcatgtaagccataatcattcacaaatgaagtcac

SEQ ID NO: 56747 - DNA, 754 bp, Zea Mays
tgttgcaccgtcttaagtcgttgccgacctaagccaattgctccgttagtagggtatagtggtcaccccgagttaggtaagcgtgagcatgttgcaccgtcttaagtcgttgccgacttaagccgattgctccattagcagggtatagtggtcaccccgagctagtcgagtacacagattgatagttaaacaattcgagtgcctttgaagtctttttattgatgatacatttctcagcttacagagttcattgtcatcccggcagcctttgagatatagctaggggtaaaatttcctgaggtgttctatgttccatgagttcccaatttccgtgtcgtccatctgagtgagacgatatgatcccggccgagtgacttctgctactatgaatggtctttcccatagatgtgacaatttgtgtcgtccctcccccgttaaaattcggtggaggacgagatctcccactgcgaaggatcgatgtcgtatggccttatcatgatagcgcctcagagtttgctgatatcgtgctgattgaatcactgtattcagtcgctcttcttcgagtacatcaacatcctccagcctaatagcttcagcttctgttatgttttcaaagattaacctcggtgccccaaacttgagatcagcaggtagcactgcctctgaaccatagaccatgaagaaaggtgtgtttccatgcagagctcgactaggttgagttctcaggctccaaacaacatatggcagctctctg

SEQ ID NO: 56748 - DNA, 459 bp, Zea Mays
ctcttggatgaaacaatggttttatgtcaaaaatgatttgagcaagagggaagatgtgaggggtataatccagcgccccatacggtcacacttcagcatcaagaggtcgtcaattgcaagtgggaacgaagtgcaagcgtgtttgatggctttcaacactgtgtgtacttacatcagtaccaggaatttggtccaggtgcatattgctttaaggtgtgaccgctcgttaatgacagggagatgccgaaggagactgttgttggttctagctagggtggtctggtttacctgagatacacctatcgctacagaaatcagtttgatgagccgaatgatgattggcttgaggttgtcgaagctactagtgacgaaatgttgggagattacacaaaggtggaggatgaaaccatgaccactgccttcggcgatcgcggaaagaggaggttgaatagagttttt

SEQ ID NO: 56749 - DNA, 519 bp, Zea Mays
aactggctgaagcatcactgattcatcgctggagtatcctcaccgccatggagacgcgcacaagcgtgggcaggaccgtccgcaccgtcaaccgaggcgagaacttccccaacatgcccgtcgtgatcttcgctaagtgttgcacgcttttccttaggagctgggactctggggggctagttgggcagtctccggcgaaagcgctgtcgtctgcgcgctgcgccaccgcggctgagaggcatgaggagggtgagtggtcggggtctgttgatcttgtgactaactgccaagattaaaaccctgaatatcgttttggatgggggtgtggatgtcattgatctgccagtgggtgaatgcaatctgatctcgcgtgaacggtttgatcatgggaatctgagccgttagatgtgcatcgtgcgtgtaagaatcattcacaatcattttaaatccaaccgtagatcctagattgtagggttgtggcttgagaccaggtctttagggatctgatctaatcctgat

SEQ ID NO: 56750 - DNA, 4266 bp, Zea Mays
agattcatttgggaaaaaatgatttcatatagaattaggagaaacctagatggacttagagttgtgttgaaggaagaataaaagcaaaaagaacaacaaagtacatttaaatgttgtagatgagcattcataccttccattaaccactttgtggctgatatggtcttccattgaacttccaaccaaatcaagctttaggcacctgacaactttaaaatttgaaacagacaaggaataggcatttattgataacagctctttgcagtcaataatttccaacttattcaaggttgtcaattgatgtgggaaactaatagatctaatcttctggaagccttcgatctttagtgactccagtgatggaagttctgagaaggtcggcagttcaacaccgtaatgaaatgacacatgcactagggaaataaggcgaggcaatttggttagtttcgggcatctactgatagaaagtcgaaagagtcgtggaaaatcctcctctctcgtgctaacccagaactgcaaatcatacatctcgcatatattcagcacctccagtgatggaaatctagtgggatattttacttcagtggccaaagaactggtctcgattccaaatctttcaacaacatttattctctgtatgaagagagatttaagagatggtagatcaccaaggtaagggagctcactacagccatggcagttatcaagtgtaactgaggtgagcttgcaaaggtaattgtcctgcatccagacaggaaacagatctccagcataatttcgaatgataagctccataatgttgctgttaggttgaagattttgaagaatctcactagcaatttctttgcccatgtcatcgtccatgccttcatcctggtaagaccactccagtgtcaaagcctctagcaagtgtttacccatcatatttgcttctctggcatcattggctgtcataatattctcaagcctagttacatgaacatgtccccttagtccattcagattgttcaactctgaaatcgaacaatgcaacatatcattcccaatgttgaacattgtgagagtttggagatctgtcagatatcctataccatgaggcatgccaacaataatgttgcccgattctttttgcacatcaaggtgtcgcagctttgccaaattacttatgcttcctggtaagtcaatgaggtggcaacaatccttcagttccaatgtctgaagactgtttacttgtcctatctcaataggaaggcttttgatcttggtgttgttgagagccaagagccgcaggtgcttcatgtttccaatagaaattggcaactctagtatgtctgtatagctcaaatttagtgcccttaagaatctatgtttcacgaaaatatcatccaaagtaaaaattctcaccactgggaaacatcttctgacaaccagaaaagactgcaaattccttacttcattagaaagtgcagttgtcttaaaatctgaaagaacaagggataggtgggaaacattttcagctaagctgcagaatggttcctcacatctgaagcactcattcttggaaacagagtgtgccagatcatgaaatagctcatgcataacaaagctatctttatgatcactatgaaatggagaacgctggaaaaatgatctgcagaatagttggtcaaaataatgcagagcagtatcttctggcttagtaccttcttcacagaagactaagccttcagctatccataatcggatgatatggtgcttgacaaaaatataatctttggggaatagggaacaaaatttgaagcactgctgaaggtgtgctggcaaaagatcgtagcataatcttaatgctggtaagataccatcaacaatcatatcaatttcagacaatccaacttcagaatgacataacaacccacttagggctttaatgcacattggattgccaccacatttctccgcaaacttccagccaatgctttctaactgacagtaattattcacaactaaatcttcaagcacatgttccttgaaaatcataaagcattcttctttggatagaggactcaagtaaaaggtttgcattgctccagtctggttagcatctaccatgctcttggtagttacaatgacagcgcttccttttgcacaaacattaagtagcttccatagataaccccagaaatactggtccttgatttcagaatcgtctagtacaagtaacaacctcttgctagcaagttcttctattacaatttcttcaagaacactgattgaggcatcaccacaggatgcaaaagtagtgagctctactatcttacctaatagcctctttttatcacacatatgcagccatattctcaaatcaaaggtatccaaaatcattcggttattgtaaattcgatggactagctcagtctttcccatgccactttcaccaactatgcaagcagaagtgactatctggttgctactattgtcagcctcatcagaaagtaacatgtcaatgatactttgctcataacacctatatgaatgcaaagaaacagcctgtggacaaaaagaatagaaaatttcagtatcaatattattcacaaattaactcattcccaaacaaaaacaaattacatgagtaaaggggctaagcaacctttgggccacactggggatggatctggttcttccacaatcttaaactatccaagcgattcgcaagatctttgaaggaaccaggaaagccttgaatatttgtaagcggcgacaaagttagggacttcaaatttgcaagtgtatataggcactcaacatccaagtcaacccgatggctgcctgataaattcaagtacttcagttcctggaggttaccaaatggttgtggaagctccttcagttctttgcaatatgataggttcagaatctctagattgcaaagatttactaaagaagcaggtaagttttgaaggccggaacagcctgctaaatccagcaaccttagcttggaaagctcacaaagtgacactggtaaaatccttagttcatggcagcaggaaagaacaagaatttgcaagttcttcagtcttcctactgacgccggcagtgtgtgaagggaataacagtgagagaggttcaatgcaaccagattagaaaggttgccaatggaagcaggcagctgtgtaaggccactgcagtttgagagatccaaacacaaaagactcctgataaacataggcaacaaatatatagggtcagtcatgtgtgccggcacacgatgcgcattcattccagttcccttgttctgaccagcatatgtcagatcatcaaaagcaaatgcaggaagttccagactatccttcttaagcctcatgttaactatgttaataatgcctaaaatgccacgacacaaaaggatgcaccgcatgaccgaagaactaagtgacaatatctcactgtagtttccaagaactacaccagtcaaaccagggcttccaggtcgaaggccctccaatttgtcggtaactggtaaaaaaacaagttcctgtgaagctagtaagtgcatgaagcttaaagctgttgttttggaacaagtccctgacacattgggcattactttcttgaactctatcccaaccccaagcttggccagcatcatcttgtagtgcagatattcgagagattcttctgcatctgaggtcaaattttttacatgattgaaccaagcatcagatggcagcttcccattgaaggatgagatgatagttcgaacatgaacaagctgctgaaagagacgactgattgatggcgaatatactccaacttgtgggtcaccaacaggttcagctttcagagattgctcggcatcaccaacatgtccagcaggtgctccttctccattgcctgatttactgcaacaataagtgaatattaggaaagtaacctggttgctaatcaggacactaattttctcaaagcaacagcaagaaacagaggaaacaacaggggggtccatatcagctgcagaagcctgcccagttgttagtctatttgggactgctctgctccataagatctagctcccagtttggttttaccttgcatctcagccccagctctaggttttcctggctggtgatttgatatatgtagtatactatacatgagtgattgatatttttatcctcggtttatgacatccatttgcttccaaggtacagcttttcctgcatgctttctatagtcaaatgttgcaaacctgtgaatgtgaagttcctt

SEQ ID NO: 56751 - DNA, 440 bp, Zea Mays
gtatctttgaagccttttttttattgatgacatatttccattttacagagtacatcgtcgtcccgatagcttttgaaatatagctagggataaaacttcctgaggtgttctatgttccaggagttcctgacttctatgccatccatctgagtgagacgatatgatcctggccgagtgacttctgctactacgaagggtccttcccataagggcgataacttgtgccgtccctcccccgttagaattcggcggaggacgaaatctcctactgagaaggatcgctgtcgcacggccttgtcgtgatagcgccttagagtctgctggtaccgtgctgattggattactgcattcagccgttcttcctcgagtatatcaatgtcttccagcctagtggcttcgacttctgctatgtttttgaagatcaaccttggcgccccgaa

SEQ ID NO: 56752 - DNA, 414 bp, Zea Mays
gaaaaattgttctcattccgaggatatgtctaccactgaaaacaatcagagttccttttgtgctagaaagaagacaatatcctataaaaatttgttatgctatgacaatcaacaaaagtcaaggtcaaacactatcacaagtaggtatttacctcaaaaaacctgtattcacccatgggcagctttatgttgctatatctcgagtgacttccaaagaaggtttgaaaatattgattgaagatgacgatggaaggtcaagcaaagagacaaagaatatagtttacaaagaaatattcagtcgcattgccactaatgctactgtcacgtcctcatagccctcaacaatactcattatttgtacattttgtactattatatatatatattacaattacatattacggtaagattttg

SEQ ID NO: 56753 - DNA, 333 bp, Zea Mays
ctggtgtggctcatggcttgcaatccagcatgtcagctcaccttatgatacgatgtactggtgttgctgaagaaataaaccatccagacgaggctcaacatcaatcccgagaaatgatgaagatgcaaatccttcattgcgaacttgtgctgaagggtggtaatgatctggtgtagcaggcccgaagaagaggcaatgagcacaatgtcattaacatacaggaggtggtatacagtgtcactgccatgctagtagatgaacagagaggtgtctgacttagcctcaacaaagcctagggagagcagatatgtggcatacttgttgtaccaagcg

SEQ ID NO: 56754 - DNA, 494 bp, Zea Mays
taggcctccaggtatggcttgccgcctcgtcactggcctggcaaggagaaggtcgacgaaggcgacctggccacgggagaacgggacctcgggtatcaggccctcgagcaagttctcaaggaaatcctcactggagactccgactccggtgatgacaacgaccgccgcaagaagctatacgttatgtatggcggaagctgggagctcacctcccgtaggaacgtgaagtccctacgctatgaggtcctttcggcgactccaggggtcccgaaggcagccccacatcagcggtggcggagcaccaccatctccttcggggcatctgactgcctcgaaaacatggcaggggctagtatactaccactcataaccacccctgtcatctccaacatgaagctgcatcatgtgctgattgatggtggggctgggcgcaacgtcatcagccacgatgcgttcaagtagctgcagatcccagggtcccgactggggccctc

SEQ ID NO: 56755 - DNA, 341 bp, Zea Mays
cgggcagggaaaggttttttaaaaacgcttcatgggaacaccggacagtctacaatgcatgtccgatgcacatcggacagcgcacagtagttgtccggtgaaccaccggatagggcagcacagaaagggatctacacgcgcccagccgatgcaccggactgtccggtgagcccagacagagggaattttgaaattttctaggaaattttgaaccaaaccaaatcccaacttataagcacacaaaagaacacctgttgggacaggtattggtaccctcacatattctctcatatttttcaaaatatttttccataggctagatagtttttagagaaaatagg

SEQ ID NO: 56756 - DNA, 510 bp, Zea Mays
gtgggacctccgacctgtaaggtcgaagtgcagaagtttctcggcaaggtgaattatttatgaaggtttatttctaacctagccgggaaaattgatgccttcactcctatccttcggcttaagaatgatgccgaattcgcttgggggcagagcagcaggaagcatttgatctcattaaaaaatacttgtcttcggctccagtattaaaagcaccacgagcaggagtatcattccgattatacattgcagctgaagataaagttattggggctgttctgacacaagaaactgaaggaaaggaacatgtggtgacatatctaagtcggaggttggtggatgctgaaacgaggtacacttttattgagaagttatgcttatgcttgttttatgcatgcaccaagtgtagatgttatttactgtctagtcattgcactgtttctgttcaagccgatgtaattaaatacatgttgcataacccaattatgagtggtagagttggtaagtgggctt

SEQ ID NO: 56757 - DNA, 447 bp, Zea Mays
tggactacctcgacaagtttgaagtggtgttcattgatgatatcctcatatattcccagaatgagcaagagcatgaggagcacttgaggaaagtactacagaggctacgagattgtcagttgtatgccaagcttgggaagtgcgagttctggatcaatgaagttctgtttctgggtcacattataaaccgagatggactagttgtggatccaaagaaggtagcagcgattctggactgataagcatcaatagatgtccgaggaatcaagagtttcattggaatggtcggttactatcagtgtgttattgagggtttctccaagattgccaggccaatgacaaccttgctggcaaagaaggttgagttcaagtggaccccagcgtgctaagagtcttttgagatgttgaagaagaaattgacaacaacaccggtattgattctgcccg

SEQ ID NO: 56758 - DNA, 407 bp, Zea Mays
cggaaatgggagcgggaggaggaacagtggaagctggagtggtggaggtggtaggtatggttgaagtggtggatggctcgggagcgactggagctggtgaagtgggaggatgagtggtagctgtggcgggtgtagagggagcggaggagcgaggccaatacgcgagtcgacgaactctgtatgcaatctgatctgacgatatctgcaactgtccacctcgcctgctctgcagctgctgccgctgcaagagctgctcaggctactctatccaaacgtcgcttcttgcggccttcctgctgctcgaggtaaactgtcttgcccttgacctgcctgaaggggcgaggagggtcctcgtcgtctcctccccctggcgctgacacattctttgtgcgcaccatcctgaccag

SEQ ID NO: 56759 - DNA, 467 bp, Zea Mays
ctccaaggtagaacatccctacatgccctactccggacccaagcaggggttcagtgacgccacgtggccactgggcgcatggtgcaaaccttcgcatggaaggaaggcctcaagccgcattaaatgcaaggcagccaaggcatgctctgaccaagcgtagggcattggtaggcttgtgataggtctctataactgtcccgcgtgttaccgaggcgtactatagcatggcagtgcctcatgcattaaatgcccactcagagctccgcgcgttacctaggttgttgtgccacgcgcatggaagacaccatcatgaagcgtcgttcgatcgggtattgagtctgttacagttaccgaccgaacgtgacaacataggcgactatgcacgcacctacgcatatcagcgttccaatctacgctgcatcccataccagagccttcgcccatacgctgacaagacaaggcaaatt

SEQ ID NO: 56760 - DNA, 460 bp, Zea Mays
ggtcggcgcatcaaaactttaatcttctttgaccacgacacaccagtagatgccatggtagcgattttccttttcctcccttgcttctgcgtgggaaagcagtaatctaggtatacgaacccgataacatcaaacaccctattcaatctcttcttaccgcgggcgccgaaggcagctgtcgtagcttcgtcttctgccttcgaatacgccgtaagcatctcattgcttgttgcttctacggcatccaaccagtcatcatttggctcgtcaagccgattcttgaaccgaaatgtgtactttagatacaccaggccaccctagctggagccagcggtggcctcctttggcatttcccaatcactcgcaagaggccatattttgtacgcaatatgctcttgaaccaagtctcttgagccaatgtaggtgcacactgtgttgaaagccgcctggcatgcttgca

SEQ ID NO: 56761 - DNA, 367 bp, Zea Mays
cttgtagtggcccttgctcttctcacctttgttgtacttgtctttcttgtactcctttttgccttcttgatccttcttgtttggacagtctgctatgaagtggccagacttgccacactcataacaagctctcttcttgcctttcctttgaaatttgttgcttcctttggcatacttcttgaacgtcttgatgaacatagctgcctcttcatgaagatcatcactggagctatcatcatcacttgagctctcaatgaatttcttgtgtttgtgatccttgcttgaagaagacttctttaatgactcctattcatttgcaaccaaagcatttgtatcccttgccttcattgaagcttcttcagactca

SEQ ID NO: 56762 - DNA, 359 bp, Zea Mays
gttgcagtggcaccaacaaggccatgcctgggtcctctgtttcacccaaaaatgaaatgccactagtggtaaagaaggtatgctactcatagtcactatcatcatcttcgacattatggaatgtttgttcatcattatcactcacatattgcatcgcagtttcatcgacttcatcttcaaaataattttcttcctcttcatcttccctttgtcgacgaagctcttcaactacggtggcagcaacagtgtaagaattttcaacagctggtctctcatcgtccaaactaaaattttcacgttgaatttcaaagtcgccacactcatcgtcttggtatgacaacgccactccctttgaaatt

SEQ ID NO: 56763 - DNA, 570 bp, Zea Mays
cagtatgatatagtacgtcgtgtatatgtcgtcctttagacatatcgatctgattcaattactatttgatatgttgggtgaggctgccattatgtgttaactacaaaatacagaaaacatccatgttgtgtgtgcaaaacgtggcgtcgacaccaaatgactagaacacgtcaaaaagcataacactattatatgccatgcgtaaaacgttgtcgttttatcataaatagtattatatattgtggtcaaacatggtttgtttttaacataaatgctacatatattagcataaataataaacaatttttggtaactctgcgtataaagtgtaaaaccttgtagttttatcataaatagtgatatatatgttgtaaacagagaacgtggcaaactgcatggtgtaaatttaatagcataaaagcgtgtaggataattcaatcatcatatcatagaaaccaaaagtatggtgacaataacataatcccgagttaggtctgcatattgatatggctagagtatcataacatccacattacttaggaccatattgtgcaaaatacaggacatagg

SEQ ID NO: 56764 - DNA, 586 bp, Zea Mays
cgctgcggatccgcagagcagcgtggcccgatctcctcggcaccagaactggggtgagtagcacttcatcgcattctccatccttccctcttcgcgtagtgcctatcgggatagccaatgcggtcctagatcaccggggtgcggtgcaccggcgaagttccgccgcaagcacgggagcggcgccgccgtgcgtgagggttggcaggagaagtatcacgtgcagcgtgggatgggggatcgatggccgagatatgatctccactctcccctttgtgctagcttgatctggtccgttgaatagcaatcggatggctcggtgtgaagtgaggatacttcattaaacccctaccgtagatatgaaatcggatggttacctgcggcgctctgattttgcccgcatagatcaaatctgggccgtagaattagatctgggcggccaggatcgctgcttcccccttcggcctggccatctttcaaaagaatccctgcagatttagaaattcatcccgccgtccgcaccagggacgttctgtgtcttagaaaacttgcgctgagacccctgctgattttggtaattgtgcgccca

SEQ ID NO: 56765 - DNA, 529 bp, Zea Mays
ttccggtatatatcggttgatgctaatttttagataaaattgtgcgtggggaggcattagacattctctctgtagagacgaaggccttattttgcttctcgtctccaaataaaatctcggcagaagtagttcagcttctgttgtgccccattcattttgcatgaggagttcggcttcacaggaaactgctacaagatgcccaacacatgagtggcaaagttcatcaatactaaccaggcctgtaagacagctcaacacattccaataataaatccacaatcccctaagaaagcgttaacaagattgaatataaatatatgcaaaagaatatgtgttccagtaaataatacaaggaaactgctacaagatgcccaacacacagcgggcaatccgaagtgaaccctgacatgtcaccagtgactatctaaaaaagagattagaaaagggagagatgaaaagtcacatgagaataagtcttgttctaatctgtgagaaggaacagatgcatccgctccacaataatgaccat

SEQ ID NO: 56766 - DNA, 845 bp, Zea Mays
gcacaacctgatattgagaagtctttcgacgtatattgtgatgcttccggtacgggcattggatgtgtgttaatgcaagaagtccgtgtaatagcatatgcttcacggcaattaaagagacatgaagaacattatcctactcatgatctggagcttgtggcagttgtgcatgctttaaaaatttggcgtcattatcttctgggcaatacttgccatatttatacagatcataaaagtctcaagtacatcttcactcaagcagaattaaatatgagacaacgaaggtggcttgagttaatcaaggactatgatctagaagtgcattatcatcctggcaaggcgaatgtggttgcatatgcgctcagtcgcaaggagcatttatgttatctattggctagtcctcttgagaccacaatttgtcaagaaatggaacgactaaatctgagtatgttccaacctgccctactagctaatttacaattagagtcaactttaattgatcaaattgtggaagctcagaagacggatgctgggataacccatatcaaggaacacatggcaatggatcctactacgtgtttccacatggataacaaaggtattctttggtttaagaaccgattagtagttccaaagattcttgagttgaggcaacagatactggatgaatctcatacttcccggtattctatccatcctgggagtaacaagatgtatcgagacttgaaattgcgattctggtggactaagatgaaaattgagattgctcgttatgttgctaggtgtgatgtttgccaacgagtaaaggctatacatctaaggtctgctgggccattgcaatcatt

SEQ ID NO: 56767 - DNA, 670 bp, Zea Mays
gcgtcaacctgggagatcggcagccaccgtcgcgcccgtaattgctcgccgtcgcacttctggacggcggatctgcccggtgcgagggcaactgtctccgtcgtgtggtttccagtgagtcacctcatatccattttgcctcagctcagtgatcaagtagcataaatcagggcgtgtgctggtgcggggtgacgccggggcgggttgccggagtttcgccgccctggcctacgcgccgccgtgctcagtcgttgtcgggttcgtgtgaggagggagcgtgtgcgccgtcagatcttgatggacgacgtggattaagaatagaatatcggttcggcttggacttgtcccggtcgttggattgttgaagtatgggcgagatcggatcgtgcatataatagatcgcaacccttgattgcggatccgatgaaccagatcgcgtaccgattcagtaaagaccagatctaatccggagcgctgaattctaatcgtacggctatcacgcgcgcatacccctttgccatacgcgctttatagaaaagcccccgcagaatcacgaaaccaacccaccgtccattgggggggttcgtctgagtcttaggattaattacattagggcccctgacttttctggaattcgaggcccaatccagaactgattcaaaatgaataa

SEQ ID NO: 56768 - DNA, 553 bp, Zea Mays
cattgatcgtctaaaaatgtttttacaataactactagtcttccttcaggaccttctccgcaacttcatttagcaatttgttaacgacttcgtcaacaacagattcggctatattaacaacctccagtgcttccttcgtctctggatcaaacggttccagtggcggagataattcagctacagtagaaaacgttaattagttcgaagccataaaatcaaatgccgaagctaaaggccatgaaacaatacctaaacgtctttcacgttctgcagcttcctcaggttgtttcgcttccactcgggcgccatgaatatctttttcacttttcttcataatttcgtgagctatttctcggccaccatttatccagatgtcattgtaaaattttccgcctattaaacttgcttcagctgagggatcctttgtatcatccacggagaaggtagctttggcctaggccaggatcttgacatggttacaccccgccttctctaggatggctgaaatccctcttgcaccagaaaacgcgcagacatccccacgatcacttaa

SEQ ID NO: 56769 - DNA, 452 bp, Zea Mays
attgcagcagcgtcaaaaggcatgtccgggtgcagtcgagcatacagtacatgtacctcttcatgtaaactattatagtacacttgcaggctgtcaagggtcgcactaagctctaccacatgagctcgagcttttgcttcgtggtcccaagcgatcgaacacgagttgatgacccaatcaatgaccgagaatcccgttctgatatctcatattgcaaacggctaacgtcagctgacatttcagttatacactggctgtcctgcgcccatgccctatttcggtgacgtaactctaatcgaagttgttccacattggcttccaggtctccaattgggtcattgctaccactactacttccttcatgtctgggggctagctgatggcgaggcacgccaaaaggtccagtagatttgcgtgttgttttccttatacgtgtcatatctccataagag

SEQ ID NO: 56770 - DNA, 833 bp, Zea Mays
acggaacgcaccctaagcatattggcaaaagacgcatgtacactcttctttcctttcctgagggatatctcctggatttgctcagaaagttatttattgtgggattgagagtatgtgatattgggatataggtgacccaggtgctaccatgttttaccatttttctttagtttttgattgagataacctatttttcaaagtcagattccagaacataaataaatttcttgcatccttcttggtcttgtactctgcactgtacagtgttcgacaaacacttagaaatttttcttaagttgacaagataaaatagactctgccactgtcaaacccttcgatttggccgacccactaggaagataagatggacctatgagctgtatggctgattacctcagtcctcaatgaagctaatctattttgccctactttgtttgtacttcagaaatagaatatgtgttacgagcaggcactaggattcacctttgtttgagttggctgatggggaccttatttattcagtagttgggccctttagcaagtgatggtgtcatttcctagctggctccacggcatatttattcaaactggtgtccatcactccatcggcctatatgaatttagaaccttgaccccattgtgagggcctggtactagatagtgtttgttcaatagcctaacctatgtagcagatttttagtgctcttaataatatccgaggtgtgggttcttgatagattaggttggtgctgggatctgttatcctactatttttctggattcttggttgtgtctgctctgccctgattgttgtagttaaattaaaataacgc

SEQ ID NO: 56771 - DNA, 548 bp, Zea Mays
gggaatttggaggcataggagttattgcacttgttgtatatcactttggtgtagctcttgtttcttcaatgttctggttgggagtatttatagccttccaataacccaaatagccattggagaaaagttgcaaaactacacaattgggtggtggacgggaccgtgatcagagcctatctgatgcgccaccggacagtgaatagtgcatgacaggtgaccattctaaacttgcaccgctagtcccttgtcagacggttcatcgcgccacttgatgtatatcacttgcaggtagccattggtcccttgtcggatggtctagtccgattttggagtagagacgtagcatgtctcggtcctactatggaactgatggcgaggaagataaataaatattagtgtgtgcatacctattagctacaccatgagtttatcatgttgccaaaaaatgccactgacttaccccacaatgaccaaaaggttcccctggttgacggggcctcatcttatcaactctgggcaaatctatgattgtttctttatcaaaaaaa

SEQ ID NO: 56772 - DNA, 307 bp, Zea Mays
gacttatattactcgcatctaaatgctcgcagtatggtttacaagcacaacgggagagggaaggatcccaagtcccaggagatgattgagccaagtactaatatcgggtggaggagaagatttgtgaagtatttgcatgcccttgagaagttgtagactgtcctatttataggctcaaggggtgcttcccagaggacgggggtcaactgcatactgtgagaaggtgtctttcgtaccctataggcggtatggtcttgtactgtgttgttgacttgtgcctgcttatttcccgttgagtgtcgaggcc

SEQ ID NO: 56773 - DNA, 540 bp, Zea Mays
gttctctgcccctctctctcggtctctagcgatctcttcctcccggcgaccacccctcctctccggcgatctcttcaccggcggtgtccaagtgcatctccccttccatctctggtgagaatccccttctctctctttccccctttctctctgtgctcctgccaccagtaaagcccccctcttccacccctgtgtgtcaatttcaaattcttgtgaaatcctgtgaaaccaagttgtggtatgtgttcccctgtgtgccttgaacattcttgtaggttctcagttccttagggagggtttcacagccttaaacagccgtttcaccgtaaccctaaatcctcgcacaccacatgctcggtgaaatgcccaaaccagccaaaaatgctccaattgaacccaaatttttcaggcaccttgccaatacctccagtaacatattcgccaaatttcacgcccatccgatgttctaggctttaatttcaccaaattccccgtttcgagagatcgtttctgagccgagtgcccaaatctcattttctt

SEQ ID NO: 56774 - DNA, 284 bp, Zea Mays
aggtttgctaagcccgagaacgcgttagggacgaaggcacacactggtgtgactagtaccagatgtattaggtagagggcactaaccatgtgtcagcatctgaatggattagcagagaaggcctccatgaaggttgtgatgcgcagaagatggtgccgatgtagcctatgattgtcggagtggatgaagtagatgaggacgagagggtgacactggcgacgaggttgtgctggacaaagtcaaagaagtagatgggtgacacattgaggctcctagagtggcag

SEQ ID NO: 56775 - DNA, 812 bp, Zea Mays
cagatcgccagctagctaccgacgtggaattcgtgggctatataagctcggtcggggttgccctcgccgataggaaacccatagcccaggatcaccccaccgccattgctgagaagggagtgagagggagcgccgggagccgccacacaagaatctcgcctgcgactttgctaagaccctgaagagtggtccgactgcatagtcgggactagtggaagtttcgaccacctccaacgcgtataacctcggtgcattgtggatttctcgtcggagtagccgcacctccgtggagccgcccctctccgtgaaccgctcacgtcggcctccttaccgtcggtatgattccttctatcaagttaattgtgctctcctctctgtttttctcgagctcgcacacgggttattagaccatcacgtcggggatcaggtaggattccggagaactcgccgcctgcgggacgcaacaccgtcgcacggttaggtgtggagagggagaatgatttggaccattgatttgctgcttgatggttgcgattagagggaggcaacgattcagtcttgtatgttgtataccgtccatccattgataagcagtaatgatcacgacataacgtggacgtctctggagtcaatgatctgagatctaacggacgcaagcgcataccagttcggtttagtttaaaatctaatctgagccgttctgaatggaccgtgtggctcataacgcaccataccccttcgcctagattcttttacatatgagtccctgtgttttaaggaaaacaacccactgtcctagtgctgttaggaaa

SEQ ID NO: 56776 - DNA, 538 bp, Zea Mays
tttagatggaaacgaaaatgtaaatgcgaatcaagatgatgatagcgattggttgcataggaacgagacattcaaggcagacgatgttttcacaactagagacctactgacaccaggtacatgactgttcactcaactaattttgcaaaatagctgatttcaggcgatttaacgtatacatgccttattctaggtggtgtgcaagaaactgttggtaacacgcctaaccataatttggaaagggccgcctactttagagagcggtacaaaaacttaactcccaccgagagggagtttaggcgtgaacgcgttaggttgtataataatacaccaaagcggaaagggtcaaagatagagtacataagaaaacgtagagcattgttggctgacacattgagtcaggagtccatcgccacggagtccccaacatatacccctgaggttgtacaccctgcaacaaatgcaattgaacctgatggatccacagttaccccctgcgactcggttatccctgaaatcgctagtaacccgttcctgc

SEQ ID NO: 56777 - DNA, 555 bp, Zea Mays
ctttaagatgggacttaggcacttaagttggaataatacgatcggttccaccacatcatgtcttaggccaattattaaaattggaatacactaactaagctacaataaagattataaaagtttggccaaaatagtttgttaagaacctcaagctagccattcaagtggaggtttatggggaaatctgaaattcagatttctgaattttcaacctctaaaccaaaatcgagcatgttcaccttgatctctatctcaaaaccctaagctcccattgacaaaaatgtgcctaactaacccctctatctcatacccgaagagggcattgggatgtgtgccctggacacgtcaaacctaggatcttctctctgtgttcagcagtgagacaaacccaacttcacccctctatatctcttgatcacgtcagcgaaacccataagcctccacacacaaacgataaaggaatgtcagggaaagagatctctcaatgggatcatagccataatctcaaagatttggagccaatctgcgcttgaacatgacctctctctacgctgc

SEQ ID NO: 56778 - DNA, 499 bp, Zea Mays
ttaggggtcagctgatgaagataaatttcaaaattatccaaaacttctcctatcatctcgttcagaggaaaccgtaatcctgctctgaaaaagcttttgaaaaccactacttcatcatccttcggcgttggagtggtttcttctccggcaaaacgaataagcttctttttagcttcttcgaagtagcccagtttcatcatcatgggcacgtcggcttcaaatacaatagatttctcaaaatcaaggtggctgggttttgatgggatcaaaatgctataatcctcctcttcttcatcagcattttcttcctcaatatcagcttgttcagcttcaacagcaggtgcacctttgtcaatggctccctctgttacaactaagcccgattgtctcatgacttccgaaaccggagctgtttcggtggcctcagtctcctctccttcacgagtcaccctcgcagtcgagcgtactctggccatctgatggatcttttgcggttttt

SEQ ID NO: 56779 - DNA, 491 bp, Zea Mays
ccgggaggctagatggccgtctatacgaccgccgcccgggccactggggcaaccgaaaatgtgatgaccacatatttgcccatcgtcctcgggcaagatgcattgcaatggctacgacatctgccacgacactgcatcgacgattggagtgactttagtcggcgtttcaatgccaacttccagtccctctccgacaagccggcgcaggcataggacctcaaatccatcaggcgctggggcgatgaaacacttcggtcgtacctcaaaaggtttcagaccatgagaaatcgtatccccgaggtcactaaggcagcaacgaatgaggacttctaccggggttctaatgactcagccttcattcgatccatactgcagaaagcgtcgaacaactattttgagaggcggacctctacatcaccgctgacgagcgggtcgaggacctcatcggaggaacgaaacctgcaccaccggcatcgcggcgcgacgcgaac

SEQ ID NO: 56780 - DNA, 1095 bp, Zea Mays
acacattgtgtcccatctgctcttctagtatggtttttgtaaatctttagaaggtagagccgacgtttttaggcctttagacatgtgtataaaataatatgtgctgaagggggtgatgaacttgtcttcgccttgtcctcttctttcacatagatctaatgatatcctgaaaaacactctagcatagactggtgaagtctatgcatattctccacttgttgttttttcttcaccaagactatgttagcgagccaggtaaggatagtctactggtttgataaacttggcttcatgaagccggtggactttgacttttgtagcttcagtctttttgtcagacatcttgcacaacctctgctttttagggcgtgtcgaggggtctgtacttagattgtgctcgatgattgtgcgattaacgttgaggaggtctatgactgaccatgcgaagacatccttgttgtgatttagatagagtaacaacttgtccttagtcttgttgaggtattctcttattagaaccatttcgttaggcactgaagcatcttaggggactttcttggccttttggttgttctgaatctgagcctttattgtttcggattttgcagggcgagggctgctagagtcttcgcccgtagtggtgagacagggcacattacgctgccctaggatgaagtctctttccatattatggggaatttgctggtctccatatatacttgttacaccttgaggcctaggattttcatgcatagatagagtccatggatggccgcctcaagtttgtctattgacccccttcccattacgacgttgtaggggtagaccatgttgacaatgtcgaaggtcacttgctcagtcatcgcattaggggttgtgccaagggataacaatagctctatcttgcctaatggaaacgttcttttgcttctgaagccatacaaggggttatcagttggctggagcagactatggttaatgcccatgcaatcgaagtcatgtaggaatatgatgtcagcctaactgttgttgtctatgaggactttgtgtaggttccatcctgctatattacagtttataaccagcgcgtttgca

SEQ ID NO: 56781 - DNA, 644 bp, Zea Mays
ctccgccggttttcataaacgacaagcagaaaggaaaagaaatgcgcgccaacggaaaggtgagatcgaacgagattgtggggaaagggggtctcagcatgctccacttctggcaaggaaccaaacgagggtggctcgacgtgggcggcacggcacggacgcgaggaagaaggaaagggggctgatgcgtgaacccaactgtccaagagataggaaggggggaaggggcgcgcgcgggccgactatgccgaaagggagcgtgggaaggggggagagaaggaaatcctttttctttttctctaaattttcaaatactttttttctaaattccaaatacatggagatatgaatccacatttaaatcttttccttgttcacgtgcttgtaagggattagtttacagaaatgtgtcataatttctcaagccgaacatccaataaactacccgatcaggacgttgtggttgcagtgtttcacctcgtggaattttgaccaatgcaagaacggctgggttactagtttgtcactaacggctggttagagagtcaattaaaataaaatagttttattctagtttttgagaatagtcattatattctccgtttggcaagtcactttattttttgtgtggttaaagagtagag

SEQ ID NO: 56782 - DNA, 443 bp, Zea Mays
cgcgacgtggtcgcgcgaccgtcgcggtgatgatcaccgttaacccgagcctgccacgctattgccttgttaccacgttgccgttggccgcaataggtagcctgcctgtcctatgagtcgacgcgccagtgaatgccacggtaacacgcgtcagtgaatctcccctctctctggccactagcacatcttctcaaaattgggtgtcaccgctgatggaccccataaattgatgccctaatgagctccgctaggttattatgtgtccagtgcaccagccctcgcctccaattagcgaactaacttagcttatcttaaggaaaacccgccaactccatcccgatctatcccgacattcgagagcaccgggcacagggaaaacagatagttctttgagattgcacgtaatccaacagatgatctaggcatgagcccactgccttctt

SEQ ID NO: 56783 - DNA, 819 bp, Zea Mays
attaactgacatgagtatgcagttattatctattttccaaaggaatggaatatttattgcagattttggttacactgatagcagtgaaacatgctttgatccatcaatcttggtagatgatctaacacatccatgctaaatttcactattcttgctttacctgctcgatttgctgctgctgaaaacaaacatagactaacatgaatggatgcctagtggtttgcagtgtagtgtgtcctgttctggggttagtcaacacacactaatcattaccgtatctccatacatctgtaaggtaagtgctaaatatgtttttcacattcaagcagtatttgatgaattgacaaagtaaccacagggataaggtgacagaactaagggcaggtgttaataatagctaacttacatacccagtccacacgtatagagcttgaaaagcttggcattttgttccaatgtcttatcccattgaaagtagcgatcagataaggcagaaacatcctaggcgtgctacctggtccaaaagagtgtggaacttctgctcaataccttcgcaagcatgtcgagaagcaccatagttcgacgaaccctccactggaacattttacgaaacatatcctgatgctctctaaaatgcacctacgccaagatcaatcctagttcgagctatactctaatccaacccatccggagcccaacttgcggattaaaaaattatcaaagggtaatcaagatgggcacacgctctgggaacataataagcaacacgaggagagggaaggaacgaaccaagagcaaaaaggcgcacctccttcttcc

SEQ ID NO: 56784 - DNA, 306 bp, Zea Mays
ggtagaggcatggccgacttgggtagaggcttcgcccaggaactgtgatcgctcttgcgataatcaccccgcccaccagaggtcgacacctcctcctgcaaaagtgccagcgaacaagcagtatccaaatccataggcctttgaagcataataacagcgcgaatatcgtcgcggagaccatctacgaaacgtgtaacaaagtataatggatcgaccccagactcatacaccgagagctgatctactagagatgaaaactgttcaatatagtcagcaacacttcccaactgtttgatgtgaaataag

SEQ ID NO: 56785 - DNA, 469 bp, Zea Mays
agcaattcacaagatttcatcttcgacgagaacgagcgttggtgaaatggaaatgtgccttgtgttattcctataaatgttttggtgattaatgtccaacacaacaacatagtaacatgtttgctaagtgtgtagatgcagaaatttaactcagataaacagaagttaagttggagaaacaattaaataaagttatatgacttagacatagttggattgtcactaagaatatttgtctaagtcatggtaatactcttgtactaagagaaaatattttggagaagaaacaccagagaaaaagacaagtattgttgtttgggtgaaccagaccttgggtttgtgcacattggaccacttttctagaggtgccaaaagatggactcagtggcctggcgcatcggacctcgggttagtgtgcaccggaccactttaccaaagacaccaatataatactttggtggcatggcac

SEQ ID NO: 56786 - DNA, 633 bp, Zea Mays
tggattgctgtagtgagcattgatgatggcataaaggagcatgggattgaaggtaattgtacgatattatttattacctttatgcaacacatttacgaaattactagtgaattatatttcatggctattgaatttcatgagaagcatatataccacttataggattgcaagtgttttgtatatatttcaaatacggaaatatgggcaattttaagtattatcttcacacgagaaatacatcatcgttgctgactagcaatcaccgacaagaagtcgatcgaggtgtggcatataatcgttgctgatttgaaatcgccgacttctacgtcgatcaattaatatgcacaagtcacatgcgtggacgtatggtcgataactcccttgacctagttgaaaatatttaacaagaagtgtaatactatcatataaacaacagtaaccatttatacgaaccatagaagctcatcttgttgttttactatacacaacctcttacctcatgcatatccaaattcagtcgtatgaattgccaattgaaggcacactagcttgatttataccaatgtaagtttattttcggacatgcagtagtaagtcattgacattatgaatggtccctcatgaagaaatacc

SEQ ID NO: 56787 - DNA, 345 bp, Zea Mays
tttatatataggctggggaatgcaagcaaggagagcgacggctcatttttggtttatccgttagctggtgttgcccacgccatggacgctatactcgctgcctgctggcccattttagattccatccgacggttttttataacggaaatagattccatctaagatccaacggttttctataatggaaatagattccatctaacatccgacggtgccacattctttttcggactctgactccacgcgctcttatcgctgcttacccagaagatcttgcagcggtggtccgagtcactccacggcctcgacgataatagactgtctgcgctccggcccaagcctccc

SEQ ID NO: 56788 - DNA, 477 bp, Zea Mays
gtcgttgtcgcagttggccaagctcccttgcggccacagatgaggggaggccgaagcgcgtaggaaggcacacgcagtctgtctatctagactttagcccaggaccagccaggccaactcaacacctggccagcctatcccagtcggtgataaaccactgttgcgcagaaaccgaccccgaagcaatgcctacaatacatataagcattttgataacgccccagctgattgcatcgttggcctgctcggcgctttcagctgaagcaaccagctagccttcaccagtcaggaaaaagaatcaactaacaatggcatccccagcagccttgttgtaggagtagtgactgtaggagactgcgtgcatgaaccgattgttgtaggagtagcaactgtaggagaccgtgtgcaacaaccgaatgagatgccaaaaaaggttgtcgccaggcagaaatagacaaccagtacgcctaccaagcc

SEQ ID NO: 56789 - DNA, 286 bp, Zea Mays
cgatcacagaagaacgacaaccgttgattccgagatctgcgaaccagatttaaaataagtgaggactagtatccacacccccggatctagatcggacggaccacattaccttgaccgaaccgacaacaagcacatctaatcgcagccgtacgtgtcgcgatcgacgactaggattaactcttgcaaaccgttatttttggatctaatccagtatgtccatttggagatctatgactagccttccttctcctacctctatccaagccgagcgactgcgccgccgccg

SEQ ID NO: 56790 - DNA, 805 bp, Zea Mays
caagccactagcttccaacgagtaaatcaacgaactgcggatcggtatcggtatattcagaagccaaaaacattcttgagtttagctatcagtgcatagtgatctcagtacatacaacagacaatgtattcttccaatttaattaactactgggaaaagatcatgctcaaaaccctcctcctgttcagcagttcagggttcagctcatcctttctttttgtgctcgtcagttccttttccctttgacaattgtattccaacttcaatcggatggaaacaaagatgcgcattgctttattactcaacaaaaagacgcgtacaatacataaaaactaactgagggaaacaaagcacggtgttcatcgctgaacacggaccatactgaaaccaaagctagcacagcacagcacgctgacagtagcggcaagaaaagaaccctctccctgaaactacaactagaggcagatctgctgtgcatcataacaggtctcgccactgcagcacccgagaccgaagtaagcaagggcgcagggatacccttgcggtatgcacaagtcctgcagcagtagctttcttgcgccctgcaggctgaacgccgagtaaccgccgctgcggctgtcagtgacactggaccagcccgtggctgatgccggctccacggttgccgccgccgccgtcaccagcagcacggcagtgaacacgatcagtgctggcacacgaacgcgacagttttgagtgctggcaatcaccgcagccatcttcttcttcgcgcaacaaggacgcacagccctccctcgcccttgtt

SEQ ID NO: 56791 - DNA, 481 bp, Zea Mays
aaaatatacaaaattagatgatgcatatggactttattttaatgaccagtaccatgaatacaatatagtcgatgatcgttatgtcgtggaacatgctcatgaaatctagcttccggtggggaacttgcacactttgactgtgtcttgccgaacaagttcgtggttggtggcatcattgccaaactgcctcctacttcgaggaattttaccatggctctcaaacataaggaggcaatgactgttgaaactctagttaccactcttgatgttgagaaggcgagatctaagggtgcgccttgttctagtccaatggatagtggcacctctaatgccaacgtggtgtaacggaacctccgaagatattaggcccacctatagttgtccttgtcccaaggaccttagacagtcgctcagatgcacccaatagctcgataggacctagttcacacatcttcttccttctcccaagagcgtacatccc

SEQ ID NO: 56792 - DNA, 365 bp, Zea Mays
cttcggtcactgttcaggcgagggaggagcgcgggttagaggggataaaaagctaggggattaagtgctaagtcaaagactcatgtgaatatttcttcaggggcacggtttaaacaactcagataggaataagcccagggacaccgatgcaaaagtctttttcctttaaccatttatgtttattcatttcaaatgagcagagaacttggaaaattcataacttgtgttatattcaaccaaatttggtcaaaccaattttgctagaacctacatattatagactatccagcaaaaatagtaaaccccatggtttctgcaatattttttagagttttgatttaaattaggaaaatgcctaaacctta

SEQ ID NO: 56793 - DNA, 766 bp, Zea Mays
tgactcgaacctcggggcaaggttcttttaagggggagggttgtaacaccctaggtgttactcagggttttccctcagtacccacattgtgacccattatcacatgtgttttagttgaagaaaaaggcaccaaacatgtggagctaaaacttaatcaagtctttttcaccttaagaatcataccctgaccatattaagcttaaggaagaaaggaaatgccaaaaccctaacaaccttttctttagagcaatggagcactgaaaagaaactcagtaaaagaccaagaaaatcacattgtcatgacttgggccaattataaaagttgtaatacactaaataagctacaagaaatagtaagagagtttgcccaaaagaatttttcaaaatccccaaacaagccctttaagtggaggccttctatagaaatcagaatttcagatttctgaaatccagccccctcacaaagatcaaacatgttcaccttgttacaaaactcaaaaccacatggtccaagtaacaaaatggccccaaaatatcctaggcacactctggtgaagtttgaaatcaaaccaaaatcgtttgacacgatttggcttggttttggtctcgggttctagctgggggacataccagacttgaccacacattttctccatgtccctaaggcaatcaacactcgggaccactagagaagagataggatatggtttagagaagagacattacaaaggattttgctgagatctgctcgttaaggtgaccaaac

SEQ ID NO: 56794 - DNA, 286 bp, Zea Mays
atagtctactctatatgcatgattataaatattcatgatatatcaaaatctatttagaggggagctgaacctctccgtatggtaactgttgtatcttaactttgctaattctactatgctgagcaacaagtcattatgagtttttctatgatttaactgcacaaagagaaggtggtgaagaaataaaggtaacaatgttaacgagagtcatacatagatgtatattgcatatttagattaaagacacgacactccaaacgaatccttggtcaactcttcaaactag

SEQ ID NO: 56795 - DNA, 440 bp, Zea Mays
gcgggtacgggtttaacattaatctcgcgggtacgggtttgtaatctctgtacccgcgggttttaaacccgttgccatccctaaatagtacacagtgacagacgcaggatgagaattcatggggggcaagaagaccacatgacgaaatcaagcaagaccataaaaactagtgttgcatagagttcaagtttcatatcaatacacgatagaagtttaaagaaggaagctatatgaacaaaagaagcaaacatgtcgttcagttcttactgaccgaattgaagtcgtgcttaccttgtcgaatggcgatcttctagaagggcgggggtactaagaaaggtgcatagttgtcgaatgacgatcttctcgaagggcggggcactaggaaaggtgcagggttaggcgacatctccggtcaagagctaggtctcactggtttgcta

SEQ ID NO: 56796 - DNA, 378 bp, Zea Mays
cgcacacactagagttagctactacatatcatcgagcgcacaacatttaacaccactaaaagacgacaaacattttgtatatttatgcaacacaaatacgaccccacaagtacgagcgtttatttaatttgctacggcttttcattagttcttctatttatcacacaaaagcatcttagcacaagtttaacagagggcatatgtatcaatgtctatagaattcctatatcacaatcaactagggaaagaacatataaaacatgacatacatgttatctcaagcttagccattacaagtctatgtccgttaagtgctaactaagcatttttagccaaaagggtgaaccaaacaatcaagtgagcacatgcagattttta

SEQ ID NO: 56797 - DNA, 329 bp, Zea Mays
cttgtttcaactttagccttagtgtttacttcctcgtgactgctatctggtttgcttgccttgttgagacctaattgattacttggaaaaaatggggaattttcgttaggctgaactgattatctaataccttaattatctatttgtttcgcaagaataacctacttcggttctgttaattctactaggaagctagctttattttagttgctttataataggataccgtgtcttatttttatgcccatttgctggtgttttctcagcatataggaatttaatttctttgccatcacacttctgatgaaacatttcactcaaacattgtc

SEQ ID NO: 56798 - DNA, 287 bp, Zea Mays
gcaactttagcaccatgatcctcaatcctcctggcgtaacagattgggtcatggattccagcgcttctagtcatatgactcctgtcagtggtaacatctccttatttcgcccaccacgctccacttccattattgttggaaacgggtccactttacctgtcacagcttctgcccactccatcataccgggtcccttctatcttagtaacatccttgttgctcccgatattgttcaaaaccttattttcgttcgttagtttacttctgataacaattgttctatagaa

SEQ ID NO: 56799 - DNA, 337 bp, Zea Mays
cggcgccgccgctagagtccgactcgtgcgttctccgggagcccgcggctacctttcctcttcttcccattacccccagcgtgtgttctctcctctcttggcgacgactcggcgaccgacgctgccaccccacgtttgatgcccaggttttcctggggcccttcgccggcgacgagcatcaccaggtatgtcctccccttgtcttcccttaccgctgtgcgaaactgagcacccaaaccctaacttactcttgtgctcggatctgtagtagtagtagtatggtgctctcgtcttgcgccttcaaacttcagttattagctatatatctcgacaattg

SEQ ID NO: 56800 - DNA, 382 bp, Zea Mays
cttgtgctcggaataagtggggcaactggtgggactactggttttatgtctctggtggggaagttgaagatctccctgggctccctgccgccgtcatgtgctctcactgttatgtggcgttcccaccgttcgaggtggcggaggacgatgaggacgaaggggcccttcggtacgctgtccgcatgagtagcgggcacaatcttgttgaggaattcattagatatggagtgtggcccttggcgcacggatgggtacttggcgaagtatgcccttgcaggatgccgtccttggacgatcagttggtgcgaagtcctgccttcgccttggatttgcggggtcggaacccgaccgcgtttgttcgtgaagtggaggccgaggcctc

SEQ ID NO: 56801 - DNA, 502 bp, Zea Mays
tcataacttgagcaatcttctgcactcatttgggtgaacattttcatatctccagtcatgtgttgagtgcatccactatccaacacccaatgattccctcccaccttgtagttcacctacaaaaggaaatcaatctcttttaggtacccaaacttgcttgggtccttggatgttagtgaccaaggtctttggcacccaaatagctttcttcttattgccaacaattgaagtaccaacaaatttagcatgaacaccttttgcattatgagaaagaacataacaatgctcaaaacaagtggaggatacattctttagcttaggacaattcttcttgatatgtcccttcttgtgacacttgtgacacactttgtcacattctttcacaaacaatatcttttgctttacaaaaagcattctttcctttcttgggaacatatctaagaccctcacgattaagtgagcaccgttgactttccaatatgaaatccaacttagcctttcc

SEQ ID NO: 56802 - DNA, 449 bp, Zea Mays
attatttgcgcgtggaaagtaataatgtatttaatacttagaactcttagtcgatagtagaaattgttttggcttatatagaacggtggtgacatgccaagtagtcatcgctttctctatatttataagtctagtcacgacgatgcgtattatgcgctcgttaaattatgcttcgcatatagtgtatgattgtgctcacgatttcgagtagacacttcaagtaagtcaagtaggtttgtgatacaagttgtgtaatggagttagttgttttaggataattattgaaatactcggttcgtaggataaacatgtatgcgttcatgatttgggaagtaaatgtgtggtgattgcgatttggagattagtggtttacggttcgtataaattggtcgatgtgcgaatatacgtgtgaatatgtatatttataaaaatattgtaatgtatatagt

SEQ ID NO: 56803 - DNA, 654 bp, Zea Mays
cataccccagagtggtgacatcttgaggtacacatgatcaacttcctcaaactccagtggtcttcttctattatcagcgtagctctcttgcctggtctgagctaccctcaagttcttcgtgattatacatgcttgttcttctgcctcttgaataagttcaggtccaaaaaactgactttctccagtctggtcccaatgtaggggggtcctgcacttcctgccatatagagccttgaacggtgacatattcggactggcctcgtaactattattatatgagaactcagcataaggtagactcttgtcccaactactaccgtgctgaagggcacaagttctcaacatgccctccaattcttgattagtccgtctgagggtgataagtcgtactgaagttcaactttgtgttcatattctcatgaaaacttttccaaaatctaggggtaaattgtgatcctctatccgagacgatcctcttcggtacaccgtgtagagacacaatccgagccatatatactctgccaattgagatcccttataagtagtcttgactggaatgaaatgagccacttgggtcagtctttccacaataacccatataggattgtatgctttcgaggtgcgaggcaatccagtaatgaataccataccaat

SEQ ID NO: 56804 - DNA, 450 bp, Zea Mays
caattttggagccaattttcactatgcatgttttgatgcggagggctctaatcttgcgaaggcctaggataatggattcatattctgctatatttgtacttggccctagataatgttttgcacctgtctgtctcgaggtaatgttttgcacctatctgtctcaagggtaaagctgagaccggcaacatatttgtagttggccctagattgtgttgtgattattgctgcggcaccggcccctgcatggcaccaagcgccgtcatagtgaatggtctaggttgtttctgcatttgggcagttggaggacagagaccctgtccagtatactatgaagtcagcgaggacttgggacttcattgcttttctcaactcgaagactatgttgtagctagagagttctgttgcccatttgcctattttggcggaggcttctggattgttgaataataa

SEQ ID NO: 56805 - DNA, 619 bp, Zea Mays
gaatttttaatttgactacaaacacaacttagagcatttttacactctattggctatactcctgaagctcttgcacttcctacattttctgcattctccttttgatccttgcattcccttagggggagttggcttctttctcctttcaccctatcttgacgcttgctaagtgcacttgtcaacaagggggagaatttttggggctttctgtgctcccatcaagggggagagttttggaggctttcagggagaatttcatgcaaggggagagttttctgtttttggggaatctcttggagatgtgcatttgtggaagattttgaggagttcttgtatacacattttttataaggatgtcttgctttctgtgagatctttcagttgtgcttcagggagagacatttttcttaggggagtctttgagccattcgggagctttcgctagttgtgttgagcctttgcctcttttggaggaattaactttgatttcagcctttgtgctgattttctcctctaatttggttttggctgctggctagtggtgttgagccttgcttttgtctctttttgacgactagcatttcttgcttggtcatgttgagtcattacccatttcttt

SEQ ID NO: 56806 - DNA, 510 bp, Zea Mays
ggaggaaagaattgagcatgacaaataaaatactttattctcaaattcaaagttaacttctataccttgatactgttgtacgccaagctatcagcaagatcatcttttgacataatcgaaagaccttcttcaagttttggaaatcccatacttttagctatctcctagcaaacaggtatttctttattgtccgaaagacagtacatgaaatcatcttcattacttccgttaaacactaaggctcctttcgaatatttcagtttttgagcataatgcctggcttctgcgatttcatcttcggacaatttcttccccgaagcatgtcgataaatgtaatcagcagcttcggcctgcacttcggaggcagaagatttcgccctttctaccatatcttgccctgctgtcagaatggtatccgaagtttgttgatcagcttggacttcaggcgtgacaaccttcgtctcgctgggcattgatggcctagtcttggcttcggcttgcccagctttg

SEQ ID NO: 56807 - DNA, 536 bp, Zea Mays
aatttgttttgtaaaaataaaccaagtggtggaaaaagtgatccaaatatgccaaatcctatgtgagatgaattggtcttcaaattgcactctttagcttatctttgaaaatattgttgcattttaagttgccagtccactgtagaccatcgccgaccaattcctcctacccatagcactaccgtgacctagtgaagctccacaactactcaattgaagctctaccaccactgacgagctgaatcgctcaccgtcgttgagcttcgtcgcttgcgcgcgtggtccgagcgactccgaccacctccgactgttacctaaccatcgacgtgaccctcacgacgtccctgacctcaccgaccactcgccaagaaccctactgccgctagtaagacgcgagttaggaaggagaaaagaacaggggtttatgcgcaaagtaatagactcaaatgaatagtgcgccatgggcatatttgaaacaggaaattgggttttcagctaggagtctcgacgcaagatggtttttcttttgcatttag

SEQ ID NO: 56808 - DNA, 466 bp, Zea Mays
cgagaaacgatcacgttacatgattatgaattaaattactcgctcaatggaagggaattaatttggacactacgttttagcataaagtaaagtcgagctccacatttaattattgtaaacaattgaaggtgaatgagagggagcggtcgcacgtcgagacgtacaacacgatatttagattgaattaagaagtaaacgattcgtcgcgcgacagaggaacaacgagacacttgcactaattttaaggagacgttaagcatcgcgcgacgaagcgcacgacgacatacgccaacagggctgagtttaaagtggaacgtcgcgcgtctggacacgcgacatcgcaccttaaacaacctaaaattaaaatagatcgtcgcgcgaagaagcgcgcgacacaacactttaatgaatataaactaaaagaatcgtcgcgcgacgaagcgcgcgacgcagcacattaataaac

SEQ ID NO: 56809 - DNA, 979 bp, Zea Mays
gggactgtaaaaaagattctttacatctggtatgtaaagtctaagatcttcttaagaacgtggttgagttcatcagttgtgtgacgagtcgtcgttgcacgagcgatgattgacttgacttcaatagtgtgggtttccatctcatcgacagcccattttagggcctcatacgaagtggacggtaaccgcttcgaatatttgatcactaaaatctttttgagtatttgatcgacaacccatttagaatatttcatcgacagcccatttcaacccatttcgaatatttgatcaccaaaaccacatataacaccaaaagatgaatttttcaacaacaatatctttttttacctcctaggaccctctagtttttaataaatttttctgttttttataaaaaaattaaattccaaattttcgaaacaaaatttccgaaaaatatcgccatgaatcgaatccgcctcgacggtaacagctggttttcgagctgagattttaaccctgcagctggctcaggacctatcatcctcgtcgggggtgggtggattcgatgaactagagcctgaaagccaccgcccatcaaaattattgtgctagtgcaggtggtttgccagggcccagggattgtccaactcgattagatgcacgtcctctttttttgttgttgttttattacgttacaatcgtcataccagataagatagagctacgatggctgaggtcagggcaaaagtacagacgataacgtttgaacacgtcatttcttccttggagccgtccaccctatcataaattttagttgcatcacattggatatttgattatctattacgagtattaaatacagtttaattataaaactaattacataatactaaatgacgagataaatttattaagctaattaatcctttagttttatagttaactaattaagtttactacattatctattacgagtattaaatgcattcgtacccac

SEQ ID NO: 56810 - DNA, 421 bp, Zea Mays
agactgtctcgatctcccaagtctcaacagcaactgcatgcatagcagctaagctagcagtggtagttagttacttgtgagctgcgacttcgttaaagcatcgtcctagctatagatagtctggcaagtggtgacaagctaggtttgatggagcctgctgcctgactgacggaacgagggcacgcacatggcggaaactaaccaatgcagcaggtgcttgtttcgtggacgggagggagttgtgcatgcatgcatggagacgtaggagattcgtcccgtggattactaccgctagctagcttcatcgattatagccgccggccatgagaagaagagttcgctgctggaactgcagctgagcttgcttggcaagttggcatctccccgactttttatcctgttttgctttagcgaacacgct

SEQ ID NO: 56811 - DNA, 503 bp, Zea Mays
ttcatccctaagatgaagaagtgtgtgcttgaccagcaacaactaccctatttgggcctcattatatccaaagacggggtgacaaccaatccatcgaagactgaggcaatgcaacagtggccaatcctagcttttgtcactcagttgagggttttcttggccttaccggctattatcgtaagtttgtacgccattgtggatctttagttaagctattgactaagttgttgcaagagaaagggtggggttggacggaggatgccaatattgcatttcaccatctaaagatagtaatgagctcaactctagtgctggctttgccccattttgatctaccgtttgtggctgcaactggcgtctatgatacgggtctaggtgcaattcatatgcaaagggatcaacttgtggcattcttgagcaaaactttgggggacaggaacaaacatttatcgatatatgggaaaagtttcccacgttaatcatggtagtggattagtggcagc

SEQ ID NO: 56812 - DNA, 447 bp, Zea Mays
gcagttgtgtctcaatattatcagacaccatcactagtgaataggttgtatgctgtactacacaagatagcaaaaggggaggttctggtggctatgactaccttggtttaccctccaatggttgtgccaggtcaggtgtggcagccatgtctaaattcgttgcatctaatgcaagcgatggatgaggagcttcctctaatgtcacatatatggcctcattatcggctgaattttgcaatacatgtgggtttgcagtctgcaccagaggtagagagggaggttgtagttgtgttaactttaaattttcaaaccccgaaagttaggtacaaacaataaaaaagcaaatttcttgttccataacgcacaagataatcatgaatgcaacatatgcaactgcttaatcactaagatacaccaagtattgtgggtgccaacgtgacataaatt

SEQ ID NO: 56813 - DNA, 609 bp, Zea Mays
gggacacacaaggacactgaaacgaaagagcagagggcatgagcggacctggagtaggatggccatggcgaggttgtaaggtgtgggattttggaccaaattgggggaaatccgaaattggggcttgctcgtgagtaattggaggcacgacttggtggatcagtgcttgattaccctacggacccgtcagtgtgctcaatttatagtgtgcttgagcggtggtgtttaatttggacgaattgcgctggcgaccgagaggggaatgagtcacgacggcgatctaccgtggcaatcgcagagcgactgaactacggcggtcactggatggtcactacgactcataccgatgcgataaacttcctaaggcatggcgccctcacggtgaatggcgaacacgccggtggtagccgctcggccatgtcgccgatgtgcactgatgaaccatcaagcacacagtgcatcccagctcatctgcggcaagatctttcatcccgtgatcgctatccgcatttaattcaggcgtgaatcacgacgatagcacgaatccgcgcacgtggtcgccggcggtgaggtctctgagctggcgatctgatcagtacactgttccat

SEQ ID NO: 56814 - DNA, 359 bp, Zea Mays
ctccatacctccgcagcacttttttttggaggcgcgtcgagcaggcggaaatgcggaagtgagctcattcttaccttggtgatgtacaatcggcgaacttttaactaatgtatcggctttcgagaggcaacatgacgacgcgatgatagcaaatatgactaatgacctttgtacaaaaatcctgctattctgatggggaagctttgctcgaagagttgtccagttgacgatattttgaagcggaagcacaaataagagttctaggccacatatatacacagacaaaatgttaaaagactgcatgttcatcagaccatttaagtattccaccaacttgcatgttctatcagattatttgc

SEQ ID NO: 56815 - DNA, 442 bp, Zea Mays
tgattatatagccaaacaaacccatcagtagcatagctcataagaaataattacgtcgcattaatagatataatccatacagtgagcttttaacgtaaatattcatattcatcaaatagtatcatgatcataacatttcaatatcatccattatttatgtataaatgttttacaatcatgccaaattatcgtcatccgaaccatgttcttcagaatcggtatgtttatgtttttttgaagtggatgtctcattccactgcggggccattgttgaatttttgtttctagacccaggcggtcgtcctctttttctatcggcaaggccagccaatttaaccctattttcctctatagacaagcaggttcgactgttgtgtccatcagtaatgccacatttttggcactttcgagtcttcttcttttctcctttcgcacccagttt

SEQ ID NO: 56816 - DNA, 673 bp, Zea Mays
cggtgggggaggtggtagaggctagaacggtcggccgtgtccgacggagtgcttgaaattcctacagttccgtagggtgtggcgcatatccttgtggtacaagcactgggcgttgaggatgtcatccagtgttcgttcgcctccgcggggtgcacctcgggctcgagcgacgggttgtccggcggcatgtacctcctcacgaggcctcttcacccagcgcctgttaggttgctggttcgtgtcgcgccgtggtgtaggtggcgcaggtttcgtacctgcgatgaggtcctgggcccgctcgtcagcggtgatgtagaggtctgcctctcgaaatagttgttcggaggtggtcggcgctttttgtagtatggctcggacaaaggccgagtcattggatccccggtagaaatcttcaatcaccgctgcctcggtgactttggggatactatttctcatggtttgaaacctcttgaggtataaccgaagtgtttcatcgccatggcgcctgatggatttgaggtcccatggttgcgtcggcttgttagagagggactggaagttggcggtgaaccgtcgactgaagtcgctgcaatcatcgatgtcgtgacgtggcagatgtcgtagccactgcagtgcatcttgcctaaggacgataggcaaatatgttgtcatt

SEQ ID NO: 56817 - DNA, 3285 bp, Zea Mays
ctttgttttgccatatgtaaagacattccacagtccgcacccaaacaaacaaaatattaaagaaatcactcagcaaaaaacccaatcataaatttatgggccaagtgatagagtgaaatggcaacatccataaatgctgctaagatgaacaattccatagatagatatacactgcagagagaatagcatgctacctttccatcataacgactttcttgaatgacctctggtgccatccaatgtggagtaccaatgaactgaaagcattaacatgaaggatcaaataatggaaattagtgtgccactaaaacctttgttctttgcaaaaaaaacactgcattatttttatttggcaaaagccatacagactgaggttagagagcaatgctgacagtctgttgatagagttattttactgtaaaatcgggacagttttatctttgcattttgattgaagtatatattaacgccccaacaacagaaacatccaagacaccgtatacatgtagatttgtgttgtgcgatcatgatggatctgggctcaaagcatggctgcatgtcaatgacaaattgacaacaaatcagtatgtgtacttagaagtgtctgcttgtgcgtgcttgcagaaaagcaatggatattggataccatcaagaagaggacaccaaatgtttccggcacactactacgaaatggttggatgtagaactattagttatgggttactcaagcatttatgtattgccatggttggaaactagagaagtgtagctgcctagaacgtgtagaagagaaacaagaagtatcaacagcagtagaaagggagtagattgatttttttttcttttggtttctttctagatattgataaattccagtcaattcttttttttttgagcaaacgcaggagagctacgtgtcatttcattaagaaggaaacaatacaacaaggggggggacaacaaatgccccccccccaacacaaggccagtcagggcagtcatgactagcaaaacacaccccagccactagaacaacactggcagcagtactggggacgacgaccaagaactattctataggtgtggtgagagcaggcccctaagcccagcaccaagcattaccttcctcaaaaacagccaccacaacacttatagtatagtactacattatatcatcgtcctagagaacctgaacttgtactctaccctgattttccaaactctgactcaacgtacctcctagatctagccaactatgaactaccctagctgatttggactcccagtgcaccaactccctaacagtgaggaaaaaagatgaaagtaccatccatagtgaagatgacatattgggcaggggccacctgccagtaggatgataacaccctgaataatatttcccaatttggacgtctttatattatgatttccacaactgttgatttgatatgctactgtcacagtaaccctctactttctccaatagctccagcagggcagcaatgtgccagcttgaaatgagcctcgcagtcatcaagaacagaagaattgttgagtggtgggctagtggccaaggaagaagccaaatgggggaatgagcaaactcataatgggatatttggggactagaggctgtcacgaatgggtttcgaaaaacagaagaatgccaaggaagaattgagcaagatatattatatatgaaatatacacattcctatttttcaatataacacttaacagaaatagctaggacttcacatcgatcattttccaacacgaacttgtttcaagttctcatcaaagtatcatcatattaaagaaccatgcacaagcacaaatggggcatcttatagtaaactggcattgacaagtttcatctgcacttcattttgtttgtcacatcgatgtgaagtttcttgaactttggaatttgaagtagcaaaagaaacactgttaagaataccgtgttgcgctttgacatggttcttgtcagctgggcagctacaccaaaatcacctgtttgtacattgttgagcatgtcaaacacagaagtcaagacatgcagaaatatcaagtgccaacaaaatgaaaaaaatgaacaaacaaatgtgcttacccaacttcacctcgccttgctcagttagaaggatgttgccccccttaatatctctgtgaactttaaaaatggagtgcaggtaagcaaggccctggagaagaaaataagcacacaaaagttaaatatccgaagacatttaattgccccacaaatgtggtgttagaacctttagtgcttctctacaaatgtaagctatttgggattcatcaagaggctcctctgtgatgcctatcaagtcagcaacacttccaccaccacagtattccataattatctgtaggttgagaatcacatttgcatcaagatcatgttaaatgagttgacaactagataaatctcacaatgatagaaaagtttggctagttcctaatattaataaaatggatacaagcaggctatttgattatttatacccataggtactcctctccttggtagcttccaaagtagcggacaacatttggatggctgcattgctgcagcatctcaatttctccccgtatgtcttcatagccttcttcctgaatgccagagatacatgcttatattttaaagacaaaaatgcaaggactcagaaatcagaaagcaaccacatttatgagattctcccacaattaagcccatgcaaacaaaatgctcacaacaaaagcaatatggttgccaaatatgaaatatgtcttgggtagccttccggaatattcacagaactttgtaataagaagctagaaactaaccccttctgttaatgagatgatcttgacagccacaagctcctgcgttctgagatcccttgctttgtacactgcaccatatgaacctttccctgcatttccaattgaatttgcattgcgcaaaatagctcaaaatttcaggcattatacaaaaagacatataaagaactaatgaaataataattccagagcaagagtcgcaccaagctcatggagcagctcgtacttggtggaaggatcctccctggtaacactgtctggcaccgagctgaccgatggcttccgccttgaatgttgttgctgttgttgctgcatcagaggcgatggctgccggagctcctctgactgctccaccgctggagtccagaaagaggacccgaaacccccgccgccgccagaggcagattcatgggaactggagcccccgctggtgtggcg

SEQ ID NO: 56818 - DNA, 501 bp, Zea Mays
gtagcatgccctttgtagaggctcatggcagcaatcaccagcggtgaggaggatgcttagggttcaggcgcgcgagagtatgggtgagccgcgaccagtaggaccgacaacaatgcgggagcataggggaggagggacccatgggttagggtttgggagctgccaagtgagggctcgtggtcaggagagaaattaaagacacaaaaagaaaatgagaaataatttttcacacgtcagcacgatgtggtatcgtcgtacgtgccaaacgttaacatggagggaggagggttcaggttttaaaaaacctgaagagatatatcatcaaactaagttgaattcattatttactacattttttcacaatatgtctaattagaaatatcatatgaagacagtttcatatttagaagtgtctagtacacccactaacatctaagacaattcttattgtctaaacgactcaaataatatctttatttgagatggtttcatatacaaaag

SEQ ID NO: 56819 - DNA, 675 bp, Zea Mays
ttcttcatataaaaccattcttttgcccactccttcagccaattgcttcgataggccaaggccgggaacattgaaccccttcggtatgtgaagttataacaaccaaaattattatggaggcctcttgtttccttcgtctggaaatgcaattcatgaatatggttgaatgccttgcagaaggcttgagcatcaaattctattccttggctttgaatagcccctaaccgcacccagtcaatattgtcaatgtagccaaagtggttaagtacctcgatgtgcccttctttgattttggacttcccaaaatccacatggctaggctttgtgggacgaatgatcgtgttatcctcttcaaaatccattcccacgctatcttcggattggttcacctagctaaatttggcttggggagcagtggctcccattgccagaatgatttctttagcatgggcctctagcgcatccttcggaggtgtaatagacatctcgagtagcactctaagtgtgaaaaaagcaagtgatctctgaaactcgctaaggttggttcgggagcaaaaaacagtgctcgaaaactagcttcgaaggcagagtgagcactagcagcggtgagcgcaagcaagagaagttgtaccctataatggttctgtttagattctaaaggtcaaatccgacgtg

SEQ ID NO: 56820 - DNA, 579 bp, Zea Mays
tcggcccattagactcaacatatcaaattcataatattcccgtcccatagatgtatacttccctttttaaagtgtcgaccaacaacccatgaccccgctcctcaatccaatagattcaggaacattttgactatggcccagtcccattcttatcgacaccgtctgatgcagtccgcttcgatgtctcgttccttatgtcgcgacactacacaaccccaccccttcccggtgcccccgcctcgctcgtcatcctcatgacgctagctagctcgacatgtccgatctcgtttgtcgcgatgatgtgaaccgtccttggaggttagcgagcttgtcgaaccaatgagctctatctctcaactagagacgtcccttgacccacccctttctcgacacacctgcccatcaaagagatcaatataaaacttgaattcaatgcaacgctgatttttacgatcttttgcttgatttgtcatgtggtttttggccgcccatgaattctcgtcctgcgtccgccactaagatcacatacgtacgatatattatagagttgaataaaatttaaatagatatcaacatgtt

SEQ ID NO: 56821 - DNA, 649 bp, Zea Mays
gcagaaaccctcaccgaacgttccactccctggctacgaagggcccaaatataaacgcttaatccaacaatagcattaggggtcagctcatgaaggtaaaccccagtgtagttcatgaactcagcagaaaccctcaccgaacggttccactccctggctacgaagggcccaaatataaacgcttaatccaacaatagcattaggggtcagctgatgaaggtaaaccccaaacttcttcaaaacatcagcaatcatcccattcaaaggaaatcataatcctgctttaaagaagcttttgaacactacaacctcattcttttccggcttcggagtaatttcctctccgccaaaacgaatcagctccttttttgcttcactgaagtagcccagtttcaccattttgggaagatcagcttcagagatggtggactttccaaaatccaaatgactaggtttacttggcatcccgcagctgtactcatcttcggaaccagcttctttaacatcagcttgtgttgcttcggcagcaggtgtgtcctctgatgaaaccagcccagaacgcctcattgcttcagaaatcggaacagtttcaacggcttcggtctcgtctccatcacgctcaaccctagcagtagagcgtactctggcc

SEQ ID NO: 56822 - DNA, 529 bp, Zea Mays
cagagatccatcgctgatcaactctcggtgatcatgcgccaccatcttcctcatactaatcatgagtcgatagatccacaacccctatgcaaggttctagtatatagctcgagaggaactgaagatcgaaaatgggggtgatcaaggagggagtagtctagaggattactgcgaaaagggagggagaggttagttttaatagaggatgggaggagagatgacgggtctatggctgtgttgttactgtggctgctggctatgtgtcgtcgacttggggaagaggaggaagaaacagtcggcgtgtgagttctgagggagggagctcgccgcaacagtggagaaattgtttatcccaaagaaagccgaaagcggtggcgaggtgaagacatgaaatagcaatgctaagctaatcccatggcacatgtcgtcagctttgacgagtggtggtggtgccaatgccactgctttcacctccttgatccttgcattcctattatttcccgttgacacaagggaaacctctctgctc

SEQ ID NO: 56823 - DNA, 871 bp, Zea Mays
ccccaaaatgatttagtaaagaaaaagtttcccagaaagattcagtaaataaaaaagatttctgaacgagttctttcccctctcatatatggattctatatatagttttcccgagtgtgttgatgacgacgatgcacggggattgctttagaccaaaacctgcatagtggggtgcatttttttacaggcggattccgttgtcaaccgtcagtgctattttttagtggcgaagccgacttaagttaatttccatcgtccgaccaagaagtcagccagccgatggggattaaataactctcattggcctcttcaaatacccacaagaataaaaaccgacgggtattagtgtgtgggcccagcaacagggaattaatcacttttgtcggtccttatcatggccgaaacaatagcagcagatccaagttaaaagcgggtgcattcaaactaaaatacattaattgctgattcaaggtttgagcacattgcctactttttcctgattttctaaaatatttgtaagattgattgtgagagtagagagaactctatgtactgcctaggcacaacaactgagaacctcgtggtggccaatggagttgccaagactgttggctagcttgtcatgcatttctacgtacgtacgtgtgtgtgcgtgcgcgctaacaaatcgatgacacgtacaactttcggaaagcgctggagcactgcacgttactactatcccagctccatacctgctcagcccccggccagaaactcttctagttagagaatctccatcatgcatgcattcgtgctacagcgggtggcatatcatccattgcaaccacatgcagtctggctggctttgcacatatttaattagctcttg

SEQ ID NO: 56824 - DNA, 617 bp, Zea Mays
gtggggcctcgtggtgagggatggcgacgcagacggacagccgctgcaacggcggtgcgggagcagaacagaatctaggcagcgcacgtcacgccacctactctactacacatacacacacacaccacatgcacttctctctcctctccgcacttcttcctttccctgctgccgccccgctcactcacctttttcatttctcttcttgtatccttttttctctctctctctcctctttttttccccaccttttgtcttttattttgcacggagtatgagcggatcgaattatttattatagaacgaaatacaaatactacacgtacagaaacgagcgccacgccacacgacggttctcacaaacctacgaccgcagaaacatcgcagacggcgacgggaaggttcctcacgacaaatgtacgtgctacgataggtcgtctggtgccttggtggtcggcgagctaaaacaacggggcacgtacgattcgagtggtccgtctacaacaactacaagcaagcggggagatgagatacggagcattttttgttcagctttttggaggaggctttctgataatctaattacataaaaaatctgcgtttaaacagaattagag

SEQ ID NO: 56825 - DNA, 708 bp, Zea Mays
cgcttgtcaaatacatccgtgcagaaagggatatatttgcatggaaaccttcagacatgttgggtatcccaagggaagtcgttgtgcactccttatggattattaaaccagggtccaagccagtgaagaaatggctacgctgtttcaacgtagagaagcacaaggccataagcaaggaagttgggaagctcctgactatcgggttcatcaaagaggtgtatcacccgtagtggttagccactaaataaagcatgcccgaaagactagttcctgctgccacgcatcaactaggtgttctactccaccttagggtgtgaggtgttgagttttattgatgcctactctggctaccattagatcacgatgagggagtctgattagcccaccacttccttcatcaccccgttcagtttgtattgcttagtgaccatgccctttggcctaaaaaatgttggggtcacttaacagggatgcataatcaagtgtttcggcgacctcatcggtggggtcatggaggtgtacgtcgacaaaattgtggttaggtctaagcaagcctcgtggctgacctcaggaagaccttcaataggctaaaagtaaacaacataaggctcaaccccaaaaaatgcatttttggtgtcccaaggggcatgttgttaggtttccttgtcttcgagtgaggaattgaggccaacctcgagaagatcactg

SEQ ID NO: 56826 - DNA, 298 bp, Zea Mays
tgcagatcttagcaaaacccccatgtacggtctcttctctgcaccaaatcctaccttttcgatgtgagttccaagcaaagatatggtcggggtagagagatatgggggtgagaagttggctctatccgagctgtccacaccgagacaaaagccatgccaagttgtgtcaaatggcttagggttgggttcaaacttttccagggtgttctaggggtctttgggcgccattttgtcaattgggccataaggttttgaggttgggaacaaggtgaacatgtttgatctttgaaagagggtc

SEQ ID NO: 56827 - DNA, 333 bp, Zea Mays
tagggagggtattaatactagcaggagcacaaggaccacaacacctgtgtagctatccttggatagaactcgaggacagagaataaactttcacaaccaggatctcaaggcagctgaacatgggcaggtgtctctgaccttgcacacaacacagtggggaagggctcccagggtgccaacacaacaggagctacacacacatggcaaacatgcacacccatcgcaccagcccaataacactgaacctggtcagcctccatagccaaaatattatcctttgttcaacaaaacaaataggacagggagcagataaggcctctcttccaaatgcac

SEQ ID NO: 56828 - DNA, 1007 bp, Zea Mays
aggcaatgtgatttccaggtacattatatccaatcaaatccctaccaatcaaataaagaaaaagcaatgggatccctatcaatcctattatatatatcgtgttaactgaaaccagtgctccccaaactttaatagtgtgtagagaccacctagcatccatgacaacaatcttcttgacattaccccacattgtgtgttgaactgtatctaagtggactacaatagccataatgtctacaaaattgtgaaaaatggattaatactgatttttgcgaaggtgttagaaatagtaggagattgatatacatacttaccaactaatgtccggtttggcagttcggcgattgccgcaaggttcaagaatagatgttttgggaatggcgacatttgaaatggaacagtgtacggctccacaacagtttgtctggtgagatacaattccatgggaccacttatatgtcgaaaacgatcacctaaattaatgctgaactctacattgtgcatcttgtaaacatgtttttcattgagcaaactatcgaagtgtttgactgtctcatatgaacttgtcatggcctcgatcttggatccctaatattattttaatagttaaagaggcgatggtattaaggtcatatataatttttgaaatgaaaattatgagaatgttgtcttacattgatgtcagacaaaatgaaatgttggctgtctcgataacgtggttcaataggaaatttaacttctacccgagcgacaatactgtacttccgcggtagcccataaaaatcttcatcacgatagtcatcgaacaacctgaagctatattaaccattcgattaaatataagggtcataagtttgatacacaaatcgtgtaaccatttaatataacttacataggcatcctttttgggcggtccgctgcagctctttcacgattcaatacgacgggttccatcgaaaatttgtatcctttaacaatgtttaaatttttatttttataattgagta

SEQ ID NO: 56829 - DNA, 313 bp, Zea Mays
gtcgtccccaaccttccagccgtggtacatgtctcatcctcggctccctcaccttccacatgcagcagcggacctcctcctttggctcgtcctccccctgctctccgaccagcaagaagccagcaacctctcctgcttacccatggtgctcgactggccagcgcccctccctgggtcgaccttggccccagccaggtctctgtccatgtcgcccatggagcacctgggcgttttggctcagattcctgctggcattgagctcaccaacccagccgagcacctccaacagctatggcgtcctccttcctaagct

SEQ ID NO: 56830 - DNA, 512 bp, Zea Mays
actaggtgtaagcctaattccctttcagcaaagatttaactgagtctttttatcttaaggatcataccttaaccatatcatgcacctcaaagtgagaaacatgcccaaaccctaaaatacccctaattaagccattttagtgcagaagggaaatttgaaaaagggaaatgaaaaatgtgaaatcatggccagaaccaactataaaacttgaaatatacttggtaagctacaaaaactactagaaaagtttggccaaaataattgttcaaaatccccaaaaaggccatgcaattcagatttctgaatttcagccctcacctagaactcgggcgcgttcaccttgacccctaactcaaaaccttaagctcccattgacaaagttgtgctaaattaacccctctgcaacgtgtgtgaagatggcatcgagattcgtgccctagacacgtcaagtcaaggattttatctcggattcacgcagtgagacaaaccctactagagcgccccatatcttc

SEQ ID NO: 56831 - DNA, 529 bp, Zea Mays
caacgctgagcacccgcaggtacgcgcgtcgctcgcctgtcagaaggaagagacttgatttgatggtcaactttctgtgggtagataatattcgacaacataatgaaccgagagataccctggccacatgtgccagaggagctgagctctgaagcctacgatttgatcgacaggtgagagtcagagaacaaaacacatctgaaaaacttgtgctgcaaactgtacttgccattgatccgatcgtgtgctagctaggttgctgatggagaacccggtgcagagattgggcgcgacaggtgccggagaggtactcctttctctcgccgtctctccgtccaatacccccaccccctgcgacattaactgaaaaatgggatattagagcaggtgaaggctcatccgttcttcaaggacatcaactgggacatgcttgccaggcagaaggtacgttgttggctatactgacaaatcactgtttctttttctgtaggctaaacagtgacagtttcttccttgtcttgtaggtcgc

SEQ ID NO: 56832 - DNA, 573 bp, Zea Mays
aagaattggttacgaagaactaaagcagtaatccaacatactgagagaaccatatgtttggaaactccatctggagaaacaatagtagttgaagacaaccgacctccagctcagattggtacatctatcaaggacgaataatatatcatttagctagaaggagtatgtctcacgaaaaaatgtcaagttgttgcccctttcaagatttgtaatcgtgctaagtgatatatgaataaatttggagaatctttcgcacctattgtgttttgcctctttataaagaaaataaagtgtggtgtcatctgctatatgcaaacaatgtgatactctagttggcctaaagtcccgctcaagtctttctctcaaattgtgctcaaagaaatactcttggatcagaaagattatttggatatcatgctctgtaatttataaggttcaaaagatctttgttaagaaatatagcacctgtaatctctcaaagtatgatgaagctagtagaaatctgaaaccatccttgttccttaactaatcttatattggaaatcaaaattttgctctttatcttaatgtcat

SEQ ID NO: 56833 - DNA, 326 bp, Zea Mays
gctaccacaaagagtaccgctgtcggtacacatcgtagcgattggcgcccagatcagcgccaacacacatttttggtgactctgctagggacaagatgtaaagatctatcagatcggtcccgatggccggttcaaaggatagttccaacatctctcccaacaacattatggagccaacaatggagactctgtcggctgaggatcagcgagagttcgaggagcacaaggcgcagctgatcaaggaggcctaggcgaagttcctcgccaacttcaaggtggtccgaaatcaaaaagtcatatgacagtgggcgactattctggcttcg

SEQ ID NO: 56834 - DNA, 381 bp, Zea Mays
taggaatttcttgaactaaatggtctttttcatgaagtattggcaatgggtattatttgtagcttttaattgggttttgcatttttctctggtggtctacttcattactaatctggtaaaaatatattttctcactattgcacaatttttggcttgcttatgatttaattgaaatatggcttaatagcaagttctatttgtttaccctacttaaaatgatgggctggggtgtttatcatttttgtagtgggtttctagtggttacaagtccactaaatttttattaacaattttgaaattgttttcataattctaataattgtctttctagtttgattagtgcttaataaaatatttcaccttgaatctgttctggactag

SEQ ID NO: 56835 - DNA, 780 bp, Zea Mays
caaagagaagaggaagatcttgccaacaaacatcgacaagggccagaagaatgtgaaaaatcagaactaaaaactcaaccaaaaggggaaatctagcaaacaagatccccatggaaatccaaaacccgaggaaagccctttttaaatgcacttcaaagtcatcctcaaggagttgcgaaactgaaagcaaattgaaatgcagattcaaaaccaaaacaacatccttgagaacaatgctctcgttcacccgaatggtgccatgagaaacaaccttacctctttacttatccccaaatgtgatgtattccttaccaatcacggggtcgaggctagagaaccattttggagctttcgttcatgtggcgcaaacaaccaaaatccatgagccacgtgttcttcaggcctctgtcctgcatcaatagtaagacatggggtgagcaaatggcacagctgtaacacccctggtgttactagaacttaaacttggcatggcatcatacgcattggcatggttgtgttgtaatacacctagaatgcatttattaggcttaacaaaaactctaagtgtgatggtgtggtcagtggggcgcagaaaacctagtttgagaaactttattttaaccccaatagtggaaattttgatctagtaatgttttgccaaaagtaaaaatatcaaagttgtaaagttttccaaaccaagcaagtctcatgtgtggagaattccatgttttatagaagaaaataaataattggtttttgacctagggttggaaattctaa

SEQ ID NO: 56836 - DNA, 271 bp, Zea Mays
cgaggaggaggagcggagacttgaagatcataacaaggcggaggatgccatgcgcttcatcatggaggtggccatggatttagcactctggccgatgggaactagcagaccagcataagcaacacatagtggacaaggagaccaaagatcttgaagctacatttgatgctatgtacctggatgaagacccaagcaagtagtcatgagtgacagtgaactatgtgctgctgctacaatagttgctacctgttggagttctgtttatttattc

SEQ ID NO: 56837 - DNA, 798 bp, Zea Mays
atcaggatgcttcgttgttcgcaaaagtcgaagaactctgaggcagtgaaattagatcccaagtttgtgatgatgttgttgggtatcccaaatctgaatattatttcctgaataaactccactgcttttgctgaagttagagaggcgattggtttgtactctatccactttgtgaacttgtcaatagcgacgagtatgtgagtataccctccttgagcttttttggatggttcgatcatatccagcccccagcacacaaagggccaggttacaagaatagtttgcaactgctgggcgggcaagtgttgttgcttcgataggaactggcatgctttgcacttttgaaccaaatttgtcgcatccttctttgatgttggccaatagaaaccagacctgaaggcttttcctaccaatgtttttgatgctgcctgtatgccactttgccctgcgtggatttcatccagtagctgccttcatgtagccgaatgaatacatttatgaggactcctcctcacctcttctatatagcagaccccctatgatggtatagtgggctgattgccttgcgatgcgttctgccgcggccttgtcgtccgattcttcctcgttttttatgtatctgataattggctctctccagtctttgggatatgtttctgcttggcgtatagtgttgctttcttcagcatgctctatggtgacgcttggttgttgtacttcttggacgaaaattctaggtggaacctaggcccgactggaccccaattttgacaacgcatctgatgctgcattgtgatc

SEQ ID NO: 56838 - DNA, 555 bp, Zea Mays
gagggtaagttgttagtagaaagtaggatgtccttgtataggagcacaaataacatggcattaggttcactcaattcttttagatcccccttcctagtcatcatgactaatccttcttttcccggtgtcttggttattggaggctgtggagttttatttggctttggaaactcttccttgctatttttgtggatcactctcaagtggttctcgctctttcgctatttcttccttagatcatccttcataacttccttcggtgtcaaaggaagcaaatagattcgctctcctttatacaagaaagacaacttgttggttcttccaaaaatctaggcattacgatcatataaccaaggttggcctagcaacaattgacatgcttgcatagcgaccacatcacattccacatgatcattgtacttcccaacagaaaaaggaacattcaccacgtggctaacacgcaacatagcttatctttgatcatacctccggtatggaaaagatagtggcgctgtccattttcttccctttcagcagtcacacttagcactcgaa

SEQ ID NO: 56839 - DNA, 434 bp, Zea Mays
gctatttgaaaaatatcaaacaacagaacttgtatttttcctaggttcttcttagcacaagagcagtcattcctaaggtaggggtgttttcttcttaggattattttcttatgacttttcaaagttttctctgtttttcatgaataaacgtgagtgcaatatcttttcactggactatgtttcaacagatttttcttgtgaactacatcacttaggcatgctagcaaaaatatggttgccctctggtttccattttcaatcccttttcttcattttcctaagtttgagcataaacaagttttagtgaataaatcttccttaaccttgtatactggggtgtttattaattttaaacagtgtaactactaggtttgtgtctccactatttttttcaaccctggtctaacaacatttctatctttttcctttattat

SEQ ID NO: 56840 - DNA, 735 bp, Zea Mays
atgaggcttatattacttgcaccaaagtgctcatagtgggggttacaagcatggtgggagaggggaggaccccaagtccctgggagtgattaaggcaagtgccaataccgtatgagggataatactactcagtgtttgccatctccccttgtggagccgtcgactgtcctacttataggccaagggagtgctaacttgtagacgagatccgactacatgttgtgaaggggcgtcttcataccctatatgcagtatggccttatactttgtcgttgactggtgctgagggtcaaggatgaggttgagggctcggtcatgtacccgagcccccctggcatggcgttgcccatacagcagtggttgacatagtgcccgtcacgggaaaaagcttcttatgggatgcgtcagctctactatttatgatgacgttgggaacgccctttgtcgtagatattgaggaagaattgagcttgggcgagacataggtttgtccaaggttgcgaccgagccttgtcttgagatttgatgacgcgtgccacaatcgacggagtggccttccacgtgattcacgggggagcaggtagcgagggccgggttcgggcgaggcagaacttgcgctcgaggtcttggtccgcatcctgtcatattacgcgtcccgtcaagggctgtcaggtggcgtgcgtgcacataatgatgttggtgaatctgtgacaagactgtggtctagttgaaaga

SEQ ID NO: 56841 - DNA, 1687 bp, Zea Mays
ctattgtgcagctttcgtcttctgcgttcttttgtgccctcaaggcattgctaagaattaagccctgcaagaaaaagaaagaattaagcataacaatgaaatacttcatttccaactttaaagttaacagcttttgtacctttatactgttgtatgcgaggctattcgcaaggtcatccttcggcatggcggcgaggccagtttcgagcttcagaaatcccatgctcttggctatctctcgacaaacggatatctctttgttgtccagaagacagtacaggaaatcatcttcgtccgtgccattgaacactaaggccccctttagatattttagtttccgggcgtagtgtttggcttctaaaatttcttcttcgaataatcttttccccgaagcatgtcgaataatgtaatcaacatctacggatggggcttcgggagcaggagatttagctttttctgtcacatcctgccccgctgccatgccggtattcagagtttgttgctcagccttatcctcagatacgacaagcttcgtctcaataggcactgaaggcccagctacggcagcttcagcaactttctttgtaggagcaggagtcaaggcttttgtggtctccatgacaacgtctagcacgctggccattctccttctcttgggagttgtggcgggagcctttgtcaccttcggcaattctgcctctaccggtgggctcagaattttttggcatcatcactgttttttccaattctgactctctggccgcatcatctttggctttggctggcccgactataggcaccttcggcactacagtagatccttcagcgctctgagcgtcggaagcagcttgttttgcttcggcagcggaggaggtcctttcaccaaattcaggcactacgaccgtttcaatatattgaggccagtgggttaaaacctttattttcttgcccttcggcacaacagtggtggccgaagcggcagttttcgtcttttttccttgccttctcaaggggtagcagtaaacaggatatatgaagccaattgcatcaaaaaaccctgttcaatcttttcttgccccgacccccgaaggctgaggacaaggcatcatcctcggctctggtatatgtaccaaccaactcgtcgctagtagcctcaatgcatttcaaccagtcatcatttggttcctcaaaccgatccctgaatctaaaggtatatttcaattgaactagtccaccttcgctggattcagcagtagtctccttcggcatctcccagctgtccacatgtggccatactctgtaggctatgtgctgttgaattatgtctcttgtgccaatgaaagcacagacattgctaaaagccttctaacacgcttcggcatcacttccagtaaccactttcggccttcaaaggccgaagcgagaccagatggggcactggataatttccttaatatcctccctctcaatcagattattcttaacataaaaccattcctccatccaggccccgtgccatctttttcggtatgtcggaaccggatagcttgcattagagcgagcaatgaatccgtaacaaccgaagttgttgtgatactgctccttgccggtggcctttgtcttgtacaaaagttcatgcatattgcaaaaacacttcgtgcttggttccaacccttggcttcttaca

SEQ ID NO: 56842 - DNA, 589 bp, Zea Mays
actctcttactatgatttgttagttatttgatgaactaaaactttgtaatttgatcatatctaaaatttgcattttcccccatgacttctcccaattaccctttatgcttcacttggtttacttaggatttattagggtttgagagtctttctccctcaaggttcatgacaagattaaggagagttttaaaaagattcatataaacatttgctctaaattttcttttgatgttcaacctttcactagatttacatgtgataataggttggggttagcttagggaagaaccctaggtgacactggggtgtcacagagccccggcgcgctccacctgagcaggccgcgcaccaggttaagcgctccctcagactggaaacagtcagggtgaccaaatgaagccatggcatgtgcggtggcgtgggcgtagagcagaggagcaagaaggcaaaggggcacaagcgattgggagagaatgcaaaagggtacctgctgcacgcggggtgaatcctttttcaaggaaaccagagtccttgttagggaaactgtaacgtcctgaatttggggtagaattttttttcttctttttac

SEQ ID NO: 56843 - DNA, 512 bp, Zea Mays
taaaaatcggtatgcatcatactatataaagtctaactatttgatatatttaatatcgtaatatattacatagtaacaatttcatagtatacacttggtatatatcaaacaaaatcaagcagttattgtaccgagttaaactattaactagttctgtggtctatggatcggattgaggtgacgtcgcggaggacaacggggagcgactcacgagccaatggagtggcgccacgatggccgaagcccattaacatgctctataagtatatgagaaggggctagggttagagctctccaccacacgtgcaaaccctagtcgtcgccttcctcatacctagtcgtgagacccacgctgcacgcgtcgtgccaacacaccggcgcacgacgttccttccctgtacgtgtggactacatggagacgcaactgcgactcctacgctaacagactatggatgaggaggagacgatcatgattggctacttcctctccatcgacgtgcgcctacgttggc

SEQ ID NO: 56844 - DNA, 606 bp, Zea Mays
tggcacgtcaactattggtctttggtaccggcagtgcaccacgggatgtatcacagggtgctttttatggttggcgaaatcgattgtagcttgatggttcgcgtggaacacgacatgacacaagaattatataggttcaggcaagcagaaggcataaatccaacatcatgtgtgttgcagcgattgtattgctctgaacccgaggttataatggtgccctggtagcttgaggttttggtatggaatagctatgagatgggagctactgataaatcgcaggggtttcaatcctgccttatataggctgacagattcagggttacaagtcggttttcttcctaactactagtccatgatctcagggtttgtttttgatccacgcgtgagtcttcacacctttgaaacaaacgctgctttgccttgtccacgccttctcaccgtcttagggtctgagttggtcgatcaaactatgaaattagccgcctgacctgcttaggcccttcaacggcccatgtactgaatccacgctatgaggacccaggggatatctatcccccacaggaaggatgagctaattaccttgattgatccattcttatggacacg

SEQ ID NO: 56845 - DNA, 422 bp, Zea Mays
gcataaaacaagcataagcataacttctcaatgaaagtgtacctcatttcagcatccaccaacctttgacttagataagtcaccacatgctcctttcctccggtttcttgtgtcagaacagccccaataaccctgtcttcagctgcaatgtataatcggaatggtactcctacttgcggtgcttttaatacgggggccgaagacaaatattttttgatgagatcaaatacttcctgctgctctgcccccaagcgaattcggtatcattcttaagccgaaggataggggtgaaggcatcaatcttctcggctaggttagaaataaaccttcgtaaataattcaccttgccgagaaacttctgcacttcgaccttacaggtcggaggtcccacattccgaatagacttgattcggtcagggtct

SEQ ID NO: 56846 - DNA, 463 bp, Zea Mays
gccgggccgacctgctcccgcgcgggaaaatccacgcgctgctcccgctcggctgaattgcgaccgtcggggaactgggtgcctacaggtccagcaaggtcaaaacccatctctcccgcatgcctatttcatagattcgagcctcccttcctcttgtccactgatttgcgaccctgattggcgcctgctgcccccctttggtcctccctcatctctgttgattgattcacggtttcttccctttctcttcatacagtcacagggcaggcacataagcatttcttcctctccttttggcttccctcctcttgggtgtgcactgcccctgctcttgacttggatgtgcactgcctctactcgacttggatatgctctgcagttcgcatctcctctgcagctctgtttccctcctcttctgtttctttccccgtctttcctctgcttgtgctttgttatatagatg

SEQ ID NO: 56847 - DNA, 689 bp, Zea Mays
tttcacgaaatcactcgagggcttggggttacacctgccagatgcgtcacatgcactcggatgactaggataactaaaaccaacctaaaaactttggcagacaacatcgtccactagtgtcaaataaaacataaacaaaaccaagaaaaacctaaaaggagaagcctcgaccgagttttacaaactcaactgatggcttggggctactaacatgtacccatactataggtatctcaagatggtccaaaatgctctaagataagagaaccaccaacaaaacatggcttacaccaaagacaacccttactgggtcagctctaaccatgtaagccctggaccatagtagccctaacctggtcaccccaaccaattctacccttgaccttagtagccctaacctgtttatcctgactaggtcagcccccaaccaagtcatcttgactaagtcggctcgagaccatagcaatgcacactttaccaccccgaataggttagtcctaactatagtagcaccaacatattcaccctaactgggatggctcttgaccatagcagccccaacctagtcaacccaactaggttggctcagtcctcagtcgccttaagcggcctcgacctggtaattctgattaggtcagcccccaacctcaatcactccaagctaaatcagcctaggtcgtacatacctg

SEQ ID NO: 56848 - DNA, 448 bp, Zea Mays
tgcatatgttgttcttttgaccgcatctgttatttgtttgatcattgaataacttcagttaaacacttatgtttcttagtgcctcatataatttcaatcgatatctctcttgatatgcactaagttaaaaggagaattcatgatacatttatgcaaattgtgatctacttgatatataataataatgacttagaaaaggatcactagttgtagaaccctctcttgtgcaaaatatttccatacattgtaagtcttaaataactaagactaatgacaaagcacaatgaagagagcatctctatgcgaaggtacaaaagggtaaaactacttcctctcacttacacatgtacctaaatcttcctcttctatacattccttgcatatcttgtataaaaggaagagaaagcatgtctatgcatatccctgcttcatacctagttaaaacctg

SEQ ID NO: 56849 - DNA, 455 bp, Zea Mays
cgaaggggtatggacggtttctggccgtcagatttcgcgctggcggtatggattagatctgcgcggatcaaaccaagagcgccgcagaaccatccgattggggatcgacggcgaggattttaaatgctaggatcaatacgcgcccgtccgtttatgaactaacggcagggatccgtcttaacgaaggggtacacattgatctaatctacaccgttccttttgcatcctacggcccatgtgctccttctacctccagacggccaagcagcggcggcgcggcaacaaccgcgaggagcgcccctcggcgaactccggacgggtccctcagatccccaaaatcgtcgcagaaagaccctacgcaaagctgaggcaagtgcgaaatcagtgggggaatctttaccggcgtcgaagtgaaggtgatgcgcgcccacgaactgacacggatttgcggcggc

SEQ ID NO: 56850 - DNA, 975 bp, Zea Mays
attttatgaatccaggggctattgcacaagattccaggacctgaattaaattcttcacaactacatgtggatggtagtttaatttcaaataagtggaggggctctttagagagtggtgcgtctgaaggggtatccgttgatctcagccataggatccaaacccacgaccacgattagatactccatataactgaacttgcatgaaatcgtagccgctggatcaaatatcaattgtttgcctttaattaaatgagattcacttgcatccgttggattgtcgatctatggtctagatatatatgtaccgaaggggcatgaacctacctaatctgagtcgttgagccaaatctgacggttagggtaatgtctccaaccctcttctccacccccaccgcaacaggacgtcgccgccacaccatagggcggaagatgccggcgaggaagtccccagaccctccggtgctctaattcgtacgctactatgctcagaatagagaggggtgcacggcgaacacgagagagtaccccttaccttggaatatggtgaatggtgctctgcccacggtgagcaccgtcaaggttgttgctgaccagtgagcaattcaccatcacccaattgatcatgcgcctgaaatcctatgcacgctcctttgttgcgctctagtgaagatccctaggcaactgttgcgaccaaaatattggtggagacaaggaccaccggcggcttcctttcttatctctttgtctcacggcgaggatgcaccctagttatgggtcgaggggaaggcatgttgttttatacccaggtttgagggacgaaatcggttggtcaaggacgagtttgttacgatccttacatcctctccagatttcggtgagtttgttataggagaccggcacgatataaggagatggcactaacgactttgccccacttgaagagaaaccccacgagcacgagagcggatagtccga

SEQ ID NO: 56851 - DNA, 329 bp, Zea Mays
ttaacgttaaactcgcttttagcgcgcgggacaggctgtcacagtaaagtccttttactgggaacgaacgctgacgggggcgtggccggcgtcgcgacaccgacgagcggggcccggcgaaaagcaatgaattgccaaccatctgcaacgtccgcctctggcaatggcacgcacgaccacactcctctgcggccctccgtgcgatatcccaacttgagtcctagccctgccgctgaaaatggtggctctattttagatctgggagaggtcggaccagtttggtatctgttcgaccgttcctctctctcccactcggtctggaggagcac

SEQ ID NO: 56852 - DNA, 819 bp, Zea Mays
caaacaagagcaggatagggaaaataacactctcggattgaaatggaataagtgaggctaagaaataggtaaacatcatggtacatatggagagaggtcaagggtcaaaggtgataataggcaaggatataaaggaagaggtaaacgtgcaaaaaaacccaggaatctaggtacaatcaagaatagagataagataagtcttgcaagtggtaaagtataggatatatccatgggtgagataagtaagagaccacgcttgaactaaggtgggagattggaggttttagataacgaacataatgtaatcgccaaggtaagattgagagatgagaagggtaaaggcaataagaaacaaaagcacaacaaaggatgaggttacaaactcgcgagccaaagaagaggatacgaccaagagagggaaggtatgagacggaagaggggcgattttaaagggcaggtatgagacaaacatcaatgtaggatatagaggtgttaagggtgcatatgataataattaaaagcatgacaaaggatatagttaaggcaagactcacgaaacgacaaggtggggaaaacaatcaagggtaagataggtaaggttccaacagaagggttgaagtaacagaaattattaccgagggaagttatgaggaaacagtgagatcatcaaggatgtgtgaaatagaatggtcgctcagggaccatcaagaagcaagggtgatcaagggcatattaaccgaaaggttttgaacaatcattgggatatgaaggtaagcatatataaaaatattagtatgcaagattccaatggtacgggcg

SEQ ID NO: 56853 - DNA, 312 bp, Zea Mays
atcatgtgaaggcattattttccttgcgaatgggagggtaagcgagtgtgccctcctatttagaaaaaggggtgcatggactcgatgtgtgccacctgcttgcttggttgcctatggattggcggctctcccttcacgtcgtccgctattttgaggatcgtactcgccctcttcgcatcagggacctgctcgttgagtgtctagaactcatccatagctcttgagcgagggcgcccccctcggtcaagtcaaagtattcgatgtcacattcatacgcatgttgcgttgtggtgcccatagtgatcgtccccg

SEQ ID NO: 56854 - DNA, 580 bp, Zea Mays
tgcattgatgattttgatataacctttttaaaaaaaagattttttttcgttcgaggaagcaagctaatgactattttcaactgcaaggtgttggatgcatatgtaagagtaacttcaacagttctcttgggaaaaagtcctaaacttatgaatagcaagttgctaaacaactattgggagtaaaaaatagcttgatctctaacatttcctcatatttagagaatagtttgattttgaatctagttttgatagacctactcctgtcggatctaactaatggtatggtcgagggtagtggacatcgatggtagatgagaaggtcgtttaacacgacttgttgaaaagtgatagtccggcagcgtgacctgtgggtgagcagtggtttgacaacggaggagaaggttgtctcacgcgacgaactgcctcactgcatgaaaaaaaagagtacgccggatctaactacctcgttatatgggaaagtgaaaaaattaacacgtaggccgcatttaggaagttgctatcgagttaccaaatctagacagtactaaatagtattagatagcaagtaactaaatttagc

SEQ ID NO: 56855 - DNA, 354 bp, Zea Mays
atcaaatgtcgcatctccttgacattctagagtggctgtggagtttgggattcaccatggtgcattgatgaccttcgcccttgtgcaacttcactacagtgaccgccttcatgaggttgctggcctacatgccgagacaacgtcagcaaacttagaactcctaacaagcggctttgacgtcgcggcgaacttcatgcttggggtgatgtcagtggaggaaataatctgtgatctcccgtaatcttgctttgcggctcatttattcctacaacgtgtatgatcattgggtccctcggaccccggttggtcctaagctctatcatggtccgaggggcgctatacgtgcaacttttt

SEQ ID NO: 56856 - DNA, 749 bp, Zea Mays
ggtatctgtttttttctgcttaacatcatatgtatgatcaacaattatagaaggtaacatttctgttcaacacacttctggaataagaatttgttattttctagaattttcagtgagctttatatatggtaggttatcaagagcgaaacaaactcataagttaattgtgccatttacataaactgtaggctcgagacgtcctttcaacttttattctttgctgctcttgtttgtttatcttgaatgtatggtcaataggaatacaaatgtttatttgtagtatgcttaatatacttttggtaggcagttctttcgactttcaaatttccccaatgcgcatgcaccagatattccccaatgcgggaggttttggctttatggagacttcatgttcatctcttttgtcaactgcacctgaggatcaacccgcacttagtatatatggtcccatgcagtcagacattaggtatgcacacactctctaatgtctgactaggtacgtgcccatgcacggacaactcacaatttgtagcgttaggtacgtgcacactctctaatgtctggcaacaacaattaattttagtagtgtgcatctttgtagtacgtgcacactctctaatgccagatctaggagttcgacgcctccgcaagaaaaacgacgacgtcgcctgcgacactgcacaacggctcagtcgaggcacccaatgcccaccggcaccagtgagatgaggtaaggactgcagagacaa

SEQ ID NO: 56857 - DNA, 458 bp, Zea Mays
tctcccctccggccctcacgattgaaatgtcacgaaagtatctgcctctcatcgcttcgatctgcctttgtttaatagtcgactttccgaaaacaacatggctcggtctccatgaccgatcttcgacatcttcatttccactttctacgtcaaaactctcactatcgctggagttttcagataatccagccaacatctcattggtgattttctccatgttggattttttcatagcttcgtaaaatctggccagcgcggggtcaatgatcttcttctcctcagccatttagacaatggttgctaaaatgtcgaagctcaaaattcaattaaattcgacgaagcaaggtgaaaaggaaatagggttaacctttttctataattaattttggtggttgatcgtcaacacaaacacatggactaactagtttgccaagtattcatgtattacaggtgcataa

SEQ ID NO: 56858 - DNA, 692 bp, Zea Mays
aaagtccaaggagtaatagtgaggtatgacatgtctagtttatgagtatcattaatccgatgttctacaataaaatccgctatgacctggcctttcatagatttcaatggttcataggccaagtcatattctatgagtgcataagcccacttaccaattctaccactcataattgggttatgcaacatgtatttgatcacatcggcttgactagaaatagtgcaatgactagacagtaaataacatctacacttggtgcatgcataaaataagcataagcataacttctcaataaaagtgtaccttgtttccgcatccaccaacctctgacttaaatatgtcaccacatgctcctttccctcagtctcttgtgtcagaacaaccccaataaccatatcttcagctgcaatgtataatcgaaatggtactcctacttgtggtgcttttaatataggagctgaagacaagtattttctgatgagatcaaatgcttcctgctgttctgcccccaagtgaattcggcatcatttttaagccgaaggataggggtgaaggcatcaatcttcccggctaggttaaaaataaaccttcataaataatttaccttgccgagaaacttttgcacttcaaccttacaggtcggaggtcccacattccgaatagacttgattcggtcagggtctatatctata

SEQ ID NO: 56859 - DNA, 317 bp, Zea Mays
cagcgtggagagagatggctagtcggggagagacacagagacacaacctagacctgcgaccatacgcggagccgtgcgcccatacgcagagtcgtgcagagccaaaattttaggctccacctcctagccgtatatgagctcctgctgagatgttctaggacatggcgtctaggagagatccggcaaagagccagagctggagctgcccggaagccctcccaaacggccccttaatatgctgcaacatatagctatatttgctatggctatgtttatttccttataggattatataatccccatagattatataagta

SEQ ID NO: 56860 - DNA, 642 bp, Zea Mays
aacaaatacaccataactgataagggatgagatgtcttagcgcatacgcttctacaagcctgcacaatatctgattcaggttcaactgagcctccacgtactccctaaggatcataaagttcaaacacaagttttaagcatctacgcaaatatcacgtcgcatgccataacctaagccatatttagttacctttccaaagtagcgttgcaacaaaatatccttcacgacattacccatgccataataatacagtaaatttgacattatctaagaaataaaaatgtcagtacataatcattattctgaaggaaggttctttgaagctaaatattgaatagctaccttattataaaacaactcagaccatgcctaacttgcttattcaatgcattcaaaagcaactgcattgaaaatattttgggtaagttcaaagcttgaactgaaatagagagaggagtgtgtaacctagtgtcaaatacctcctcaataaagatatgcttgtcagtaggtgacaactcaagatcagcaggcataatgtcactcagtagattgtgtgtatatggatcatcatctatcacctatgtgctctccgcccgcggaacttcaggtgagctcgtgctctttgtgcgtcgacctgaaat

SEQ ID NO: 56861 - DNA, 887 bp, Zea Mays
cgcttgcccttgcgccgaccagagtgatggtcacgtgggctagcctccttcttgcccttcttagggcaacttggtgaagcatccatcccttaacccgatacgctgccagttctagcggttgttgtggaaccacatgaaccggctggccacaagcgccagctcctcatccccgaggctctccacctgctcctctataagagtcaacaaagaagagaaagaaaagatagcaggtgaggggttagaggaagcaccacctctagagaccagggccatggtgtgtgcactagggttctcaatcttggcatgggtctggtggtcaatcttggtggacttgagcttgctgaagagctcgtccaccatcatagtatcatagttgggcgactcgacgatcgccgagaccttcgcctcccaaaccctccgatctagagcacgtagcaacttcagtgctctcttatgatcatcatagggaagttgtgtcttgttggcacgcatcttgtagacaatctactagaaccgagaaaacatcgtgttaatggtctctccagccaactgcacaaagttctcgtactcttgccagtacgtctcaaagagtctagtcttcacatgatcattgccctcatggaatttctctagggtgaaccaaatctcgtgaaccgtagccagatgtccaactcgctcaaactcacctagcaataggcactagaacaaagcgttgtgagctttgttgtttgaatcatggaactccacttgaattggagtgattcattcacttgcagcattgaacgcaacatcgagcaaatctcccaaacttgatacccaatactctaaagaaacacagacatgcaaatcttccagtatgggtagtttgtcccatcaaagaatggtgg

SEQ ID NO: 56862 - DNA, 805 bp, Zea Mays
aacagttccatcggtaattccagaaagagatccagaagaactccatgaaactatgagcattgcctggaaagacaaggcatatcttcttaatattcataaggagaaactcaaaaataatcttcatgcacttcaggagaaagaattacctggaaagcaagtataaaaaacatccacattcgattaaaacttctaaatatgtgcagaaatgtgcgtacttcaacaaaattggtcttgggctttcttgccatgccgcactgtaaaaaaggaaaaatagtttgagaagagcacctggcataaccatttggtcaagtgaacatgaaactcttctaatttctaatcgtgtttaatggctcctttttagggaaaatctatgcctgggaagaacgctaccttaatgtttccatgcaattataaattcatctgatgtctttgaaggatacatgttagcatgtcttatagttatagtagaagctatacggttctgatgttctccctcagtcccaaaataaacacacttctagcattcaaaatttgtcccataataagtgattttttaggctaccgatcatctagcactattactgtttcctactctctacttccaaagtgtaattattacttgttactataactttggatagggttatatatgtaatttatactagcattggtctctccacccacatcctagaagtgcacttattttgggatggagggagtattattttttatacaaaaggtgattataatatactatatgcacctgctgcttaaaatagctctaggatagtactgatggaactgc

SEQ ID NO: 56863 - DNA, 337 bp, Zea Mays
tagacatatcaccttcggtaatggtggatttcccaaactccaggtggctgggtttagatggcacggtgctataatcatcttcagattcaatttcctcagcatcaacctgctcagcttcagcggcaggtgcatcctccgatactaccagccctgactgtttcatcactttagagattggagcggtttcggcaccttcggcttcctctccatcgcgagtaaccctagctgttgagcgtaccctagccatctgatgattgaatttcttgattttttacgaagttgaaaattcttaactttgccgaagctctttcttgttacgaagcttgagcaaaatgaa

SEQ ID NO: 56864 - DNA, 1103 bp, Zea Mays
ctacatcgggtaggggtgagacttttgcacgatcttgggctccaaccatggtctctctagctctagacattgggatgtacctcaaccctcagaaccatgctcaagagccattccttgacgttaacatgaagtgtcgtgctagttgctagaacaacaccatgaatcatagagcataccatggacctgcacaatgaaggcctagccccctagccatagttccttgtttggccccctacatcacatgtaaaccatgggcctacccatttagatctaggtgtgtggccctcaccctcgcactttgtttggtggcttatccctataagttttgcccccatctcctgaagaagtacgatgggacaattaacctcgttgagttcctatagatctatgccaatgccattcccattactaaggtgatgaggaggtgatggcaaattattttcatatggctttgatcgacttagtccggtcatggctcatgaacctctccgaggcctgtatttggtcttgagaagagctttgctggaagatcgtgactaacttcgaggacacctactctccgcttagcatggaatctcacctccacatagtctagcacctagctagtaagtccatggatacctttttgcaacatttttgttaggttaggaacaccattcctctcatcttggaacctccattttagtcaccttctatgtgatgagaatatgctcaagacgctgcccacccacaacatctaggacgttggagagcttctctctctagcaggcaagtgtgcacagggtgctaagggtagatcatggcacacccactttgagatgcatttagggttgcaaggcccctatacctcctaaactgagcctccaaataagaaaaagaagagcaaggctttggggtccaaaaagtttgtgttgccacaaaatatggcaccacctggtgcccaagggaattgaaaagtacttcctcattcatagtcatggcctgactaaatgtagggtagtcagggatctggctaacctcttccagcgccctaactataaatgccccaatcaatggggcttgaagcaatgacacctcaaacaacaatgcaaaagcgaggccta

SEQ ID NO: 56865 - DNA, 530 bp, Zea Mays
ctatctctgtgatgcctttgttagggcaaggccatgaatgaccccattctaccatttttggtgcgaacgtcaagtgacaacaacccctttaggaaggtttatttctagctccacactaggctctggtgctaatcctcatacatttccacagatctattagggatatggaagccttgaaggacattttggatgtacatctcggtgtgctagagcacatatctcattgaaacccttgttagtgataccatttgttgccttcctctataacaattctaatgtgctaccgaacttcttgtagccctgtttacagtttgggtacaataaagttttatggtcttttaacatgcgcttcagtgttttctaacatttccattgtcatagtcttcctcttcatcatgcaatatttgtgctagagcattgttttctataggatctttagcctcacccattacaacatctacaaaggaactgtaataagcaatttggaattgtgtcgtcatcctcttcatcatcctttagacctctatttt

SEQ ID NO: 56866 - DNA, 926 bp, Zea Mays
cgacggcggacggcgacgagcatgtctccagcgagcctataccggccaagatacgcaatgaccggcgctctagcttggctgacacctaattccacccctggcgaccttaatccctcaactaattgcactaatccgggatggaatctctctgtccacgacaacggcgaaaaccgagaataatccgatgtgttctgggtgatccagggcagtttagttcaattaaacgggtctacgagtagcaggggattcaagggaggttagaacagcaagcaaagaagcttgaaatgacctgtagaggactggccacggcgacgtgttcacggtggcgcggaaacccgattggggggaagtttggaattcatgagctatagtggctaatcggaggcgatggctggtgcactggacgtgtaacaacctaacggagctcactggggcattgatttatagggtccatcagcggtggcgcccaatttgaaggaatcgcgctggcgggcgagaagaggggttgagtcactgcggcggtctaccatggcggtcactgggtaatgagctacggtggtcactgggtaatcaccacgactcacaacgacgtggtaagacatcctaaggcgtggtgcgaccgggtaaacggcggcagccacggcgaagaccatgcaaccacgtcgccggcaagtgggcacgacgacagggcggccacagtgccccaaactcatccacggtgaagatcttttcactatcgagcgtaatccactcatccaaggcacgaatcgtggcagccggcgtgaatctaggcgcggaggtcaccggcggcgaagtgcagtgaacctgaagatcttttcgtgcactgtaccatggccatcatgttcagtcgttctgacagcgcgatttgaggagccttgttctccattttccatgtgacaacttac

SEQ ID NO: 56867 - DNA, 823 bp, Zea Mays
atctaaatgatccaatatctatagattaattaatttggcacgacttatgagctaaaacgaacgttttgagtcgttgggtgatttgagccttggagtgtcacgagatctggtgagccccttgtcccataatagctctttacgaaactttgtaattattaatttgagatatactaatgttaaattacctagtgtcaagcaccttctctagacagggctaggagaggcccatgggatgtaggatctcgagagcggtgatccagatagatggatcctgcggtagctttctatatcaggattcttgaatgcgtcttgacggccatcggcaagctttcctggacactgacaaggtcaaggacccaacatgttagagccaagtgagagttgtctcaaacgatgccgcctctatctctaaggttgcatgttgtcactatttgtgtccctacgcatgcggagctagcatactagcatcacgtcgtttcatcgccgcacacgtgaatactatgaagactctgttgttgctgctatggtattgatcgacgataaactttaggagcatgaatgagtgtgattctgatgctggtatgcgaggatgtaggactatttgtctatattgtcaccatgttattcccctatattgtatatctaatgataatgattgataatcatgtactcataaattataaaaacatgatagatatgctaatgcgtggcgtatctattttgtaacataaatcatggaagtagccatatacaagtacaacacatatgtccactagtatatagaagctttatagaggctgttttgaacctatttgtattggcg

SEQ ID NO: 56868 - DNA, 644 bp, Zea Mays
aacacgagagtgtcatggacgccactcagggacagggctaggtagggggacactttgacaaagggctctagggatgggggcatcaggaacaagcggcacggggcacctaggaacgcgatgtcgggtagaacaactgacagacctcgaggaaaagggtgtcgggcagatgtagatgcggtgcgagagcgttgggcaaaacaagcgagggactcccgaggaatggggcgtggggcagatgtggtgtggtaattctaaggaaaggggcatcgagaagatgccacgcaggagctgagacaacaatggcaacgacgttgggatctgagagggtcaaagcatagtgagggaaaggctcacaagcacgactaaagaggatgaagggaaggtagatgaaaaggaaatgagaaaataatccattttaataatgtattggtgattaatgaccaacgcaacatattgggctaactagttggctaagtgtatgggcgcaggttcactcaagtgcaaattgaagcatccaagtccaactgagctcaaacaaggctagaaagtgcaacattttgaaaatgaaaaaataatgaagtttgaacctttgaatatgtcgtgtacaccttttggtaggttttggcactttggtttgctcgcta

SEQ ID NO: 56869 - DNA, 1097 bp, Zea Mays
aaaaagattaaaaagtaatgcgctcaaaccatcccaactcagcccacggatagggaaacgcgtgcgcccgcgcccgcgatgtcaactttgcacagaggacctcggctgattgaataaccagttaagaacccttgtgcactattcattgtctctctgacattcacagttaggccctcagagttctatttctttaccgcgccaagtccacgacggtgaacggtgacgaacacaactccggtgaacttgtactggccagaaaacgcaatggctaggcttctgctttgttcgacacccaactccaatcctggcgaccctaatccctctaacaattgcacgattctagcctggaatccctctgtccacgataatggcgaaaaccgagaaccacccgatgtgttcttggtgatttagggcagtctagttcaattaaacgggtctacaagtagccggggacttaagggaggctagaacatcaagcagagaagcttgaactaacctgtagagagctggccacggtgaagcgttcagggcggcgcgaaaaacagaattggggaaaaaggaaattgggatgctatggtggacgatcaggggcaagagctggtgcactgggtgcataataacctagcggacctggttgatcactcattttatagaagccaacagcggtggcgtccaatttggagaaggtgtgctggcggccggagagagggggagtttactgacgcgagctatcatggcggtcacttgctgaggagctacaacggtcattgttgagttattacggctagcaatgacgtggtgaaagggtccgctcgaccatgttgccggcaagtgggtacgacgtctgagcaaccacagtgccccgactacatccacgacgagatcttttcaccaggagtggttatccgcacgatactaggcgcgaatcacagcgccagcacgaatccgggcatggggtcaccggaggcgaggtgcactgtacctgagatcttcttcaggtcactgtaccattggaactccattcagagcgcctgacagagctaattgaagcactttattcttcaatttttgtgtgacaacatgatcatctatcaaca

SEQ ID NO: 56870 - DNA, 340 bp, Zea Mays
ttgttacgaagccagagcaccaaccctctccctcgattagccaccatagctggagaatttcattcttcccccaaatcggccgtctgcgccaccgtgtgtcaccccaccgcggctagccgctctcaggtctgcccttgccctccttttctgtgtttcagcgctcttgtgtgcttgtgatgctcgtcggcttggccaatttggctataccatgctagaacatcgggaacgcgtcgggattgtctcaacctccgcgggtgtgcgtggaccgagctctagggcggtgttcaggttaaattagtgactcccagtggatcgccaaggttagaattaggcgtagacc

SEQ ID NO: 56871 - DNA, 689 bp, Zea Mays
cttgacggcaattgaagtatcaagcacttccctcttgacccttgcttgaaaactgttctgtggacttgtttcataaggccttagttcatgctcttgtctacaatgtccccatacattacatacatgacttctctgttcattttcagttttaaatgtctattttcatggtctagtgtgtgtttccatttaccattgtgccattgtcatatattcacatgttggtactttgcccctcgtccgcacaatacaaatgtatgcatgtagaggattattcggaccaaactgggaccaaagaagcatctcctggcctgaatcgacacatcagtgtcttaatatcatcagatggacttattccagattcctcacgacatttaaaatgtctatgcaagaagaaattacactttcgatggtgtgaatgggcattcagaacttctgagaatagactcatcataccatggagattgcattgaagttgtttcaggcggaacaccacattctgcctcggacctccacagaagcctcaatatgtgcaactgccataaacaattcatgcagatttgttttcttctttcagcagggaataaaaggtgaggtgcactgcctactacattatgtacgttctgctctactttatactctaaaagccatcctctgccttatattccgctttgtcgtcaagtacaccgtgc

SEQ ID NO: 56872 - DNA, 558 bp, Zea Mays
ctgctcatctggcctccctgtatgcattatgcattgaccatgcaacggctctcgattgggctctcgtttggttgcctgcttacacaatgccaaggctacatccacggctgcagctcaagtcaaaaacatttgttttggttgcatgcacagatacacaaagagcgtcccgtttctagcggattaggcttgcataagctagaccacacttacacatcgaaccgatcaaacggatagtaaatttagcattgcttcgcagcgctaccatacaggcgccgaccgtcattggattttcttgaaaattatacacacgtacgtgggccccacgtggcctatttaaagctcggtaggctgttctggctagacagtgtaaaataggagacgtagaacaataaaaatataaaataatactgtttaaaattgtttgtggagtaaaatttaaaacaatagatagataatagaatacaggacggccgagagatttccttcgtccttcgtctgctggccgccgccgcccgatgttctcctcccctggttagttgcagcggcagcagctccgcc

SEQ ID NO: 56873 - DNA, 345 bp, Zea Mays
accaactcctgccgagcaaccatgcgaggcgggcaggctgaccaactcctatcgagcacccctgcgaggtggatatgacgacccactcccgtcaagcaaccctgcgaggtaggcggtgcgaccaaatcctgatgagcaattctgcaaggcggaggagcaaatgcccataacaagggctagtacatatgtgggtcccggtgacatgaccatctatcacacacacaataggtgcatgcctgtacctgcctgacatcaggacacgaccagcattgttgacccatgccaaccacgataaaggcacgacaccatcaaatatcgtcttggctgacgctacgacacaccaag

SEQ ID NO: 56874 - DNA, 667 bp, Zea Mays
ttgatggggaggactattcttggtggagccataaaatgcgtagtcaccttttttgtctctccaccctagcatttgggatatcgtcgaaaatggaatgcaattgctagatagtgatgttgaaaattataatgatattgatgctcaagaaataatttgggatacattgaagatcgctcatgaaggcaacgatatgaccatgatcaccaagatggaagtcatcgaaggtgaactgatgtggttcatcatgaagagaggagaagagctagaagagacatacaacaagctcaagaccttggtgaactaagtgtggaactatagaagcaagagatggatagatcatgatgtcgttcgactcatgctaaggtcatttacagttttagattgtaaccttgtaaacttaatctgtgagaaccccaagtacacaaaaaatgatgctcgaggaagttctttataagttcgtgagtcaatgaatgatggccaaggaggcaaggtacatcgccgacaacgccaacgagagcccccactacaacgaacaacaacccgtcactctcaaagcaacgaacgttaaggaggtgttcccgacaaggtggtgcaagttgaggtggtcggtctcagtgaagagaagatggcgcttgtgatcaagtgttccaagaccgcagtaaagggg

SEQ ID NO: 56875 - DNA, 584 bp, Zea Mays
cgagctgatagtgtttgcttgaatgtaagtgtggaaataagggggatagagtttcccgctaacctcatagtaatgggtactcagggaatagatgttatcctagggataaattggctagataagtatcgggcagttatcagctgtgataagaggacaattaagttgatgtccccactaggagaggaggtggtgaccgagttagttaagcccgaggcaaggaaagggagttgtcatcagatggctattgatagcagtgaggcagatccactcgagattatcagggtggtgtcagaatttccggacgtgttcccgaaagattaaccaggtatgccacctgagcgaaaagttgagtttgccatagagcttcttcctggaaccgcccccatctttaaagagcctatagagtatctggaccagagttggttgaacttaagaagcaaatagatgagctgccagagaaaggttacatcagaccaagcacctcaccttgggccgcccctgtcctattcatggagaagaaagatgcactaggaggatgtgcatcgattatcaagctctgaatgaggtcacgatcaagaacaagt

SEQ ID NO: 56876 - DNA, 455 bp, Zea Mays
tataagaaggacatatatggataggactttgggctcggtctagaggccatggacatgaggagggtctaccatgagaaggattccagaatacaaatatggtagttatcttattggaatagaagagataaggcaaatatcctaaatagacacgacaagactctaacggataaggaagacacccttgtaatcataagagctagattctcatacgactaggttaccagtttgaaattgtcctagactatgtaatctactcatatcctccatgtaatcgtcctattcttggactacaaaaggagggacgggcgagccccctaggggcatcacaacataatagatcataagtaataaccaccaaaatactgaacatagggtattatctcaccacgagagctcgggccagtctaaatcttgtgtgtcctgtgcatttaacttaagttcttgatctcgtgacc

SEQ ID NO: 56877 - DNA, 629 bp, Zea Mays
taggtcatcggccctgttcttggactgacatttggcacgccaggtatggtgaatctcctatatgattctcctagccatctgatggagctttttcttgggcatcaacggacatggtgcggatgcaacctacccccagagggggatggttctccctctacttcgacatctggcggtagtggaaagttgcactatgacttcctttacctgccaatggatttcaagagggaggccaacaagggctccaccttttacaagtgcatcttgccagaggcagcttgcaagaggtagaacgagctaacagaatcatcataataggaataatgaagtcaatcttcaatctgctaaaaggaaagtggccagatgaattggtaaaagtggcatggaaccataacactgttgtttcgagatcaacatggtttaccccattcaagcttttatacggtgatgaagcaataacaccagaagaagcaaaaacaggttcaataaggaccctagctttggaagaagacgaagaggtttgcaaaataacaaaagacaccatagaagggaccaggctttaggcaatatactacatcaataaatatcaaggcgaaacagttaaatggcaggataggaaggtaagattaaag

SEQ ID NO: 56878 - DNA, 362 bp, Zea Mays
attatagccggctcttcagtcctctgcatgggaggaacattttctcttgatttagcagctgaagaggcctccccgccaaactcaggcaccacaactggttcaatgtaacgcggctggtgggtaaataccttcatctttttgcccgcggccttcggcactggctcagctggggcggccaaagcagcagcttttctcttcttcccctgtccccgcagcgggtagcggtagtcggggtagacgaagccgatggcgtcaaaaactctgttcattctctttttccccgacctccgaaggctgtagatagcgcattatcttctgccttgtaataagctccaagcagctcatcacttgtaacctcgatg

SEQ ID NO: 56879 - DNA, 980 bp, Zea Mays
tgtaaatccaaaatggcgaggaacatgtccataaagtacttcaaaggtagtccaacccaaagaggaatggaaattggtattgtaccaatactcagccaagggcaaccatgccgaccacttggaaggacaggaatgcacgaagcagcgaagatacgtctccaagcactggttcaccctttccgtctgtctgtccgtctgaggatgatatgatgagctcatctttagtgtagtacccgatagatgaaacaactcttgccaaaaccgacttgtaaacaccttgtcacgattcgacacaatggctgtgggaaggccatgaagcctgtaaactgaatctaagaacagttgggctactttgagtgcagagaatggatgcaacaatggcataaagtgtgcatatttggaaaaatgatccaccaccaccaggattgtatcagcacgattagagcgaggaagaccctccacaaaatccatttcgaccacttgccatgacttttctggtactggaaggggttgcaataaccctgggtacttgcttctatcagacttagcctattggcacatagaacaattggccacaaattctttgactactgatttcattccagcccatgcaaagatttgcttgatcttgcgataagtaacaggaaagcccgaatgccccccaagagggctgtcatgtagtgttgacataatgttcttgtgaatacatggatcattaccaacccataccctgcctttataacgtataatgcccgagtgcaaggtgtagtgggtggaatcagactgattggtagcaagagtagccaaaagagcttgtgctttaacatcttgaacatagctgtcagcaacctgaagtagccattgaggaactgcagtagatagactgaacaaggcgaattcaacaagtggcatgcgagacaaggcatcagctgccccattttccacccctttcttgtacaccaccttatattggagaccca

SEQ ID NO: 56880 - DNA, 1821 bp, Zea Mays
taccccgcttatctgtacactggggtcaacgaccctacccaaattaccaacagacaaattccttatgagaacctgctgagccaacttgacttgatgttaaggggcaaggtgtcaaatgctagtgccccctcgtcttattctgcttggaatctgcccccacagagtctcttttccgatttcgtttccaatcctcatgttcgagatggcagtctgggccatagagtgcgaccctcctcagaggacaatgaggctttcatagctcccttctaggatcttcccgaggccgagaggcagacccactttgatatgccgaccagtactgatgatgctaatatgaacgctgttcttagcatgctggctagggaatcatccgactctgcccgcactgagccaatggtggttgcgattgggcagaaccttggtgaagacgaggaaaaaatcgaaaaaacctgaaggtgctcgtcgcaagcgatcccaccgagtgaaccatccagctgtgcctgacgaggagagaaagaagaaaagacgactctaacggttatcatacttggagcaagatgttgccccctccacattatttctcggcgatggcctggtgagcaccatcctcgaagacaatgtcagaggttgtgacgacgctcgggttgccagaagtgtgcttgatgaggatgaggaggaagaagaagaagaagttccgttaatatgcaagaacagtcatcgcaataagggcaacgacattccgatgcatgccttatcagcacttgtcagccttcaggggttgtcaatatctgattttgaccatgcactggaagagatcatcccccaagaacctcctattggagcctcctgaggttgacaatcccatcatctatttaaaggttccatatgatgtccctctgtcgtgcgatcctaccgggcaagaggttacccggacagcctctcgtgcttcgtcgaccttggagggggtctagctcgcaaggatgcactggcctttaatgccgctgatccgagtcatccggttcctctgggcgtggctgagggagcttcagccttggaagtggctgctacggagggcccaaccctcgaggatggtgctgggaacgacccaacccccgagggtgttggggcagactcctcttctgctgcttccatggacgtacatgttggatcaccgccggtccaatctaaggagcccacggtgacacacttatctgctgctcttgttggtctagtcattttagaggctagtgacccggatccaggagtctaccgcctgctgacaaggctgaggtttctccaagccgtgccttcgatatcgttcctgttgacatcccctcatccagcaatgcaccaattcttctgattttgggtcttcctttgttcctctctaacctttaggtgaatcacctttcgttttttaccgttcatgctagcaaattggctttcttgcttattttttcataataacaggatatgcttgattctgtatctgcccaactgaaatcctgtggcgctcctgtccccgaccaagtttcatccttgatgcagtggaaccctttactgcttcaaaaacagatagaagatctaaaggcctctaaccttggttagtgagctcatagttccctttttcacttccattgccctccttatcttatatcttgtgcttttctctgctgcttaatcagatttggctcggcgatgctctgatactgaaaaaaagtatacacagggccagggcgacttgagccaaacctctgctttcttggacagtgctcgcgccttaaactcttctctaaatgaacagcttgactctaagaagaa

SEQ ID NO: 56881 - DNA, 442 bp, Zea Mays
tggccgttgtcatctattgccttgcatcaagttgattgcataaggctgtttaagtcatctttttagtggttgttttggtcacgtaaggttgttctggtcatgcatggtcatgtaaggtgtttgttctggttgtcgtgatagtgtaagactttaaggtcattgtactttgctattttggccttactttctcttaatgcaatgacatgcagttttacatgttcaaggaaaaagaactaagctagaaggtgctgactgctaagtaaatatggtcagttatttgactgcccaaaaaagctgtctttaagaccaaactccccatttctatgttgggtattgaaaacaaataggatggcctggccaaacaccatgtaaggtccaccccaggaccccactgtctgaacaaccagtaatagcaagaggtgaatagaacaaaggaagaatg

SEQ ID NO: 56882 - DNA, 407 bp, Zea Mays
cctaatcgagattaatcgccttgtcagacccctaggttgagctggttgctcgactagaaaacatagctatgtcgaccgaggcccagaattaatttaggtcttgcctctaatttcgtgcttttggggtagcctgttagacatatcccaaatgtacatgtataatatgaacccacatcaaagttgttgacaatacctcccaaacaccgcatcgtttcaccaactgtcattagagaaggattaagtggttccttgatcaattgattgtccaacccatattgacgggcattgcgtcaacatcaaccccacattattgttcattgactttaataccatctaaggacctcctatatccattctccactaaaacctcaggcaatgtcacatttgactattgaactaccattttg

SEQ ID NO: 56883 - DNA, 384 bp, Zea Mays
ctgctatgtcgtaatgccttacggtctaaaaaacgccttgccaacatttgtgcgggcgatgagtaagactttcggggacctgattagggacagagtagaggtatacgtcaatgacattgtggtcaagactaagagagggtcgaccctagcggaagacttaaccctggtcttcgacaagctgcgggcaacacgcacgaagctgaacccggacaagtgcgtctttggtgtctccgcgggaaagttgttggggttcctggtttcgtactggggcattgaagcaaacccagagaagatcaaagcgattgaagcgatgaggcctccggcccgtatcaaggacgtccagaagcttacggggtcattagccgcccttagccgcttcatttc

SEQ ID NO: 56884 - DNA, 450 bp, Zea Mays
ttttgtttggagcttggattcgtcgcgtcagagcagagctgtcgttcgtccagatgcaggtccagtccttgtcggtggtgttgactgtagagcacgctgtgctctgatctgggctgctagcacattggctcatgctttgtgccgttctacggcgatcattccatttggactggtcaagtcgtttcggggttgtcaaggtgagtgtgtcctgagttctgaccaggacccggcgaacagaaccaaaatactgggcacggtgtcttactaaacacaaaataaacgaagtcggtgaagctcgtcttagcgtcaagtcttggcagatctgagagaaggaaaaggaaaataaattgaaagcccggcgaatattcaaaggtttttcctttaaaagaaaacacgaactccaaggcgagccagagctttcagcatcttcctccagccaaccgctttccc

SEQ ID NO: 56885 - DNA, 307 bp, Zea Mays
gctggtgagcttggtcatgacgtcgggtcctggatggccgagaggacgatgtcaagtggtggagaccaggacggttggggaggacgcgccagtggaggaggaaggccggagcatgtagaggagccccgagctgtcacagcgggcaagaggggtcctggtggccagatccttcacaaagaaaccaaacgggtcaaacttaatggaacaagaattgtcggggtgaatcgacgaacggaaagaaagtttgagtaatatgtagagctacgagaacgtcattgagatagaacggttctgagagaacctagac

SEQ ID NO: 56886 - DNA, 377 bp, Zea Mays
tgcgttgttctttgggtttggtgtgcatgctcaaatgtcatagtgcactgtatcatcgttatagtatgacttgtcctattgatgctgtttggcccaagcagtggagctttcaatgtctgatctggaagaatgtgaaaaatggaatacctgtcactttcaagtgctcatacagttgtgccttatcactgttttgcggttccattaggtttaaacctcctccccttcttcaaaatgagtgaattgatgagtgggcgtgtgcatatgttgtttgatgtgataaggtgatcaaattgtttatctgcccaactcctaatgtgctgcagctgcctgtattactttcttatggagtgttcttaatgcctcaactagtggtgcat

SEQ ID NO: 56887 - DNA, 592 bp, Zea Mays
tgacatcaccgcctcgtcaaatcttggtatggcgccccctatccaaatcacgagtaggtgaatttcattttgcgcgattcctcggggtggtttgctcgtcgggctcgcggttagcgagacgccagtgagggaccgccgtactctgggcacaccaccgtactccgccgtcgagggtaggagtggtcctctgtgttgtccgatcctagcgtgatggcgaggattagaactacgtgtaccgattcgcactgcgcatctgaggcgtcgatgcagtgtcgggcggttaggatccagtcacgtgtacgataaacctggacccttgatctcagatccgagggctccgtttgcgtaccggtttgggattaaactgatctaatctacatcgtttgcttacgatctaacggccgagatgtgatagttcccctttgcagaaccatatttacaaacgaatccctggccaatgcaataatcaacccgtcgtcctattgcatggtgcgctgagtcttggtactcttctgtattaacccctggactctctggaaattgtcgtcaggtccagacagtggataatattcataaaatcaattagaaaacg

SEQ ID NO: 56888 - DNA, 478 bp, Zea Mays
gattcgaggatgtcccggagaacagcgagatcagcctgctgaaagcgctggcccatcagcctgtcagcgtcggcatagctgcagggagcagggacttccagttctacagaggggtaagtatcaactgacttgcctgtagtatggttggtttcagatggtgtcatcactagctgtcacagaagggaagtaacatgtgcgtgtatacctcgtctggctggctgcactgctgcagggggtgtttgacggggcctgcagcgtcgagctcgaccatgcgctgacggccgtcgggtacggctcatcgtacggccagaactacatcaccatgaagaactcgtggggcaagaactggggggagcaaggctacgtcaggataaagatgggcaccgggaagccggagggtgtctgcggaatctataccatggcctcctatcccgtgaaaaatgcaacacgctggggtgcttaatatttttgtaacgag

SEQ ID NO: 56889 - DNA, 512 bp, Zea Mays
aactcgcttgtccacaacaacagtgcaacgaaaaatgaaagggagacaggcagacattgagctacaaatactcgatcgatttgcttgggtaggcaggtgctggccgtgcgaaaaggtttgcctcttgaatcttccttccacggccagcgtaccaatgggatggcggcatgtacacagtacacccctccaatgaagcacgtacgcgtcgctgtcacacgggcacgactacggctacgaacttcagctgctggaagctggatgcagtcgtcctgctccgattagtggagaggccaggaaactgggagctcaagtaccatatgcatgcatgcatgcatggcgtacccagacgagtcggaaactttgcgccggtacgcaaggtactcccctgcacaaaacgtctgctggccgctttgacttgccggctttggcaggcaggggggatggggagggcgtcatgtgtgatgtgcgcgtggctgcccgagtcattgttggctctggaagaccagatcgcc

SEQ ID NO: 56890 - DNA, 607 bp, Zea Mays
ccctcgcattgtaccctaatgggacaggttgaaaaacattgttgctctaatccatcgtgttgttaagcatcaaagtattcccgttttcccactacttggacctactcaaccacgtgtcagtgagttccaacatttggcgcccaccattcgtgcttcaaaatctcattgccaggatggctcccaagaaagcaacttcgaaggctaccacctccattgacgacgcaacgaaggcggctcttctcgctgagaatatgggcaaggcagcccttattggcgatgtccctcatgaggccctcgaggatggggcagttaacagcaagcgacacctacaagagaacctgcctaccccagacaacaccgttcgcacatgcagctctgagggactacctcgggccccaccgtcgggcttcgcccccagaagctgacgatatcatcgaagacggcgaagtcctaggcgtatcaactacagaagcaaaaggaaatactcgcagccaagcgccatcgcttcaccatgcaggccaagttcaggcagatgatactagatgaggaacagaaagccaaagagctggaacaacaaatagtagatatgcaaggcgaagtccctcac

SEQ ID NO: 56891 - DNA, 289 bp, Zea Mays
tacagtatctatctttgtagaacacaaacaaatatgtattctagtttgggagatagaggggtaggtatttgaaccccaggttctgtgcctattttttgtatttttctggcagtgcgcgtgggagggaaacgtggtaggaaatgcccacttaaatatagtagagatagattatatgcatcatcaattcactatcaatcacttattcgcaggtggatcaaaagaacccctgctaaaaattagtaaccattaactgttacctagctaattttgagtgttaatgtatgtaaag

SEQ ID NO: 56892 - DNA, 606 bp, Zea Mays
tgtcgcgtcgccgtgactctttacagccgtcaaatcgtcgccggtgagctcgccacgactgaggacacgaacccactgcgccatgatccttccctgtttccggccgccaactctgcccggccaaattgagcgccaccgtcgaagccctttataaattgatggccggggcagctgcgctatgtcatcttgaagccatagcacccgctcccacccttaatcattcacccgagcccgtgaatttcgaacttcccccaaattcgatccctgccaccgtgaagatcagttcgccgcggccagctcgattcaggttagctcgagtccctctgctgcttgttctagcatccttaggtaccccgcaaaccccttgacccctttaattaaactataccgccacggatcaccgggaacacactcatctgtctgccacaccctcggttcacgtggacagagcttgatagctcaccaaccgtgcaattagcctagggaaaatgctcggagtaggtcggatttggtgtccgccgctcgggaacgccagtcattgccccgttaggccagtctgctagctcgccggagctccaccgcgctcaccgtcgtcgtggactttcc

SEQ ID NO: 56893 - DNA, 617 bp, Zea Mays
cacggcggaaaccgtgacgtcaagcccgcgttcccgttcaatcatgcctggattggtccaatggctgccacggcgagctttacgggtatacaaagctactaaaacaacactcaaaaagtacatagccatacccgagtggtccagccatggaagggctatctacggcggcgcggagatccaatttgggggaaaacccgaattgaagtgctacagtggatgattggagacgagagtgggtgctctggcttggtgatggcccaacgcagtagtccatgtcgtcaatttatagtggggctaagcggtggccagtgaatttggtgaagacgcgcggcggtcagaatgaaggggtgagtcactggcacgatttaccgtggcactcaccggttgaggagctacagcggttatcggcgagctagtgcggctagtgacgacgtggttaaaggcctggagcttggcacaatcgcggtgaagaatggcaactccggtgatggccgtaaagccacgtcgccggtgcaaagggtaggggacagcgaggccacagtagctcatacccatccgcgacgagatcttttcatggtgagcgaaatccacacgcccgcggcacgaatcccgacggt

SEQ ID NO: 56894 - DNA, 744 bp, Zea Mays
tatttgcggcccaggagcccgccacggtgagcatgattgatgacaatcctctccagccgggggatctcgccacaagaggtcatccctttgttggactgcctcccacgggtgtcgggcccttacgccaaccgtcaccaatgggggagatgcaacctccctgtcatcggtgcggattgcgttcggaggacggggatggtccacacgcagcgtctgaggtgcgcgcctgccccgtggaggtcaagggagcgttttttccctaagacggggcgtcagtgattcgacaacatcttagccattttgaggaggcatgggactcatgccaccgttcgaagtcccaccgtagagggagttgtggcagcagggtccgtgttcggtcaatcggtgtggcctaagcatctcgtggtcgagacaaataacagtctcccaatagcctagctagacctcgcagagacatagtcgcaaggttgttgtgtcgatggatctttgtcaaggtccatgtctaaaggtgagtatcgtactctcccatccctaacttttgatccttttagtcccagtaattcgttgatgggttttcctgtttttaccagtgatggtgctggaggagcttgcgcgtgcggaggagcgtctctaggtccttagttgtgagcgctccaatctgtccacgaccatcgaccctgtatgcgaccaccttggggttttgcaggtaagtgtccgcccgtactcctcgaatggcacttgtctctg

SEQ ID NO: 56895 - DNA, 780 bp, Zea Mays
gcctaggtgttaggctatttgcagtagatcgtgcatacgtagaacattaatttttgcctggtagactgcactgtttatgaagtaaaaaattgaaataagagatatatatgataagaaagagtgcgggaggtagccttacaccttttttccctttgcatcccaatcccaactctaatccaaccctgatcccaaccttaaaccgatggaaaaaaataactatttgccactatttggtggtggatggcaatttttttggcatgtcagtgattcatgtgccaatgacacatgattaagaagatttcgtaaggatgacaaatagttaaatgcccccaaaccgacactcttatcagccatcacaccacacagaataacacaactaccatgtgtgcatgcagacacatgcacattagacatgtgtagatgaacatttcaaatcgcatcgcattgatcatgcatgtgtggcacatttgtggtttttaaactaaggtatatctgcggacacaatagctagactataaggaggctatatattaatgctcccccaccgtactctaatccattgtagttatctgcacagacgacggctccacctccaccaccgcaaaacacgcgggcccagcagcaccagtatatatagtccggcgatgacgacgacatcagcacttctcgggcggggcctgctgctgctggtccatgttgccatgttgggcaggacgatgacgccgacgccaccaatgcgtccacggacgcggcgggtgatggcacgctggactgcactcg

SEQ ID NO: 56896 - DNA, 280 bp, Zea Mays
ttgaggttctctttgaacagttgaggggtgcccaggtgttctccaaaattgatttgaactctggttatcatcaattgaggattcatgaggaggatattgagaagaccactttttgcaccaggtatggaagcaatgaataggatgttgcatgagttcttggacgactttgtggtcgtgttcctggatgatattctgatttattcaaagaccgagactgagcatgagcagcatctccgactcgttctggatgcccttaggaagaatcagttctatggcaagt

SEQ ID NO: 56897 - DNA, 744 bp, Zea Mays
cctaaatgagatgcgggatgcatatgtatgaatatgattaaatatatcacaagacaaatcccaaaatagacggtagcgaactaaacactaaatagcgagacatcgtgaacaaccacacacactagcattagttatctacgagtcatcgagcataacaagtcaacattactggaaagacgacgtacatttcctatatttaaccaacacaacacgacatcacacgtacaagcatttaccacattcacttttattctttcttagttactctattattaaactacttagacacgcgtacattcaccgtgacttctaagcgtcatacagacaaactttgtttaatagggaataattacttaatcgggttctaccaacattctcaatattctaatgcaagcacacacccaagagcacacacggaaagcgatagcctaatcacactgcttcttatactagtctaatgaggttggttatttagcaatattatatttgctacgcaagtattaaaaatggtaacatctcgtttattgtgtttcttatccatataatgacacttgctaaaataacgttgattgaagctgattacatcctagacttgaacaatttaatttactacttagagagacatggactagttacttacacataacccaattatattagttattgtcattgttactcatatgcacttaaaaccaaaacaagcaagcagtcgctcaagacgaacacaacagagtagagtaatca

SEQ ID NO: 56898 - DNA, 416 bp, Zea Mays
ggcgacttctgcacggagttgtcgcacgcgagggtggccagcgctgagcctcgcggtgactttgtattggtcgaatgtcgaagaccgtcgtcgcggtcttttttcgacgcatgtttttgcgggggatttttcacttgtatattacatggctccgcctcgttaaaaacctcaccccccgggaggaaaagagtgcgggccaaaataaaattgtatttgcgaagtacaagggcgaaccggccctgatgagtcaaacaaaaaatttgcggagattgtcgatgttccatgagtgctccaggtcttcgccgtttggcgttgtgagcctgtaagcgctgggggaagccttcgtcttgacaatgaaagggccctcccacctgggctgcagcttgcccctggactctgtccgagctgtacggacg

SEQ ID NO: 56899 - DNA, 566 bp, Zea Mays
gccgaatgggtgatcgccagtaccgaggctagcgaccgcctcgtgcttccaagtgagggaccgaggctcgagaagaagcaatggagagctaagccgccgttggcaccggaatttgagcctgtgttaggcaggatcgaatctctagcgtccgatggtctgacgtcgatgcatgtggtcggtgacttcttgcagcgccggatcgcgccgctgcaggcgagggcacgcttgagctgttggttttctggcatgaacgaccccagccaggtccaacacagcccaggcaccgacctatcttgggaggagctagaactcttggtgaaggggatcactggtgagtccttcgttgctgagtccttgatccttcccgaaggcattcccccgctttgcgacgatccagggttgaggacagcgatcttggattcgctgccgacccttgacgaaagcggcgtagcggttcgctaggctagcggccgggacccccatcgcggaattcagatccccgacataccgggcggaggctcttggcccgccgatgccgactccagatttcacccggcaactctcag

SEQ ID NO: 56900 - DNA, 612 bp, Zea Mays
tccagatttgatatagttgttatggccacttggcgatatatataaatatatgatgccacacaacacaatcaaacaaaatatagagcgaaaaaattgtttacgaaggttgcacataatgtgatttcaggggcttgaacgacacaccacaatccacgcgagtacaagatctagcgtatttggtgtcaacgcgtgtgcggccatcagagctacaatagcatatcaagccttcgtaataagtgcaacaagcgcagttgtgactcaatagtcggggtacatgacaagtccatgaaacatgcgctacatgcgcaattgtggctctatgatcacgagagacaaacaatgcctacagggcgtgcgaaaaatgcgtgactcgatgatggcggtccgactcaacgagagtggtccgattaagcgagagtgcgacatagtaatcaaatgacgcaaccaagttcgtacgacacaaatactgcatcgtgttgccagggcgcagccagtgctcagccaatgccataactcggtcgattaataacgtagtctgatcgacgtgtctgagtacccactatacaatttaatcgctcgacgtgaatccaaaagctcaacacatcataaata

SEQ ID NO: 56901 - DNA, 602 bp, Zea Mays
agaccacattatctactgtctcatcccatgaccagtttacttgtcatccttcgttgacttcttggtgagggagtggatggtctggtgtcagtcctcgtgtcgtgacatgcggcacctttgtttaggcacatctcctcctgtcccatcattcaatcgcacgcatgtactagagtatgattcgcatgtactcatctcttaaatggcttctagtaagatgttgttgactctagactagggaactcgggcgtgaccacctctgatcccaaggttaggaaaagaaaaccttttttggagagcgcttttgcgttctgacccctcaggagactcggtgtcgggcgaatcgaggactgggtccgttctcgagttaccctagttcgtgtcgtacccatggtatttgttcccgacagtatcccttgagccttcgggggagctcaggtgctctcccggaggttctactaccacggatgcacaagcggactcggtgagtctagcacctgagcctccgagggaactataagtttgcttggagaatccttcggtcataagctaaaagggaaatagacttagaccatatcttatattaattttggtgcttgatgacc

SEQ ID NO: 56902 - DNA, 303 bp, Zea Mays
cgggaactaagccagtagagctggcgaaggaatgtcttccaaaaaagacaacaccacctctacctgaagcatcttctcaaggtgacttagaatatattgttcgacatgcttcgggaaaacaactatcagaagagcaaattgttgaagtacatcattatgcaaaggacttgaaatactccctagggtccttggtatatggaggaaacgatgaagatgacttccttaactgtctcccagacagcaaggagataaatgtctgtcgagagatgatggacaacatgggatatctgaagcttgagcttg

SEQ ID NO: 56903 - DNA, 403 bp, Zea Mays
ggctggttgtgcaggaaaaaacaattgccaaaggtacttctaatgccgaagctgaataggttgtagctgaagttgaaagtgacaatgaaagtgaagatgacgatagcattctatgtccgactaagcccagccatgttgaatttaggaaatccacaattaaagttgaagatctagttctaatgaagaagctagtatattttggagaaaatgatgatgatctggttcgctttgctggagaggaaacaattccagagccgaaagaagatgaagttgtagtattcaagagcttctttagggcaggacttcggttccccctttatgagatgatatgtgaagttttgaaaaagtttgagatctaccttcatcagctgatctcgaacaccattgtcaggctcagcgtata

SEQ ID NO: 56904 - DNA, 312 bp, Zea Mays
cgggcgatgagtaagacttttggtgacctgattagggacagggtagaggtatacgtcgatgacatcatggtcaagactaagagagggtcgaccctagtggaagacttaaccctggtctttgacaagatgcgggcaacacacacgaagctaaacccagataagtgcgtctttggtgtctccgcagggaagttgctgggattcctggtttcgcaccggggcattgaagcaaacccagagaagatcaaggcaattgagacaatgaggcctccggcccgcatcaaggacgtccagaagcttatggggtcactggcc

SEQ ID NO: 56905 - DNA, 821 bp, Zea Mays
gaaagatctcataagtcaagctgtacttgaagattatgaggcagccaacgccttgatctataggttggaacatatcttaacactacaaggggacacatttgaacacatattaacgctaccggaactcaccgatggagcacatcacgcagctgccagtacaaaccccaaaccataggacgacgaagtcggacaaagattgcacaaacggaggacaccaatggagcacaacacgcagctgtcggtagaaaccctaaaccctaggatgactaagtcggacagggtgcacatactgaggagcagaatggcgtcgaatcggagacagcgaacacgaaccctagaaccacgatgacaaaatagcggaggaaaagcggacggaacaaaccttagcgtcgaatcggagacagcggacacgaaccctagaaccacgatgacgaaatagcggacggaacaaacctattgcacagagcagcaaaggaatgaggaagcggagggaggaatggcgagtagcaaagagcttacgtgaaggagacggccggctgaggactgaggcggtgaagggagcaatggcgagcagcagccccgtgctaggcccaaaagaaaccaggggtgcgtactgtcggcagaaggatccagaaatgcagtcaaaccaatacaggaaaagccaagagtccaagactaagtattgaccattgattacagatccaacgactgaaaatgtactagctgacgtggacaccgtggttgtccctggtttgaaccgcctttgttaaataggaaatatgtaaaagctctgcaccacaacgcaatttttttaatttagc

SEQ ID NO: 56906 - DNA, 532 bp, Zea Mays
catcatcagcacacgaaccaatctgatcatcagtaacaagcgctggagcatggtcgattatccgtccgtcgaagacgcagagtgaataaaaaaacagaacagaaaaaggatccgagaccatgccggtcagactcgacggaaggcactactagctttacggggttgcgctggtccgcggatccagcgaggaagaaagcgggggtagtagcaagcataggggaagggaaatgcggttggggtttttgcgtggtacggtccgtaccttgaaaaccgctttgctttggttggagctgtggtggaggagtcgagtgccaaagccctgctgttccaggaaggaagagggtggaatgcggcgatcgcgctgcagcggaagccctcgcggcggaaggaagacagcgtggttggatggatgtagtagtgaactgcgctgcctctcttttatgtccaggcctctgcacagcactacgcctgcacggtgagaactgagaagggaatggaagtgtggttgatgaggagggatcgtgaaactgat

SEQ ID NO: 56907 - DNA, 364 bp, Zea Mays
agtggccagtcacttgtgtggttcacatgtccgttagctgtttctactgggtagtagatgggtggacacattttgatcttttggtggttgagatgtcatttcctgtcataccttgcttgttggcaactgcgcagcagcacgagtaaatttcgttatcctatgatgtcgatccgttctatttgtgactctgcctccttcccatgcaaaataggggctacataggtagtcatattttggaactatgttatcaagagatctcactgcaaacttggtgccaagtgctcactgttgagaatcagaaagtttagacaactagatgagtttggcagtttgctactactaactgaaatcagccgtgctaaac

SEQ ID NO: 56908 - DNA, 347 bp, Zea Mays
gctaaaaaaatattctatgtgaggtgcttctaacaatcatagtgtatgcatatgatgagatgtcctatgaggtggagtcgagggaaaaatcaaggaggggggttagaagattaggatttctaaccttggggttaaattttgggatgttacaatgtgcatgtttaccattttatgtcttatgcacttggtattggttactatttgaactttatgtcttatgcatattggtgaactttgtcttatgcctgtggacaactatctgtaatattctgtgggttgaactatgtgtgttaaatcttatgtttaaattagttcgaattattctgtgaatggttgatcgaggagtg

SEQ ID NO: 56909 - DNA, 760 bp, Zea Mays
tagaattattagctttcttgatggtaatgccagatataatcagattttcatggccgaagaagatgcgtctaaaacaacctttatatgtccaagcttcattggtttatttgagtgggttgtcatgacatttggtctgaaaaatgctgctgctacttatcagagggctatgaatttgatctttcacgagctgttgggaaacactgtggaattctagattgctgatattgtagtaaaatctgttgagtttagttctcatttagctgatttgcgcaaaacctttgataagatgcgtcggtatggtttgaaaatgaacccacgtaaatgtgcttttggagtgtcggctggtaagtttttaggattttccatccatgaacatggtatagagatagaccccgatcgaatcaagtctattcggaatgtgggacctccgacctgtaaggtcgaagtgcagaagtttctcggcaaggtgaattatttacgaaggtttatttcttcctagccaggaagattgatgccttcaccgctatccttcggcttaagaatgatgctgaattcgcttgggggggcagagcagcaggaagcatttgatctcattaaaaaatacttgtcttcggctcccgtattaaaagtaccacaaacaggagtaccatttcgattatacattgcagctgaagataaggtaattagggctgttctgacacaagaaactgaaggaaaggagcatgtggtgacatatctaagtcggaggatggtggatgct

SEQ ID NO: 56910 - DNA, 694 bp, Zea Mays
tagttgaatgaccattttgactttgtcgatcaactttgctaaatttgggagtgatttttgccaacattaaatcgcttttcttgcccttttaagcttagccatgagccttttcgttggatctggctgaaacaatggctgatcccaagagtcgtggaagattgaataaaagtcttcaagttgtagccagaaattttcaaacctaaaaatgggcggtcttgggacgttaatttggacattggtcacccaagggacgtgatctgaggctccccgagctagtgaatgagcagaagtagcagggaaattggtagaccatgcctgcgagacaaagcaccaatcaaacttttctagcaaaggatgccattgcatatttgaccaagtgtaagcttgccccttgagaggaatttcttgaaggcccaactgactgattgccaaattaaagttcaacattctatgagggtctcctcctggtttgttgcagttttcaggtgatctaatcatattgaagtcgccaagaaatatccagagcttttcatcatcaacctcaaggttagagaaccaggagagaaagtcctcccgaccatgaggggagcatggggcataaatattggtgagccaccagacctgatttgtcagctttgtgcggaataaaatcgtatgcccaaacgagttctactctatcaccttagcatcattg

SEQ ID NO: 56911 - DNA, 832 bp, Zea Mays
gacacttcttcaactgtgatacatggaagacatcatgtacatctgcaagatgatcaggtagctccaattgatatgcaacctcccccactcgctttaggattaagaagggtccaatgaagtgaggggacaactttcctttgactttaaattttcgcataccccggagtggtgacaccttcaaatagacatgatcaccctccttgaactctagcaatcttctctaggtatcagcatagcttttctgccttgactgtgcagttctcaaattctctcttatttgatggacttgttcctctgcctcttgtataatttcaggtccaaagaaatgcctttcaccagtttgatcccaatatagtggagtcctgcactttctgccatatagtgcctcgaacggggacaacttcaaactggcctggtagctattattgtaggagaactccgcatatgataaactcttatcacaactaccaccatgtttaagagcacaagctcttaacatatcttctagtacttggttggttctctcggtctgcccatcagtttggggatggtaggccgaactaaaattcaatcttgtgtccaaggactcgtgcaacttcttccaataccgagaagtaaactgtgatccacggtgtgacacaatcttcttaggcaccccatgtaagcatacaatccgtgccatgtacaactctgctagcttagcacctgaatacgtggtcttcactagaataaagtgggctaccttatttagcatatctacaatcacccatattgagtcatacccagcagatgtgcggggtagtccaacaatgaagtccatgccaatctcttc

SEQ ID NO: 56912 - DNA, 314 bp, Zea Mays
aacgacatatcacagatttatgataagtcaatgagtttgaacgaaatttcggcagcataaccccgttgttctccattgcacgcccgtaatggtgcaacggagaacaagagggttatgctgtcgaaatctcgctcaaactcattgactcatcataaatcctatttaatatgtcgttcactctaaggctgtccaaaaagggacaatttcggtacaacacactactttattaagcaatgtgttggaccaaaacgggtgacgcataagtttagacctattttagttaagtatcgcctataggctctactcgacaaaac

SEQ ID NO: 56913 - DNA, 394 bp, Zea Mays
gagaagcgcacagatgaagccggggcggctttaaattttgtgaccacacatccggacagagtacaccggctcaccatcgtctggccccttaacaagctcgcagacgtccccagcccgaaggtcgtttgatgtcaccaaatgtttcccgccctcggtgaagcccacaaataatgggaggtggtagactacagggcataatctcttcttggggtccttcagcattataacatcacaaccatgccttctctgtctaactgcattggaaagtgcacttctatctacgagcttgcttcccgacccgatcctgccccggaggcgggtttgggctcgatttcttttgaatcaccttttctccaagttcccttattgatggaactagtatatcagactaaca

SEQ ID NO: 56914 - DNA, 420 bp, Zea Mays
tataccaagacataacgtctctcgtcccttccctccccataaccaagccactattagggaagataccgaacataacctcgatcatagagcggagactatgttgagcggagtctaaactcgccctgcttgcaaactaacgaaaatcatccttccccatttattgtttttgtaggttcgctgatgtggagactccgatcaagtgacccagcattgaggggccgcactaaatgggagtgaattctctgtcacccttcacagcgcaccgaaggcagagcccatgccaaacctccatgcgccttaaccggacgaagggcacctgtcggcctcaccatactctagaggcgactttccctaccctcgcgtctagcgggtggttgaggggaacctggcgcgaagtcttacgacgacatcgctagcaat

SEQ ID NO: 56915 - DNA, 1283 bp, Zea Mays
gacaataatactaagtacatggtcggcagttccaaaaaaaatctacggcgaacccgtgaggcaggcactagggaagaccggtgctgagtgctgttgttgcctcggcgacgatgaacgtgaggtcgatggccgacgcaagcctaccacgacacacagaatgggcagggagaaactgaaggcgacaggtgctaacgtcagggcacgatggtgaacagcagccgagaccggaccaaggtgcaggacatggagaggacgacgtgcagcctgatcggcgaacaggtgaagctcgaccaaagagagggagtggaagtggaggtccaacattgcggcatgaccgcacaattgatgcgcttcgctaaaactactgttgtatgggttgcgcatgcctggctgatggcaggagacggctgttggacggtaaaagagctggaggcgagtggtgactggtgagatcgatggccagaagaagaaggatgagcagtgaaagagacgtccgcgataagaaaatcagagggtggctgaaagagaagaagtgaggcaagcattacagggaagatgctagggccaggaatactcgtcgtttatggaccgaaaggagcaggaagttgcacgtggctatccttatcacagtggaaggagcgctatagagccagcaccagtcgagtttggatacgtggccgcgatggaatggcgcaagcaaaactggcttcagttaagcggcaaaaatttggatttagcggtgtccacacaggaggcaaggcagacaccagccgacgcgtagcttgagcatgcacagcgcctccctaaaactgaaactaagttcccagccggcctgacagcccaatttcaaacgaattttactctgacaatttctccgacaatttctaagcaacatgtaaatcgtccttaatcaaagtcgtacactgatcgatgctctttcactttggtataataaccatgatgaaattcttcacggatccaacacaggagagcgccaaagttcgctagaaatcactgaaactcgacttcagttttctgaatatgcccattgtatagaaccgaaccactcctccaaactgaacatagttcagtttcagatccaaaactggacagcacaaactgaagcacaaatttctcctagttccaaacaaattcagaggtatattgtttaataaaatttgctccccaacaatatctctcccagtttgttgtgctgaaaatcgaccgcaagtttgcagatttggaagttataggagcccgatgctgagaagagcaaactgttt

SEQ ID NO: 56916 - DNA, 375 bp, Zea Mays
gctcttcttcgagtacatcgacatcttccagcctggttgcttcggcctccgctatactttcaaagatcaaccttggcgccccaaacttgagatcagcaggcagtactgcctctgacccatagaccatgaagaaaggagtgtttccatgtagagctcggctaggttgggttcttaggctccaaacgacgtagggcaattcccttatccactttcctgcgaacttttcattcttatcgaagacccttttcctgagtgcctctaatatcatcccgttagctcgttcgacctgcccgttggctctcgggtgcgctaccgaagcatacttgatccgaatgctcttttgctcgcagaagtcgaagaactctgaacttgtga

SEQ ID NO: 56917 - DNA, 897 bp, Zea Mays
gtacttcttctccatagccatgagacatgtgtggtactcgttggggaagagtgttgatttttcgaaggcggaggcggcaagtccctcagcgtcggagttggatgaaaagcagtccgagtctcattcctcgtcgatgtgtgcatcgcccttcttcttcttgtagattttttttcttctccttccccttggcgctcttgtcttatgactggttatcattgtcaggacattttgctataaaatgaccagacttaccacacttgaaggagacacgcttctcccttgatttttccttgttagataagtcctttcgccccttgagtgcggtcttgaagtgcttgatcacaagcaccatctcttcttcgttgagactggtcgcctcaacttgtgccaccttgcttgggagttcctctttgtcgtttgtcgctttgagggtgacgggttgcgattcgttgtagtgggggctcccgtttgtggcgtcgtcgaggtatcttgcctccttggccatcatttgttcactcacaaacttaccaaggacctccccgtgcatcatcttttggtacttggggttctcatggatcaagtttacaaggttatgatctaaaacagtaaacgaccttagcatgagttgaacgatgtcgtggtcggtccttctcgtgctcacgtagttccgacttggttcaccacgaatttgagccggttgtatgtctcttgtgtctctttttccctcttcatggcaaacctcccacgttctccttcaataagctccatctttgtgatcatggtcatatcattttcttcatgagcgatcttcaatgtgtcctaaatttctttggcattgtccaaaccacttactttattatactcctccctacataaagaagctaacatgacaatact

SEQ ID NO: 56918 - DNA, 354 bp, Zea Mays
ggtcggatccggctgctcggtgcagctgtcgtctgcgagtacacggcttttactgccggcgagtcgttgggagcttggcattggcaatgtgtccgcttctatttaggatcaagcgtttgactcccggcccgttgcgttgcatgcacgaagagatcatatgcaattggtttttggcatggagaacatgtccatgaattgaccgcctgttctacttggattctcatcaacagcacttggtccctactactaccacagtattaatagagacaagtgaaattagttctggctaaagacaaagttcacaagttcctattcatttgtggattgaagcctctctcttttttgttttttttt

SEQ ID NO: 56919 - DNA, 512 bp, Zea Mays
aacgagaaatagtgccataggaggtttgaaattcgaattgaggtatgaaatgatggggaattgagccgatacttcacgaataggtttatatgggtaatattagtgaagtgtgcgcttggtttgattttaggcgaagaaaacagaatttgggcacttggctcggaaacgatcgctcgaaatagggaaatgtgtgaaattgaagcctggtatatcggattggtgtgaaatttggtgaatatgttactgaaggtgttgtgaaggtgcctgaaaagtttgggttcaatcagagcaattttgagtggtttgggcatttcgctgagcatgtgatgtgcagggaattagggtttcggggaaatgatcaattaaggctgtgaaaccctccctaaggagctaggaacctgtaggggatacaatggagcactagggcacacaaccatgcataggattcacaagatttacacaagaatttgaatcgagcacaagaggtgggcaggagctccattcaactgaga

SEQ ID NO: 56920 - DNA, 501 bp, Zea Mays
acacagaccttcagcacatagtacgtggtagcagctttacatggtagtccaattgggggacattcagggtttccagtgacttatcgaagcgtcaaacaactttttgcgtggactggcaggagcagtcttatgtcgctcagtgttccatttgtcaacaagcgaagcctgacaggagcagatatatatcctggcctattacaggcgcttcctgttctagatcaagcgtggcaggtgattggtatggatttcattgagggtcttcctcgttctgcacatgtggacactatcttggtggttgttgatattttctccaaatatgcccatttcttgcctctgctacaccctttcacagcatgcaaggtagctcaagtattcctcaactcgatatataagctccatgggatgccagaatccattgtttcggatcgaggcagaatttttacaagccggttttggcaagagctcttcaagttatcaggcacacaattgaggatgagttca

SEQ ID NO: 56921 - DNA, 601 bp, Zea Mays
gatgtggtctacagaaaatcaggaagtagtgcctcagaatggtgctaacaagctcctgtaaaaatttcagattttttgaacaactgagcgaaaagttatgcccggtttaaggaaggtatgtttaaaacgaccgagatgagacaaccgctttgtatcctttctccttcgttttttttctgtttttttgacgtaaccgaaggagaaaaacaaggaagcggcgttgactcggtttgatgtaaccgaaggagagaaacaaggaagatggttgcggcgcgctagggtttgatgtaaccgaaggagaaaaataaggaagatggttgcagcgcgttagggtttgatgtaaccgaaggagaaaaacaaggaaacaatgttgactcggtttgtggcgtgatcaaacgggagatgtggcggcgctagggtttgaatggtggaagaacacaatgcaaccagcaacaaatgacgcgaaagcacacaaattcaacaatgcagattattgaaaaaaagtgcgaggctcaaaagggtgctgggataaggtctaacctgaatttttatgtggttttgtggactgtaggaaaaaaacactcgataaactcaccgatca

SEQ ID NO: 56922 - DNA, 355 bp, Zea Mays
gtggaggatgcgtacatggtacgctacctgtggaggctttggtcgttgagcctcaaaaacacctagcgctatagagggctggttttgttggatttcggcatcagaacctggcggtgcggttcctgtgagaatcagaggcaacacatggcatcatcatgaaggttgagttgaggcgaagcaactttgtgaagagcgtgaggctgtcagatcaatatcctatgagttggtctactttgcccctagctaagtggtcgtcaaatcaatattctaggggtagtttagggtagtggaataaccctctaaaaataggagggagggttggttgtttcagctatctcttttgtcgttagagcac

SEQ ID NO: 56923 - DNA, 562 bp, Zea Mays
catagatgtgacggttttggaggtctctctcaatatttcgtatagatgggaagactctaatgcaactcaaccgagaaatgaaaagtgacagtgtgttattgtgttctctattctatacgtgtcataagagctagatataataccatgagctgcataaagattaaaatatatggaacatacattcattacctcatacgtcaatccaccattaactccttccttaatcggcccaaattaatggtagggttagctcaaccatacaatataatattgtcgtgaatattactttcgtacaccacgactgcactagataggttctgagaccgtctccaacaatgcacgataaagaagttgttaccatatatttagcattttttagaacgtaaggcctccaacaatgtccgctatcgagtccgctaaaatagcggacgtccctagtggcgactatatttagaagtgtgtcgtgtgtcctgtacccacacgtgttgcacctttcagttgccactcgctggcatcatgtccttttttattaccttttggttcttgtcgttctaaatgtgac

SEQ ID NO: 56924 - DNA, 459 bp, Zea Mays
cgagtagctaccttgctgacccctggagtggaccaaggatgctctttttgagggatttaattgtggctcattcggccttagaggtggctaacgtggatgtgcggtgtccacaatcatgactagcgactcttaacgacccggggcaggtaatctatcatagtctggcctttaggctctcgattctttctagattcctgactacctgttagcttgtcgcagttcctaggcccgaagcgtggggcttttcctatacgtagatcgggctacaacatttgttcgtgcgcatgggaggaatcagaggtcacgtctcctagacatcccagagcgtgtttgcgaggctatggagtttgggattctccatggcaaggtgatagcctatgccattacacatctacactgtggtggccacctttgtgatgttgttggcctaccgccgggacaacatcaccggacttggaa

SEQ ID NO: 56925 - DNA, 901 bp, Zea Mays
gttgggaagctgagcgcctgggaagaggtcgatctggtgttcaatgtcgcgaatggaaggaagacatggtggtaactccttcggaaacacaccggcatagtcctacaaaagcttagtaacagcaggggtatatccaaagatggcgcatcatctagtgaaaacaacatatgagagcataaaagggcatagcaaggcagattatgagcacgtacgtcatcaaaatcagattttgtggcaagcaaaataggatatttcagtttaatttcatttggtatgggcggttgctggtgttgttgtttcgctctagctatgtcagattttacaatctgttcaggtgtcattggatgaagaattattttcttgcccttaaacatcaaagagtaatggtttgtgcgaccatgatgtaagctatatgtatcatattgccaaggcctaccgagcagaagtgaacaagcttccattggaacaacatcgcaatcagtataatcatgataggaccccatagagaaatgaacatgtactgagcgtgttaccttgactttaccgccctggttaagccattaaatatggtaggggtgtgggtgtggacgtgtggggagagacaacttctccactagctccgtgcttgccaagttgttacagttgccaccatcaataatgatgcgaatggaacattcttgcacaacacctttggtatggaacaaggtgtggcactactgctgctcaggttgtgcaacctgcgtgctgagtacgcgttggacaacaagactctcatactttgtcagcattcatggcatccacatgttcttcttgggttcttgcaacatcagtggcaagcatagcatatatggtttcttcggaatcactagctgaagaatactcaccattgtcacgtataatc

SEQ ID NO: 56926 - DNA, 370 bp, Zea Mays
cttttcttttcttttcatgtttgaattcttaaatttgaatccaaattcgattgtaaactttgaatttgaactagatgtactggtccaagatgttgatatgaaatgacacatttatttatatattttccttacattgtatatagggcttttcctattttcctcttcaccttctatatcttatttctcaaattattggttcccaaaattaggtttaatgtctcttccaccatttgcatatttcttttatcattatctttatgagtgaatgcacaaacaaataaatcacagcattatgcacaaattactttaagtgtcactaattaattaatgacttttgaggtgttggttcacatgttacaataaacatagg

SEQ ID NO: 56927 - DNA, 1366 bp, Zea Mays
aacggaggagccgaaagggtatccctaaatctcgttcgcctgatctgaaccaagcaccaggattaaatctcttttaaaagaaattggtatgcaatgccatccacccgatccaagatcaacggttgtggtttaatgaaggcgtgcatcagccccaaccctccgatcagatcggacggtccaaagcagtcaaacccgaaatgttatggtctctttgatccttaccgttcaaaacacatctaacggacaaagcgcattcactggcattctaatctcagccacatagctagcatccaacgaccaagcctgtctcccttcacaccttccctcatgcccaacccagacacagcgccgtcgcgtcgcacggtggaagccatggccggtgaacctcccggttagtgttcaagtgccccgatttcaaaattaacaagcgctagaccatgctaaggttgcgatgaacgaatgggagacattactcaccagatttagtggcaaagaggccccggccccggcaaggtgcaacccgcgacgaacccgggtctccggtgagcaatccacaggataccgtcgactctggcgaccaagggccaggcggtacgtgatctacgctcgataaccatgcaccccaaccccacgacgagcaccgagcggcaatggaggcaaggcgaggggcgcgacgactttctttccttccaaggcgtaaacagcaacctcacaacggtacttggtgcttgtaatgctccggccagatgggtgagacagtcgcggatcccagactatatagcgcggagttcgatatgctcgaccggagcgaacccgagattttcgcctggtggttgagatcgtcgcgctcgcaatggggaagatgactccagctgcctagtgtagagggttggccatcgacatcgcggtacgagcgcaaggtaagacagagactagctagcgggcctaggctgtcggcgccgggatccaagggaaacgcgcatgggagaagctaagggctgacaatatgggacccacacgtaagtgtgaccaaaacttgagaaaaggggaaaagagtggagtgggtcgtgcgggatgaaatagttgagatgggccgagagagcaggaaggggagttggccgatggagcacttttgggccgagagagcaggaaggggagtgggccgacggagcacttttgggccgagagagcaggaaggggagtgggccgacggagcacttttgggccgaaacgcaggtttgatcttttcttttcttttctttttctttttattttctatttcaaagtttgatcttttcttttcttttctttttctttttattttctatttcaaatttcaattattcaaaccaaattctaacttctg

SEQ ID NO: 56928 - DNA, 611 bp, Zea Mays
gaacgggcaggccgtgcgtttataaaggacgaggtcacaaaacgcggcgctcgagatttatactcaagccgcagcaagtccgtgccccgggcgccattgtcggacgactttatcgaccatgatggttgtgattgagttgatagtactgctcacctagccccacctgtaagcggctaagagaggaatcatgatagctaatgctcggggtagcgaagggttcaaccagggtcgttggggcatggaagagtctgtcgtaggagttgaaacccggatcaatacgtgttcgactgagtttgttggagagaagcagatgaatctgacaccctgggcccacatggaagcgaggaaagtcaaccagagcgtgccacctgagactgcccaaaggggcccacctatcggcgcccaggcacagcacaggcgcgcggattgggtttgtttgtgggtgagttggaccagaactgtgggattaggcccaaattaggtttgcatttttctttttcttgttctctcttttcttttctatttcaaattccaagtaaatttcatattcatgtttgaactttaaaatttcctagtgtccaaattaacactaatgtgaatataacttccac

SEQ ID NO: 56929 - DNA, 442 bp, Zea Mays
cccttttgcgcaagagttttggattcgtgtcctcgcttaggagaacatgtctctaccgtagcaggccgatccgcggagcaccacagatctagggtgattggtgggagaggatggaggcccacttcccgaaaagtcatagaaggaatttcagcggtgtcacgatctacataatgtggaacatttggaaagaacaaaatcgaagaatattcgaacaaagttcgctttattcgctccagggggcgtgttaaggagaacctatcactctttaggggtgcaaacaattctgtgagatcgtgacaaggttgtttttttctcagacctctgtccatgtgtatcttcacctcgagagcttgtcaagctcccttctattgcacattacttttcacctcttaatgaaggcagaactcatgccaaaagaaagataataactacacatcagcct

SEQ ID NO: 56930 - DNA, 578 bp, Zea Mays
cacaaaccttcaaactattatatgccaagtagtctgccagatggtccttcggcattaaggacatcccgagctctagctttaggtaacccatgttacccatcatttctcagcagacatcaatttccttgctatcatgtagctagtataggaaattcttttctcatcaccttcgtacactagggatcctcgaggatacttcagatccttagcgtaatgctgagcttcggcaatttgcttctgtgttagttgttttcccgaagcgtgacagatgatgaattcaagatcttcggtcgacaccgcttcgggtatcggcagtgatatttcctctgacagactctcgtttacttgctctgttggcctaatttccgaaggtctagccttagtgcaatcaggagcagcacttacgtcgatagctatttccaattctccaactttgtctttggaaatcctagtaggagcaggagtagctattttcgaaggcctcagaacagtgtctagaacgctagccatccttctacctttcttaggtgttgctactgaagcggatgttatccttgactgcccttgctccaccgaag

SEQ ID NO: 56931 - DNA, 349 bp, Zea Mays
gaagttgttgtttaccgaagctttttgaaggcaggccttcggttcccgttgagcaaatttgtggttgaagtgctgaagatattccagatctttcttcatcagcttgcccccgaagctataattaggatgggcttgtttgtttgggctgtaagaaaccaagggctggaaccgagcgcgaagtgtttctacagtatgcatgaacttttgtacgagacgaaggcgattgacaaagaacagtatcacaataacttcagtttacatattcattgcccgctctaatgcaagctacccggtgccaacataccggaaaagatggcccgaggcctggatggaggaatggttttatgtt

SEQ ID NO: 56932 - DNA, 508 bp, Zea Mays
tcatttattgttttgtaacagtactcatatattgtttggttcaagtgtagaacagaaaccttcacattatacatgcatgcctctaattattgatccttataccagatgctcctgtaggcgtttgagattactttcaaaattcctaggtccgctagattgtaacatggcttattttttgtatggttctttttcctatgcatggatacatttgtgctatctattttaccttgccatccataacatgatcaagctgaaatggttgaacatcaacgctttgctgttattttagctattcaacatcaccatttctgttcatgatggggttattacctgaatagtgtatgtgtgcctggctgcatatatattgctctagtataccttctttagacagttttttatataatatctaggtccacccctgcatctggtggttgttgatccggtgacctgcccacggcgactccaccagaagactaagatggctccagggaagaggtccgcatggacc

SEQ ID NO: 56933 - DNA, 848 bp, Zea Mays
cgggaacccttgccccatcaccatcgccctggttgtgggcacttaggccaaaggaggtcacgtgacaccatgctgcaagagggcaagtctaaatatatgacattctaggaggcgaccttaccatcgttggcgaggtgaggttccttgagaactagttactaaaaagtcatggagaagtcaggcagcagatcaatgtcggcaatgttgttggtgatgctaaagaaccctaggttatagccgcgtagtatgttgatgacaagttgtgagtcaaggacggtgtggtcgacatcactgggtgcatcagtggtagcctttttctagcagtactcatcgatggggaggtcaccctgagtcatggagtgcaccttgtgactaaggaagattgcatagggagtcttgtttgtcaagtagaggtacttgatggcagtccagagcaaggggttgtttggtggctctaggatgacgcagagaatgtcgcatgcgatagagatgaggagccagtagcagacgcaagagtcggcgacaacctaagctgagtcctcgagatgtgtcgtcgttgtgccatcaacatgtggatgaaggtcaaatttgctgcacaagatgggaagaaggccgactagcgagtaaagctagggcacttcaactcaagggtgattggcacctagggcttcatgatgatggaagcgtacaaaagaatgttgaacgacaacatgagatccgattcggaagaggtgctggtaagggcactacacgtggcgttagatgtcgaccttgccattatgttgatgggagaggtgacgttggcgtggtggagtgtcgacttcgtcggctagggttagaagaagagg

SEQ ID NO: 56934 - DNA, 559 bp, Zea Mays
cctctcaagggcactgtacgggggcttgccactaagataaactagaactcatcgatgaacaatgcgcaggaacctcacttcgtcactagtgaatcccaagagtttcttgtggcaaggacgaggatggcgaacgacgacctcgacatgccgacacgatgatttccggtcaataaagacgatggcgtgacgattcctgcttcaggcttttcatcgagcatctgacgggcaccacacaaagacttcactaccttctccattatagcaccaccctcttcatccatccaccacacaagaagaccaagacaacgctggcagctggtgggaacaagttcaagaaacaacgatgaattccggttcaagccttccatcgaatgcctgtcgagcgccgcatgggcttcactcattacaccaaacaactagcgggcgatgcaccgaagcacctccaacctctccatctatagccacaccaacgcagaaaatcatcgatatagcacaaggagagggagcatgcgcagtgtcgagtaatttttacaacaacgacgtgctggagaagctccta

SEQ ID NO: 56935 - DNA, 575 bp, Zea Mays
tgctcgtcggtcatagtagcgtgtacaatagcggcaggctccctatgctgatcatcggccatagtagcaggcactatagcaacttggcgcacatgcccatgtgaatggtcagagagtggttctccctccccttgcggcatgcttgcaacattcggtagagatgtgtcattttggtgaacagtacctcctacatattgatgatgttgtactgcaatattctcattaggcatgttagtatcaacagggaaaaagtcagggacaacaggatcacatctatcagcactcgtttttgtcgtaaaggatggcagcaaaagaacttcagatcgtaatttggcacaagcattagaatggagagcatagatggggaaacgaatctcatcaaatgtacatctctggagatgtaaacacgtccagtggagatatcgagacatttaaaaccttgtgaagagtactataaccaataaaagcacattgctttgatctgaattagagtttgtgagtattataggggtgcaaattaggccaacagacacaacaaaaaattcgtaaataagaataatctggcttttggtgaa

SEQ ID NO: 56936 - DNA, 685 bp, Zea Mays
tcgagttgtcggtgcccaggccttcggtatcgcgcccaacgccttctgcaaccccggagaagggaggtggtggtagtgccacctggaattcgttaccggcaccgcctaaattgctcgtcggagtcacgccctagccgccaacccgctctgcgctgtgtccagaccctccaccgcgccgtatcaaggtaatatgtaactctaattgactcgcgtcagctggggatcgggcagagcgtttcggctagaagcttgagtgtggaatccagggggcgagggagtccggtcatggcgtaccgtcgtgcggtactatttcgtcgtcggcgatggcttggggaatcgggggaaatcgtgattgaccattggattcagcggacggtctggattgagcaaacgaggctggatgggaaacaacccggaaccgttgatttcacttgcgacggctatgattagaacccgcgtaacctttcgagcttccgatcacgaccctccatcggtgatccgtcgattgcgagcccacctccgtagattacatcgggcggccatggacgcataccagttcgcgggggcgccgatgtgatctgagctgttgattgataattggacggctctcatgccgtgatacccttcacgagtacgatttactaaagagaccctgggtaaagtaaaaatcaacccgtcgtccatg

SEQ ID NO: 56937 - DNA, 650 bp, Zea Mays
ccggctgcacccttaggcgacttttgcacggagtcgtcttttagtaaagacttcgtatcgtgcacttgttatgcttgtccggctacacccttaggcctcttttgcatggattttgtcgcacgcgagggtagtctacgctacctgtcacggtgaatttgaatcggtcgaatgctgaaggccgtcggagcggtgtttttcgacatgttgattcttgaaatttttttgcgggggcttttcaatggtatattacatggctccgcctcgttaaaaacctcacccccgggaggaaaagagtgcgggcctgaacaacattgtttgcagaattacaaaggcgcatagaccctgggacttaaacaaaaaatttccagagattatcgatgttccatgacagttctaagtcttcgccggatgatgttgccaacctgtaagcactgggggatgccttcgtcttgactatgaatggaccttcccacttcggctctagcttgccccatgactctgttcaggtggttcttacgagtacgaggtccccttcgttgaattctcttgggatgactgcattgtcgcgccaggccttggtttgaacctgatatttgtcgagggcctccagggcgaggacacggtcttcgtcgatgagatctttggaagtt

SEQ ID NO: 56938 - DNA, 558 bp, Zea Mays
cccgcctgttagttgtcttccccaacagatcccgtggcacggcaaactcggagcggccgacatccgggacttcgcgtggtcctcggccatgccgtttcttcagccggagcatatgcatatatatggaaaatcgtaggccgccttgacccatcgacttgacctacaacaccttcgataaagaagaaccatacaaggagaaacaacatagagggagaaaagcggatctgccaccgtcgaaccgggcatacgctctcggtggggtctcggccttgggtgtgggggattcgactcattccctaggagttgctcgttgtcttgccctacccgattggatcacggagcaccggagattgctcgtcgtcgggagacttcactgctgcaccacatggcgtctcggtcgggcttcctgtgtcgctgtttgctcacggtaaggactccattcaatgcgccatgttctccgacctgcttatgcatccgattgtgtgggaggccaggtattagggcgggccatgcttctccacgcggattcatggttgtgtggtgggcggcgctgctgcc

SEQ ID NO: 56939 - DNA, 663 bp, Zea Mays
atctccgactgccagcgttgctcgaccaaattggccaccaccgcttaagtatcctataaattgaagcctcagcccgttccgctaggtaatcgtgcgtctagagaacccgctcgtagctccgatcattccccatagctccccaatttccaatttcccccaaatcgactctccgccgccgtaaaccacccatcaccgcaaccagccctttccaggttagttcatctctctctcccttgtttaagcaccctggttactctgtgatgcttgccgagccttcaatttaaactaggagaccaccagtcgccgggaacacgatgatctagccgccatgctctcggtcaccgtggccagagctccttagttggtcttggatgcaattaggttgggggaaatgattaaggtagccccaatttcatgtctgttgcttggagaacctagccgttgccccaatcggctggtctgctagctcgccggagttcgtccctgtgcagttcgccgccagggacttcggacggagaaaggatagaagtgcggggttgtttttgtagatgtcagagagacattgaacagtggccaggaattcttagtagatatccaaaacgttgaggacctctgcgcaaatctgccccgcgtgcgcgggcacgcacgtgtcttttcctctgg

SEQ ID NO: 56940 - DNA, 872 bp, Zea Mays
aaaatatgcctttggcagatatatttttacacaggagaggaatcttcatcagcagtattacaatgcagcaatcgtggcaaaatacgcactattgaatcgatagaaggggaatctttttcttcgtgaagcatgaaaagaagggaaggtgtttttttgcgagcggctcaaaaacggtacgtatggaagtttcatgcatcacaaagaaatatattacatcaatatacacactaattgtttacaagtgtttcttgcaagactagagatcatgttcaacaatattaaactagcaaaaataaaagttctagttttccttcaggaccttctcgacagcttcgtttaacagcttattgacagcttcgtcaacagcttcattggtaattttgatagtctcgagtgcttccttcaggaacgggtcggcttctggatcatatggctccagaggcggagatagttcagctgcaccgtagtacatgattgttagttccgaagctaaaacggattacgaagctaaaccacagcagatgcatacctttaagcctagcctgctcggtagcttcttcagcccttcttgcctcttctgaagcatcatgagtttccttttcttttcttctgatggcttcatcggcgacttctcgcccgcccttcagccatacctcgaagtaaaatttaccacttagcgcagaagcttcggccgaaggatttttcatgtcgtcgactgagagagcaaactctagctgaacaacagccttcgcatgatcacaaccgaccttttccagaattgatgtggccccacgggcaccggcgagagcgcaaaaatcccctctgtcactgagaatctcttcaaaagcttcagcctcgccactaatccactg

SEQ ID NO: 56941 - DNA, 565 bp, Zea Mays
cattatattaacgatggatggatgtttcgtatatgtttcattttaatgtatgtatgaaggggcagtattataaaaaatatatcactatatcatggaactcggcttcatttgcaattgagctgtcctggcttcgttttctaccttgctgtaagcagttgcaaggacagtcaaaggtcaagagcttgcattggcggggtgagagatgatgaaccccacccacacatgaatggacatggctagctcacccccacatgccccaactaaacccaaccagaaatccctcgtttaaccaaccgaccccttcctaatccgccgtgcttgtcaaatcaaattaatgagatgtactacgtatataaaaaccacaaaacccccctccgatcctttgcctaccaacatccacacacttgcatgcaagataggcagcagccacttgtagagagattcttcctctacaactgaggcagcagggcaccgtgcaagcaacaagcgacgacgactagcagctgaggcagagcacaccaaacggcccgggatgtcaaccagagcgcgcggcggcgggaggcag

SEQ ID NO: 56942 - DNA, 559 bp, Zea Mays
attttgtttctgtgatgagttcaagacaccagcggtaatggcatgtagaaccatgtctcctacaaaacgcagcagcaacaacacaggttctattcagcccttcacccgtcagactcggcggaggagctcagaagttggtacacctgagtcatcacatcgcatgacccactcgagtgcaatgaaatatcttagacagaatgatattaaaggcgattctgatcagtatgctatagctaatgaagtacttaaagacgaggcaaatttggatgcattcgcctggctgccagacattaaggaaatgatgggtttcatgctgcgaacctagaacgtaaaggtaagccaggcatctaatgtgttcatgttttaatttttcagctgtatttgttcaaacttactgttctcaaagcaggtgcatggtagcctgaacgcaggggacatgaactcttgagcgcctgcctgctgctaagccaatgtcttgctagcatattttcccctgctgatcctttgctagtatttaggttctgcagttgcagccctcccatactgcagctcataattt

SEQ ID NO: 56943 - DNA, 1068 bp, Zea Mays
ccggcgtcccacgacgacaccggccgcatgaccacattgcacgaccgtcaagtgcagccgataagctcctgcccgcgaccaaatccacccccgctagatcttttacccccgccccctgtggttatccacttcgcgccgaacacgaattgtggtggccggcgtgaatctatgtgcgggtatcaccgatggtgaggtgcgatgtatctgaagattttcttcatcactgtaccatcgcgactgttcatcacagtgcctgatagagcaaatttgggaatgatttactccaaaaatcatacagcactaggcaaagcttaatacaacaaatttgtttaccaatgtcagggcttcaacttcatcatagtgaccttggacttaaacccactgaattgtctctaatttatctccaaagtccgaccagtgccactgttaagctaggttcagagttctcttatgactgacagcccgacttctagggtattttatcccaatttccatacagcatcaaggcttagtcacttaatcaactttgaactactaacatagctctaacattttgttgtaatgacttaaggcaaaatcttcatggattaggaaatacaagggtacaaaactttgcccaatgtcactaatttgagggtttaagccatatgggtgttcttggggcttttgcaattaagtccaaattgttccacattacttgaaaatcctccaatgtaaaagttgtttggtttttgatattctaccactttgatacatacactttgctccaaaagtgtatagaatttgaaatcaccatatagggcacaaaatagggtttctagggttcattttagggttttgggtacttttgggtttttgtgctactcaaatccatcaaacttaatctcttgtgactatttcccatggattttgaggtatttttcaaattggcttcacatttacccacatgccctaatcccagggttaagaacacttcaagtcaccacatcacacttgttttgaagttttacctagtggatgcattctaggtgtaacaaacaaaatgaaatgtcaatgcatatgatgtca

SEQ ID NO: 56944 - DNA, 936 bp, Zea Mays
tgaattgcacagagcttgttttgccacgcaaaccggtatatactcttggaactgagtaaattgcctcacatcagacagctttatgcatggctttctttataccaaaatgttggctgcaaaggaacatgaatggacctgtggaaatgctcctcgtcgtgtgtccgatgcattggccactccttccacataggaccacttctccaatcaattaaaacatacaatttccaccatcaaacctccaccaccaccactagctttttattatacccctgctcgacacacctcatccctctctgattccccatttgcttctatctcctcccgtgctctcctctctcctcacacctcatctcttcaagcaccaatctagtgttgtttatgccaaattcgagatgctagagatctgacctggcaggaaccaaatggcagcatacacgccccctatcaatgccaccaccactcttaacatgaagaagttgtccatcatggttgctgggctgctgaccctgtcctgttcggctgctcctgcttcctcatgggtcaaggagtaggtcaaggggaagaggaagagcatccctggaggtgattgtgtcatcatcaagttgacacaagcttaggtgccatgtgcagtaacagcagcctggccaacaggacctctactccatggagcacttgctgcggcaatgcttcgtcgcttttctcagaatgtttcaatatcttaaattatttgttgcaagggttttccgggatgtcagactcagtccttgggggatagaccaccccgggtattaaagaagagattttctcgctgcaggatcgcgaaaacaccctgaaggccccatccgcataggttatctgtccaggagcaaccaggatgtggctgcaggttacttatatctctgcagctgcgtcagtggaagaacaggccaacaaggg

SEQ ID NO: 56945 - DNA, 911 bp, Zea Mays
ccgtacccatttagcccaaagcccggtactcaaattatttctgcgggtaatgaaattgaaaacccgaatttagttcgagcctaatcgggtaacgggtcgcggtacccgaagtacccataatggccgaagttaattttgttgtgcgtcttgtagcttttctataggctttcagccaaaagaagtccagttgccaagcccactaatgccccaccctggagccacgtagccactacccatgaacatccaggctccaaacatcacccaaactagcccacgcgcagcacccaaactagccaggccgcccactgtcccagctcccaaccaagcaccaggcgctcctagggctaggaaccctagccgccgcagcgccgtcgatagccggtcaaggctccaacgctcctcggctccgatggttgatgcttcctccgctctcgtcctcgttcgacactctgactgaccgtcggtgtggatcgtgctgtgctaatgcctcctctccttcattcatctgccatggtccttgaccagctagaagttccccgtgctccttcattcatctgccatggtccttggctagctagaagttccctgtgcctcctctccttcattcatctgtcgtttggtgcctcctccccactcctccagtcatccagtacaacgacgaaataggagcaacatcaccaaggtccttgactagctagaagttctaaaccgggtacaatgggctacccatacccgaacccgaaaatttcgggtacccaatatatcgggtatagagtatagtaaacctgttttcgggtatagtttctagatacccgaaattttaaaagcccaaaaaacccgacccgaattttcgggctaacccgaatgcccacagctaacgccaacggtcacctgcaacagcaattaatgcg

SEQ ID NO: 56946 - DNA, 719 bp, Zea Mays
agaattaagccctgaaagaaaaagaaagaattaagcatgacaatgaaatacttcatttcaaactttaaagttaacagcttttgtacctttatactgttgtatgcaaggctatcagcaagatcatccttcgacatggccgaaaggccttcctcaagcttcggaaatcccatacttttggctatttctcggcaaaccgatatttctttgttgtccgggagacagtataggaagtcatctttgtcagtgccattgaacactaaggctcccttcggatattttagtttctgggcgtagtgtctggcttctaagatttcttctttggataattttttcccgaagcatgtcgaataatgtaatcaacatcttcggctagagcttcgggggcaggagattttgctttttctatcatgccttgccccaccgccatgccggtatctgaagtttgttgctcagctttatcctcaggtgcaatagccttcgtctcaatgggcatcgaaggacccagttttggctccggcctggactttaacagcttcggcaactttcttagtaggagcagggctcaaggcctttgtggtctccatgatagcgtctagcacactagccatcctccttctcttgggagtggaggcaggagccttttgcactttcgacaattctgcctttgctggtggactcagaatttctagcattatcactgtttttcccaattttggctc

SEQ ID NO: 56947 - DNA, 822 bp, Zea Mays
cccgagaaaaggcttcagctttctgagacggactctttgcttgtggtttggtgcgctgaaaagactgtggggggtggcatgggaggaaagactttataaatctggattgggtaagtgttttactgccatgagatctcattgctatgattgttgatctgaattttgattctcatttgtggttggtgtatatgcttttatgtagtagcagttgcttgcacacaaaatggcactaggtgtgggggctataaaattgccagtgtgtattatgttggtgttagatcgttttctgcatggacaatttattgttttcatctactttttgtacgaggtgttttaatctattgtaccttctattatttgcacagttaacctaatcggtcgtttggctaaacgacaggtgatcgttggttcgacgtttaatggatcaggatatgtactatgcgattctgcacttgtatcgtcttgtgtaacttgtggacatattattcacataaaatacaaacacattcctgatgtgtttttatttatccagcatatatcaaccttggaacgtaggaagactactgcagcgagacagaatctctgttcccttcagttggacattggagtattctagtattcattgtgcattaattttggaacaggtacgaatgtacaacgatggaagctgcgcggtgctgcacctacacaagcgcaaacaagccccaaccagaatccaattcggtgacgatacgcctctattggctacctctgtcaggcaggaagcactgcaggatgtgatacccctgctgcatgctagtcttcgctttgactgtattattc

SEQ ID NO: 56948 - DNA, 610 bp, Zea Mays
gtgaattggtgcctggggtcggtcaggtcaggtggcagatttcagccatggtttgttggaaaggaaggaaatcaatcatcctcttggttcacgtgatctcacaccctctgcggaccagtcagtttatcacgagtggtatgtgcagtcagctcactggatggatcatgtgaaatccgtgacagcttccgcagatctggaaactcgaacggaacggaacggaacgggaaggcgtaactaggggctgctgtagcagcctcttggtaacagtgctactacagctcaggtgtccgtcccttcctcgctgcttcagtgacagctagtacgttttagtaagacagcgaaccaaactgtggcaaactttattactgtcattgcttgccctcgtcaacgttaagcatcgcccttacgtttagtaccacgtgctctctcagatttccgaaacacagccatcgaagtttatggtagtaccaaacataaacaactttgctctcgcgcaagtcaagtctagatatggaccatcgtcctcagtgctatgttttattgcactactatttctaagagaggcactccctctacacacaaaaaaataaacgtaattctagtttttttg

SEQ ID NO: 56949 - DNA, 478 bp, Zea Mays
agcttccacacgcttgccccagtgatcggctaagcatgtttgaatagctctctgataagttgctccagcgtttttgaggccgaacgacatggaggtatagcagaaagctccgaatggagtgatgaatgttgttttttcctcgtcttcttttgctagactaatctaatgatacccagagtagcaatccaagaaagacaacacagaacatctggcggtggaatctaccacctgatctatcctaggaagcccaaagggatcctttggacagtgtttgttgagatccgtatagtcgacgcacatgcgccaatccactttattctttttgagtacaagaacaagattagctagccactcaggatgcaacacctctctaatgaatcctgccgcgaccaagcgagccaactcagcatggatggcttctctcttgtcgtgcgtgaagcgacgtaacttctgtcggattagccccgcctgggggtag

SEQ ID NO: 56950 - DNA, 1194 bp, Zea Mays
tggtcgaaccaccaccttctcctaggggaacttttttacctcccctggggatgttgtgtcgtcctttcgacgaccagcaccatgctcaccacctctgtagccgctgcaatgtataagtacaacgtctcccctggctctggagctaccagtattggtagggacacaaggtgctgcttcaactcttgaaaggctcgttttgcctcttcggtccaagagaatgggccggacttccgcaatagcttgaagaagggtagtgccctctcagccagtcttgagatgaagcgactaagggcagccagtgaccccgtaagcttctggacgtccttgatgcgggctgaaggcctcattgtatcgattgctttgatcttctctaggtttgcttcaatgccccggtgcgaaaccaggaatcccaacaacttccctgcggagacaccaaagacgcacttttccgggttcagcttcgtgcgtgttgccgcagcttgtcaaagaccagggttaagtctttcactagggtcgaccctctcttagtcttgaccacgatgtcatcaacgtatacctctaccccgtccctaattaggtcaccaaaagtcttactcatcgcccgtacaaatgttggtaaggcgtttttcagaccgtaaggcattacaacataacagtaaagcccatccaccgttacaaaagcggtatgcttcctatcttgcctagacatctggatctaatggaaaccagagtaagcatctaggaaggataggaggtcgcacccagaggtagaatccacgatttgatctatttgtggaagtggacatgggtccttgggataggccttattgaggttggtgtagtcgatgcacatctgaagcttcccattagccttgggaacgatgattggattggccaaccatactgggtgatggacctcttcgatgaagccagcgtccagcagcttccggacctcctcacggatgaaatcctgccgctcaatggactgtctccgaggcttctaactcaccggtttggcatcagggtggatcttcagatggtgctcgatcacctccctagggatctcaggcatctgcgacggttcccatgcgaatacgtcggcatttgcctagaggaaggcgatgagcgcgatttcctatttctcctccagatcgcctgcgatgcgagtggtctgggaggaatccccgctgagcc

SEQ ID NO: 56951 - DNA, 547 bp, Zea Mays
tcatgcgattggggaaaacagggtccataatcactacactccttaccacaccgagggtactattggtgaccatttacccactcctccctccctgggtcacttgcccaagctcaacttccctccattcgacggagacaaccccaaattatggcaggctaggtgtgtcgactacttttacatgtatgttgtccaccctagtgtatggattactgtttctaccatgaccttttctggccccgcagcgcggtggttacaatatgttaaacccacactgttctctatgtcttgggagcagttctgtcaacttcttctggaccgctttggcaaacaagagcacgaaattcttatccgtaggttattccacatcaagcaagccaccactgtcactgcatacattgatcagtttgcccaattgctagaccaactccgtgcctattagactatcacagaccccctatattatactatgaaatttcttgatggcttgaaagatgacattaagtctgttgtaatgattcaacgccccaaagatttggatactgccttc

SEQ ID NO: 56952 - DNA, 561 bp, Zea Mays
cgacattttcattttcagttcagggaagttgatcatttcatcaagtttttcttgagaagggaactgcataagatacccagcgtgacacttggtcgctttccaagtcttgccccaggggaagtgaaacccaaagtccttctcaagatcttctgcagaaatcaaaccttccataacagtgattaatcctatgaaactccttttcggttttctggacagaggtttcgcaaaatgggaagagtaaaaccctaaaccatcagccgccatacccataataggcatacaaggtttgttttgcttcggcaacacacatcgggccgtcatgtgggtttctttgtgacaaatatcacaccacagagaccggaagcagtcccgagcatgatgaccatcgactccacatttttgacagaaagggcgacgcgccacttcaagctcttttttcatagtaacgggaggggttttgaggatacctgtgtgacctccctcaccagcagacgaagcgccaatgtcttctttggtctcagcttttccaataatcggcttcaacctccaactgggattacg

SEQ ID NO: 56953 - DNA, 640 bp, Zea Mays
ctacaactccttttagtatccataataagtaagataaaccattgacatcacaaatcgcaggaaaataggagatttcttctaagggaacaaggccattggcagtgctaacattcagttgcatttatacagtgagagaatgcaagatcatgagaacaatgtaaccaaagttgttgactaggaccattagagaatttgtaatgtcaaggccacacaagtaccttctgattcagcatctgtttatctgatttgataggaaacctcctacagttcatgaaaagctgaaaacctaaaattgtctccctcgaccttgtcagtcctggagcattctaatttaccatgcaccactactgcaatgactgcataagataaaatcacccatccctaaattcatggaattaagagactgaatcacaccaataaacgaaaatttatagtggcaaacagcaatacatactgctgaataacagtagcagacaagtcgtagccttacctgaaccaaccagcctcacccagtaaataactgaaacctttccccaatcaacaaaccaagaaaaacaagggaaacgaaaaatcgcaaatcgcactaaggtcatctacgaacattaggggatgaacaggttgatcgaatctctcagtcttt

SEQ ID NO: 56954 - DNA, 1337 bp, Zea Mays
gtgccaacaggcatttgctggcggttggttgcttgcaaccgagggggcctgaaaggagctctgactctgctgactgtagcatgatggagtgggtccagctggtctattgaagcttggtcccttgggtggaagcccaaaggatcgagctctctggtgatggtcttgctgttgagctcggagaacctagaatttcctcttgaggtgccctttatcttcctcttttgacctttccacttggatggctttgttggagaggtgcgagaagttgaggaagtcttggctggcgaggatggtcttaagctctggtcttagccccttcagaaaatgggccatcttcctggtctcggtgctgacatcgtcaggcgcgtaacgagccaactccgtgaatttgtgcacatattcactgacagatcttccaccttgagttagttcccggaattcatcttccttgagttgaactatccctagggtacgtggtgctcacggaaggcagtttcgaattttgcccaggtagcatccctgacggtctcgctgaaggtatcccaccatgctagggccatcccagaaagttgatgagcagccaattgaacacgctgattttcggggcatccgatggcttccagcttcctcttgatcgtgtgcagccagtcgtctgcatcgaggggattgctagaccccgtgaacgtgggaggcttgagtctcagaaattctcccatcctgtcctgtggtctcccaccacctgggcgctggttttccagacttctagtgaggacttcaatgagtcgggtctgattggctagaacttgggccaaatctagtggtagttctggaggcgcggggaggtgggtctcactcccttctccgccagcttctcctcctgctcttaggggaaaacctgctccaatcccggaggctgtaggtgtggttttatctgaagccatctgccaggggaaaagagttactactatgcacatgccaatttttttcaaccagttactttattcattacaccagttcattacagcacacaactaccataagttcattacacacaagggctatctagggtacttccgaactccttctctaaagtgtccccaaattccttgagaaggtcatcaaggctggctagggacatttcctcggtgtcggacgagttccctattctggtaggaggtagggctggaggggcttcttccttctgctcagtctgacatccttggcttttggcctttttgcggatttttcttgcgggggcaagcttcttcagcttcttgtcgtaatccatcttcagagtgcggtaggcctcacgggtgttggtttcctcgccttctgct

SEQ ID NO: 56955 - DNA, 612 bp, Zea Mays
tggcagactggatcgcgtcgccgacacgatcgaagactggcgagacatgtggccaggacgtggggtgcgtatggagtacgctactctgaaggtttcgatggttgagcctcaaaaccacccagcgctacagagggctagtttcacctagtttgggcctctaaactcggttgtgcgattctggtggaaatcaaaggcagcacatggcgtcatcgcgaagggtgcgtcgaggcaaagcaacttcgtgaagagtgtctaaccgtcagataaagaacctaggagttggtccatttttctcttggctgagagaatagactcaatgtaaggggtagtttagtctagataaataacctctataaataggtaggagggttggtcggttcagctatctcttttggcattggagcactctctcttccattgcctagtcttgtaattgctctagcttagagatccactggtgctttgaacacccacatatgtgttcctgagattttgaagaagtttggtcataaccacatgtggtccagcatgcttttgaaatcttgtcaaatctgaagttgctgagtttttgtctcgctttctctcttctcaatccctctaactagttttgtg

SEQ ID NO: 56956 - DNA, 930 bp, Zea Mays
gaatgctgaagtcttctctctctattcttcccctcggcagacatggctgggtaacccatttgacataatcgtttgcgacgagcacctccaggactgcaagctccttcatcctcaccgaaggcgcgcccagctgcagcgctcgccgatttaatacgggcagatttagatgactcgccggctagcatactaagaatagcgttcattttagcctcatcagcagttgtttgcatctggatatgggtctgtctctcagggagattctagtacatagcaacgaaggcctcaatatattctgaagagggtcgcactctatggcctggactgttgtcttggataagcgggttggatatgaactctgaaaagggcctttgcggtaacaaaacagcacagtaaggacattacacatgacaaatgcaggaactcataggaaacaacgcttaccataggtggaagattctaggcagaatacaaaaggggagcaccagcattcgaaactttgcctctcagcatcgaatcaactcgactcaacacgtcctccttagatattcccctgttggtaattcgagtggggtcattaacaccggtgtacaggtaagcagggtagactctatccttcaaaggctgaatattcttaaaaacaaattcgacaacaacagctttagcagtcaagcctctatccctcaatgcacatatctctgcaagtagcaccctggacttaggaagctctgaatccgtggggatctctgtccagctaggcgttcggacgtcgggctaatcgagcgggaagttatttgttatgattctccatagtaaaccactcgaagcgccatcccttaatgttgtctttcaaaggaatgttgagatactcagctttactgcctcggcgaagttccaagctagcacctccaacaagctgatgttgccctccag

SEQ ID NO: 56957 - DNA, 568 bp, Zea Mays
aattatttggtaaggtctttttgcttactaatagagtcccaatttatgatgtcttatatgccaaaaaggcttccatgcattatatatcttcaggttacttcaggtaaaactttatgcatgaggaaagagagcacgaaattaatttatctgtgttctatattatttcatttactttcccagattattcaagcactatagagcttgatatagttgttatggccacttggcaatataaataaatatatgatgccacacaacataagcaaataaaatatagagctaaacaaaattgtttacgaagattgcgcataatgtgacttgatgaccttgaacaacccaccacaatccaagcgagtacaagctctagtgtatctcgcatcaacgcgtgtgcggccatcagggctacgacagtatagcaagccttcgtaataagcgcaacaggcgcggttgtggcttggtagttggggtacacgataagtacacgcaacaggcacagcaggcgcaacaagcgcaattgtgactcaatagttgcgacacacatgcaatgccttcagggcccacgaaaaat

SEQ ID NO: 56958 - DNA, 401 bp, Zea Mays
gaagaaggcagtagcgccaggggctgtccttgcaccgttggacatcaatcaagaggggctccctctaagggaagcccaaagccagaaaaggaaggccattagcccaaccacaggaagaagggttggatcaagaaatcagagatctagaggttatccaccaacaagtggagagaagaagggagaaaatgcttcggctgtctgaactccagaagaagattgatgaagctgccgaagagatgcgccacatcacacaaaacaacgaacaagggcgaaggccacatcagagagagcttcgttaggaaagcccaagctatgatgacatatggtatggcgatttccatcatgataacattgcttttgatgatgcttccccctagacacagaattgcaggctaccccag

SEQ ID NO: 56959 - DNA, 287 bp, Zea Mays
tggacgaaaacaggacgacgtgaccagttcgagatgcgatttttgctcccaagtgttgatggtcgttggatgagcatcgtgtggctgcatttaaaaacgtcgacgtggacgcacggctgggcagatttatgtcctgctttaatatatagaaattaggttatcttcagcataagttgcgtgctaatgagcattttgaatggtcctagtacgaatgcgagtgtgcaaatgacaggcgcttcaaacagagtacacatgtagacgtacgaatagaactgtggtggagagag

SEQ ID NO: 56960 - DNA, 434 bp, Zea Mays
ggggggttggcttctcgaaactacagtggctgttcaagcagccttgcctaccgggaatatggcaagtacgcacgcctgcatacctaaatgacaggccaatcttggaccgcatgatgatgctattgctatatatgcatggtactccgatctctgcgtgtatctcctttcaaccgtcggttccactgcacgcactcaactcaggctcttccacacgtcgcttcgtctgccggtgcgcggccttcgaccacatccagccgcccacctgtcgatcgcactgtcgtccgtccgcctgattgatggacgtaccaacaaatcgctcgctctgtgcatcataccgtgcgagattccatgcgtgccatgcccatgcatgccatgtgtttgcagggtccttgttcgctgtcgtgctgtaggtagggttctcttgctttccttag

SEQ ID NO: 56961 - DNA, 898 bp, Zea Mays
gctgcaacaccaaattcttctttggataaaccaagttcagcccttaaattgtttgcagcaacagcttcatcaatgcctaatgcctttcctcccccagcatttggtaaccccaaaataaggtgcaccgtctcctttgtaatttttagctccttccgtgggtcggctcgaattgtcatatcattatggtcaaggttttccatcagccaagctaaatgagatctactgccaagcgcgtcaactctcatatcaagtatactggagaaccccctccgtgcaatagcttgacgttgtctgtcatttaaaatctgaatgcttactataatatcttggggattgcatctcacattaagcctctgctgaaataatgtaaacaatgaataacgtaaacatttacatctacatgatcgcaactcaatgtttaaatcaaatctcaatacaacataatttcacgcagaaaatgatatattggcattgaccatcaattctaacctgtcggggggatccactgctttcctccgctttgtaactaacttcttcaagacttttggaggactgtcatcaaagttacgcttcttcgataatggcataaagtcatcgtcctcgtcaccatcctgcattggtttgtgtctaacagtattcaccggaacacggggtatgtcgacactaaagcactcttgagtagactgaattataattcgctttggattagacggaggtcggtctacgttcttcatgtatgattttcctgccaaatcaaacaacacacatacatataaaacgtataaaaacaatcttatggagcaatacaaattctgctcatatgcaacagccaattaatgtataagctggctctttcgtgcgtactggccctaaatgacttacctgcttaacaatgaat

SEQ ID NO: 56962 - DNA, 357 bp, Zea Mays
caccaaacataagcacatattctttaaaacaaataaactaaagaaaaataataacaatccgtacctgctccatcgcccggtcagacctttcccggacagtatcacggtcgtgagggccccacatcctatcataaagcgccccagcagaccgctttagcaccgcgtcttcaacctagaagatttcgcggtcgaagtcttcgtcggaccggtcaaagacttcgaagtgcctacatccctcacgggacaaggcattcgcggctccctcataggtgatgagcgaagcgaaggacatgagacccgtcacgatcgatggaaggacctccagtttctcctgcaaccatccgagaaagcggaggc

SEQ ID NO: 56963 - DNA, 564 bp, Zea Mays
aggaaatgttgaagaatcatacgcattggttgtggatcagatgaagggaaaggtataatataggtttcattttttgccggtcttgaggagtttagagaagatacctgaccggattagtaggctagatagccgtactattaagaggggtcaatgacttagatctgtgtaaaacttagtgcctcatagagcatcaagtagttgcatttgcataaggactaacagcgcttcacatttcgtgagttaaaagttctttcaaaagcatgtttgaaaattgcgaagtcatggacgcgcggactgtccgggccttgggggcggaccgtccgcgatcctccagagggggtccgaagtctgaccatttgtgtggatactttgttctattgcactgcggaccgtccgggccttagggccggaccgtccgcagtcatgaccagagaagggtggcttcgggccagtccctgaattataggcggacggtccggctgtgatgggcggacggtccgcaagtgtcaaactcgtttttggacagggactgtgtgtttttgtagatttgtactacggactgtc

SEQ ID NO: 56964 - DNA, 2083 bp, Zea Mays
caacaatcaaagcttctctagggttttatttactaagctaacacttatatatatacaagagaaaagcttatcaacgaccagaaaatgaagaccacctgtaatatgtggttgtgaggagtctcggcggcacagtgcaagctctgtccaacccagccgacgaccaaaaacatgtcatggttagcgagctgacctctgtgatcgttaaacatagaatccaacttttccttcacgacgaccacagtgattggcgtgaatacctacctcaacccgcgcgtaaacagaaaaggaattgacacgatctacaacaaccccgcctgaatcgaagctcactagatctccttcaagatttccttctgttccctgtcaatagatcaatctacggagcaggggcggccacaatgtcttcctcctcccctcggtaattcctaaccagccaccacgtcttcctcctcccctctgtaattcctaggtcaaaagggagcaggagcggccatccccatcccttcccttctaggtcgcgaccatcttctcaccttaggaaccacattcacctccctaaaacaacatcccccacaacccgtgtgcccctaatttatattttggaaccacacaaggcaattcgtccaagcaaaagggtgttcctgctataatcttcagagaatatatgttaattagttagattccacaagtttatatgttaattgtgaggcatagtggctgatctgtgagaagtgtatacaaaaattacttgtatcaaatgggaattcagacaattgtggttgtggttgagatcaaaatatactacaatatttagtttaattagtgatgctgctagaacctcaccacatgtgcccctaatttatattttggaaccacacaaggcagttcgtccaagcaaaagggtgttcctgctgtaatcttcagagaatatatgttaattagttagattccacaagtttatatgctaattgtgaggcatagtggctgatctgtgagaagtgtatacataaattacttgtatcaaatgggaattcagaccattgtggttgtggttgagatcaaaatatactacagtatttagtttaattaatgatgctgctagaacctcatcccatgtgcccataatttatattttggaaccacatagggcagtttgtccaagcaaaagggtgttcctgctgtaatcttcatagaatatatgttaattagttagattccacaagtttatatgttaattgtgaggcatagtggctgatctgtgagaagtgtatacattaattacttgtatcaaatgggaatttcgaccattgtggttgtggttgagatcaaaatatactacaatatttagtttaattagtgatgctgctagaacctcatcccatgtgcccctaatttatattttggaaccacacaaggcagtccatcaagcaaaagggtgttcctgctgtaatcttcagagaatatatgttaattagttagattccacaagtttatatgctaattgtgaggcatagtggctgatctgtgagaagtgtatacataaattacttgtatcaaatgggaatttagaccattgtcgttgtggttgagatctaaatatactacaatatttagtttaattaatgatgctgctagaacctcatcccatgtgcccttaatttatattttggaaccacacaagacagttcgttcaagcaaaagggtgttcctgctgtaatcttcagagaatatatgttaattagttagattccacaagtttatatgttaattgtgaggcatagtggctgatctatgagaagtgtatacaaaaattacttgtatcaaatgggaattacgaccattgtagttgtggttgagatcaaaatatactacaatatttagtttaattagtgatgctgctagaacctcatcccatgtgcccctaatttatattttggaaccacaaggcagttcatccaagcaaaagggtgttcctgctataatcttcagagaatatatgttaattagttagattccacaagtttatatgttaattgtgaggcatagtggctgatatgtgagaagtgtatacaaaagttacttg

SEQ ID NO: 56965 - DNA, 389 bp, Zea Mays
ggagctctgactctgctgactgaactgtgacggggtgggtccagctggtctactgaagcttggtcccttgggtggaaatccaaaggatcgagttttctggtgccgatcttgctgctgagcccggaggacttgaaatttcctcttgaggtggcctttttcttccttcttttccctttccacttgcatggctttgttggagaggtgagagaaactgaggaagtcttggctagctaggatggtcttgagttctggtctgagccccttcaggaagcgggccatcttcttgacttcgatactgacgtcatctagcacgtagcgggccaattccgtgaacttgtccacgtactcgctgacagatcttccgtcttgagtcagttcccggaattcgt

SEQ ID NO: 56966 - DNA, 841 bp, Zea Mays
catagcgtggtctcatcttgacattggggcgagagacaagggacactgcttgatgatggagcaaccgaagccagacccagtctcccactgtgaactccaagtcgcgatggctggcgtcgtagtagcgcttggcgtaggcttgtgcttgcaggagacggtcgcagacttctgccaagaacatgtcccgttgttgtagcatgtcgtccatggtctgggtctgcgatgtgcccgtcataaagggggccaatgtcagtggttctcgactgtaaaccacctggaacagagtcgtgcgtagggcagtgtggaaggaggtgttgtaggagtactccatctatggtaaccaccccacctaggcgcgtgggcggtcaccggtgaagcagcgtaggtacatggcaatccacttgttgacgacttcacattggctgcccgtcagagagtggaatgtggtgctcatacgcagcttgacgcctaccattttgaagaggtcacgccatacgacactggtgaagacctagtcccgatcacttacgatggagttgggaaatccatggaggcaaacaatcttggtgaagaaggcacgtgcgacggaggtggcagtgtaggggtgtcctagggcgatgaagtgggtctacttggagaaacggtccacgacatttaagatgatagacttgccatggactcgaggcaatccctcgatgaagtccaaggcgatgttagcctatatttgcgaaggcacctccaagggttgtaggagtcttgccaactggagtgctttagtcttgttaagctggcgggttgtgcatgcccggacgtagtcccagaccaccacgcgatcgctgat

SEQ ID NO: 56967 - DNA, 617 bp, Zea Mays
taatgatctaaccaaacccttccaaaaaccagagtttgagtttcactgcttggtgacgctgaacttgatccacagggtaaatccagtaaaatctaacctactcaaatagaaccggaaaatatatggggccagattgttacccattaccagcaaagctgcagacggatgaagttgctcgtgttacttgcaagacatggacaacagaccatgtaaataaccgtacaaaatactgttatacaatgtttataaaacatagtttgaaatagagaatagtataaagagtcaggctactctgccgcgttcatgatcgatcatggagtccacacagcgtttccggtgaccatcgtggccatcaggctgggttgtgcccaggttggaagattccggccggccgcacggacagtcggcaatagcaacccgcttttcttgctagttgtgctgttgttagaccctttgagctctcgttgtattatcccatctaaggttattcgttcgtcccgtgcaaagcgcgcaagtctattcctcttttctacatctcgtctactaatggtccactacaccatagacatgccgtaagaaaccacttaatcacaacacgattgaaaaaccaagcgccg

SEQ ID NO: 56968 - DNA, 3232 bp, Zea Mays
atcgctgcccttaacacggctgccgttgtcgccaccactattgcttcccttgctactgctgccgtcaacgccgcctttgccgccgttgccaccgccatccttgcccttgcttccattgtcaacattgtcatccatggctccttcatcaccaccatcgtagccatcgtcatcgtcatcgtcctcctcctcccctgactcatccaagtcatcgaggtcggacagctcgatgccccagagataagccctctccccgctgacatccccatggagtcgtccttgcaaacggatgatggggagccaggggacggcagattggtcctctcatcagagagctctgtgtcactgaagtcctccgatggcggagttgcaggttgtttcctcttgtcacccctggtgttcctcctacccttatcgtctttctttcccgccatcggagtttctagaagaggagaagaggataggaggaaacaagaagtatgtgcaagtgaaggagtttgcggcacacagttggtctatttaaagaaatgaaacagtacctctttgtattccggtcgtacaacaaacagtcgccagccttcaagagtcgtttggattccaagaaattgcatgcttctgtcaccctttggcgtaacacaacaccaacacctcaaacaactattccgtggacaagacaacgtacacacgcattgggcacacccattgagtgcacagattagattttctagaaaacacaatatatgaaatatcaacgacagtcctacaatatgacaaactcaagatcgatagaagtttactggtcaaacctgagtcaaccagacctatatcagttgaattcagtcggtagccttagcaagcctggccagacatgccctgactagagttcagtcagccaggccatagtcggttgacccttagtcggccaaaccaccctcaagacaaagttagttggctagatgccgtcagaccagaagcatggtttatacacaaccagggaagtaaaataaatcctacgaaggcaagatcttgggaccttcatgttgattgatactcaaatcagctcgaaactcaggggctacactcaatgaatcaaagcataaaaaactgcactcaaagaaatacgatcaaatagcttaattcattcttagacgtgtcctcgggggtttgtgggagatatatatcccatgggtcatcacaacacgaatatgttccatgggccacctaaaaagcctctgataagtcgcccaacagtgcatactatcgagaagcattcaggcaaaacaagatcaggcaaaacaagatcaggagaaacaaaatgacgtggccagcggggaacaaactcgaagaatatggcacgagaacgctatccatgcgccattgtcgtaggggaatggtggggattctgagacgcgtcctggacacgactagatagcgacctactcagaggataactcagaggaaaagcaactgaacatcggaagagtaggcacactcgcaatagaagatgatagactcaaatgatctataagataggatatctctctagtcagctatataaggctgcagagattaccctaccaaaaccctctctctctctcttgcccaccattggattgataggaactctttcaatcacttccacagctacctataatctgcaaactcaaagcaatctaatactcaacaccacacatgatgtatggtgttacacgttcacgtggcccgaacctatataaatcttgtgtttcgacatgcatcgcacatagcattgagcagtgatcgacgttgacgtcctcctaaaaagcactacgtgagctaccccatagtgcgcagtcgagactaaacaccaacaacggttaccgcccctggacccttcgcctttgagttgtgcgatagtgggccactcgaccgaggcgatgtcaatggcggcggacgtcgttgaggtccagcttccatatgcaccaggtccctaccctcctgctgcacagagggtggtggtctctttgctacttgctctagaggagggctccgaggatcttcccgccttatccttgaagggactggagtcgaggagatggaggcagaggagagaaggtttgttgagggggctccatccgggcaactaagagcctagagatcatcgagggctctaacacctctgccatggaagtagcggtgattgtgcgtgtgtcgatcacgcaagagttgctccctttcgatgtggtaagtctcatctcctttttgccccttagtgtttctaggattcctcacctgagtatcactcctagttgtagcgtctcctaacccagtcgtcgacccggagtgacgcactgcttgcagcgcagtaggaggtggagcacttgctcactgaagctgccagttcggaggagcgggagctgttcgtgctcactcttaggctgagaagccttgggcggaggtgacgcgcctacgcacatagcgaaatgaggcgcggggtgacgtggatcgccttcggggggagaggtcatgcttttagggagctctgtcggagttgacccgacataccgatgacaccgagttggcactaaactcagctaacgctcacctagaggggttggatgcagatctctcgcgagaacgtgaggcatccagaggtacacccttttgggaacggggttgttcttgattggtctatgtctaaggttacttacatttcttcttttgcagagctctaaaagatgtcctctgtggctcgggacacccaaaatgtggtagacgatgagaagcacaagctctcaattgcttgtgacgccaccgtaatcgcatggctccaagccgaggattcactctcggagtagagcgtggagcttcatgctctatggttggccacgggcatgtcatgtgtgcacctttgtccttcgatgacgacaatggtcttgttgaccgagcaactgggaatgttgtggggccacatggaatttgtcgtcctagaggacgcgttcttcatgagcaatatgccccttggacagatggtccctcacttcgatgagatcgaccctgtcatgagtcgcatcgaagaaaagttgcatcggatcgaagctcaagtcatccctcatgctcagctaatagtgtggtgagtcaacatggggcttctcctgcgatgctcccagccacagctccttaaactttgtctttagcttctgttttgtaaataaactttaatgttgaactaaatgtgaatgagactttatgctat

SEQ ID NO: 56969 - DNA, 284 bp, Zea Mays
ttcttctttgctcgacgtggatgatgatgtagaagaattcatctcgtagtatacgatcttcttgatttgttttttcttgccatcattcttcttggagcttgatctggtgggcttctctccatttccttctaggggtgccttatccttgttcaagtcctccaatggtgccttctcgttttctcccgacatcacttcaagtggttaaagtcaaaaagaagtgtcgggctctaataccaaattgatagtcacctagaggagggtgaataggtgacacctgaatattc

SEQ ID NO: 56970 - DNA, 698 bp, Zea Mays
aacatcgaagagttcatgcccgacctctgcataactagggtgcacacaacctgatataagtggagcctagagaaggaataatcaagacaagtcttaaccctgcattttgcatagaggttgcatcaaacctaggaccttagtagaaagacttctcattgtgtcaggcctatcattctgtgcttaaactatggttattggtatgaaactcattccaaggacccaaacggtacctacatgaaaaagaagaacaatttccatctacattctgtacaacgaattgctttcttttgctactactaattttaattttgttccatgattcctacctcttttcttgtagaaaactgttagagatgagaaagaagtccttaaagctgttgagtatgtgcatgaattgatagacaaagaagtagctgcgggaacgagcccgtcaaacatattcgtttgtgggatgagccaaggaggtaaatcaatgagcttaatctgcattttatttagtattctaggccataagatagtaccaatacagatacttctgtttattttcgcaggtgctctagctatagcgagtgctctactctacccaaaaactctgggtggctgtgctgtcttcagtggctcagttccgccgaataaatcattcgccgataaggtgtcacctgaagctagaaaggtaataagctgcagctatgcttatg

SEQ ID NO: 56971 - DNA, 425 bp, Zea Mays
agaatatccataaacctagccaattcacttctccaatcgccttagtctagtaaaagcaaatgccctatgcatgtaactttaccttgcactttcttttccacttctgcacttccatccatcatcttcacatgttgagcacttgcacttcatggtccttgccatctccacttcacggttctatatatgtggctcaactatcttgtacactaaatcgcctattcatctcacatgaaataaattagtctggcattcaattatcaaagccaaatcaggtctttcactccagagctcctgcttgactagttgccgctcttccgtgatgtttgccacctcttccacccccagactgcagtggtatactttcccccaatctatttttagtgctaaaattggggctttctcaaattgaattatttgcttctcca

SEQ ID NO: 56972 - DNA, 650 bp, Zea Mays
tagtgcatagattaaagatgtttgattggctagaaaagaagcaaatactcctaggtagaaaccagttaaatcgaacactaaggtcaatcataggagagagtttcatattagggttccaaataataatctacatgtgcagaagagtatttaatcgatgatcattagagtcctaggtaatactcttgttaatgtcaatggagtgatttctcccccctatgtttcttgccaatccaacataatgtttcattttattgtttataaggatgccatgtaatcaagagtgctttcgagttgaaacaactccttccaatgcactgttttatgtaactgtttcaacataccatttaaatctaacgcacaagataggtggacgtgggatgaaatggaaccgtgcccctaatgtatgtttcaacatgtttcataatcttagaaacatcatatagcgcttcacctagataaaacccctcttatatcccttctctattactttgccacaataccataaaactatgacatatcatcataattaatggatagaagtgatatattccttcacccatgacgaccaatttggtgtgatttcatgtcctgagattgtcaactatatgtgatatattctgaagaaacaaaaaattgacattcaattattt

SEQ ID NO: 56973 - DNA, 427 bp, Zea Mays
aattcatcgggggttcttatgaaaaatgtgctcgcgaaggggtatgaatcaaatctgaccgtctgattagaaatcgagcactagcacctaaaacgaatcggtacactagtgatgtcgttggatttgcatcctatggtttagctaatgcacccaagctctaatctagtgcatccgatccgaattggacgaccctcattaccttgacccatacagtatgcgactgctcaatcctgagcgttacactggaatccaatggctccaaacatactattctctcttctattcgtggcatttaatcacgagatcaacggccccgaaatcttcttctaccctcgacaccttctctcctcaactccaaccggtctaacaccagggcggcgccatttgcagcacacagccaaaaggtgctatgttttctacccacgaa

SEQ ID NO: 56974 - DNA, 681 bp, Zea Mays
tggctcataaaatcccgatgcttgtctctagcctgaggtacattctattgttgctgctggttctgttggttctgctagtttcgctgaatctgttgcacagacgcagtgagtccctacaaaagctacatttgagctgcgataaactgctccatattggggttcggtggtggtggtaactactgaccacgctggttcctgttgttgttgttcctgcgacctgagcgaacgttcaccatctggttgatttgaaagtgaaattcttagaggagtgaggagtaagaaagattctataggggaatagcttattattaaagttaagtttgttttctatatgctgttatggccatcattccataagaccattgcactcaatcaaaaatccaattcaaaattgcaaccaacaccatcacatggttgttattattataagcataaattataaaagagtgttcatcgtctggcgcgaaagctatcttcttacaattataactaaaaaaatttaaagcagcctggtgatggatccaggctccccatagcgaatcctcttgcgaggaggggacaacgtcatggtggggacttgggcttcagggggaactagtccttgaatttgagctttcagggctgcaatcctggcatgggcatcctccaactccaagtgcaccctagagagatccagggtgg

SEQ ID NO: 56975 - DNA, 979 bp, Zea Mays
gttgtcagtctaggaaattctgaactcgattcagtctataaagctagttccagtattttctgttaagtattggagctgtttggtgtctgatccaaggggtttaaggctgaagtttttatgaaaaattgatagagggttgttaatggaccaattttaataagtgtgctccccatgttactatgagaaactatgtgattgaaggggtgaaatgggagagatcatagttcaataggtattgaggttcgctataaaaatctggagaaaagatcttattccattttgtgttccagctgtccctgggtattctggagatgtagataaatgttggctcggggttatctgtggataggctcaaagttaaaatatctaggttgcaaagagtcgtgtgatttactgctggtgaccaccttgtctgcctgcctgtttctgattgggtgccaccagttttggttcatcagttggtagggtgctgatcctccgtgtcgctcatgcagccaaactgcatgtccacgtgcttgaagttggtggtggtgctcgcatgtgtatctctaggttgagctttaggttgatccggcgtggtcagtcgtctttcttccttggtcaccatggttctcggtcgagttaagtagtcatgttcgcattcccttcctccaaatcactagtacatcagaatcgctgtcaccctgcgtcttggaaaaacttcagtcccgttacttgctcctgcccgggttcacctcgagctgtgctgccgtctctacttgccaccacgcctcccaaccccaccttgccgtggcttgaacacctcgatgtgtggcatgcccgtgggaagcttgttctgtgatctccataggtcagtgaaactttccctgctggtattttgaactttgcggttgtcggttgcctagaacacgcttgcgccgtcgtggtcttgcaccgtggacaacctctgcaccgacctgttaatctgtgccgtccccgg

SEQ ID NO: 56976 - DNA, 388 bp, Zea Mays
caaatggtgataactgcttggcaacagcgaaacaagactgttatccgtctgggaccaggcttcaacaacagatagtagtgctctcataagaagaaatcatcaggagtagagaggatacaataggtctccacaagatcttcatatttctatcacaaattatcatcactagtagtctagtggtcaagacatatggctcttctggctccaaggaccaaggacatattaatgtctaatttagcttcaagctcagtggtgatgtgggatttcatagctagtttctactcttcttactcctagtagatcagagatagattacggtaagcatttcaaaggtggaatccaatgtagttctgctacataaattccaggtatatgtccattcaggact

SEQ ID NO: 56977 - DNA, 297 bp, Zea Mays
aaaaggcactggtgctatgctgaattagcctggtctgcaacatttcagccacttgagattcaatttcatcctccattgtcagagagaaccgatagggttagatgctgactagtctggcaccttcaataaggggatagaatggtcacaaaatcgactgggcgacaatgtagcgggttgctggaacaggctcacataattgcggagcagctgcacaactggagcaggcaaaaacaactcctcaatagaacgcagtttggctgatgcaggttccgttaccatcaccggccagagctccag

SEQ ID NO: 56978 - DNA, 634 bp, Zea Mays
cacaacatgaagttacgaatgctgggagataggcaacagcaaacaagtgttacaccaacttgggatgtacatgttcatgttccataagcgtatatgtgggttcagccatccatccatcctcattctccagaagcaaagaagctaaaccactgccgaaattttctttttatcccacacagtttcagtagctctatttgctgatctgcttcgtcagcgcaggtctgccaagtggcgtggtttccaagcagggccaaagaaatcattcaagcaatttgaccatctagcttcgtgtccgtaaaaactatttgtcacaagaggaaatccaaacgagaggtgcatattcataccccaagaatatgctgaagaacacgcacagctagggaactggaatagtccatggaaaaaccaagtgccacgaggaattgaggaaactatcgatgcctccgtagtcgaccgctgcccggaaaagcagattcctccagtattggcagtattgcacccatgtgcatgggcatatgtagggatgaaaacggaactggacaattctataccgccctgctacgaatactgtcttttctggtcgttttctgattatttcgtatttcctgttttctagtcgtagtgataccttttt

SEQ ID NO: 56979 - DNA, 364 bp, Zea Mays
cctgactccgggtatatatgcatggccatgttcctagtcatcgcgaggagcgggtgggtaagcaactacctcaacggagcgtagcgttacagagctgagagcgcgcagggcagccgccaccatgggacctctccggcgtctgcgattggaggccaagatctggacagggagcttcaccgacacccacctcgtgtttgcgtgacctttcggggtggggaatggcgggactcgtcgggaattcgtcgctgaacctggtggcaccgccgcggagccgccggtcaccatgggcgggggtctacgccgcatgagcaccggtatggaagctctcaccatgatcaccattttcccctctatgcgatccagt

SEQ ID NO: 56980 - DNA, 571 bp, Zea Mays
ccgcaaaataagtgaaatactaaattggaaacaatccaccgatgtgtccaagatcaggagttttcttggattagcatgatagtacagaagatttatcgaaggcttctccaaaatagtgaaaccccttacttcactgttggatagaggtaaagagtttaagtgggatgaagcatgttagaaatgttttgaggaattaaaggaaaggctaaccactgcaccagtgttaattatgcctgatattcacaaaggatttgatgtgtattgcgatgcatcacatctaggacttggatgtgtgttaatgcaagaagggaaagtgattgcctatgcttcaaggcagttacggaagcatgaaaagaattatcctacgcatgatttggaattagctgccatagtgcacgctttgaagatttggaggcactacatgattggaaacaagtgtaaaatcttcacagatcacaaaaagtttgaaatatatcttcacgtagaaagaactcaacctaagacaaagaagatagcttgagttaatcaaagactatgatttataaatacaatatcacccaggaaaagcaaa

SEQ ID NO: 56981 - DNA, 824 bp, Zea Mays
aaaattttagaaattggaatggctcaatttggagctagaatgaattttctatgcattttacaagtttctagatttgtttttgtattaaaaacgaatttctaatattatttctctagttttaatccactctgaactgggcgccaattttcagaaagtccaggggtctcggcgcaagtttccagagactcagaccatagtgactacggattgcgggttgttttctgtaaacaataggggttctttagcaaaatgtgtcgcaaaggggtatccgtagatgtgagccgttggattagatccggacggcgcagatgaatctatcatcataccgaacccatatgctacgttagccattggatctaggatcgatgattcggatttaattatccccagatcaaggcccaactgtacgatgcgagatcaacggctcggatcgaaacgaagtgaaacggtatcgctattctaatccgggccaccgatcgctcatccaacgactgaaatccttttccccaactccggtcagacaacggcggtgccctgggttgccagcggtggagccatcgccggagcaaggccgacaaccgttctggtgcgctaaactcaaaaggaataggtgctatacaaaggtgaggcaatgcgaacaagcatggggaacatttcaccttcaatcccggtgcagaaatcccaggcgatgacggggcgcggcttcacggtggagggactataccggtgagcaattcacgccgtgatacgggtctcccccccaatcgccgatgtggacgccctcctcagacgcaggcgttcctcctcggacacacctcgaagat

SEQ ID NO: 56982 - DNA, 1156 bp, Zea Mays
gtcttcggatgaggatttggattatttcgcagcattggatgtggctgcggcggagacttctctgcgtgtgatggatgctgttcccggtctgagtgttgggcgtaggcggcgaagggaggtggcgaagcgtagggtgagtgaggttgagggtggtcgtcttcgtgtggacagggctagcaagcggtaattgttggcttcgccggctggggtgagcgtaggtgagggggagttgcgaaatctttttgagggtgaagagctaaggataagctgtttaactatagggagatgggtatcatcccgaaagttgaaccaatgtaatgtgtgatgccctcgctgcacgtatgtaactgtaatttgtatgatgagtctgtgtgccttcgctgatccagccatgcccgtgggggacttgtgcatttgatctagcgcgtttattatgccggtccggctgcgcctgtaatcggtctttgcgcggatggtttttcgacgaagattttcgcacggatgtgccttcgattttgcgcacttgttgtgctagtccggctgcacccttaggtgactttttcacggagagtcttttggaaaaagacttcgatttttttgcacttgttgtgctaatccggctgcacccttaggcgacttttgcacggagagtcttttggaaaaagactttgattttttcgcacttgttgtgctaatccggctgcacccttaggcgacttttgcgcggagtgtcgcacgcgagggaagcttcgctgctcctcatggtgacttcgatgtggtcgaatgccgaagaccgtcgatgcggtctttttcgacattgctttaattttttgcgggggattttcgcgtgtatattacatggctccgcttcatttaaaacctcaccccaggaggaaaagagtgcgggccggaataaaactgtttggtgaattacaagggcgtgttagccctaaggatttaaacaaaaaatttacggagattgtcaatattccaggaatgttccaggtcttcgccagattgtgttgttagtctgtacgcgctgggagacgacttcgtcttgacgataaatggtccttcccactttggttccagcttaccccgtgactctgtccgggttgtgcggacaagtacgaggtccccttcgttgaattctctt

SEQ ID NO: 56983 - DNA, 1489 bp, Zea Mays
ctgtcatgttgctgctcggactttctagtgatgatgtcgggttcgtctaggggtgtattgttccttcccacacaatccgtctgtcgaaaggggaagggcgagtcgtatcatgttccccttaacgatggaggtcgtggcgagcctcctttttgcgaggcgagccccaagtcccccgtttgctaccgaggatccgtctaggaggcatgtcccgtcttttatttattctttcccacacatctcgtccgccaagaggggaaggatgagccataccatgctcccctcggttgctgagattatggtgctcagtgggcttcggtttgctgatctaaatgggcccccttttttgcggagcgagcccccccaagtctcccgttagttacggaggatccgtctgggggcgcgtcccatctttttaatactcttcccgcacattccgtttgctggaaagggaaggttgagctataccatgcttcccttgatggtcgacattatggtgctcggtgagagtaatctgagtggggccccggtttctttagcagcatccaaacgagtaatctcagcaactgagccccaagtcccccgtttgctaccgaggatccgtctaggaggcatgtcccgtcttttatttattctttcccacacatctcgtccgccaagaggggaaggacgagccataccatgctcccctcgattgctgagattatggtgctcagtgggcttcggtttgctgatctaaatgggccccttttttgcggagcgagccccccgagtctctcgttcgttatggaggatccgtctgggggcgtcccatctttttaatactcttcccgcgcattccatttgctggaaagggaaggttgagctataccatgcttcccttgatggtcaacattatggtgcacggtgagcgacaaatgagtaatctgagtggggccccagtttctttagcagcatccaagcgtgggttccgctggtgaccatccacatactcctaggttctgactcatagttgctagccctgttcgaccgggtttgacagctcgctgcctctctccgtgataaactatgagtcagacattccctaggactcgaacataatttagaaatgcccttagtgcttgtgcactagggtactggctgcaacagtgctcatctcataatcgccccttgctctagggtttcgagagcggtcgtgaacccattagggacaaccttcgaactccaaaaaacttcatgggatagtctaggccgcctcgtagtcacctgtcaatgaggacccaatggacattctcgacaggtgagagatagtatcgagtattgaaaaataggggttgtgttgtcttactcggtctcgactctgtaatggttgggcttgggtgctgcttcccacattgcatggccatctcctgatctgatcgtttaggcctgtgggctgcacgtctctagggtgctttttacatctatcccaaccctatacattgaaaaccaa

SEQ ID NO: 56984 - DNA, 450 bp, Zea Mays
ccgatataccaggcttcaatttcacaaaattccccgttttgagcgatcgtttccgagccgagtgcccaaattccattttcttcgcctaaattcaaagcaagcacacacttcactcaaattcacccatataaacctattcgtgaagtatcggctcaataattccacgtcatttcatacctcaattcgaattccaaacctcctatggcactatttctcgttcaaacgccgttttcacgtcatttgacctctcgctcgccatatctctcgttttctgtgccatatttctctgtgtatgtatttattcacatttcatatagttatgactatgtgactaatacgtgctcacctcttctatcattttagtgaccttgcctgcccgtgagccgtctcctgtcctgcctggattttcacctctcgtgtgagctttccaggtagacatctcctcttttg

SEQ ID NO: 56985 - DNA, 429 bp, Zea Mays
gtggcgcctctcctggaagctggtaaaaccttggatattcagaggcctgtcagtgttcgcccgaagcgcccttgccgagtcaatcaacttgattctcctgctgatgagcagaaaaagaaaagagacgtcttcggcgagtatctagcttggatcgggatgctggtccttcggttcctgctattgaggaagtgcctgtgactgagtttaccaacgctgaccccaatgtgtgtgatccatccatcgctgatcccaatgggtgtgctccatctgtcgctgatccccatgggtgtgctgtctgtgttgctgatggaaacgaggaggaggaagaagatgagatccctctgactcggaagaacaatcggcgatacgtagccagtggggaaagtagtggatctcctgctctgtctgccctcattggtctacaagaat

SEQ ID NO: 56986 - DNA, 433 bp, Zea Mays
tagggataaaatttcctgaggtgttctatattccaggagttcctgacttctgtgccgtccatctgagtgagacgatatgatcctggccgagtgacttctgctactacgaagggtccttcccataagggtgataacttgtgccgtccttcccccgttagaattcggcggaggacgagatctcctactaagaaggattgctgtcgcacggccttgtcgtgatagcgccttagagtctgctggtaccgtgctgattggattactgcattcagccgttcttcctcgagtatatcgatgtcctccatcctggtggctttgacttctgctatgctttcgaagatcaaccttggcgctccgaacttgaggtcggctggtaatactgtctctgacccatagaccatgaagaaaggagtgtttccatgcagagctcggctag

SEQ ID NO: 56987 - DNA, 961 bp, Zea Mays
aaatttgattggggctgctgtgtttctatccctagatggaattggaattatgattttacatatttaggtctttttaaaaacgaaaaacaagtttaagcttgttcggttagagtgacttgatggtgtgaaatatagggacaaaaattataattgttcttcgtttacaattgtgattttgcctctacttttgaatttgacttttatgtaatgtgattttgtctctgtgtttcacactaagtgcttgacaaaacaaagctaaatttattcttcgtttttaaaaaggatgtccgaaatcacaattcacaaagttgaatttcatatgttaaaatcacaatcgcacttccatccaaggacaaaaacacaacaaccccaatttaatttgtttaggacatgaattgcagcagccctctgagcgttagtacaccataaatcacaattgagatgaggactaccatgtgtcaccattgtcgcctcaagcaccaccaccgaggcatagagagtagtaggggatgttagttaatcagttgaattgtgaaaccgagcgtagagagtagtgccgacaagctgaggcacaacgacgctagatagacatgatgcttattttgttcgagaccatctaggttcaacatgatcaattctagcggtaactgcaagccaatcgtgcacattaatttgcattcattaacatgacttgtagcaccatcatcaccactatgaatgtttcctcctgcctccttatagacacatgtgtctctaacgatatagtctggtggacttcaaggctagtgtttgtaccaatttgcatcactagtttaccctatgacactagacttatcctcaccaatacaaggtgcgatagtgtcagtcatgattgtcattgtcacgggccatacctatcaccaccctactgacaccatctgtcactgtcatgattgccattgcatcacctacactgatagtg

SEQ ID NO: 56988 - DNA, 291 bp, Zea Mays
gagcacactaggcgctttgtccaccaatgcctgcaactgaacctttgaaagctttcccaaggacagaagtaaaccaagataatgacaagggaaatctgaaatgggacatgggagagaatctcgaacccgcaccaaatcatcttcggcacaacgaatggggaacacactacttttttggacattagtcttgagccccgatgcttcccaaaaagccgaaggatctctaggattagatttatgtctaaagccacaggcctaagaaaaaccacaacttcatccgcatagagagaa

SEQ ID NO: 56989 - DNA, 472 bp, Zea Mays
gagaatactaaattctttcaccttcttgcaaaaggtcggaagcggagggttaaaatccccttcttgaatcatgaaggagtctctgtaaacgatgctgaaggtatcaataaaattgctacttcatattataaagatctctttggcccttctgtgttatctagcattaatatgacttacttcaatatgaatcagttgtcagacaatgatagatctttcctgacggctcctttttcaattgatgagattaagaaagtgattttcgagatgaaacataatagtgctcctggccccgatggttttcctgctgaattctttcaaaatttttgggatacaattcaaatggatattgtgcatttattcaatgatttttatgttggaaatcttaagatagaaaggctgaattatgggatggtcactttattaccaaaagtggataatgcggctgacatgaagaattttagacctatctgtc

SEQ ID NO: 56990 - DNA, 569 bp, Zea Mays
caacgctagaggagcaccaccatctccttcggggcacccgactgccctgacaacatggcaggggccggcatactgccactcatcaccacccctgtcatcgccaacatgcgactacaccatgtgctgattgacggtggggcaggcctcaacgtcatcagccatgctgcgttcaagcaactgcaaatctcggggtcccgtctagggccctcacgcacattctccggagtaggcccgcagccggtgtatccccttgggagcatcacactcctagttacattcgaaactgaggagaacttccgcacggagaacgtcgtcttcgacgttgcagaagtcaacctccccttcaacgccatcattggcaggccggccctgtaccggttcatggccatttcccattacgggtatttggtcctcaagatgccatccccgactagggtcctcaccgtgcaaggtgaccgtgccaccgcacttgcagccatagagaagatgcacgccctagcggcagagactgctcgcccagacgacggagggaggagtccatcaacctccggtaccaaggcacccctcaa

SEQ ID NO: 56991 - DNA, 535 bp, Zea Mays
ggggagattctgtgatgcagtatctcaacaaatttaatcacctctcccaatactccatcgatcaagtggatacagacttgaaaaagaagaattgcttcatgagggattaaatgacagactccagcacaaaatgactacgtgtctggaccttacatatggcagggctgtcagcacaacactgtcagttgaagccaaaaatgcgggacaaggaaagtcaaaaggatatgcgggtgaaagatcaactcagggacctaaaaagaggacaaggttggtaatccaacctttcaattcaaattgttcttctcctcgtccgcccacatatcccttcagacaacccgtgttcattcgtcccactcctgcccccgcctagaacaatgaatcgagtgcccgtggtgctcatttccctgcccttcccagttcctcgagtggctgcttcaattgtggcaagtctgggcatttcatcaaagagtgtccctaaccgaagcagaataaatcaaactttcaaaagacttccgggaacacaaatcaaggaaag

SEQ ID NO: 56992 - DNA, 382 bp, Zea Mays
caaccgtgggaataggcgtggcagtcggcatgaccataggcgggccggcagtaattgcgtcaacaggcacgcaggagcagcaggccaaccgctaatcaagctttggccccacctgcaggctcgcatcctcccctgaggcgagcccgggggccactgtcggtaccctgaatcaggggtactctcttctacagtatgaaggtgtcgtacatctacaacgtctccaggtcacacggagaatggctcccgaccccaccgcatgggcaggtctaaaggcaccacgtggcaaggaaaggtaatacatcccaggatgtatcattgggtccgaacctccacagtaggacaccggacccctgtgcgtacaagcccggagctcccaagaagg

SEQ ID NO: 56993 - DNA, 300 bp, Zea Mays
actaatgtactcctccactcatcgggcatcttgtttgatcgaaaaatatggttgaacaacttggttagccaaacgatagcaatatccccaaggtatttccacacatatattgggataccacctgggcccatcatcttgccccctttcatcctctttaaagcttctttgacctctgatttttagattctgcgtacaaagcatctatttaaatcatcaaaggagtcatccaattgggtgtccatagtctcattctcaccattgaaaagattgtcaaaatacctctgccacctttgtttgatg

SEQ ID NO: 56994 - DNA, 283 bp, Zea Mays
ttattctttttctcccccgatagagtcgcaaaaaacgtgttgacactagaacagatctacatcacacacgagcaaggtctagcatacccatgatagacacatgactttgaacgtagtgaggtacgtagcggaccgatgaaattgatatagaaactgattaagtcgatgttgatcctattgtttgctcgtaaactccttaacacctcacggaaagacccatcactgagaagcacgtgaaggttgtcctaggatcatcgtgactatatagaacgtcaccaaaccc

SEQ ID NO: 56995 - DNA, 870 bp, Zea Mays
cttcggaaggcgcttcgggagtaggagcggcagctttttcaggcaaaatctgttctatagcttcttcctccgctgccttttctccaatttccgaggatttttccttgacgcgctctgaaggcccagcttcggcgtcagcccggctcattgtagcttcggcttcggtcagctttgtctcggtttcaatctgtactttcgaagccttggcaactttcgctggagtagagcttgaagcttttattgtctccagcacatctagtacactagccatcctttttctcttgggggtcgctgctagacctttttgtgtcttcggcacctccactcctgccgaagggcttagaacttctaatgttttcgtcccttcaattcttggtttttcaattttgtcagtcttcggcattgcaaccggctcttcaatcctctgcgtaggagcaggtcctttggcttcaatagctgaaaaagtctcaccgccaaattcaggcactatggtcggttcaatgtagcacggtcagtgagtaaggaccttcaactttttcctcttcgatgcgggctcgcttgaagcagccgaagcagcagcttttccagaagttgcaccctatcctttctgcccccacggtgggtagcgatagttagggtacacaaacccaatagcatcaaaaaccctattaaacctttttcttttttcggctcccaaaggccgcagatagagcattatcttcagacttggagtatgctccaagtagttcatcactagtattttcaacacatttcagccagtcatcgtctggttcgataaattggtctccaaacctgaaggtatatttcaatcaaactaaaccatcttcgctagggttagtgaggctctct

SEQ ID NO: 56996 - DNA, 358 bp, Zea Mays
atcgttctctaagcgggtgcaaacatacatacatccattgaaattaggaaaccaacagtacaccatacaagagaacaagtaaagcaaatatgcatagaataccacatacgatgatgaatttaccttggttagaaagaaacgagggaaggtctcgcaggggttaaggcttatgctcgaggggcactacgggttggtgaattactagacgtcacgcgctctagttccagttggtcctaacaaaaggattagctacatgcactaatgtaaacacgatcacttttagtagattaacatagaataagatagacgattgactatacaaattaactaacgtaaccaatttccaaattgagactcc

SEQ ID NO: 56997 - DNA, 430 bp, Zea Mays
tggggttctgaaatctgggtctaaaagaggtatgaataggtcgaatcaaacaaaaccggtgacaaaatttgcaccagatttgattcgatttaatttgaaacctgataattcaaccgcagtctgaacagggaaatagattaaatatcaatactaagttcagttctaattacctttatctgcgttgaacgacttactacttaatactcatgattatcaaccccgcgcaagatttctctcagacaatgcgcgatcttaattattttgcactgagtattttaatcgttaaattataataaatttatttgggacacggatcacaacgatggatcgagcttccaaattcgtattctcatagtccataaatttttaaacggatagaaaactcgacatatcgcgaaataaatacgcgagatcgatgtgacatcgaaag

SEQ ID NO: 56998 - DNA, 391 bp, Zea Mays
gcaagccacaacctaaggaacatctatttataacaccccttgagccaacgagttattgtgccttcactgtagaaaactcagggtaccagactgtctgatatcaccatcaacccatcgactaagggtctgataccctctactactcacacatggtagtcgaccatttgacctatccattactaacacatagtatggcgcttctaggtttggtggttgtcgaaccaatgttacccatgatccggtatgttctcgagaagtaaaacaagcatcagactaagctagtgctaagtattggaccaaaaaccagggtttgatgcttcctccaaaacatgcccaaacattgatatgtgggacctactcaatgaatagtgctaccgtttggtccatcgtc

SEQ ID NO: 56999 - DNA, 699 bp, Zea Mays
gagaaatatggcacagaaaacaagagatgagacgatcgagaggtcaaacgacgtgaaaacggcgtttgaacgataaaaagtgccataggaggtttggaattcgaattgaggcacgaaatgacgtggaattgagccgacacttcacgaataggtttatatgggtgaatatgagtgaagtgtgtgtttggtttgaatttaggcgaagaaaatgagatttgggcactcagctcggaaacgatcgctcgaaacggggaattgggtgaaattaaagcctggaatatcggatgggcgtgaaatttggcgaatatgttactggagatgttttgaaggtgcctgaaaaatttgagttcaattggagcatttttggctagtttgggcatttcaccgaacacgtggagggcggagttttagggtttcggggaaatggctatttgaggtgggaaaaccctcccgaaggagctaggaacctgcaaggatactcaaggctcacagaggaacacatatgaccacttggtttcactggatttcacaggaaattggaattgactcacaaggggtggaagagggggcatcactaggctgaatcagagagaagagagaggggtgaaggcaaagctgctcaccagagggagaagggacgagtgcaggcacaggatcgccggaggatcgccgccggggaggggagatcgtcggcgaggg

SEQ ID NO: 57000 - DNA, 1074 bp, Zea Mays
atatatagccatgagtccgatgagattaagcttcggaatgacaaggcccttgtgccacatgcaacttggctccccgtgccagctgcccgaagttgaatttagagtggtagctgtcgagattagtactagggacctagtgcaagaatatttggcaaatagaacatttccaacttctattagttgggggattccaatgaaaaaggaaggggtaaaaagtatgagcttgtttggctcccctatcgcttcaaatttgagaaacagttcaagaaaccatgcaatgaatggctggaaatgattgaaaccatgtgcaatgagattcttggcaattatacgaagaaggaggaccagctaatgactgctgccttcggtacctggccgaaacgaaggctgaaccgggtaatggatgctttgaacttcgactacccagattatgagaggtttgacgaaggggccgggggtgtgaaaagaaaaatagttgttaacatcctaagtaggcaagctgcccgctcagtaaaagaagatgaaaaggccttgaagaaaacaaaaacagcgccagagccaaaggcaacaatttctaagaagcagaagcttgaccaaaaaccctctactgaaccgaaggtcgacgaagcagcagagaaaacccctctgttgccgactgctgccgaagtggttgaaattttgaaggtaatgactgattctccgccattcaagctgctaagtcctctgggattggaactgacaaaacttttacagaggaaggaaatgcccccggctacagaagagaaggttgaagggcaaaagaaacgacgaattgtgaatataatgcaagcaattgaacaaacaccaccttcagcttcggcgacgaacgcgccaattcctgcgaacggcgaagatactggcaaagccaaagttgaagagctagcagccacagtgtcagaaattgacagacttgtatcagatgtggttgcagacgtggctgcagaggagacgagtgtagctacagaggaaaacatggccgtagtgctagataaaggaaaagaaattgataatactccttcagacgagaaagatttt

SEQ ID NO: 57001 - DNA, 809 bp, Zea Mays
gaaattgtcaaaatcattgtctaattttacaggcaacaaatcagagcagaactacataagtaggtagtaggctcatgattcatgaacatcgatgtgcaacaataaagtgatagactagtagatggagaaaagtactaatacggtagtacctcactaccttgcttgttgcttggcagtagcacgcactaggcctaagcgtccagatcttgtagctgtaggccaccggtgtcctggaatctagtgttgaagccatcgtgggacaattggagttgacactggcggatggattggtggccgatggcagcaagggctggtggttggccatagcccatggaatagttagatccaaactaggattgatagcagcggagtagggagcagatgttggaacgagattggtggccgactaagtgggattgttggccagcagagcgagattggtggcctacggagtgcgagatggcggcgatagtagcagttctcaggggggactatcaaaaccctagaaaatggctcttatatctggtatagggtgcgaaattttggtgaatggaataggcacggcaggagactgcattgtgtgccaaggttccaaaatttcaccatcgcctaaacggtaaggtacacgctatacacgttgcctaaaaacgtttttccaccatgtcgtgtacactaactagaacgtgtaacgccgtgtttgaccgtgtaccgtttggtggagcgtttatgggctacactgtgtgccagcctaccgtgtaccgtttaatcgtcgtgtacatgaccgtgtaggccgagtaggcgaacactgc

SEQ ID NO: 57002 - DNA, 693 bp, Zea Mays
ctttgcttaagggtgtgagcatagttgttaagaaaaatctggagataatcatgctcaaaatctggctgtcaggctgttaaggtctgaattttcagactaacagtggactgacatcaacttcaagctcaattctgagcatgatccagtgctcaactaagtttaatccctatagtcgaattgtagctggtttgtatctctgaaactttgctacagagagtggagtgagttactagagaaactttagagaaatttggacctaaaattgctctgtcaggttcatctaactgaacttcctccatggtacagtgctatcgggaggatcagatcgccagcgcaacggtcctcaccgccggtgacctgccgccgcgattcgtgctgctgttgccgcgatttgggcttggctaagttggatagcactttgggtcacataaatatcctcgccgtggataactccggccataaacaagtccggccaccgtaccgtgtatgccgcggtggaaagttcgatgggctcgccggtaaaccgtcgtcgcacggccttatgccacgtatccgagcaccccgtcgtatcatcgtgactccttactgctgtctcatcaacgccggtgaggttgccacggcgggggacacgaagtcgcgacgacagtgctcttccttatctccggccacccgcacggcccggccaaattaagc

SEQ ID NO: 57003 - DNA, 406 bp, Zea Mays
gttatatatcttgaatcattcaatgggtagcttttcatttgatatatttaccatgattaactctcttggtgtatgtggctaaacctgtatctttttgtaaatcatgttgtgtggtttttaatgattatgtattaacctatgtgcaagcatgatagttttgtttagtccatttcacatgattactttgtcttggtactctgtgtataccaaaacaagaaatccatgttgtgtctctaatgcaccctctcgagctatgaggtgcatgagcataaggagctctcaattggtgacaacatgcgctctcactccacactacctaaaaagaatgaatctcatggcattcagataaaaggcaaaggtatgaaggatggaactatgcaatttcattgaatatcttgaagttccg

SEQ ID NO: 57004 - DNA, 511 bp, Zea Mays
aaagccctcaccatggtcagcgtactccacgtctgttcatgctccctgatgtcttgtttcaacatccatggatcctcctcgatgctccccgacccggccaattggactaggaccccatagatcaacgagaacgtgcttgattgcctgtagtactcgctgtcaccgtggacagtgcgtgttagtgcaccattagtaaaattggttgaggggaaaccctcgttaggtcttgaattcggtctctgccaaagtagggtgccggtcatcgagtaaatcggccggtgtaagctcgccggagctcgacccagcgccgttcgccgtcggggactgcaagctgtgaagagatagaagtgcaagggccttttcgcaaatgtcagtgaccccgttaaatagtgcgtaggactcttccttagatattcaaaccttcgggggcctccttgcaaatccaccagcgcgggcgcgctttcgccagcacgtgggccaacttgggtcagtttcggcccagttctgttag

SEQ ID NO: 57005 - DNA, 847 bp, Zea Mays
tgtccctatcttggttatctatcatttttgtaatacaaaaatttaaacttgtatactacgacgattgatattttcaccaccactcaaatattatggaagaccaatgcccatgaaatgtacatgtacatcactccataagatgtatcttcttccaacaagaggaaagacttcggctcataaggccaatcatgagaagaaggacaaagtcaaaatcaaataaggttttgatagctcaagtgaagaacaaggttataatgtcaaacttgctctcatgattaggaaaaccacaaagatgcatacaagtctcaacaaaggggcatcatgtttgactcaacaaaaaagaaattcttcacaagtagcaaaagaaagctcatctccaaaatgaattgctactattattgtatgcccaatgaacctatctcaagagacattatgtatgtccaaagaacctatttcttgtattttttacatttgactccctatagaccactcaagaaacggtgtattaaatgagattgtacattgtctaaaaccaccgataagttgtatgcttcgatgtcccttctcattgtcttccatgtccgtcaccggcgaggcgcggaccgccaataagttttaccgcttcgatggtcgtcgtcgacgacgacgactcccaaggcacacgtcgcacggctatggcggctgaaccggtcgcctcataggctcactacacagcaaacctttggcagaagatctgaggcatccaggagcttactggatcgccctgctagctcctgcctaggctgcagccacgaggggcgccacaccggtgcaggaacttgaggggtgagacaaggtcgcttcgtgc

SEQ ID NO: 57006 - DNA, 1091 bp, Zea Mays
gtttaatgtcttggaaaggttggtgcagagtaatgtcctgggagagaggtggcaaaggcacaccaggagaagccgactgacgacagatgttgtcgtctgtctcacgctggcggtgagccaactcatgcacatatgccgagatgttacgacacatcaataacagggcatcaatggcatgagcaagacacgagccaagacctctaagtcgtcctctacctcgaccactacgatccataggacacgaagctaaagtagcacaggaagaagatggatgacgaagcggcataggaggaggctcatcagaagactaatcttgcctgacaactcatgcatgcgctctctttgatcttccagcaggattggcaggatctatccattagggagtgtaagcaatgggatgggtctctttctcaaaccaagtctaagagacaacctcaatcatcttcatgatataaggcgcatgaacacaacccttagatggatataaagaaacataaatgatttcctaccaaatcaagtcaaaaacattgagtcgatgggtcttgttgggttgcataaagaagagcagtgcctgactatcaccaaggacattgacctgattctctcctttaggcaacaaagtcatcctgaacaatgcattaagatatatgtaaaatcaattcatttgggagttttccaaaactcgtgatcatgagacatgtgaatatccaaaacttgttcacgaggcgaccgattaaaatcatgcacacctggcatagctgaccctgtaccatgttccctcaatattgaaattcatataggggtgaggataatcaccatcttcattactagccttgatccacaagatggaatagaactatgcaatgacttctttgttccaatcatatgcgaacgtcatgatatccctcatacctttgcttctagatgcctgcaaagctcttgatagatctgaatcccccatattttcacattcctcccaatttatgggacattgcaaaataatgggcagatgctttttcgacatgatgaccgaattatagaagtttacatgaaagagcacctagaagcggtttcccttgattcggtcatcc

SEQ ID NO: 57007 - DNA, 455 bp, Zea Mays
agaaaaactactctaatcttgttgatcattcccctcttcattagctttttcaccttcatccggcacctcctcctggttttcgggttctccaggttcatcttctgcttccacatggtttacttgtccccgattgacggataaggcctaacttttagctcctgagacctgaccttgcttcaccagagctggggtagtgtaagcagccctattgggacagtagttggcataatgaccagtctgtccacatttgaagcatgacctgtttgtgggtgcattaggagcaatgggtcctgctggggtgctttcttgaggaggagcttgggtcggttgagtcagttgcccgaaactgccacgagctggtgtactttgaggtgtagtataatggcgacaggtactacttccagccagtccctggttagtagcccttctcttctctcctagctcaactctcttgt

SEQ ID NO: 57008 - DNA, 848 bp, Zea Mays
cgcttgcccttgcgccgaccagagtggtggtcgcgcgggccagcctctagcttgcccttcttggggcagctggcgacaaagtggtcggggtcgccacagttgtagcatccatcctttgacccgccacgccgccggctcatacggttgttgtggaaccgtgtgaaccgactggccacaagcgccagctcctcatccccaaggctctccacctgatcctctgtaatggtcaacaaagaagatagagcaaacaaaacaggtgaggggttagaagcagaaccacctccagagaccagggccatggtgggtgcaccagagttctcaatcttggcccgagtctggtggtcaatctcggtggacttgagcttgctgaatagctcgttcacggtgagggtctcgtagttgggcgactcgatgatcgctgagaccttcacctcccaaaccctccgatccaaagcatgaagtagcttgagtgctctctcatgatcatcatagggtagctgtgccttgttggcacgcatcttgttcacgatggattggaatcgagagaacatcgtgtcgatcgtctctccagccaactgaacgaaattctcgtactctcgcctgtacgtctcaaagagtctggtctttacatgatcattgccctcatggaatctctcgagggtggaccagatctcgtgagccgtaggcaaatgcccaactcgctcaaattcagcaagcgagagaaccgagaacaaagcatttcgagccttattgttcgcatcatgaaactccaactgaatcggagtgatacgagggctctcagcatcgaatccagcgtcgaggcaaatctcccagacgcgatacccaat

SEQ ID NO: 57009 - DNA, 757 bp, Zea Mays
tgctaataatgacaagggcgggtagaggatcgatgtgggttggaagcaggatgtgtagaagggaaatggggtgggggtggggtggggtggggtgggggtttagggtgggtgcgcatagagacgagggcgcctgcgaatgtgatgggttttgtcaaggccggcaggggacagaggttctaccccaggctggtagtggccggggttggactccccaaacccacacgggcggcctctgaacctgtacccaaagaaaaaaaaaacaacaaaaacaaatctgtgcaaattctctccctcctcctctctctttctatctggaattctggatgcagtctgcaaggatgacacaagaacaagaacaacgcgcagtctctctcctctctacccttctgctgccatcgatctcaaagcaagggaagggaagggaagccgcctgaaagcccaaccaaaccaaaccaatcgcatctcccactcgaaaaaggcaggcatccaaaacccatccagggtagaaagagagagggagagaacgaggaggttacccatcaatcaatcaacaagagacctactgtatatagagcagagaagggggatactaatttgttagtaaaactcaaacaaggaagcacttattttgtgcttgtttagttgcgatcaattagcccgccgccgcgccgccgcctcctcctcctcctatattagcccacttcccttccttcctttgcagcagcaagaactaaggcttgtccctttccctctcttc

SEQ ID NO: 57010 - DNA, 917 bp, Zea Mays
caactccagcggacgattgaaagctgttgatttcaagaaaacatatcgaagtaaatgctaacagcaagaacttgatccccacatttctgaactagggactctaggatgttctcttcaacgtaggaaaaaagagaggtcctacaactgtaaagaaggactatttttcaggctggcaatccggtacttcgggcgtgcggctcctcggtgggtgacttcaatcctcagtcccttgagggctttattgagctgcaaattcagaaagggccacatccatcacaagttcaattatgcacaatgctctttgtgccttagaaatgggggaaagaatacctaccaggacaagatccatgggagtaatacttgtaaaggtcctgcgatctttgcccagaatcaacatcacataatcaatcagtggcaggggtcgaatgaaagctgttgaagaaatgtctgcaatggaaaatatgtggccatcggacatcttaaaacacacagaaatttgaactggaatacgaaatcaaattgcacagtttctaccatataagcatcccacacgtaaaactacctatgatcacagacaagccattttgtgtcggcctgatgctctgatagaaacccgtccatccctccacacccatgccaatatccctgggtcctcggggtgagaagaaggaccggccaactgcaacgtacctgtgcattgtcaaaataacaagatgaaaatggtgtcatcttaaatcgaggtgcaagccaagtactcactccatggagttgcgttcgttgaggataatgtcacgcagcacaatgtcaagcacctgcagcgcctgtgccgggatgtccgaagggtagcccgccaggagcatgaacagctgctgcaggctgatccccgtggtatgcttgatcaccaccttgtacatcct

SEQ ID NO: 57011 - DNA, 426 bp, Zea Mays
cacacacaaagtctctttctagcctttataaagaatgaaaataggaatggaatgagagtacggatgaacaacaccaagcaaaagagcacaagaaactcaatgacacactcttctcaaacgtctctctcaaggcactaatctctagttgatcacttcttaattgtggcacttggtggatctctattgctttgagtgtgacttggagtggaagctcttgctcttgctattgcaatgaataggagtgcttgtgttgattggatcacttggatgccattaaatggggtggctggggttatatttatagcctccaaccaccacctagttgttactgttgttctgaccacacgcggactgtctgtgtccctagcccggacgatccactcctgcaatatgaatggctagatcacaatggttatatgtaacgac

SEQ ID NO: 57012 - DNA, 558 bp, Zea Mays
ctttattgctcttggaggtgaacaactcaagtatgcactccaacttttgtttccgacatccaataatgtagcagagtacgaagcactggtccacgggctgagcatcgcggtttcacttagcatcaagaagctgatggtgtacggcgattcaccaatagtgataagtcaaataaacaaagattgggactgctcgaccgactcaatgggcaaatattgtgcagccgtgcaaaagctagaagacaagttcgagggattagagttccaccacgtggaaagggatcgcaatgcagcggccgatgcgttgtcgaaactggggtccagtcaggcccaagttccacctaggatcttcgtccaagaaatacagcaaccaagcaccatcacgtatcagatggaagaatgcaatgccctaagtcagccagaggtggatcccaatgactggagagagccgatcatcagatacataaagaacgaagaggaaccggatgataaggccgcagcggagcgcattacaagacagtcggcccactataccatcatagggggcctgctgtacagaag

SEQ ID NO: 57013 - DNA, 474 bp, Zea Mays
aagatatgagaactgtataatggataaactatctgaccagaaaagtgaggaatgagcaatatgtatagtaaataaaaaatatcatagatgaaaactgtggttggcataccaataagtaaagagacagcttaaccaaagcatcacattaaatgaattggtcataataatagaaaatatggtatgcagaaatcatgtacgcagattcacaaaagaaaacgtcataacatctaatattcacatttcagcttaaccaaagtatcagaacatctgatattcacaaaagaaagcgtcataacagcctaaccaaagtatcagaacatctgatgttcacattccatctaaggaagcgtcataacatcgtttactaagctgcaggtccaaaataccacaccagtaagtgacattacactaacacaataacatattgtgtttatattagtccatatgacatggtcccctccatgtaaagatgaa

SEQ ID NO: 57014 - DNA, 811 bp, Zea Mays
gtattttataatattctttctcttttttcattttaaattccaaattcaaatttatgttttaatccaattcttcaaccctctattatatatttatccatattattaatttattaaatgcacaaacaaatatccaatataatgcatggtttatttgtgttctagtaaagaattattcacttttaaacatgattagtcacatgtctcaaaagtagatggcaaatcacacaaggagatcatctcttatataagctttataatttgggtattacaagtaggcacttgctcaaaaggtggtggtcctgggacaaaggaaggagatggtgaccacacactcattactgggttacttgaggcgtttgaggccgaaggcaaacttaacattgtgtcctgtaactgagactagacatattatgggatataaggtgaatagtacgatgatgtactgaacacctcttttgactgggagggttgagtggctggcgaagtaagctcattctgcttgttgatggtatgatggcatgttcttatggtatggcctttgtcgtcgccacaaaacaaacaaaatggtttacttggaggtgcattgaatctaccaccaaaacttcggcctccccttccgcctcttggagcaggtggacgaaatctgatgtgcgaaggttgctactgagagcttgcttgctgctggcccgactgaccttgagactgggccatcttttcctcaccctgcagcaggttgtggatcctttggacatgccttggatgaaaccttcctctgaagcccctggtgactttggtgtatctgtgaaattcc

SEQ ID NO: 57015 - DNA, 739 bp, Zea Mays
cgaccggtcgatgtgggagctgcctgtgacagcgttctggacaaacctcatggcgttccggctagggcagtacgatagagttcaaaatggcaacgctatgagaaccactgtaacctatagacaacaaaatatgaactaatggtgtaggattcaccttagaaattgctggtcatggtgaactgagaggaacaagtgtgtggtcaccagtttcaaggtcttcaaagacactaggggttttcttcgtggagggatggtgtcagttggctatcctggtgcacaatagtgatagcagctgatgctctatcaggtggtggttgaggagcccagagatattggacgtacccctttatgggagttgagagtggtggcaagaagtaaaaaggataaactctattggcctccacgtgttcacaggaggggtggatttgagaccccagtcagtgcatgaacatatgcacgtgtacagcctcaccatgacccacaccagtcccatgtacagaagcaggttgaaccatgcctttacatgttggacatggggggggggggtaaaagaaggagagttgtagttgctgacagcaaagcaaatcagcagctgagtcatcttcaaagaacatgcccacacttatctcttctctgctctcagggtagtaaaaaaatatttccaatactccactttcgaatcccaagttaactctatctacaagctgcccagaatctgctagaaaggataagggatcag

SEQ ID NO: 57016 - DNA, 474 bp, Zea Mays
gtgaggtggatggcggtcggcttcgtgtgggcagggctagcaagcgggaattgttgtcctcgctggctggggcgagtgtaggtgagggggagttgcgaagtcttttaagggtgaagagcttaggataatgctatttaactatagggagatgggaatcattccgaaggttgaaccaatgtaagctgtgatgccctcgctgtacgtgtgtaactatggtttgtatgatgaggctgtgcgccttcgcgcatccggctatgtccataggggcgttgtgcgcttggtctggcacatttattatgttggttcggctgcgcctgtagttggtctatgcgcggatagtttctcggtgtagacttttgcacggatgtaatgctcttgcgttttggcgcgcttgttgagctagtccggctgcacccttaggcgacttttgcacggatagtgtttgaagaagacttcgattttgcgcacttgtta

SEQ ID NO: 57017 - DNA, 390 bp, Zea Mays
ctccgctagagaggaaccaagagccccgacaaagtccaaggcctcacccaagcgatagcgcagctcctccagctcgacttccaaagctgtaggaaaaatgataaaggtaagggaaacatcgatgactccaaggagaaagggatgagcactttaccaaccacgcgatcatcagacttgacaagttagacctagatcagctcgacctcggcctcaacagcctcctatgccacacagaagactatataactctcccaagatgcccaaggtagtgggagggaggacaaaagctctagccatgacaggctgatggaggacgatgcctccatggtgaagggagaagattcgacaaaagtgaggagaatgagtcgcatgggaaaggcaaggccttac

SEQ ID NO: 57018 - DNA, 353 bp, Zea Mays
aggatatataggtgtgatttaattctattattactaactgctatgaatggtagtattacggaatcagacgtgctttctgctggtgacagactgagtaggtgttgtcttgttcctgcatatgtgcgtaggtgctgaacgtccatatgtattcacgagctcaaagtcaaaccacacatagtatactacgccttgtctttcattcagtatactaattgtccatatgtattcacgagctagctacgtaagtaccgccacgatcgacgtgtatataacatacgtatccttttgcgatgatatttttctgtatatatacggctatattaattgtccgccctgtagtttgcacatccagc

SEQ ID NO: 57019 - DNA, 981 bp, Zea Mays
caatatcaggaatcgacttggaaggctgcgaccatgtagaagcatcaaaaaatgggttgaggttggtcttatccactggcctcacagagtagaacaggcagcatacgtgcatgtaaaggctgatcccagcgaccggtcgaaaaaaataaaacgtaaaagtaagatagcgaatgatgatgagacctgctctggtagccagtcacaatctcattgtaaatattcaagtattaataacaataatgaggcagtcggtcctcatgatcagcccaatttttttcagtcctactcctcatgtgtgtataatgtcgatttgcaaggcgatgggaaactaggatacgggttcaccttagtggacaaactagaagaagtcaatattggccctggggataagctacaacccacattcatcagtaagaggttatacctagtgttacaagagctaatgataagcctgctacaggaatattcggattgttttgcttgggattacatagagatgtcagggcttgataggagcattgttgaacatcggctcccattgaagaaggggtttcgaccttttcagcaatgagcaccgttgttgaaatatgaagtactacaagaggtcaagaaagaggtagggaagatgttggaggcagggttcatcaggccatgccgatactctgaatggatctccagtgtagtgcccgttcaaaagaaagatgggcactagcgggtatgtgtagattttagagacctcaacagggccacatcgaaggatgaataccccatgccggtcgtagaagtgttaatcaatgcagctactggccacaagaacttaagcttcatggacggaaatgctaggtacaaccaaattttcatggccctaaaagatgtacacaagaccacattcagggtgcctggctcggtaggattgttcgagtatttggtcatgactttcgggttaaaaatgctagagctacgtaccaacgcgcaatgaac

SEQ ID NO: 57020 - DNA, 640 bp, Zea Mays
gtttgttcagtttgaggatacgtgcagtagtgtctggctaaagcaagactaatgttgcattcatttgtgtattcaccgcttactgacacgcgggggaaattgagctccaactgagatccctcaatgcaacaaacaaaagttacgggctggaacctgaaaagaagcactacaattgtgttgttgatttgttagacaaagctgttaagtttaggatcataataagtcactaaaccaatagaatttaaataaaccttccctcttctaacttaatttacggagctgaaacggttcgtcatatctgtgatcagttagatttagaatctgaagtggagctaaactattaactgagtaatctcggaaggagcacttactggaagggagacatttacatcggggccttgctatgatgcagtatccatcagaggagaacataaggtttgttcatcttatttcttttgcgctacttctttgtgggaagtccgtatgtgatctgtgtgcacaggtcatgataaaatgcctgcaacatttaacattcaaaaatctaggacacgctgatgagtttcagtccaatcaagtattctaaaaaaatcctgtccgaaacaaactaaaatatatgtggccgctacaggttgaatagtgc

SEQ ID NO: 57021 - DNA, 411 bp, Zea Mays
agcaggagaaggaacaccactactttccccactagctatgtaacgccggctgttcttccgaatcagagggatttcatcctcttcttcatcatcttcatcaacaacacagacagtacacccattggggtcagcttcagcaggattacacccattggggtcagcatcagtcgggtcacatccattggggtcagcttcagcaaattcaggcactggcacttcctcagcaacaggaatagaaggaccggcaccctgatccaagctagacactcgacgaagacatctcttcttcttcttctgcccctcagcaggagaagtgggttgattggctcggcgagaatgtttcgggcgaacattgtcagacctctgagcgtccaaagctttgccggcctcagggatgggcaccaccaccag

SEQ ID NO: 57022 - DNA, 299 bp, Zea Mays
ggttgtcccctcaataggtggtccccttggcctcccatgcaaccttcggtgattccttggcttttgtccagtctccacaagatccatcatgaagctcatgtggcctttggcgggagggtgatggctagaggcatagtcccgtgtcgaaggacccaactaggatgaagtccccttaaaccttccatgcggtcatcgaactttgtgttcaccatagctaaaaccaacaagtgattagtcgtagacaacgagatctatgatcaaggtctagttcgaccttctcccgaacagtagcccccaag

SEQ ID NO: 57023 - DNA, 390 bp, Zea Mays
gttacgactcgcccgaggccaaccctggtgggatacaaagttacaactcgcccgaggccaagccaagacagaataggcagtccgcccaaggcaaccctcaggtcagagaggcagtcacgactctccctaggccaagcccaggcaggacaggcagccacgactagcccgaggccatcctctggcgagacaggcagtcacgattcgccagaagccaacccccaatgggagacacaatcacgactcacccgagaccaagccctgcctggacagttagccacgactcgcttgaggccatcctcgggtgggataggcagtcacgactcactcgagaacaaccccggcgggagtagtcacgactcgcccgtggccatccttaggcaggacaggtag

SEQ ID NO: 57024 - DNA, 875 bp, Zea Mays
gcagtgatatccaaccaactttggggctttctatggctaatccagtgagctatggaccatggtcactataataaagttgaagatcatatatttgtgaataagtttcttacagagagttggatttggtgttatgcaagattgggagtaatacactctcaaagtctccctgtcagaccagtcgaggggacatttaggctcattcagttaactggactagtttagtcttgggcaggtgtagtgcaccatgccgccggcatccttgtgttgtgatttgagcttggctttgtgattcgcgcatgactaaggatggattctatgcagagggtgaaaagatcgtcgagggggtgaacttgggccctagtgcaggattgcttgtggcaccacttgccctgcgtcacggttgtgtgatcgttgtcgttgatccatcggccatccctgttgtgccacgcagtagttcattcaacacattgcagtagtcgtggcgtgcatcgaagagtacccctgggtcatcgagttaccaaaacaccacaatgagcgagctccagcgaattatttggtcgctccgataagcccaacctcgtcaaaattctctgttacatacctagtgcaccctcagccactcctcataccccgtatctcgagagcttcggtttaccccaaaaccgatcaccagcatcgtcgtgaggtgcctctctgtgtctagagctccttaggtgagcttgaccctctctggttcatgttttatcacccctatagtctctgttttattactgaccttgccaattgaactataccattgtgtgttggccggaacactatgttgccgtccgtgagcgccgtcgtagcctgccttcatgtgcctagttgcctctgtt

SEQ ID NO: 57025 - DNA, 712 bp, Zea Mays
tagctgcgaccacaacctttccctttgaggtgccctcttcaaacggggtcttcacctgttttctcggtcgtccccggaatcagcagagttcccctccaggtaaggaccatatggcaagctattcaattaaaaaacccggttcaacctgacgttggaaccgcggatatcccagctcctcaacatctcagtcttcggcacatattttccaacaatcttaattgcctccgactccacctcccacacgaaggaggtcgcgtcccgtccccgcaaatcaatagcgaaggctgggctccacaccatctgatcccctaaagacggcatcaggcgaggcctgacttcacccaaattccacccatgagctagcactcacactccgcacgcaacaaattcttccactaggtcctggtcgctgctcaaccaggctgtgtcgcgaagggcctcctcattctgatcccctttcttcactttaaattgtgggaaggccacataacaatgcgagcacaaaatggttaggggcaaagcaggcaacccttcgacatccccaggtgccacataaaaccaaaagtaccaccagtagccccacttattatttgcacaaggaacaatttcaatctcttcggccatagtcttcccagtcctcgccatgaatgtgcaggacccaaattgcgcaatcaaaccacctatctttttcttctgctaatgcaagcaatag

SEQ ID NO: 57026 - DNA, 698 bp, Zea Mays
gcgttttaaaaaaaggcctccagcccgcatccgagccagaggctcattcttttccaccagcgttttctctctggcgattcccagcacccgccggcgacagacctcccctctccggcgaccaccgtgctccggcgatcgtgtgcctgggctcgtcctctccctctcggtgagcagtccatccatctctccctccttccactgctctctgactgtgactgtgttcacccttttccaccttttgtgaatttcctcaaattcttgtgaaatccaatgaatccaattggtggaatgtgtcaaattgtccccattgagtatccctgcagattcttagctccttcgggagggttttcccacctcaaatagccgtttcaccgaaaacctaattccgtgcacgccacgtgctcggtgaaatgcccaaaccagccaaaaatgctccaattgaacccaaatttttcaggcaccttcacaacacttccagtaacctacttgccaaatttcacgccaatccgagattccaggcttaaatttcaccaaatttcccgttttgagcgatcgattccgagccgagtgcccaaatccctttttcttcgcctaaattcaaaccaagcacacacttcactcatattcacctatataaacctattcgtgaagtatcggcccaattccatatcgtttcgtgcctcaattcgaattccaaa

SEQ ID NO: 57027 - DNA, 539 bp, Zea Mays
aatcaattagggccacaaatctaacaccaatgccaccatttaacttaaaatcgcatatatatacagcagaagtccgcccatataacgtcgttgacagacgctaagcgtacggttttagacacttgcggaaaaaacctcacctcctccgacagcccctgcttcgatgcccttctcgccgagaaacatgtgcacgcaatcggatctcgctgctctcactcaattagtttcacaggtcagggaggagcgcttgcaagtcgagcgagaactgctactttcttgccgaatcttgtcgccgccgcaccagatcttgtcgtctatagagcgagacaagttgccgaggttgcctaggtgagagctgagcagagaggatgactgtgtgagggagtgatagagtggagagaatgagcgggttgacgaggtgagggagcagatgcaacaaatatccatcaaggttaatgtctacaacccatttttttgttttttggcacaaaaaacatgaatatttgaacaacatttttacggctcatggagacctctag

SEQ ID NO: 57028 - DNA, 848 bp, Zea Mays
acgacgtctaccattacctcccataccttgttgattacgtgcgaggcgttgtcgtagcggtgcataaacatcgtcgtcatcatcgtcgtcgtccacaggagagtgagctagggctggagttggtggtgggggacgagcctccagtacgtccatgcgtgtaacaagtttagcaactcatcgatcaagctgttcataggatgtcgtcgcagagtcctggtattttttaaaagcttcagtcatcgcgcgcatcatctccttcaattccaactgagagacacactcatcgtcgttaagcttaggccccttgtccttgtccatttgattctttggtcctgtcattgttagcacaaaatagagacaaaaaggcaacaaacaatatgaaccctacaactatctcttagggtggtggtggtggtggaatacaaattatgaagcgtcttaccccgctcttacaacgttcttaccagcactgcaggtggcaaacggtgaccagtgtgactgtccaacgagcatgggtgtgattgcaaaggagtacctgttctgctcgagagaaagttggagttctgagaaggctgactaaatatatatatgtggcacataagtcagtaacagatagcaatgctgaataagtgttccaagtactcgtcctagttgctggcctagaaaatgtaatagaacagttggaccaaggcacaagaaaggaggtacaagtatatgggtgcagcaagaaaacaggcttgaagcaaaataatcacagaggtgcacagaacactgttgtttctggttatgtgctacccttctttttttgcgatttttttcaaatattttttttatatttttctattttg

SEQ ID NO: 57029 - DNA, 429 bp, Zea Mays
ctagtacagaaaattcctaagactctgcgaacagtcccagtggactgcgggttattttaacctaaaccgagggacttttatgcaagattttaaggccgaaggggtatctgccatgctgggccatcggatcaaaattcaagggcccagattagattgcccataacccgaatacctatatgttcacagccgttcgattcaagatctacgatctatattcgattaagctcgcgctgacgtaccccatccgatttcgatccatcggtcgagatcgatctgcacaaaattgatacacgtgttcgaatcacagccgatcgatggccatccacggttcatcatcggcagagtgaagcggtacgcttcggcctgatctccaccgcccgatgatagatcgacggccagcaactgttctctatcctaagcctgcagccg

SEQ ID NO: 57030 - DNA, 466 bp, Zea Mays
atcctacccccttaacaagaatctcgtcctcgagatttaggaaggactagggaaaagatgtggaaaatctatgtgaagctcttcttctctctcccaagtagcttcatcatctccatggtcgctccattgtactttgcacatccttataaccttatttcttgtaactcgagtcaaagtatcatgaatcttgatagggtacttcgcgtaaatcaaatcaccttgaacattgagctcttccattggtaagagttcctcagggacacgaagacacttcttaagttgagacacatgaaatactttatgcacatcagatagactagcaggtagctcgagttggtatgccatctccccaactcgcctaaagatcatgaatggtccaataaaatgaggggacaatttgcccttaactttgaatctcctcattccacgaagtggtgacaccttgaggtacacataatctccttcc

SEQ ID NO: 57031 - DNA, 809 bp, Zea Mays
ctggagcgtaataccctacatccactgtccataagtcgtattgaccatgtcccttgtaacgttgtgtcccctcccttttatagtttaagggaggtacatacaaggatgcttagctccgacatgcgggcccaggagcataatggaaggaatacattatgtgaataattaatgctgacagcacacaaagatctttgctggacgctgtgttgcttctccgactggctacagccacgtcttgccgtgtccgcaggtgggtgatggcttgttgcagtagaatacggagtagcctggtatgcctgttgtgcatagaggcgtataggcaaagcgttcagattccctccgccttagtaacgcatgagtaatcagcgggtgtcatgatcactgcagtccatgcagcattgataggcagtgacccttttcttggaaacgcgcgagtaatggtgagtcattgtccttgctatggtaacgtgtgagtaacagcatggcccacgcagcgtggactgagcacgccgccagtcactggaatggacaggcgcacgtcttatccgtaatgaatgcaaagacgcgcgtagcttagaggcttaatgacaggttccgcccattggcttatgccgcgtgcagtaggccacatggcagcatcgggtctcagcctgggtggggagcaggagtgtatttgataaggtccggatcccaccagatcaggtctggacacgtgtcggcaccggacccccgcctgggtcctaattaaggcccgggtatgttctgtcctggaaccttgggaccccactgtgggtggcctggaccccata

SEQ ID NO: 57032 - DNA, 864 bp, Zea Mays
tggagggttgttggccatgcttttgtcacgctaataaggatgctatacaatggggtttatgatgcaatactagggtatgactggatatgagcacatagtcccatggaatgcgattagataaataaggtgttgacatttcaggatcaaggaagttgggtgcagttgagaggagattatgttccaatggaagaaatcacacaggtgatagttattctagttgagaagacgatgagagggaatgagatttggacctttgtgttgtgggaagaaaggcatgaaactaacaagcatcatgttccagagaagatttagggtttacttacagaattctaggatgtgttcgaggttccaaaagggttaccaccgtctagggaatttgatcctctcattccactgctccctagggctataccatacaatgctagatattatctatattctccactccataagcatgagattgagaggcaggtttgggctctgttggatgatgggttgattataccaagtgctagtctatttgcttccctagtattattagtgcaaaagaaagatggattatggagattttgcattgactataggaaactcaatgacatgaccattaagaatcaatttagacatgacatcgaagtaccatcaaattcgtatgaaagaagaggatgagtttaaaagtgcattcaaaactcaccaaggccattaccaaattcgtgccatgccatttggcctcacaaatgccctggctagtttttaatgtgctatgaattccatcctcacacctttctttcgcaagtttgctatggtatttattgatgacattctagtttatagtccaactcttgagcaacacattgggcaattgag

SEQ ID NO: 57033 - DNA, 717 bp, Zea Mays
ttgctacatgctctagatcaaagggtttggaatgtgaaggtctcgacgatcatcgagtcgctaattatgagattcccactgtggatgagttgttaagcaatgcaagctcaagtccaccgagcttgaccactaggctcgaatcaagattgagaatccgggtgcacctaccatggccctggtctctggaggtggttctgcttctaacccctcacctactttgtttactctatcttctatgttgtctatcacagaggagcaggtggagtgccttggggatgaggagctggcgtttgtggtgagctggttcatgcggttccataacaaccaccaaaactggtagcatggcgggtcgaaggatggatgcttcaactgtggtgacctcgaccacttcatcactagatgtaccaagaagggcaagaaggaggttggcctgcgtgaccaccactctggtcagcgcaagtgcaagcggaagtacacctccagcaagtccaagggaggattcgacaaggaggcgctcaagaagaagtacctacacaaggtgaagatcaaggagtgtggtttactcgcctccctcagcgatctcgaccatgactatggtaacacgacctcttcctcgagcgatgaggatactgaaaggtgggtcaaggacaagctgaataggttgtgcttcatcgccatagaggcctttacatcatggaccttggtgatgatgcattg

SEQ ID NO: 57034 - DNA, 512 bp, Zea Mays
aagcggaggagggcgggaaagggttcggccacggtggttgtcctcgggcggctctggcgggtcacggggaggtccccggagctatgggcaagctccggggagtttggcgcggtacagaggatgcaacggggaagctagccgggcactaggcgggctttatagccgtggcgcgggcgtggtcacggggcggccgcaggcgcgcgggggttcgcgcacgggcgtgctctgagcgcgcccccgagtgtcagccctcgtcgaacacgtgtgggtttgcttctgccatggttcaacagccgatttgagcaccttatcatgcagatcttggcaaaaccccagtgtacggtctcttccctgcaccaaatcctacctttttgatgtgagtcccaagcaaggatacggtcggggtagggagatataggtgtgagaagttgtctttgtcctagctgtccaaaccgagacaaaagctatgccaagtcatgtcaaatgacttagggttgggttcaaacttttcc

SEQ ID NO: 57035 - DNA, 575 bp, Zea Mays
ccaatttgatgagccgaatgatgattggctagaggttgttgaggcaaccagtgatgagctgctgggagcctacacgaaggcagaggatgaagctatgatcatttccttcggcgctcgaggaaaaaagagacagaacagagttttcgatgtgatcgggtttatttatcctaactactgttttcctgctcaaaaataaggagggaagagaaaaattgccacttcgacctcttccggtgcaccgaagtcgaagagagctgaagtcctgactcgtaggccgaaactacagtctttagaaaaaatagatgtagcgcctatgacagagaaggtaaaacttgttgaaagtgctgaagttatccccttagctatggaaacagttccttctacgccagccgaagttagtgtcgatccggtaaaagagccgggaccaaagaaaacagcagaagaacaaccaaagctgttgagtcccccaactgtggcagggttgctaaagctatcaactactacaacaatgactccaaggatgaggagaatggccaatgttctagatgttcttttacaatccactaagttgcccg

SEQ ID NO: 57036 - DNA, 402 bp, Zea Mays
ttctcatagtggctatggtgctgctagttcttctggatcctctggaaagaaaaggagacttaatgataaagagctggggattatgacaagacttactggagctgtgaacaaattggctgaagctgtccaagcacctattgtggtccagaccaccgatgtccaccctgatctgtatcaaatttgcatgagtattccaagttccactgatgaggacttgattacttgccttacctacctattaggcaacaaaaggcaaggttatggctttgtgaagatggagcctaaacaccgtgtgctttggctaaggctgcaccatgcaaggatttgagctgaccagtctgatgcctatgatgcctaataccttgctctatgcgtaatactttgatctatgcctaatacttt

SEQ ID NO: 57037 - DNA, 679 bp, Zea Mays
ggcaactgtgtccacagttgtttataacctcgtcccagtcctctaccattttgcaggcttatcacagtttgcaagttgcaacagaacctagcaaaagcattctcgcgttacagacaaataatagaaggtctatcctcgtcactttccataacactcttttgttagggctggtttcatccgacctatccggcccaagttctaaaaggtctgacatgattgaattttggtccggcccggcctgtgggtttagcccttggccctcggcctgcggtccagcacattattggctaaacataccgggctcatttagggcagcccaacattgtataaagaccaaaattcacatagagcccaaatttcatattaaaggccgaagttcacatcagagctcaaaattcacaacaaaacccgaaattcaaaacacatatatcattaaatagatattaacatttcaaacgttataattaaaaaaaatcaaagaacacgaaaccaattggtggttgacacctcatctccatgattaagcatgcagctaaccaaattcgagaggatgttttccatgattagaagcggatggccaaatgaatatggaccttttcgtgcctataaatgtgctatttcgtgacttcgtaaacgggtcgtgtccgtccatgggccatgacctcggcccaagcacggc

SEQ ID NO: 57038 - DNA, 702 bp, Zea Mays
ctctctttcggcgactaacaccatgcttattgcttctgcagctgccgcaatgtacaggtatagcggttcccccggctccggagcagccaggatcggcagggaagcaaggtgttgcttcaattctttgatggcttgttccgcctcttcagtccaggcaaatgggcctgatttccgcaggagcttgaagaaaggcagcgccctctgagccaacctcgaaatgacgtggctaagagctgctagcgaccctgtaagcttctggatgtccttaatacgggcgggaggcctcattacctcaatagcctttattttctccgggttagcttcaatgctccggtatgaaaccaggaaccccagcaacttccctgcggagacaccgaagatgcatttctctgggttcagcttggtgcgggttgcccgcagcttgccgaaaaccagggtcaggtcttccactatagccgacccttccttagtcttgaccatgatgtcatcgacgtaaatttccaccttatcccggatcaggtccccgaaggtcttgctcatcgcccgaacaaaagttggcaaggcattcttcagaccgtagggcattacaacataatagtatagtccatctactgtcacaaaagcggtatgcctcctatcctccttagccatccgaatttggtggaaacccgagtaagcgtccaagaaggacaagaggtcgca

SEQ ID NO: 57039 - DNA, 322 bp, Zea Mays
aaaaaatctatgaaagtacactttctcatcgacgactcgagtgtctatctccacaacaccattgggggatctcaacaaaatctctgtcttccattgatacaaccacctaaaactatcatcccatgtaccatacattttttcaatgctccctgcagccctttatatgcagtgtcataagttatctgtaccttatatgttgcttgaagtctcttttgtagatgcttggcacctatagatggctcaatccgaagtataggaagtgccttatgtgctacccatccttggctaacattcaacccattcaatcggctttttgaggcac

SEQ ID NO: 57040 - DNA, 441 bp, Zea Mays
ctctttttcaacatggatcccagttggagtacaaacttccaaaccttcaccgacatgattaatagccaatcttcaacacccctatcgtgtggaggatgtcttcttcgacgacctttcttctatacatcgtcatcagaaggatgtttttgcccatcctcattctctcacaccacaatccttattttcatactcgtatcgtcctcctctatgtccctaccaaacttccatggatggtcctcctcctcctaatggtgatcctactatcgacgctcctccttccactaaagcttgtaccatcaatgtttctcctccaccacaattcacttacatataccctcatccatgcatgtatggatataaatggtgctcccccttcgttccctcccctgtttggtgctcctctcccatatagtgcccctccttcatatggtgctcgtccac

SEQ ID NO: 57041 - DNA, 608 bp, Zea Mays
ccaactaataaatttccagagtatgaagtagtccacttgaaggaagggcttggcccatattcacgtacgtgattttcatgttatgttgtgcgctagaacagttgaacaggtaggatctatcgatactagctaacagacagcatatgtttcatcacgtactaggctacttgttaactttaattcagccaaaataatgtaataattgcagttctgttcatttatcgatgaagaagccacattacttccggaagcaaaccagctagctataagtgtgaccatggcaaataaatggtgggccatttttcaatgacggtgtacaatataaaatcactagcacaatatgtggctgacaagaggacaacatgaccttcgcacctgcagagacaacctcacttctgcatttgcaacactgcaaatatgtctgttgtctacacaaaacaaacaccatttatgagccattctgagcacaccagaaatttaaatctgagaatttctaaatggacaaaacttaagtacaaacttatagaccctgcaaggttattgaaaaaaagacctaatgtgcaagctagacgggcaaggtagtaaattatccatatcatttcatcaaa

SEQ ID NO: 57042 - DNA, 616 bp, Zea Mays
ttttgtcactcagaagactgagcgatattattcaactcctggtgaagtagagcctactcgcacaacgaagaactagaattatattccaaaaatccagattttaacagctctcggtaggctgaggtttaatagtggtgaaaattgcacctttgatggcaaaattggttgctgggcctttgtcacatttgaacctgccaagagatcgagtgtgaattggccagcagggacaatagagatgcagcccattgaattaatcacaaaggatgtcatgcgatgtttcatgattgaaaaggtcttgctggcaatttgtgctaagtggccacatgaagatgccaataagcttatatacatacaacaagacaatgcgaagccacatgtttcacctaaggtgggttcgacattagacttatatgttagcctgcaaactcatcggatttgaaggtattggatcaatggttcttttaattgtctccagtcaatttagtacaagacatcatccaaaacaaccgaagagcttgtagttgtcgtcaatacagtaatgctcttttaccatttgtttttctatgttcattacctaccatgtgctttagagtattatgtcctggcctaccatgtg

SEQ ID NO: 57043 - DNA, 565 bp, Zea Mays
aaaagaatgtggaggagcttcgtgaatccaaggagagatgctatgaaaaatccttggattgcgcaaagaaactgaaagacagttttgcaaaggtgggtgcatactcatcggagcaaaaatttattcaaaatgatcccgaaggagtcattcaatggatcggcgaagaggttgaagattttgaagaaatacttagcgaccgtggggatttttgtgcctttgccggtggccgaggggttgcagcagttttggagaaaattggctgtgaacatgttaaagctgcagcccaggcagaagcgatcttctccatagacgatacgaaggaaccttcagccgaagctactctgatgggcgagaaattctattccgatgtttggatgaagggcgaccgtgagatagccgatgaagcaataaagaagagtgaaaaagaatcccacgatgcccgagtagaggcaaaggaagctgaagaagctgttgaacgtgcattgattataggtacctctatttaatgcccttttgctttattattcgtttctagcttcgaacccttattatcatatactttgct

SEQ ID NO: 57044 - DNA, 295 bp, Zea Mays
atcatggcctatctatggtataacaacctattgggtccatggtcaggcaagatgcaagggagagcaacagactaacaagtttcgcacgtgacacacgacacaagaaactggtgctttaaaggagtagagatatccaaaataagagtgtgtcaggctatgtctaagtccatgttgttgaggaagctaaaaggagtctgtttcaactcaccaccaaaatactgagctggttttttcactaagatatggggtaattacagactttcctgcggttcacaacaagcatgggagatcaccg

SEQ ID NO: 57045 - DNA, 811 bp, Zea Mays
ggataatatagggtaaccgttgtgggagataaaaaaggtaagggatgaaatgttaatgatgtgacgcagaaaagtgatataggggggaaaatttagaggtcactgctgcgaacagtctaacggatgctataacactcgcctagatgtgggggtggcagctgacaccccttgcctagattttagtacacacgtgtctgttagttatggaaaaaatggtaatgaatgatgaataagtacgagaaatgatatttataggaaatgatatttgttagagtgaactgatatggaggataaaactataaaaagagagatcactgacgtgatacataagtgtgatataaaagtaaaaatgtagagtgaaccgttgaactcagtctaaagctgagtcgattaggcgacgaatcaccaaactgcagaaaacggaggattccatgtctagtaggaggctgaccggagaaccaagagggatagttcccagatttttgccatggcccacacgattcggcaattccgagttcctcgtggtatttccaagctgaacctcaggttcagcagcagaccagcagtaagcagcaggtgtcatgtcatgcactgacactgctcttcattgtgtgaaagcacgaaacctcaatcatcatcgttaatcaacgaggaaaagactggagaagcgatggaagggagcggccaccaaaccggttcaaaaattccagtttcttcttctcttttcttcccggtgataatctccattttcttttgtccattaccagcggcgaccacttccggagcgagagagcccacaccgccacacgac

SEQ ID NO: 57046 - DNA, 779 bp, Zea Mays
agtggccaaccagctgaaaaggtgaatggttctatattaaggctgatgagaagaaaagggggaagctgatgacgatggttatgtgcccactatctctaaacttcgggatgactcggcccctatgcaacatgcagtttgggtcaccatgccagctgcccgcagtagaattcagggtggtggctaaacaaatcagcaccagagacctggtgcaagaatacctggccaacaggacatctcctacgtcaagtgattggggcatatcgaagctaaagggaacaaaaagaaatatgaacttgttcgattaccttatcgttttaagtttgagaaacaattcaaggagccttgccaagaatggctggaaatgattgaaactatgtgcaatgaaattttggggaactacactaaaaaaagaccaattaatggcagcagccttcggcacccggccaaaacaaaggataaaccaggtaatggacgctctaaaatttgaataccctgattatgagtggctcaacaagggtgtcgaaggggcaaaaagaaaaaggattgttagtgttctgagcagacaagctgccaggatggtgaaggagaatgaaaaggttttaaagaagagaaaatcctctcctgagctaaaggtggcagctttaaagaaaagaaaagctaaatccctagagcgaagatgactaaagaggaagaagagactccctcaacacctccagctgctggagtggcagaaattttgaaggtaatgactgaatctctaccaatcaagctgctaatcc

SEQ ID NO: 57047 - DNA, 501 bp, Zea Mays
atggagcttgaagttggactgtcaggttattaggtctgaattttcaaacaaacagtgcaactcttgagacttcgagcatggattcaattatgatccagcatgaatctgcccatggcagctatgacaaacttgtagctggttaatagctctccaactttgctacagagcatagagcatgtttccatataagtttgagagaaaatcaagctcaaaaacggtctgtcagattgactgaacccgttcgcgatggtacagtgtcccaaccggatcagactgccagcgtcgcttgctcaccgccgacgaccgatttccgccgcgattcgtgttgccgccagtccaagttgtgttcgggatgagtggatagcgctcggggtcccggaaatatcaccgtcgtggataagtccggccggtaaaactaatccgaccaccgtactagcttgtcgcggtggaacccgataggctcgccggtgaaccgccgtcgcacggccttgcaccacgtat

SEQ ID NO: 57048 - DNA, 282 bp, Zea Mays
tgtcgtgactatatacattggatccagtctgcaccatgtggaatggagtgtcactgctgctgggcacagattcaaagacacctgccaagtcgtcgcccgcaaggcattgagggtcctgtgtcagatctatgaagaagaagtggctgacaccccgcttagattctttccgccctttcagagaaaccgtccagtttggatggccaggatgcatgcattggaagggcagcagctgcttgaggacgacctcacagtcgtgtacctcactgcatatctgctcaccct

SEQ ID NO: 57049 - DNA, 703 bp, Zea Mays
cctgcttccgcgccattgctcaagcgctccagagtttcctcttgaggtgagcaacctccccttgcccttatttccccgtttgttgccctgtccttcgcgcaattgcttgccggagcaagtccacgctgccgttgggccactccgccgcggtccgcgctctctaatgcccttgtttcgttgttgtgcccatggtcatgttcgccatactccactgaacctccctgagcccttcccggcgtcgtatccgacgggcctttgtcatggacgcgagtggcaccaccgctggcagccaagggacctggcctgagctagccattagatcccaggcgttcgtctaagatcggatggcccagatctaatcagaccaaatctaatcccaaccgcccactagagatccgacctctctgatttccccctcacttgtgcccctaccactggtcctggcctgtcagccccgttatcccttggttgctgactgccttggcccactagttagtgcgcgcccgcacgctcgcccgtgggatctgttctcggccgtcgatctgaggtcggatggctgagaacgcccgataccctttggcgtggtaaaattgttaatgagaccctcgactttttagaaatgaacccgccgtccctagttttcgcgcacagacccctgtaatcttgcagattgaaccttggactttttttaatcacatattta

SEQ ID NO: 57050 - DNA, 814 bp, Zea Mays
gcaagataaccaagactcaggataaccccaaggtggacggcgggttgatttcagtaaaggataggggttcttttgaaaattgaccacggtgaaggggtacctgtggatctggaccattggatcacttgccaagggcacggattagatcggatccccgaaccggtatgcatcgccagccgctggatcctatatctacggctcggattcaaaatacccgagatcgagttgtattcaccggatcgtaaatctacggccctaatttaaagtgacgaacaggtaaactattatgcctaaactctaatccgaaagtcgtaatggatagcggtaatggtaggatatcacaataggagattctcaccgagatctgaatgggcgcccaaaccttcccacggcgcacggcagaatccggcgaccgacgtcgaattctgggcaactccgaggtcgattactcccaattggtcacgagcgcttcaccagagaccccacgagccacccagacacgtcgtggttcccccgagctccaagtgtagactgggtcgcgttggctgatgaatttcgtccacgcctctctctctcgcacggccgtgagcgacaggctttggttctggcgataatgaatgagcgcgaggagcagctggggacaggtagataaatccccggaaggagggcgacgtcggccgcaaccacgccggcggatgcgcgcaggcgggtgagcatggcgatatttgcgcggagcagggagaggtcgtggaaggtggattcgcttttatcaccccgagatgcgtggagtgccccaactagcgcaggagaagag

SEQ ID NO: 57051 - DNA, 382 bp, Zea Mays
tttttacaataagtactagtcctctttcaggatcttctccgcaacttcatttagcaatttgttaacgacttcgtcaacaatagattcggctatattaatgatctctagtgtttccttcgtttctggatcggtcaggggatcgaacggtttcggtgacggagataattcagctacagtggaaaaaattaatcagtccgaagccacaaaacagatgccaaagctagatgccgcgaaacaatacctatgcgtctctcgcgctctgcagtttcttcaacttgttttgcttgtactcgggcgtcatggatgtctttctcacttttcttcataatttcatgagccatctctcggccaccatttacccagatgtcattgtaaaatttcc

SEQ ID NO: 57052 - DNA, 1304 bp, Zea Mays
atcgtttcgagttaggctcttgttaaaatgatgattaggctcttgttcagttaagtaggtctcggttctcttaaaatgatgattgttaggctcttgttagtaggtggagatgttatggccactgttgcagcgaatcatttttaagtgatgcaaaagtaaattcaaggatactattgtgaaccatgtgcttctgaattttggatggatgttttctttattagttcaaggtttctggaggtggacaagtagtttgccgatatacaagagcatgtatcaatttgctagatcactatatttataaatttatcagagatttgcttatgtagagcactaaaatttgcttgattaccaaaattgttcgttgaagttttttcaatttatgtacgtcactcaaaacactatggaatatttctaaatgatttgttataagtgctactgctttctgtgctctggttctgccaacaaacaatgcccaactgagaaaactgggtctgtactccctggccctgcagctgtccggtgcctccctctatgcatctctgtagtttgcatattaatagtactaactgcttgaactgtggttgtgatttgccatgtgcttctgaattttggatagatttttctttagttcaatgtttgtggagatggatattatgctccaggatcctacaacatgacatcacatcaattgtaaaggaggtaaccaatttttctagactgtattgggattgtttttgtaccagactgaaatgtttgcttatctttctgcttcatgaaatggtgtactattaggctcttgttcagttagtaggtctcaattctcttaaaatggtgttgtgtacaaacataaatggttctgttagtctcgtcagtgggtggagatgttctggccactgttgcagcgaatcatttttttaagtgatgcacgaaagtttgctaggtcactatatttagaaatttgtcaaagatttacttatgtagagcactaaaatttgcttgattaccaacattgttcgttgaagctttttttaatttatgtgggacactcagaacactatggaatatttctaaatgatttgttataagtgctactaagtctgtcaaaactcaattgtttgtttcaaccaaaaggcatcgacacaagactaacactcacatgtagtccgacatagtctacgagtaatgcgatcttagtctatatataatgatagggatcactgtgaattaaaaaatgatcttactttctaactgttagctgtaataatggtcttatatgcacatttcaactctttgcaaggtctttg

SEQ ID NO: 57053 - DNA, 499 bp, Zea Mays
caaaaagcttcggtagataaccacctcatttgcttcaggaacaggagcaacgctgtcccctccaaccctcacaatagtcatgtcgcggaagtatcttcctctcatagcatcaacgtgagtcgatttcccgaagatggtatggcttggtcgccacggacgaacttcagaatcttcgtctccactttctgcatcatagtcatcgctgtcatcggaatcctcagacagttcagccagtatttctcttgtaatcttttctgtttcatctttgccatggattctaaaaacccagaaatgaaaggatctgcagctttcttcttttcataaagcttctcttccttagttatcttcttttcctcagacatcttctccccagacatggagcaaaaacacgactttgaaccgaagctctaaaaaacttgaaaatcaagcgagagctattgagcaagagccagaaatttgagaaaataacgcaaatagccgaaatagcgcatcaaatgtc

SEQ ID NO: 57054 - DNA, 318 bp, Zea Mays
gaaaaatctacctcaggggctctgttctcttaatcaagttgagcgttcaaggaagagttcagggtttgggcaccatccaagaacgcagaaacctagttcaggttggcttgactctaagcatacctctcctcaacgtcggagcaccgtcgagtcagagctggaagggcaagaaggaaagagcacaggaggtaaaacgagggagcaacgaacaacaaagaaagctatcaacccactaaccgatgttcgaggcttttagatcatctatttgcttctaaagcaggagaggattccactgcagcaaggacaaaacctgatcag

SEQ ID NO: 57055 - DNA, 431 bp, Zea Mays
agcgctcccacccttatatgcatcaattgtgtttaatttcgatgcaatcatggaagcaaaccaaaagccatggctggccagtggccatatcaacaatgaaaggttatgctgcatccaggaacaatactacagaaacatcctgtaatgtagccgatacaaaaccatgaccaaacagcgaagcgtaaagctctacccaatcccttctccatcaggtacaaaccagaaacaacaatgaagagaggttgctatttcgcaactcatagttgctatcagcgcatatccgtttggttctacggactcatttggaagtcaaacgtccgagccactaaccactagatgaagcaagtgatttctgcaaggatctcaccaaaatggctgggaaaatacgtcatctcaatatctccggaaaataacatgtcagccacactaag

SEQ ID NO: 57056 - DNA, 642 bp, Zea Mays
attaattacgaattaaacaagattctctaattatttctatactctaaatcattttctatactattttattcaatttatttgttctctgggttgcgcgcgttattaccagaaagtttagggtccaaatcataaatatcgggactcgattctaattgttttctaactggtgggggatgacgggttgattgcctaaaacactaaggtctcttttgcaaatctggctcggcgaaggggtatcctttatccctaggcattggataatgcctgacggtacagattagattgaatcctacgagatctcggccactcgattctcaatcaacgttcaggattttaaatgattgggtgaaccctggcgtgcacgatcccaatccaacggcgcgcggcaatgcccccaaaccggtatccctcattttaatcacgaccatccattcacagatcgacggtagacacctgatttcctacctcccattctattcgtcaatacttaggccagctatggttcggccaacgatgacggcggctggcgcgcacaggccagcaccgaaggtgatggtgaggactgaggacaaagcatagtgcggtccgtgatattatctgttctccaacgcaacacatcggtaccccggacgctcccccggc

SEQ ID NO: 57057 - DNA, 709 bp, Zea Mays
aaatcctaccccccttaaaaataatctcgtcctcgagatttaagaagatctagggaaaagatgggggaagtctatgtgaagctcttcttctctctcccacgtagcttcgtcttctccgtggtgactccattgtaccttgcacatctttatcaccttgtttcttgtaactcgagtcaaagtgtctagaatcttgatagggtactctgcataagttaggtcatcttgaacactaaggtcctccattggtagctgctcctcaggaaccctgaggcacttctttagctgagacacatgaaatacatcatgtacatctgacaggtgatcgggtagttctagctgatatgcaacttctcccactcgctttaagatcaagaaaggtccaatgaagtgaggggacaactttcctttaactttaaatctcctcataccccggatcggtgacaccttcaaatacacatgatcaccctccttaaactccagtagtcttctcctattatcagcgtagctcttttgcctggattgtgctattctcaaattttctcttatcattcaaacttgttcttctgcctcttgaataagctcaggcccaaagaactgtctttctccagtctgatcccaatatagaggagtcctgcattttctgccatatagagcctcaaatggtgacatcttcaaactggcctagtagctattattataagaaaactca

SEQ ID NO: 57058 - DNA, 437 bp, Zea Mays
ggtgccgccacggattccgttccgttccgttccgcggcgtacgtcacgccgcaccaccggcacacacacgcacgcctgccactcgctctctctctctctcatcacagttccacacccactgacccaccctcgagccgtccgaccgaattaacaacgtactgcgctcgatgcgaaggcgctgatcgaggtcttggccagccagcctccgagcaagttgcggcttggtaggaccagcagtagctgctggctccatatgtatgagatgggaagaaacaaaagaaaaacgcagcgagatggccgaaaggcaaccgccggcaagttgcatgcgagcaggactaggacctgcggcgtgcgtgatgagcgcgccaggtacgtggtgggaggcgccaacgaccgaggagcgaggatacgtacgatgcagaggtgagctggggggg

SEQ ID NO: 57059 - DNA, 509 bp, Zea Mays
tggatgtcacttggtacattggtggttttcctttttcttcatatttgaaggttctttcactttccaattatgaccttattcttggcatggattggctatgtgtgttcagcccgatgtggatccactggagtgctaaatgtttggtgattccttaccttcattccaaaataaagctctggggtttgggtgctagctaagttcatggccagacactggaagtttgtatgttggactcactgtcggacaaggatcaggatattgtacaccaacttccctctgaattgcagcaacttcccagtgattatgcagatgtgtttgttattcctcaaggtttaccgccacctagagagtgcgatcaccaaattcaacttctgccaggagcccaaccagtgcaagttcggccatatcgctatgcaccagcactcaaaacagagatcgagactcagattgcataaatgctccaaaccggcatcacacagcctagcaccagtgccttctcattaccggtt

SEQ ID NO: 57060 - DNA, 611 bp, Zea Mays
caggcccgcccaatcataatccaacggccgtaatttaattactattgagatatgtgccgatcgtctgatcccgatcggacggtgcttatctaacgtccgaagggggtatccgagatctaatcctagccgtaagccgcacatccgacggatacgatcagcctaaccctatcctcgccatgatccggcggcgtccaaacaccggcggcagcgccatggccggcattcaacacgattgcgatccgcgcactagaactcccaacagaagacagtggcgagtaatatgaacgatagattactcacagggagggtgtttaccagagtttaagggcagtgcgatgtcgcccactgatcgcggcggacaccaaccaccgacgagaaattccgacggagcaggtgacaatccccgagcggtgtggccacggctacttttcctagggtctggaggagctcctagggaccaatccaaagacttgggccacggtcaatagaattttcccccagcggcagcgcggtccctcacggttcactccctccccacggtgtgacgatggcggcggtggaaatcaccaggtgctcggtctagggttcaatgcaggagtcctagaggtctc

SEQ ID NO: 57061 - DNA, 1045 bp, Zea Mays
ggagcgcgaactcgtgctagatcctcgccatggttgtcgtgactgtgctactcccgtccggattccttggccgttgctgggagtataaatatgcgccaccaccccagcttcctccatcctaagccggcaccgaaagaccaagcgcgacagtggagagaaatagtagagagaggaagagagattgccgtcgtggtggccttgcaagcataccaacatcggggtcttggcattgggtttgagtgcttcaccgggatgtggcgagggtggacatggcttcagggcaaggggggctgacccctggggttcactggagcatacaacctgctgcggatccgcctatcaacgtggaccaggccctcttcgccaccctgttcggtaaggtattccccatattcttcgccatcctctcgaatttgcgtagagccttgcggggttgttcaagggcattgagatgtcgtatccccatgttgatgccatggcgccgccgcatcggtgctattgtcaccgcgacggggcgttgtgaggagggcgacgatgtgagggccgttgatcaggccatatacgggtaagattagaagaatgggtaagggagatttcgaccgcagattgatgatcttgcggctaggattaaatgggcgataccggttcagtggggtggatttgcaccgttcgatctggatcgagcacaccgaaataaatccgagtgttttaaatcccaagcgttggtcattgatccgacgacacacactgcataccatttcagatgtgaggacttctaatctgaaccttggattcgcgatctgacggcctagaagtgagcataccccttcgaccagcgtgttttacaaataaggccccgtagaaccctataaacaacccgcagtccacctctgagttgtctgagtctgggaaaacttctgaatttgccctcggggttctctgcaattagtgcttggtctagagaacaatgaaaatggataattaattacagaaattgatttttaatacaaaaataatttcagaaacttgtgaaattcatagttaa

SEQ ID NO: 57062 - DNA, 1184 bp, Zea Mays
atgcaggcttgcaaggtaggcctatatatcgagtggcaaaaggaagcaagatctccaagccattatgaaaaggatccattcctcagtgatggagcagcaagaaatacagagatacagccggtgagagagagagagagagagaggagggaggacactcgaaagccctacttgatgcttcctgcatgccatacggcgaggtagctactaggtagcagctagaggtgaggatggtgcatagctttcagtgatgcatggtaggtgaaggaggctctttctagggcaccatccatctcgctcaagactctctcgctcgcaatacgtacttttatgctcacgcaatagatccacacaggcactagctaggcactagctgtgtagtacgtgtatgtactcatgtacactatatatatttttacagatggatgagatgatggagagagctctgttgcatgcatgttctcttgtacacacgctcgctcgccatctgccgatctgcgccattgcactactactagtgcacgggagctagctagggaatggaagaaagccaagcaaaagagaaggacggagcagaaaaaggcttggggacaatgatgagcttgcaggccattttctgagcctaggggtgcataggaaaagaaagaacagaaaggcgtgtccgtgggggctcctgcctaaggctatgcatgctactacgcatctccaaaagcttttgtgtgcgcgcgcgcggaagtgcacaagggagtagcaagctgccaaggtccatcactagccagtgataactaaccatctatctaacaccctcactttctctctctaggatggatggggggagagagaggagagctactctcttgtcaagtggtggtggtagtagtggtggtgatggtgtgagagaggggtgatgtgccaccccaggacatacacccctcacctacaacaggaacaagacctcgctcgcttacatgtatgctgtcacacacacttaacgcacatgtatattttatacagagacaacacactagctagaaatactacgagagcatattatatataatatatattatatatattataaacatgtaagtgtgtgtagtcccacatctgtatggtacaactagtcccttttctagctcttgagttcctttcatcaccgatgttgggaaagcaaggcaagggctggg

SEQ ID NO: 57063 - DNA, 608 bp, Zea Mays
tcaatatctgcgaagcgcagggggctcggggataaattttctaagacacagagtcctgcagacaggactgcgggttgttttctcagaagcctagggtctctttagtatatatgccaaggcgaaagggtatctcccgcccggagccgtccgattagacgacagtgccacaggaccgcggctttatttctggtttagtaaaggtctcatatgaaaatgcgcacccgtgaaggggtatcctctattatcaaccgcaggatctggatcttacggctcgaattagattgtcgcggttaaaggacccgcgcgttatatgaaccccacgatccgcgatcaacggaccacagcgccccattcccagatcaaatctgcgcccttagatcccagatctacgtttacgatttaatgaagcctgaaacacgcaccaatcgtccgatcctgatcggacgttgcccattcattttcctttcaccggtatccttgttcgatctagaccgttggtccacagatcaacaatccagcacgtctctaactagcccgagccgtgatcaaatccggtcgttcattctgtcatctacggccatgagctcgtcctcatcctctgaccacac

SEQ ID NO: 57064 - DNA, 451 bp, Zea Mays
ggagctatcagtattagtagggacactaggtgatgcttcaactcttgaaaggcttgttccgcctcttcgatccaagagaatgggccggactttcgcaacagcttgaagaagggcagcgccctctcagccagccttgaaatgaagcggctaagggcggctaatgaccccgtaagcttctaggcatccttgatacgggccggaggcctcatcgcctcaatcgctttgatcttctccgggtttgcttcaatgccccggtgcgaaaccaggaacccgagcaactttcctgcggagacaccaaagacgcacttgtctgggttcagcttcgtgcgtgttgcccgcagcttgtcgaagaccagggttaagtcttccactagggtcgaccctctcttagtcttgaccatgatgtcatcgacgtatacctccatcttgtccctaatcaggtccccgaaag

SEQ ID NO: 57065 - DNA, 943 bp, Zea Mays
gcttttaaagaagccggatgtcggggaaacgatccccgaaccttaggacccactggtcagtgagcgtgctaaggaaagagcccctgatcgttgggcccgtttgtcagtcagaagaggcaggtatgtcaaccttgaaagatccgcctctggtcgaaccccgcggcaccgagcctagggttgggcatggcagagcctgacaatggaggtcgggcgtgtcggaagggaaccattcgagtggattcaggacccggccccggactgacccgccataaatgactggtcgcattaaatgcatctggcactaagccacaacgtgggcgccgatccgcttcccacacatgacctacagcccctcgggacgcatagcgctcatgacctacgagcccccagactgtgcacattaattgcatgttcacccctcgacatgcgatgcacttatggcctatcaaattaggcatgagtgcacaaacctctcgcggggcactacacgacgggctgtgccgagccccaggcaatggaagccagtggtcggtgtagcccgaaagatggcacctaggaccatcgcctccccccacgtcatccaacatgataaatacatgatagccagacagcctcgggtcccacgagtacgtgtggactcacccagagtataatgttggttgtacccttgccttatggctcattctcggggaaaccaccgctggccaacccctgtctcggtcaataaaagggagaggctcgcctcagggcaagggggacgcaaccggacgccttcagacggagacgaacccacaaggacgaacaaaaggagtagcgccgacgaggaccaggaggtcggagccccgccaagccaagacataggtaggactccaccttgtaccttctaagctccacttccaccctaattagagatctaagagcctctcatccctctctcgactgc

SEQ ID NO: 57066 - DNA, 419 bp, Zea Mays
cgacagtatacaacgcttccctgcctggtttggagcattcatctttttttggaaggtgatctgtgtccactccttggtggacgaggtgcacaacggagttcatcgagttggggaggccatggtcgaccggccttcaaccctctaggggatcctgagcctggcctcgtgcggaccacgctccatcgcgccattggcgtggtttgtggtctcgccgcagcttcctttggcgatcccaagggagatttcctctcgggtgaagttgctctgcgatgcaaaatcccctctatgtctactacataggagatagttccgaagtagaagactgctcctgggctgaaggtgatcatgctcttgaaacgacgaccgtggagtcagcgttgctcgacgatgcaccccttacctggcgcgccagctgtcgg

SEQ ID NO: 57067 - DNA, 320 bp, Zea Mays
tactgctaggctgacaaacgaaggtggagagactgagactactgagacaactccagtctcataagttatgaagcgctctaggttggttattcaagagggggaaggatctattcccgagaaagatgatgttaatgccgaagctgaacacgttattgccgaagctggtagtgatgacgaagaggacaatatcatcttgagtccaagcaagccaagtcatgttgaattttggaaatccactatgaaagcagaagatttagttctaatgaaaaagcttggatattttggggaaaatgacgatgaattgataaggtttgtcaggg

SEQ ID NO: 57068 - DNA, 331 bp, Zea Mays
agaccatcagtggatgaggttccgttttgagcgagaggatgtcacattacatgccagcgagatacgccagttgtttggatttccagagtcgttgactcgtcttcacagtctatgctatggtacatcagatcctcctcgtcgacctcatgatggagttgcacaagccactgctcatgtcgcggccctgtttagacctcctttcacagatgggtcacgacgctctccagctgactttatccctgcagcgaagtatctgtattaggtgatgagacggacactgcttcctaggatgggttacagagaggccaccacacacattcaattatggcta

SEQ ID NO: 57069 - DNA, 766 bp, Zea Mays
gcaaaaggttcgaatctttcagctctttcatgccccgaagacctgccacctttggcagtcattttctaattgtcttcatcggaaggtgatgaacctccaaaggtagtatcatcaagacccaaaatacgtgggctctccacttcttcctcaaatggaatttcttaacccttcgaagggtggcctccttcgtcagccccctccgtggttgacataaattgagtcagtgttggtcctaagagacttaaaggggagaatggtaatggttgtgtcattacctcaagaattcgtgtgcatcccaaagaagaggtggttgtagtactccctttcccttgcaattgcgcagcggtagaattttttgaagaagtcttggcttacttcttttcggggcccagagatggctcttcgtcgcccttggactcatcatcctctgtagcagcatctgtagtattcttcgaagttttcacaatacctttagcaacttttttcttttttccctagttttagtgttaatagagggatcctcatagtcttggtactcaaaaccaatggcattcatgactctaagccgaagcttcccccggcttccgaagacagaggatatatcttcgtgctctttggtaagataatttccacatatctcattgcacttttactctatcaacttaagccatccaaccgaaggagctttgtacgaggattgttccttaaaaccaaaagctagagtaacaagttcttcatcttttgacttcacctccttcaataattt

SEQ ID NO: 57070 - DNA, 362 bp, Zea Mays
aatcgtagtgttgattgcatctatgacttggtttgagcttcattacatgttggttcatgcttgatgtcaggtggtgtagtttccttagacaattagtccgaggtagaagttcttgtgttaattaagaccaataatggacccatgttttgaatggtggtgctatatggggtaccttggatgttttgtttggagtggtcgaattcgaggacaaattctttttaaggggggtagagtgtaatatcccaaaaaatgttgtcaaaggttgatcttcggtgcgtggatgtgggaaaagggttgtgggccattggatgataagtcagagtcatctgtagcgtcgtttcttttctcccgcaaagaaaccc

SEQ ID NO: 57071 - DNA, 998 bp, Zea Mays
ctgatagggaaaatattggacttctgagcattgttatgcagaccagagacatatcatcatcataaatacaaattctgtggagcttctttctcctgcataactattgtagcaaccctgcttcctcagccttggagaagagcaaacccagaacatccatggcaagaataaacaacattggagacaagggttctccctgtctaagacctcttctgtgttgaatcttgttacttaggcatccattgaggagcacttgagtggtagaagatcctagtagcccacagatgatatctctctatcgttgcctgaaacccatatgttgcataacttcaatcaagaagggtcaggaaacagaatcgaaggcttttgtaatatctaacttgaaaaataatctggccaaattcaattggtggaacagccttgaagtcagctggacaagcatgaagttgtcttggataaacctccctttaatgaaggcactttggattggagagaccatgtcattcagcctactagcaagcctgttggcgagaatcttggtgaccaatttggtaaaactgtgaaccagactaataggtctaaaatccttgacccggttagcttcctccatatttggggtcatagcaatataagctgagttgagtttactcaaatttgctaagtttttgatccatactgctgacatagcatttatcacatccccttttataatgctccaacaaactttgtagaatcttccagtgaacccatatggccctggggctttatcgggaggcagactttgaatggtgtcccaaacttattgtttagagaaaggggaatccaaattagagtgattaaatcttggaagaccaagagcctccatatcaatgcttctttctctcacttccacctgtccaataagatttgtgtagaaatgatccactagggctgctttctcagaatgattaatcagaatactctccccatctctaagtttagtcaccaacatctttcttgat

SEQ ID NO: 57072 - DNA, 553 bp, Zea Mays
gaggttacgggttcgattcctaggcactgcgcagcacacgaaaaatgacgtgacttacgactcgacggagacagacgagtgagatctcctaaataaatttttttgctatcttcaaacccatttttatgattcctgaaaaagattttcaccgtcggtttaattatcttgatggtcagtggaaatcgatttccactggcggttctcagttacccaccgaatagagaaatgacaatgtaagataaaagccttgcatcaacaccttcgaggttgggccaagaacacagttggatcacttcgaagggagaaatctcgacttactcaaaaacttgacgagttagataaaaaggcagagacttctcaactttcgccaaatgagctagcactaaaaatatatattgacgaaagacttgctactatcttaagagaagaggaaatccgtctctttcagcaggcgaaagttaaacatcttcttgaaggggacaataacactaaatactttcagtcagttgccaatagcaaacattaaaaacaaagaatttatagccttgaggac

SEQ ID NO: 57073 - DNA, 309 bp, Zea Mays
aaaagagcgagacgagaggacggaacgacacccatcaatttcattgagatctccacgaaaatagtctggagaaggaagtctagagcgctgggaaaggggatgagtccgacaggcatgacccactagacagggatacaacacaagtccgtgagcgcgcgaggaaccctggacggtggaccctaggtggcagtgacagggtcaccatagtgttgatcatatcaagcgccacgagcgtgagactgatgcacgggccccaccggttgccgctaaaacctcagttggtcggcgcgatataggggtgggatgcag

SEQ ID NO: 57074 - DNA, 409 bp, Zea Mays
tctcgctgccaatgcggacgagatccaggttggcgtcgaagcggaagacgtggatgcggctgccggagctaccgacgtcgaagatgacggcgtacctgtctgccccggccggcccggacctccggtcatgacaagaggaatgttacttgacaacattagactaatctcaaacaacttacccatccaatctctcatctcatcttgtattttaaacttcactctacaaatgcagtcttacgccctcgcttccagtttccaaacagagcagatgaactggttgcatctgcaatgcccagtcttgctgcctgccaatgccaatcaacgtcagtaacccgacgattgttctaaccatcaccagctatgagaaaggaaccgttgacgtggttggcaggcacgagactgccagagc

SEQ ID NO: 57075 - DNA, 289 bp, Zea Mays
gaaatgggaaattggagagctctggtgaacaattggaggcacgacttggtggcttggtgcgtgattaccctacggacccgatggtgtgctcaatttatagtgtgcttgagcggtggtctccaattttggattggcgcgctggcggtcggagaagaaaggagttactggcgctcgagattagtggctgtaaccatggcaacctcaccggtgatctctggataggttagtacgagtcacggcggcatggttaaagtgctgaggcacgtggcacaagaccgtgaggtgtcta

SEQ ID NO: 57076 - DNA, 357 bp, Zea Mays
tgcgcccgtaagcgacttttgcacggagagtcttttggaaaagacttcgattttgcgcacctattattccggctgcacccttaggtgacttttgcacggagagtcttttggaaaagacttcgattttgcacacttgttgtgctattccggctgcacccttaggcgacttttgcacggagagtctggctgcacccttaggcgacttttgcatagagagtcttttggaaaagacttcgattttgcgcacttattgtgctagtccggctgcacccttaggcgacttttgcgtggagtgtctttgacaaagactgattatcgcacttgttgtgctgttccggctgcacccttaggcgactt

SEQ ID NO: 57077 - DNA, 602 bp, Zea Mays
tgggggctcgccgagattgccgcgggggagaggggagcgcttgccgagggagatggccacggtaggagagggaaggagtgcgatgaaaccgcggtcgtggcagaacgtgcaccagtggacgcctacaatgcacacttaagtagtagtagagaataggctgttggtaatggaagccatgggcttccgttaggcatgggaagctccagtcagggtagtggtcacgcgcgtggtcaggtcgggccagtggggcgcgtgcgtccgcgcgattgtagggcatgtttatgcatgtgtaaatatgtgttatgttttgtgtaaacagaaggtgcgcacgtggtgtggtcgagttgggatggacgaaggtgggccagcgtcgtgtttgctggtcgggaagttggttcatactcgtgtttaggctagcatatttaatggttcagacttgcataacaggagagcggcaacgaattaacctttcaattgttcgttcagctgggtccacacaccaccgtgattagcgcgcccacaaagctggaagttaatgtatatatcggaacagaagatatggagctgatcgtgcgtgggagctcaggcgtttcagcataaaa

SEQ ID NO: 57078 - DNA, 472 bp, Zea Mays
cgcgaatatttttcgtgccatctagctttcgtgctgcaattgtcattttagttttcctgttctctgagggcaactgtttgtgagcttcgactttctgccgtaatcatcactgaaatgtctgaggacaagaaaagcgctgttcccacactcaatatcttttacgaagccatggaaaggaccaacgtggagaagatcaccaacgaaatgttagctgggctatctggtgattcaagcgataatgaaagcttcgatgttgagagtgggaatgaaaatgataaagatcgaccgtggagacgaagccacgttgtttttgggaaatccatagtcagacaaggtcaaattgaaacaatgaaaggaaaatactttcatgatgtgtctatagtgagaggctagaggagaagatattgttcccctgccaaaaggtgatgaagtggtagtcttcagaagcttcatgaagctggcttcgctttcc

SEQ ID NO: 57079 - DNA, 570 bp, Zea Mays
caaacaatcaaagaatgcatagttcggcatggtgcatcaaacaacataaaacagttttatggttttcttacacgggaattccaaaccgaatcccgctaactttggaaaaggtcaaggtctagcgagggaaaaaagaaaaagaaaaggtaacgcccgaattttggcgagtaaagaaaagaaaaaattcaactgcaaaattcggggcgttacaatggttaactaaacgtacgtgactccattggctttgatcgaactatcagtaccaacaccgttgagcgtcatgttggtcttgacaagttcgtcgtcttgctttcctaatttttgtacaatgagtaaggcattaaatttacggtcgcccttccatctaccaacatcttagcaatcggtattccattaatatggtggcgcacgaagagtggctttagatggttgactgattcttttggcttagtgaaggcggcctctttaggaccaaaatcgaattgagcgacgatgggctcatcgtcaccggttatagtacaatcggcggagaacataataacatttacgtccatacctgagtgttccggc

SEQ ID NO: 57080 - DNA, 547 bp, Zea Mays
atttgttagaggacatcagttcagcattcgaatgatataattactctcttattgtttcggaatttatcagttcgtgaatttgcagtaatgaaatgacgcgcgatgattatgaaatttgtttgcggggtatagaagtcatccctgtatgagtaatcataattacgtcagatcgccttaagtcgctgctgacttaagtcgactattttcgttaatagggggtagtggtcaccctgaattgcataggcatgagcatgttgcaccggcttaagtcgctgctgactttagccgattgctccattagtagggcatagtcgtcaccccgaattgagtaagcgtgagcatgttgcctcgccttaagtcgttgccgacttaagtcgattgctccgatagtagggcatagtgatcaccccgagttaagtaagcgtgagcatgttgcaccgccttaagtcgttgccgacttaagtcgattgctccgatagtaggacatagtgatcaccccgagttaagtaagagtgagcatgttgcaccgccttaagtcgttgccgac

SEQ ID NO: 57081 - DNA, 756 bp, Zea Mays
aatcaacagtgtctgacgtgaggctccgtccaatccctttcaaaaaacgaacagtgccagcagtggatttactcttccttttcttctcgaacgaggacactaattttggtatagaaactttagatttctttgatggtcgtagagatggctgtggagaaggtggatccctgaagggtgatgtatgtggcggagacggtgggccaccatgaggatgaggagaaggagggtcagaaagaggatgaggagcaacatgtgaagtttgaggaggtgatgatggatgtacaataggaacaacaatttgagaaggcggagacggttgggcctgcgacgaattcgaccaatcaaccaattcgacatcccttcgaggccaaaggataaaattcttgatagcttgtccaagtgtctcgatacctttgggcccagggatgtctagcatgtcgtcctcgtatccttggacgactgtcgtcacttctaccctgcaatattcttctggaatgtcgtttccatggaacttgcgtcctaggatcgcaaggcctgtggctactttctttgtacgctgattgttaataccatatcttataactagtgtgcatgccataggccttgtgatgtcatcaactggatagcgaaccttatttcccgttgacgcgacagagcttgggatggtcgtaccctcggtggaagtcggtgtttgagctgctggaattatttgcatctctggagtggtcatctgttgaacagacatcgcactcgcca

SEQ ID NO: 57082 - DNA, 463 bp, Zea Mays
gggaaaacttaattagtttctaaagcttacacaagtagacagcttccatgaggatgacatgcagacctaaattttctcctagacatgagttcttttgagatcacaaaaagcttccatgcaaagaagctgtccttgcttactgtccccgtcccaggtctccctgctagctagatagctgtagtgctgttttgtagcagtattttttatcatggatgggttcatttatgcttgttactggccgtcgtaggggggcctccttatctgtatcttagggtcctattagacctttttctccttcttaatatatattcgcacagttctcttgtgctttcgagaaaaaaagcttacatgctaatttaaaattctgcatatagaagtgcacaatcacgacctgtcagaggatgttgagtcaagtgttacatcacaaaacctaatgtcaaatgacacatacctagactttcat

SEQ ID NO: 57083 - DNA, 334 bp, Zea Mays
cggccggtgggtcaaaaccttcattttcttgcccttcggcacaacagtggtggccgaagcggcagttttctcttctttccttgccttcgcagtgggtagtgataatcagggtatacgaagccaattgcatcaaacaccctgttcaatgttttcttgccccgacccccgaaggctgtggacaaggcatcatctttggccttggaatatgtctcaagcaactcgtcgctggtagcttcaatacatttcaaccagtcatcatttggttcgtcaaacttctctctaaatctgaaggtatatttcaatcgaactaggccaccttcgctggattcagcag

SEQ ID NO: 57084 - DNA, 483 bp, Zea Mays
tgagactgtaaggttcagggcgaacgacaccactgaggtcgcagcactaaaggccttgatgaccttctacagatatcatcccctggagatgatgatgcacccacttggactcttccccgccgagaagagggatgacccaatgtggtgcaacaaagtgagtcacgtgaaggatgtgtgggtcatgcatcccgaccaggttgggaggatcaccgtccagtgcatgcgtgcattgtaccgcctgtaggccttgcaaggcgattccatgacacatctcgctgggctcgctcaggctacaaagatcaacctcgacaatcgggaggacttcgtaatcgacttgtcttcggaattggtggagaaagatctataggtggaacaaatgaaccagcgcatcctgactctggagcagtaggtggagatctgggataacaccattgatatcctagaaatccagctccacgatgtgcaggaagagcttgcggaggc

SEQ ID NO: 57085 - DNA, 804 bp, Zea Mays
ccgccgttaagccaccaccggcgtccgccgcgtggctctacctttccaccgcatcgccgtgactcactctagctccccgttgatcgccggagcaattgccacggcactggacaccaagccattgcgccagtaaactttccctttctctgaccgccgcgcgtcaccgttcaaattcccggccaccgccctcccgtagtataaattgaccctgccgcgagctccgtaaggtagttaagcatccagccaccaagaattagcctcaatcgttcaccagggtgtgcgaattttgaacttcccccaaatccgcgcaagaacatcgtaggagagacctcgccgcggccagctcaactcaggtcagtccaagtccctcaattgcttgttctagcgtccctaggccctcctcaagctcctcgacccctttaattgaattggaccgccatggatcatcgggaacgtgctattcgtttggtcagtcgcactgtcgtcgtggccagaggcctttgggcagccactcgtgaaattaacttgggggaaatattcgggaagggttcaatcatgtgtcggctgcttgggagcaccggtcttggctccctccggtcggtcttgctcgccggagctctgcttcccgtgcggtgcgccatcgaggactttggcgtgtgaagaatcagaaattggagggtttcggtgttaatgtcagcgacacaaaaaatagtagctaggactcttaatggaataattaaacgccaaggttctttctgcaaagtctgcatcgcgggcgcgggcgcgcgcgcattttccttagag

SEQ ID NO: 57086 - DNA, 300 bp, Zea Mays
gtccattttcctctcttccttatcttgagtacatgcgtttttatggaaatatcctactgccgcctaggcttcggccttatcctctgtacgcagcacctcacgtccctccctccccatgggccctagccttggtggctgtgcctcccacctccgttcttggacggtaaagtatccaattcacatagactacttatgcacatatgcacacataaaatccagatcccccatctagaatccaacggcacttgactcttgcaaaaagaacctcccgcaacagctgccaacggttgttgctaattt

SEQ ID NO: 57087 - DNA, 497 bp, Zea Mays
taaaaattagtcaatctaaagacgatataacttgtatttttaagatggagggagtacacgctattaaactcaacgtgttagttctgatcgataaagcgtggaagctagtaagtcaagcaagacaatatggtaaagtgtattactagctagcattttgttcaattggagcgaagggagctagtaactcaagcaaggcaatacgctaaaatgcgttactagctagcattgtgtttattggagcgaagaatcgatccacttagttcttgcacacagaactgatgagtagctaaagtttacctaacaaacagtagccaaacaattcaatccattctcttgtgtgtgctatattactccgttcctgagttatggtacaatagaaccatatatcaatttgtcatgcgctagtaatagtggcaacatgattgtggctgagcgaagggagattctttataatagtgcaacatgattgtggctgtcttaagttaaccatttcaaac

SEQ ID NO: 57088 - DNA, 295 bp, Zea Mays
ctcgaatcaggtgccatagctgccatcgcagtcgtagcatgtgtggccattgcaggcttcctcggatggtgtgtctactactcctggttttgcagtccagcggccaaagcgtgaggtagcatccagttcgtccacccctcaatttctgaattaattaattattattacaaccgcgcgcatactaattaaattagaacaggtgagatggacatgtcgtgtatcctctcgtctcggcgctccacctcagctctcttttgatgcgattccccctccctacatctacaaattgctcaag

SEQ ID NO: 57089 - DNA, 324 bp, Zea Mays
atttgtttggggaaagaggataacggcgcgaccctaccaggctgcggcgcggacacgggatcggatcgacccgaatccagggaggagttccgcgaatcggccgaggtgctcgcgatttccgtttggaattgccacggagttgccgtttgtttcgctggagagaagaagaagatgacaggccgggtccacaatacagaggaagaaccacgacaacaggtggggcccagctgtcattggggagctggttatatggtgcttggaccaggagaacggctaggcaatgggtcagctgatgaaattcagcccatttggccggttcgccat

SEQ ID NO: 57090 - DNA, 427 bp, Zea Mays
ctctctcaaaattataatacctaaaaatgttgcataaatcgatacctaatttcatagcggtatgagtaattgggtaaaccatgggcaatgataaaacgagatggattatacatttatgcacataaaaaatctgtgatatcccaattttctaaaaaaagaagttaaatttctttttctcttttctttcatgttctgtggcattggggtttggagtttcaggaggcattcctcagggaaatagtagatcttttggcattttttccgctggggtcaggagctcagatgggagagcgtgttcgggcctttgatctcgatccgatggatgggagccccccctcttcccaaccctagccgactcactccccttctcccaagggtggcagccacccccaccctttccacccctttggcggcccctccctcttcc

SEQ ID NO: 57091 - DNA, 356 bp, Zea Mays
tgtaactttctatctttaacgtatacaactttatatctaactttctatctttaacatacataccattctatatttaacgcaagttttttattattattattttcccggccgatcccccctcccctcatcacctgtgcttccgtgaaacaacgctccgaattcaacagtgcctaaattaagtgaaacaaccctaaactttcatatgactactatatagtatgtgttacacacgatcccgaggagatgatcgatgatggcggtggcgcatgtgaggagagggggaggggaagggatgagggatgattcaaataaagtagttcatgggaagggagatgagttatccaactatctagacc

SEQ ID NO: 57092 - DNA, 1102 bp, Zea Mays
tgggcggctggttggccatctatacgaccaccgcccgggccactagggcgatagagggcgtcatgacagcgtacctaccattgttctcgagcaggatgcgctgcagtggctttgacactttcatctccattgcatcatcgactaggacgactttctgccaccggtttgtcgtgaatttccaatccctttctgacaaactggaacaaccctaggacctcaaatacatcaagcaccaaattgacgagtccctctgctcgttcctaaagtgttttcaaactatgagaaatcacatccccgatgtcacggaagccgccgtgaccgaggacttctaccgcgggtctaatgactcggctttcttctgagccatcctccagaaagctccagccacctcggaatagttgttccgagagacggacatctacatcacctccgatgaatgggcccaggacctcatcggccacgcgaagcttgcacccaagcaccgaaggatagaaatcagcagttggacaagtgctgggacaagtgatcaggagacaaagtgcgtgccgctaggtccccggcgactcgaccatgtggcgtgccacgaggcaacgtacagacgctggacgagatcttcgatgcccagtacccataccaaaaggagatgcgccataccgtgtgtaattgtagggacttcaagaactcagtcagtcacaatcgaccattccaaccgttgtcgccgccctcaccatgaagagaactagtcgtacaagaacaactgccgcaatagagtggggtggtgacaacacctttccatggattgatagggaggtcaatgtcatcttcggaggccatgggtcacagaagagcaaaagacaatagaagctcaccgatcggcaggtcctggtgacaacccatagtgccccaacacagtatcgattgttggaacactccatcacgttcagtcgagctaactagtggctcaacttcgaccaccctagcaagtaccctcttcttgttgaccctatgatccaagtgagccaggtcaataaggttctggtggatggtcaccttccctagaacactctaggccttagggatcccgactgctgacctcattgag

SEQ ID NO: 57093 - DNA, 753 bp, Zea Mays
gcctaataggtccatgttatcttaaaagattctcttatcttaatggatccatcttaccttaaaaaaattctatcttatcctcaccactttgcttatctcacaatggtataacaaacatgatctattccaaaataaatttagtatatccctatcgagtctaatctggttacaccaatttaattctgatctcatctaatttgattagatctactctaatggacaaacatgttagataatactgataaaatagattagaccctactagccagatgttaacctaacttaacacattagaccaacttaaccatgagcagaagacccatcccaaccatagagtcatgatggattgcataatctgcctatctccatctagcgtcaaacaaacttttgatctacatcatgtactctacctcacccataactatcttaaccatatttcccaactccgatgatatacattaactttgaattaatgagaccaggaaggaaagatcaacatcaacaaggaaggatataacagtcaaagcgaatctcgagatgaatcaagacttaaacttttcggatcaagtcttttccttgccataatcttacttacccctatttattcttgccctaacctatccatctctttttccacataataagtagctggatacatatgctctcctaatcacccactatgcccaccaccagctccaccaagctacataaacatatataaattgctactatttgtaagatctagatattact

SEQ ID NO: 57094 - DNA, 451 bp, Zea Mays
accacccgggttacctcttgcccagcagaatcatgcagtgaaagaccaccatctaggacctctaaacacatggtcggaatgtcagcctcaggaggctctgataaaatatcttcgggaacgacctcctccagcgcctgatcaaagtctgatattgaaagcccttgaaggctgacgagtgccgacaaggcttgggagggaatattgctgcccccgttgctgcctctatagtgacggttgttcttgtggatcagcggaatttattcttcttcttcctcttcatcctcatcaaacacactaccagcagcctgagcatcatcacaaccttcagcattgacctcgggaatggcgtccaccaggccgtcaccaaggaacaacgtagaaggaccagtatcttgatccaggcatgacagtcgccgaagtcgcctcttcttctgtcacacccgactttaag

SEQ ID NO: 57095 - DNA, 648 bp, Zea Mays
atttattctcgcgtcgacgtgccttttgatttacgagtcctagtttcactttttctcttcatccgctcctccgcttcccctgaatttccgagcccgctcgccccgccggaaaaaatcgcgatggcccccaagcggaagaggcagagcaccgctgctgcaatcatccacccatcgaccccaacaaccagcttcccttcgctggtaatcacatgtctatcatttttgaatccgatctccttcatctcattaaggttggggttttcttctgaaggagctctgctcttggcagacctatcgtggtgtcactgttccaatagaagacacacatgattctgtagtttacgttccctttctcattcgtggacttgctcttcccatctcccctttttcccgcagcctccttgatttctatgaattgaatctgacgcatatgaaccctagttcaattatgcaagttgtcattttcgtacatttgtgcgaggcctttcttgggattctcccccacttcgagctttggaaatatctttatcactgtcagcccgggatggctaggggacaacaccagctagttggcggtgcaagtctagagcttcaccggggaaggaaagtggagtatctcgatattcctcttaaggacagtatcaaagg

SEQ ID NO: 57096 - DNA, 450 bp, Zea Mays
aatgaatgctgttttttcctcgtcttcttttgccaagctgatttgatggtatcccgagtagcaatccaagaatgacaatatagagcatccggcggttgaatctaccacctgatctattctaggaagtctgaagggatccttcggatagtgtttgttgagatctgtatagtcgacgcacatgcgccaatccactttattctttttgagtacaagaacaggatttgctaaccactcagggtgtagtacttctctaatgaaccctactgcgactaagcgagctcgctcggcacggatagcttctctcttgtctggtgtgaaacgacgcaacttttgtcggatcggtctcgcctggggatagaccttcagtttgtgctcggccagctctctcgggactccccgcatatccgcaggctgccaagcgaatacgtctcgattatcttgcagaaactg

SEQ ID NO: 57097 - DNA, 914 bp, Zea Mays
gaaggaggtgcgcctttttgctcttggttcgttccttccctctcctcgtgctgcttcttatgttcccagagcgtgtgcccatctcgattaccctttgataatttttcaatccgcaagttgggctccagaaagaggagacgtgggttggattagagtatagctcaaactaggattgatcttggcgtaggtgcattttagagagcatcaggatatgttccgtaaaatgttccagtggagggttcgtcgagctgtggtgcttctcgacatgcttgcgaaggtattgagcagaagttccacactcttttggaccaggcagcacgcctaggatgtttctgccttatctgatcgctactttcaatgggataacacattggaacaaaatgccaagcttttcaagctctatatgtgtggactgggtatgtaagttagctattattaacacctgcccttagttctgtcaccttatccctgtggttactttgtcaattcatcaaatactgcttgaatgtgaaaaaacatatttagcacttaccttacagatgtatggagatacggtaatgattagtgtgtgttgactaaccccagaacaggacacactacactgcaaaccactaggcatccattcatgttagtttatgtttgttttcagcagcagcaaatcgagcaggtaaagcaagaatagtgaaatttagcatggatgtgttagatcatctaccaagattgatggatcaaagcgtgtttcactgctatcagtgtaaccaaaatctgcaataaatatgtcattcctttggaaaatagataataactgcatactcatgtcagttaatagagtccaggtgcatgttgttctccattgtattctggaaaagggcatttcccccctctctaatagataactatgaagtgtgctggcc

SEQ ID NO: 57098 - DNA, 912 bp, Zea Mays
gacaaactagattatccctcattaaagtatctagcctaacaatatccatcttatcttaaaagattctctcttatcttaatagattcatcttatcttgaaagattcatcttatcctaatcaccttacttatctcatcctaaagtaacaaccgtgagctaatccaaagaatttatttagatcttatctagtctaaaatattcatatcaattattctagatctgatccaatctaataggttaatctaacctaacgaaggctaaccttaagttgagctaatctaatgtaagttgcttaatgttggtacaaaatatgatgccatactcctaattcacttaggcctaaactagtgacctagatcaactcggccatacccaacaacttgacctacataacagatgtatcttagcctcttgtcccaaacccggatggagaagaccaagactggagaagaaaagatcaacatcaaatcaaggaaggataagattcaagccagatcttcaaaagaatcaagagccacaatcttggatggagtctttccttatcctactctttcttacccaaacctataaatgctttaaagatatcatttatcctacataatgaagtggctatacccatatatacccatgcttttctaatcacatgataatttgcgatataaaaaaagaagagttttggtattaaaatcaattagaaactaacccatagactacaaacaatttcttctacatcctcttacaaatctcgaggacgagatttctgttatgggggtaggatttgtaacaccctaaagttcaatcttgtgaaaatgaggaaaattccccaatcaaacacctttccttgagaatattcataatttcaaagttgctactccaaaaattaacataattttgttttaaactaaaataaaag

SEQ ID NO: 57099 - DNA, 416 bp, Zea Mays
tgatattctcacgaaggtagactgcgggtttatttataaagaacacagggactcttttagaaaattcccatagcgaaggggtacgagtgaagatcgaccgtgcgatcagaggtgtatggtgcggattaaattcgtccacaaccgaattggtatgcaacatggagccttggattcggatccaacggcccacaatcgatccgagggttggagcacgacatccgatcccacccgtctgtcccgagatcgacggttacgaacacatcaaccgaatcgttatcttatgaatccatcacgaccgtcaatatctagatctattgtccatggcgttcttccacaccccgatttactagagtgacggcgcacacagctcacacggcggcgctctcgccggagctgggtgaacggcccaatcccac

SEQ ID NO: 57100 - DNA, 328 bp, Zea Mays
agataatgagcaagggtaagaatggatgagaggcaatcaatcaaaatggagcaatctcacgcttggagaagatgaaatggtccaaatggagatcaggggaggtctagtgtatttgattagttgatttgcatctagtggcactagttgattgaccgagccttgctttttcacgttactcttgttggttgccgctatattgacggctacatggagtggagattgttgagggttcttggtgattgttgttgactccgatcgagcaattacaagaggatcttgtgctcgttcccgtgacagatcatgaagagaaactctagtggaatgcttg

SEQ ID NO: 57101 - DNA, 378 bp, Zea Mays
ccgacgggtgggattgaatcggccgtatacctcttcggtagattaaatctggacccttgatcgaaaaatgagcgaccgaaaatagatctaggcactttaaagttctgggccgctgatcgtttgttgggcggcccggatcgtataccggttcggtataaacaatttttaatccgtgccgtgagattatgatcggatggcgctagtgagttcataccccttcgccgtggatctctcatccaacgactccagtagcatactggttcattaagcgccagatctaatcttgaccatggggcacggatccaacgactgtgttgtgaagatacctcttcggccgatcagttttgtaaaagatccccttggcttattcaaaaccaa

SEQ ID NO: 57102 - DNA, 386 bp, Zea Mays
tcttaggtatactggtatccagcctcaacacattgagcctacatcccaggggggccaagtaccagggagaaattggtaacgctacacacagcgaggacaaatagcatacaaataagtgttgtttgattagtagttttcaaaagtatcttacaaaaccaaagattattacatccgccttcaagcggagccctagccttatctctgtatgtacgagctactcgggatcggcagggtcgcgctggaagcgcgcggccaccgtctccatggcgtcttggacgctctcccgggtggcgtcttctgtggcggccaccggaccgtcgagcaccggtgccaaggacatggccgggtcgtggctccggaatgacgtcaacacgtaatccaccacc

SEQ ID NO: 57103 - DNA, 613 bp, Zea Mays
cttccctgacctcaagtgaagctcactgaccagtttaattgaactctactaccctggataggccggagccctcgccaccgacgagctcccccgcctgcgcacgtggaccggcctactccgaccatccccggagacgatccacacatcggcatgaccgtcacaacctcccctacaccctcggccacctcaccggagcgatctcaccgtcggtaagccccttcgccctttcctccgctgtgagtactgtttaattgggagaaggacctcgggttaggtttagcaaaaccctagggggttttctaaactgtcagtggcacatttgaatagtgacccgaggactagtatgtaagggaacataaaaacattcgccaaggaccccgatgcaaaacctatttccattaaccatttctgtttattcttctttcaataagtaaagaacttaggaaattcataacttgagtattagtcgaccaaatttagtcaaaccaattttgctggatcccaaataatatgaaccattaaacaaaaatactgaacctcatgctttctgtaataatttttagagttttgaattaaatagggaaactgcccaaaccttattaatataaagaaa

SEQ ID NO: 57104 - DNA, 368 bp, Zea Mays
gccagctcattatgcccaagtgacggcccaagcacgacactagatccgtattgtgccggcactgtcactatataaatcatgctcgtattgtgccgaagcactacgggtcgtgttgtgtttagcgccattccatttaacatgactgtgtcatctatagtcactagtgtacatggccacatgggggtgcctggcaaatatttgttacaatggataaacagaaagttgaaacaaatgatttatgtatttcacgatttgtatccatattggatcaagttgcgtttcccttaatatttaatgtcgttgtttcttctacttatactggaccgtttgataacattgtgtataattcaattaaaaacttacagttt

SEQ ID NO: 57105 - DNA, 659 bp, Zea Mays
gtcatgccgaagcttaatttcaagggactcattaccatgctcatgagttttcccctttcttctcgtcagcttttacataaaaccattcattcatccaactggtaggccacttggtgtgatagccaatcactggagcctttgtgtcttttcggtatgcgaaattgtagcatccgaagtttttatgtaaaccacctacccttgctttggtttgataatgaagctcatggactctgcagaatccttcggcattagcaatttttccttgacttcataaagcccatatgtacacgctgaacttgactatagcgattagcgttagttgatgaagatagatttcaaacttcttcaaaacttcaccgatcatttcacacagagggaaccaaagtcccactctgaagaagctcttaaaaacaacgacttcatcatctcttggctccggaactactttgtccctagcaaaccgtatcaattcatcatcattttttccaaaatatccaagcttcttcattaaaaccaaatcttctgcctttacagtggattttccaaattcaatatggctaggcttgcttggactcaaaatgccatcatcctcttcgtcatcactagcagtttcggcaatagcatcatccttctccgggataacctcttctccctcttga

SEQ ID NO: 57106 - DNA, 460 bp, Zea Mays
tatatatgaatcaaatgacaagttaggagtgggatttttaccaatgggacaatctttgcattgatgtcccttttcccggcatgtgtagcataggcgttttccaagttttgaaactttcttccttccttgtttgttgcttgctacatggttagtaaaaattttcttttctaaccctatgcctctttgttttaaatggggacaagatctaggtgagtgtcccttcttggagcatgtaaaacaaagtctatcatccttgttaataatcaagccattaatatagggacatgacctaatcaagtgcccctcttcaaagcattcactacacctcttaatgtgaagtgtggcttgatcattaccttggatgttaccttttgtggaggcgtggttgaggcttttggaggaggtgttgaatttcatattttgttccctcttcttggcaatcctcaaatccttgacattt

SEQ ID NO: 57107 - DNA, 627 bp, Zea Mays
gtatacgggagatgatcaggcccggaaattgctggtagccttaacagttagtcccaatgactcgggacattatacattgaattcaggcatcatcaggtacaaaggtcgtgtatgggttggcaataatatacatcttcagcagcaaattatgttggcattacacgatagccctgttgggggtcattctggttttccagtgacatatcccaaattaaacaacttttttcttggccatctatgaagactattgtcaagcggtacgtgagttcttgttctacctgccaacaagccaagcctgatcgcagcaaatacccaggattgcttcagcccttgccaattcccaagcaagcgtgggaggtgattagtatggacttcgtggaaggtcttccaaggtctgccaatgccaacaccattctggtggtcgttgataccttttcaaaatacagtcatttcctcccattactgcatcctttctctgcactaaaggtggctcagctattcatggactgtgtttacaaactgcacgggcttcctgtttcaattgtgacataccgggatcgaatatttactagccgactgtggcaagagcttttccggctgtcaggtactacattgaagatgagcacg

SEQ ID NO: 57108 - DNA, 613 bp, Zea Mays
cgtggatgagcggctgtaaattagaatttatttcctcctgtaactgtgcctttatttacgtgaacgtggagcacgtctttccttatcttagaccggtggagatttatataatgcatggtttatactatcatgttacacaacgttatgcagtcgtaaacggtgtgcacatggtaatattcgttcccgtgattcgtggcacaaaagattccttctatgcatgatttatgcacattaatacatatatttatgcgtgcgtatatcgcctgtcgtgtatcattcgggattcgtggctatcatatgcatagctgacgcaagctcgcgtacagtgggccgaccgcgacctggttggcgtcctggttggggcttcccccactaacggaagcccagggcttccattacctccaccattaccttaaaccaccagcatgacttaaaccaccaccattacctttcctggacagctagtaccacactccactgagctaggaattaatacttgcaatttgcaagctaaggttctgttgttgttttctcaaagtcctgaagggaatttgtacgtacgctaaatgtgacgtcgatcacgatatgcaatcaaatcatatacatgaatgac

SEQ ID NO: 57109 - DNA, 793 bp, Zea Mays
caacaaacaaaagccgagcaccagaagcctgcaggcctattgcaaccgcttccagtgcccgaatggaagtgggaggaaataggcatggattttgtaaccggactgccccggacgcaaaaagggaacgactctatctgggtaatcatagaccgtcttaccaaggtagcccacttcatcccagtgaaaactacctttggaggagccaccgttgcctggatatatcttaaagagatagtctgactccatggcattccaaggaagatagtgtcagacaggggaacccagttcacctccaaattttggatgagccttcagcaagctatgggcaccaagctagactttagcaccgcctatcacccccagtcagatggtcagccagaaagggtcaacaaggtacttgaagatttattaagagcatgtgtgttaacattcgacagaaactgggagtccagtttgccttatgtagagttctcgtataacaacagccatcaggccagtatcaagatgtcaccgttcgaagcattgtatggacgaaagtgccagaccgctctcatgtggtccaatgtaggggaaaagacactggaaggacctgcctttgttaaagaggctgaagagaaagttgccctcctccgcaaaagattacttgaagctcagagtcagcagaaaagttatgcggacaacaggcggagagaactcagatttgaggaaggagacttcgtctacctcaaggtctccccgatgcgtggtgtcaagaggttccaagtgaaaggaaagctagcacagcgattcgtcg

SEQ ID NO: 57110 - DNA, 463 bp, Zea Mays
cgttcggccaggcctcgaaagtcgatggccatggctcactgtcgctatcacttcttcctcatggttgctactgctccagactgactctacaagttctagctctgttctacaactacagaacgagagagaaatggaaaccttgcacaagaggtacaaatgcttgcacaaaaacttgagaatgagctgcagaaactaacaggaagggagaagcaatgcgccagatttagttttggagtggtgatgctgatgtattccttttgccgttatttctgaacaaataatgctagattttttattggaattacttccatatgattattttatgcagcttattgtgtattaacttgttgatttcctgatacttggtgtcttggtcaccaataggagaatgatgagctattccagttgaaagagcagttagaaaaatacaaggaggaagcacaagcaaataagaactacatgg

SEQ ID NO: 57111 - DNA, 461 bp, Zea Mays
cttcttcctgccgcgtccggattagagtttaggggcggaaatcacgtgtagctcggactccggcgatggtccaccatgctttcccctgccagtgccgccgtggcttggtcgggaggtaggagagggtttgcgagccgttgatccagccctatgcggtggatatttgacgatagcagcgactctgccggttggatccgcgaccgtcgatgcgggatcgtgcgcctaggattggagtcggtcaccaaaaatataagccgtagatctttcatccaatgggtgtgttcccgtaccgattcggcttgtggcgcgactaatctggagcgtcctgggtggatcagacggttgatctacttccgtagacttgggttgtggcagttttacgtatgagcccccaaattatactgaaattaacccgccgtcctatcggtagcactctgagtcacagggatttttgtagctag

SEQ ID NO: 57112 - DNA, 799 bp, Zea Mays
atttctccctatatatttactttctattatattttacttacatcaccccaaaactgtttcacaacaattaccaatttcctgaacattatattttaccacatttctgccgccatggggggagctttggggagagccgttggagggctgtttcaccccaaaactccccctaggttaggaatagttcgcctggctttctatacagaaaactcggttgccttttactgactgcagacaaatataaaattttaccgacagcaacactaacacttccttttgctgatgagagattcaacgtggcacctttgatattgtctaacaaatgttcaggaaattggtaattgttgtctggaattgctttgctttaggtcttgggtaggtcactctacatactaaatatgtcatggttttttcagttatgcggcttatgccgactttaatgttatgccagaacttggacctactttgtggttgttgttagttttggggcttaggcttactgttgtcttatacaatgtttaggctttcgacgttgaggtactgtggagattggacatcagtgtttctatttacacatgctaactgtcctgttgagtgtgtacctgtaatttggaattgttggatgaatatcttttgcaaaatatatgttgccaagatgggtgaacttggttctattttgcatttctggaacacatgttacatttcaacagaactaccgaactgtgaagtctataaagcagtaacagatgaaatattcgggcaacttaagtttcgagaaaaaaatggacttagggggtgtttg

SEQ ID NO: 57113 - DNA, 631 bp, Zea Mays
gtcggataaacgcgataagggtgcagccggattagcacaagtacgcgaaaacggccaacatgccacattacaatacaagttacagttacatacactcagcgaggacaccacatactacatcggctcaaccttcaggatgatgcccgcctccctataattgaacaacattattttcaatttcacaccctcaaaaaggttccacagatcccctcaccaatgctcatcccaatcggcgaagacaatagttctcgtttaccaatacggtctactcgaagacggtcccgctccatccccatccgacggtgcctaccactccgcgaaacctcgcccacgctatgcttcgacaccacccttcgtcgtcggcacttggtcctcgcactaggaagatcagccacctcgccaacctccacccgcgacgaggactccgccgcggccacatctaacgcagcaaaataatccaagtcttcatccgaagactcttcggtccaggaaaacggactcccagactcaccatcagacaaaaaacacccagatccaaaaccagataaattgtcattggcaggcactacggttgcggctgccacaaaattagtatcgtcagcagaggttgcttgctcaagcccatacgtcg

SEQ ID NO: 57114 - DNA, 417 bp, Zea Mays
agttcttgcccaagtaaatcttgaaattcaaaatcttcttcctccaaaatgtcttcagcttgctttttccccttttcagtagctgtgctcgccgcggccacaacagattcttcctcagtcatttttaggagtatgttatcaataacttcaagtgtttcttccaggttcggatcttctgtggccccggtttcagccccggcagcttcggctgcgccagtttcagcttcgaaggtttccgctctggtggcttcggctgcgacgcctttagcttcgacggcttcggcagtctggtcaatagcaattcttgatgccggtgtcggtgacggtgtcccatgaattacatctgctatttgaataatccttcgttttttcggcagtgcaggaccttcgtctgccgaagctgccttgtccttctga

SEQ ID NO: 57115 - DNA, 1314 bp, Zea Mays
atgctcgtagtaggggttacaactgggttacaagcaggctagagagggaggaagggctcccaagtatcttatgcgggggtggtcctaaagactatggaactggagtcatacgctaagtcttagctccaaactttaggacttcaggtctcttcgagtgtgtgtggttgccttctatcgagtgtcttctgtctcatgtcctctagggtttgtccctgtattcgtggctaacttcctccttttataggcaaaggtgggggtcggcggtcggtggctcctttgggaaggagccactatatcgtggtaaaatcgaatgtcttacctcagcaaggtcgcgttgtctgactgtgtattgttatttgtccatccctatttgtgctcattatgatggacaatgtggggccctgacgccatcattactacctctgcgccacgccgaccccgggtctccgtaaactggacctcggcgtggctcattgcattacaggccctgtggacggtttgcgtactctagcctaggcctgatagatcacgggtgctccataggtcgaggggctcataggtcatgagtgcgtgtaggccagggggttgtgcaggtcatgagtgggaggcggaccagctctctattgcaactcggtgtatagtgtagttaatgaggtcgaccatttatagaggcttagcctcaggctaggcgaggaatctactcgagtggtttcctttcagttcgttcggcccctctgtatctccgccacgcccgaccctaggcttggtgcctcagggtttattcgggggcagatgcttccttggtagacaattcccttaccctctcgctgacgggtggtccccagtagttcggaggttcttatctcatgtgctttctctggctggtaggggcccagggatcttttccatgacaaatggcttgaatataatatcaaggattctttattttcctttatatgttacttgttcaagaagggcagtgggtcaaatgcatttgtcgttgatgtatggaatatttggaatataggaaacaaaatacttctcaaacatagtggttccaaggcacacaatgcagctcatgagcggtatattggttttataaattccatggtagcaattgattatcacattaacaagtggactgacgaggatcttcctctttacaagaaaagattgacatattcacttagatgtatcaagtttcttttgcatcaaggattgacatttagtggacatgatgaaagtgaagagtctagcagtagaggcaacttcattgaacttttgaagtttcttgcaaaaaatggtgatgaagtg

SEQ ID NO: 57116 - DNA, 672 bp, Zea Mays
attccctattggaactaaaaatcatgaaactatttttattaaatactatagaaaaatagaagcctagcaaaattggtttggtattttagcatttttctagaattttctaggaattattcagtcctgggaaaaaaagaaaagaagaaagactctacagtattgggctcatttcaatccgagacggcccagcaaagatagaattcgcccgcgcacgcgcctgcgcgctcagttttgcgcagggaaccctggcggtttgaaatttctataaagaatccttcccattgttcctctgtctcactgacacttgcaaaaacaccccagcgctttcatctctttacaacccgcggtccacgacgccgcacggcggagaaccgagctccagcaagcttataccggccggatcactcaatgaccggtgctctacttcggctgagacctaattcaagccctaacaagagtttcccctcaattaatttcactagcggagctctaactcgctctgtccacggtgacagcgggcacaacggacagcacgacgtgttcccggcgatctaaggggtcctaacctaattggcagggtcggggagcatcagggacacacaagtacactgaaatgaaagagcagacggtatgagcggacctgagatgagctagccatggcgaggcatccac

SEQ ID NO: 57117 - DNA, 417 bp, Zea Mays
gtgcaaggaggccattggaggagattgaggatctagcgacggtggagggagtttagggcaaagagctctatggaagacaaagtgacgactacgatgagtgcttgagggtagagactgtaaattgataactcatggaaatctgacagtcacaaggtattttcttttataataggttatagatgctaaaacgcaaagagtattttctttataaagcggctaagaaagctaaagtggtgttgagtgatagaatttgaagcgctagttcagtaaagtgatcaagtcctgaacaattagttgagtccatatacttggggctacatgaatgagccaggaatgcgaccgaaggaagatcaacatagacatgatgtttcaagttattaatagaagattcaagagaagagtctcatttgtcagaat

SEQ ID NO: 57118 - DNA, 695 bp, Zea Mays
agttgtaagatcaccacatgaaagggtatgagtgaaacttggccgacagatcgacattcaacgaatctgattagatccgaccccatgccttgccatgaccgttgatcgtgatatcggtggcgaccataacaccagacccgggatccatccgatctagatcgaacgacatcacttaccaagacaacccacgatgctacttctaatcctacccgtccataggtaatccaaaggattaaatttaaatgtcgaaggtttacgtagagatctaatcctggccgcaccgatatgatctggcagtcaggcttcgtctcccccatctggtcaaccagtcgcgctggcgcaccgtgccctggtgtccacgtgcaccaaacactaaaccgaaaggctctatgtaatgagaggatgatgcgaaattagatgagatgcttctcaccttgaattcgacgacaatgaggtcgagcgacgctgcatggcggctttggagtgactttgagaaattgccaccactccggggactcccgcgcaccaccaacttcaagaaatggaggcgtgtgatcacgcaaagctccatgttgcaccccaaggcttgaattcatggcgccccatgaaactgacccacgacgaccgcggtgaagctccctttttcaccctcccgagcactcttcaatgatggtggctaggtttttctggtgacg

SEQ ID NO: 57119 - DNA, 637 bp, Zea Mays
caccgcgctgggtgcacgggaaggtgtcctaccttcgcactatcgtatatgctcgcctgatggttgcttatgtgtgtttttccctattggtcttggccttgcgggcgataatggtcgtggctcttggttgcgtgaccattgacacctctgcttcgtcatccgtctcctgttggtagtgacatcaatcttatgccaggtggacccattatctcacactctctttagaggcttcatcccctttaagggcgttggatggtagtttatggtgcctggatgtgctgtctatggggtgctcgtcatcaacttcaagaaagatggttgttctttggcaagcttcaactggggtgctccctcactcttagtcctctctcagttgggtggtccctcatcctttcaaggattcctcctcttgttgtgtgaaatggaggaagacaactgtgtggcgttgctacgacggatgatgttgtttacattggtttgggctagccgacgagtacattgtttgatgatgaggtcttcaggaattcggttgtcgttgtcctactcacatcaagtctattcgtgttgtgtttgctttcttttccttcttgtcgctaaagtacttgctgtgatgtgcttgcaactgcctataatctgt

SEQ ID NO: 57120 - DNA, 489 bp, Zea Mays
acgagccaaatccgcgccaaattcgtcgcctcccttcggcaccgagaggggaacgctcttcaatctcatccatcgccgcctccctttccttcaacggtgccgaagatggactccgcgccaaatccgccattcaatcttcgtcgtctcccttccttacgccgcgaggtgaacgggatcccctacccatcctccatacacgtcgccataaaccatatatatcaaggccaccagactggagttcctctccttgcggcaaatcctccacgcgtttgtaagttctcggagtgaatcaaacgcaacaaggatcgcgagctgctggtgggtactgaacggcgcaacaaggcactggtcggcaacaagtgacgcccagactggagttccactccttccaagcaaggattgtggtcggcgcaacaattttctggtatgggaatttccctcacgccctgcattcttctgtaattactgttattagtcactcttagtcac

SEQ ID NO: 57121 - DNA, 783 bp, Zea Mays
ccctcgcttgtatatgtagaggcttgtatgatgaagttgtgtgccctcgcttgtatacgtgtgcgaaggcgttgtgtactttgtctggtttgttctattgtgctgatgtgattatagttggtcttggcgcggacggtttgatgttgtcgtttctgcctttgttatgctagtctggttgcacctttaggcgacttctgagcggatggtcttcgcggcagactttgcgcatttgttgtgctagtccggctgcacccttaggcgacttctgcgcggatagttttcgcgatagactttggttttttcgcacttgttgtgctagtccggctgcacccttaggcgacttctgcgcggatttgtcgcatgcgagggttgctagcgcttagcctcgcggtgacctcgtgttggtcgaatgtcgaagaccgtcgtcgcggtcttttttcgacgcatgtttttgcgggggatttttcacacatatattacatggctccgcctcgttaaaaacctcacccaccgggaggaaaagagtgcgggccgatacaagattgtttttgcgaattacaagggcgaaatcagccctgaggagtcaaacaaaaaatttacggaggttgtcgatgttccaggagtgctccaggtcctcgccgcttggcgttgtgagcctgtaagcactgggggaagcttttgtcttgactataaaggggccctcccacctgggctccagcttgcccttggactccgtccgagctgtccggacgagtacgaggtccccctcgctgaactccctcg

SEQ ID NO: 57122 - DNA, 427 bp, Zea Mays
agaactatagacgcagcaacgtagcacgcagtggagttgaacatgccgccgtgagctcacccactggcgtgaagacgccgtcgccttgagcttgccaggcctggagatgtggccgccgccgctgctcgagcaacgaacagggagagaccgagagaagcaaaatagtcatctagggttcagggttggacttttggctagttgattttgggcccaaattcactcggcccacaacacacaacagccatcatcccatgagattttagcgcgctaagtcatatgagatttagcggttttagcgggataatattggatattagcgtatttgaccgtttagcgctaaaatgtgattatcttatcccacccttctccagcagctatatccagctatatcggccgctatatccggctattttaaacattgctgcac

SEQ ID NO: 57123 - DNA, 810 bp, Zea Mays
aaaaaaacagtagtctataacactatataatccataatccactggtttatattttacaatacttatctaatcaaatcactctacgctatctttactgaatacaccaaacaaattatactcagacttaacacaccatcaaaatcaatggttcaaatttctaggtaaccttctctcccttacccactcaaatcaaatgcacgatattgtttgaatcatctgtcatctatcccctccctcacgacctcaccgcccctcccctcccttgtactgtcaccatcgtcgtcgacccctcctctcccctccatgggatcatagtgtcatcacgagctatgtgctggtctaggaagtaagttcgatgccgacggtggacttcctgttgctgacactttcatcaacatatatagaataaacattgtgtcgatagcctctcttgattatttctcctttaccatgtagattgccacccataaatattttattggccgacataacatctgcaagagaacaatctcaatgtatggcacgtccaagcttagatcaaacttgcaggtgaatccattcaatgatcagaaaggcaacaattggactatgtggcttattgtgtaggcatacctcatcttctttcgacaattatctccttcgaaaatgagcttgcttggtattgatgaattgaagtagcatctagaacttcttgtttagggtttgttcggttagaagtgaattgaaggagattacatcccttgctagacaaaattaaatggaaagagatttaatctccctcaatcctgttctactcccatgctcaatctc

SEQ ID NO: 57124 - DNA, 969 bp, Zea Mays
gtgaacggtgtaatgcattttatgagcttctctcaagatatccatcttcacctctgatttgtgaggcacacaaacacgacccctgaaacagaccaaatcattctcatcaatggtgaactcacggggtttaccatcgccgaccctttttcgagcttccttcaacaaacggtcctgctactgagccatgcgcactctctccagaagggaggattgaatgagcatccgagtctcctctctagcggtgccgacatagcacaaaacgactcccatatggtccagatatacgatcaaagtcaaggccacttttggaaccccggacctggtaagggcatccgccaccacatttgccttccccgggtgataatgaatggatagatcataatcctttatcaattcgagccaccgacgctgcctcaaatcagctccttctgagtgaaaatatacttgagactcttatgatcgatgtagatgtcgcaagactcgccataaagataatgcctccacgattttagggcaaagaccaccgtggccaattcgagatcatgagtcagataattcacctcatgcttcctcaactgcctagagccataagcaatcactctgtcctcctgcatcaacacacagccaagaccaatacgagaagcatccatataaactgtgaaacacttaccactctcaggcaaagctatgataggggcgttcaccaacttgttcttcaatgacttataactgacctcgcaatcgttggaccagacgaaaagaacacccttctccaagagtctggtcaaaggcttagcaatgctggaaaattttggcacgaaacaccgataatatccggcaagccccaagaaactttggatttcagagacattagagggtctcttccactccaccacagcagcgacattcttgggatcaaccgcaatgccctcctgattaatcacatgacccaggaaagccacttcagac

SEQ ID NO: 57125 - DNA, 364 bp, Zea Mays
gcacacttgtctatctacaattggcctggtacaacaattcaacaacggtgctaagtcactagtttaactacatttcagatacaccaatacagcatcaaagcagcacaatactacagatgtgttgttgggcacagatgtattgtatgcagcctgaagattttggtcggatgtgcctgtcaatctaccaattccgtcatagatggacacagatgcaacatgtatgcagccatcacttcgtttggtaacgctagcacccatatcacagatgtttgtaaaacatgataggatgcaaatcttacttattatggaatgctaagagagaattagttcagcatcaaataaagcaaggcacttcttcccatta

SEQ ID NO: 57126 - DNA, 982 bp, Zea Mays
agaaagtggatgtagggtattacacacattgtggctcaaacatctcaaaccgcaagtgtgttatctcccccctcatgtcccggttcagtaggatcatcgatctgcgccatgcttccacctcgctctctcttttaggtacaatgtgtgcattggtgttcttatgcaatgacaacaattattaatcatgttcacaaattataaaataagctaatctcaataaatatgtgtaaaatgagtaatgtgagcctaagcttgcccaaacaccatcatgtacttcatatagcataccactaacaaaatagtctcattataagaactatacacatgaagctcaagaatgctctatagtacattgttggtacctcgtaactggggtaccctctcttactgtgttaaggccagatacccacgttgttacctgtaaccacgtgctaatgagttgagcaatcgggcccataggtccggacccatctcacaagaccattagcctcagggcctcctccccgctcggagacaggtctagtttcaccacgtgtcctaggatgagaacgcctaggaactagtaccatgggtttggaccccgccagtgggtactgagcctccatgtatgctagccggacccccacgagtgggtctcggaccgccacgtgtaccactcggctcacggtagggggggccaagacttcaagccagcaagcgctcttgatcctcgctctccactcgggcaggggtctggagctgccatgtggcccatgggcgcatggcacaagccttcagatagaagcaagctcgcccacctgcatcaaatgttggcggctgaggtacgcgctactgtgcacagggcatgataggtcgtgcaagctccaatgactgtgccgcacgttacgaaagcgggtgattgtgtgtcagcgctacgtccatgggtcgcacagtaagccacgcgttaccgaggcagactgttgtgtctcagcgccgagtgcgt

SEQ ID NO: 57127 - DNA, 365 bp, Zea Mays
gctaccgatctcgtctttcttcgtgctgctgctggaggagctcggcctccaacctcagcacttcacgccccgcttcatcctccaggtggccatcttcgcctacctctgtgtgatgtccatgggggcgacacttcttccgccagcattcggacaaaagggggttgtgcagcgaccttctgggggtggaaagtgagctgagctgcggctccatctttcgcgtgagcttcaccagcatcccatggtacacctccatgaactggtctagctctaactccatgaggtggaaggcgagctgagctgcggctccatctttcgcgcctccatctctttggctttaatggcttcgacgccgcctccaatgatga

SEQ ID NO: 57128 - DNA, 314 bp, Zea Mays
tggctttatttcaccaatagccattgttttcatagcatttctcaattgagctccaccaacatcatcaagattatcgttttcatcttgagacccatttgttccatcaaactcaacatcatatgtttcttcaataataccatgagtcttgttgaaaactctataagccttgctatttgatgaatatccaagtagaaagccctcatcacatttcttctcaaatttagagagtcggcttccctttctcaaaatatagcatttgcaaccgaatactctaaaatatgagatatttggctttctaccaatgagcaattcat

SEQ ID NO: 57129 - DNA, 332 bp, Zea Mays
ggtggattattcgagcccctaaagtcacagcatagcgcaacccttgtaaacaatgttgtttaactctatcttttatttgattgttttgtgtggcatcatatatttatttatattgccaagtggccataacaactatatcaagctctatagtgcttgaataatctgggaaaattaaattgaaatacaatgaaacacagataagttaattctttgctctctcctcatgcataaagttttacccgaagtaacccgaagatatataatataatgcatgaaagcctttttggcatagaagacatcacaaattgggattctattagtaagcaaaaggc

SEQ ID NO: 57130 - DNA, 484 bp, Zea Mays
gttaaagaagctcaacagagaaggcatcaagtttgactcaagaaagaagaaattcttttccagtaaaagaaagcccatttctgaaatggattgctacaactgtggagagcttggtcatcttgctcatcaatgcaacaagcccaagaagaacaagttcaagggcaagaaagaagatgacagtgatgatgagaaaaaggaaaagagattcttcaagaggaaggatgggaagcacaagcggttccacaaaaagaaaaatggaaagtcatacattgttggtgactggctcactgacattgagtcatcaagtgggtcttcttcaagtgaagaagaaaatgatgaaaaagttgccgccatcgctggggacttctcttcaccaccaccatcaccatcatcgacttctcacctatgcctcatggctagaggtgaacggaaggtacaaaatgatattattgatgatagtgatagtgatagtgatgaagaattt

SEQ ID NO: 57131 - DNA, 524 bp, Zea Mays
ttaatctggcctctcaccctaaacctcctgtgataatcctcggtatgcaaccctcattagtactcgtactattctagtcgacgtattgcgcgtccgaaatcggggatttgcactcggctggggtgctcgacggcgaggtcgccgccgttgtgcggtcagcgttgccgcggttcactggaaggaaggtgacgaatcggtgaccgtcagatccgtggggaagggcagtgattagacgacgcgcgtatcccttcgctagatccacctcggcagtaggatagtgatcggagggttagggtcggatctcgggatcgtaggatgttggtcgttggatctagatccaatagctctcggttcgtaacgattcaataagatctaaatctaatcgccgccgtcggttctcgatcgggcggaccagagccgcccataccccttctccatgacagtttagcatatgaacccctacagaatcaagtaatgaacccgcggtccactacgtgggtaaactaagtcttgggaaactttac

SEQ ID NO: 57132 - DNA, 724 bp, Zea Mays
ccattcttgtcacctttccttctgtgggtttgtgtagtttaacatacttcccaattgtacaggtgattgttatttctattactatgtaaaagaggagtgccatgaatgaccataagaactgatgatgctcagaagatccagcctagatctccaaggctgttcaagcagttggtacattttgaggtttgttcatacttcatagacttgatgcattgtcgccataggtcaaccgtactatttatgcacttgaattggctggccattcatactttcagatgtcaaaattggtaaccatttatactaacaaaattactagtccataacctgagctaggcattttaaagtacaaaatgctcctccagactccagtcctctactagctaacctcttgtaaaatagaaatgagacaaagaagcctttttcaacagagaaaacaaagaatagaaagaaaaggagagggagaaccaaaaacgggcgaaaatactactattctccaggacacacaataacatagaagctcctcctactcattgaagatcacctgtggcaaacacacttgtagtggtaagcactgttcatggggtcatttgcatccactgggacttgctcagcagtacacttgaatcgacaccctctgcactcgttgtatgtgcatattggcgcaattgagccgatcaacattctccgtgcatactttggcaatatgcctttgtttagaccctaa

SEQ ID NO: 57133 - DNA, 741 bp, Zea Mays
ctggcgattcgagaagaacgaaagaacccccaaatcatgggaattcagttggtgacttgatgaaggattaccaaccgaagcaatatgcagagcatcagtggggaccaattcagcgtcaccagcagaaatcaaaactctgtcatcaggcgcgtcggcctctaaggtgacctcctgacccgaagcccgtgctgctgccatgcaaccagaatgtggaggagaagacccgacgtgaacatccatggaagaatgagaaggagaacccgcttggacaccctcgggggctgggtcatagctcgcgttgcccacccgagtcggatcatcaccggcaacaccctcgagggctgggtaaacgctagcgccatccttagggatcaagctctctgtagcagccacctctaaggctaaaggactttcaaccacttccatgggaacggagcaatccagatcagcctctcgactcttaagaccgcgctccaaggtccacgaggcacgagacgctgctcgggataactctaaaccggcatcaggcatatcagcacaaacttccatcattccaccatttgcggacttggacaacagatcttcagggaccatattttcgagagtctgatcaaaatttgccagagacaattcttgcagaccaacgagagcagacaaggctggagaaggaacaccactactctccccgctggctatgtaacaccggatgttcttccaaattaaggggatttcctcctcctc

SEQ ID NO: 57134 - DNA, 439 bp, Zea Mays
aactccgtccatggattatgattttcatcattagcgcctttatcgttatcacctctatatcttaccttgatgtttatcttataccggcctttaaaataccctcttttccatctcaatccgagcattgtgttttacctacttttcccttggtcgtatcctcttgtttgtcgcttgcgagtttttaactccgtcctttgttatgcttttgtttgttattgcttttacctttcccatctctcgatcttaccttggtaattacattatgtccgttatctaaaatctccaatctcccatctcagttcaagagtggtgttttacttatcctgcccttggtcgtaacctcatctttgccatgtgcaagtcttgtcttaactccattctttgttgtactcatacccttggttcttctgcacctttacctctcctcttatacccttgt

SEQ ID NO: 57135 - DNA, 962 bp, Zea Mays
gtgcccaattgtgcgtcaccatgtctgagaaatagaaaggacaggggacagcccgccgtcattgcgatctgctccctgggccgtatgtccttgacggatggcaccagcgggatcactagggaccctagtacttgggcaaaggagttgccgacaccggggatcgctggagtcgcgagaattgctcgttgttgcttaacttcatcgacaatccccagcgcgccgtggccgtcaagaatttccctgtgaattccggtgagagccttttccgcagcttccccatgtccccaattcggtataacattatttttattaggaaattgagttcccgggcgggcgggctgccgttctagccatggcgccgttgcggcgctggcgtctcttcctgctttcggctgggggtgtgtgtgtgagggagagggagatctgaccgttaaatccgatcacggagggacatggatccaccgttggatcgtggtgaacggcagggattagcttgtcataggtgtccagccgaagtcgatcagaaccgttgatcgaaaagcacgtgatcgaggttagctccgggcactttaaatctggtccgttgattgcttgttgggcggtcacaattaaatcagaagcgcgtccctcgtctgtgtaatcaaagccggtgattgggtgatggacggtcaaaactgggtctcggttatttaaaacactaggcgacggatctcgatccgatggctacctttgaataccgattcgcattaagggcaattctaacctggtcgtgggatctgatctggacgaccagaatcatccaataccccttcgccatgcactttgacatatgagaccctatgcttttcacaaactaacatgttgtcctgtgctcagtaatgggaccctcgggttaggtttcgaaattgcaaaccagtccctagaaatttgaagaaacgcccctagaagtaatcttaatataa

SEQ ID NO: 57136 - DNA, 787 bp, Zea Mays
atcatctcaaccttcagcattgacctcgggaatggtgtccaccaggccatcactaaggaacaacgcagaaggaccagcatcttgattcaggcacgacagtcaccgaagtcgcttcttcttcttctcctcctcgacaggtgcagctgggcggttcactcggtgtgaacgcttctggcggacaccttcgggtttctagatttccacatcctcgccaaactcttgtcctgtcgtaatggccatcggctcgctacgggtagagtcagacgattccccagccagtaggataagcatgacgtccatctcagcatcaccgatgctagttggcatctcgaaatgagtttgcctctcagcctcgggaagattccgaagtgaggcaatcaaagcttcaatatcctcaggggagggccacactctatggcttgggctaccatcacgagcaggaggattggagacaaattcagaaaagggcctatttggaggcaggttccacacagagtaagctaagggagcaccaacatttgagaccctacccctcagtaccatatccagtcgactcatcaagtcctcattgggaatctgtctgtttgtgactcgggtggaatcattgatgccggtatacaagtaagcagggtaaactctatccttcaaaggttgaatattcttgaagacaaagtcagcaaccacggcttcagcagccagacccctatcctccaatgagcagatctcagcgagcagcactttggcatcggctacctctaaaaaattgggagactctaccgagctaggc

SEQ ID NO: 57137 - DNA, 350 bp, Zea Mays
gtaacatgtccttctataggactttaggggataatatagttgcaatagtacatattctaaatatgacacatcgctccaggcgttcatccattgcaacatctatgatggtgtaacaaaagtccatcaaagatcgtaatccatcagggatttttcatcgatcagatatatcgttatagtctgtcattctagcacaatggggatattttgccagtaacacctaaaccttataggtttctgccatcggggctttagaggataccgtaattccacatctagtggaaaataccatgagtaaagatcgtgaaatgcacatgtgcttattcggtgaacttcaagtcctttgttatctc

SEQ ID NO: 57138 - DNA, 714 bp, Zea Mays
gtttgttggccgtctaagcgacgttttttgatgctggggttgcacgacatcagcacggatcagctctcggccacattcgttcgatgtgtcaatggtggagtcgcggcgcggtcaccacgagtagcatggatcgcgtcgcctccctccgtttcatcctcaagtaatctactacgtctacgtggactacatactccataataatccatatatatggtcgccgtcagcagagagagatccagtaaaaaaagaataattaatccttttcgggtacggcacacactaagaattccgaccgggagctccaaaggggtacaaggtgtgctggagatttagttgaatgcctcaacaacaggcgacatcgagctgccgaggagaggagagtccaaccgcgctggtgtacgtcatccctgttgttgcgtaatcggaggaaggggctccccgtctttgaaggggtcttacccggtccgggtccgggaagcctcgtcgatgggtgggttttgggagacccggcccaacccatatattatactgggtaaaatccgaatgctgtcgccggtccacgtgcatgcatgctgaaaaatcaaaccgatgaattcaggcgacgagcgagcgaggctgcggtcccggtggaagaagagtccagcctagctgccttgggaatggaggaaccctctttgatttgcctgcttgtgctccacgtacgtatctgtgctc

SEQ ID NO: 57139 - DNA, 771 bp, Zea Mays
gtgaacaccatattcaaaagcaaataattaataaaagaatatatgccattgaaagtatgcatcatgctggatattatttttgtggagtgcattttgtggctatacaaataaaataaaataaagagaatactagtacctagatgagaatttaagatttaaaggggatcctagaatttagaaaagagaagaaatgaatattatgaggagaaaaataagtaagtgaaaatatattgtgccttaactagagtacaggttcacaacactgtttggattcaaaatttgaatggaaatttaaatcatgaatttggaagacaaaataggaaaagggaaataaaataaaaagggaaaacctgcagctgggccaacttcatgccattcggcccatctaccaattgcctacgcgcagcccagcacctcactcccgtcgttcgcgcgtactcactaccatccgggccctctaaccagctgctgtactcgcacccatgtctctggcgtgtggacctggcgagtcagtcgtctcccaccttcccccacggattttaccgaactcacgcgcaaacgaccgccgtaacttgcgcctatccgtttctcctaccgtgtgtggccttgacctgcgaaactcctgctggcgccacctcccgacgacttcgccgtagattccgtggacgccggactccgtcagcgtcccggttgaatcggtcgtggccgttgcgccttgacccgcggacctcgcgcagatctcgggttctggcaacaccctcaccgcatagg

SEQ ID NO: 57140 - DNA, 508 bp, Zea Mays
gccagagcagggtttatcgctggaggagcacccggaggagcagcactggagccaccaacctcatgatcatgggaacaaggtggcataggaggtggtggtggaatccccagatcctcattgtcatcagaggaagtatcagtagctacaccctgatcctcaaactgtctgatgtcctcatcctccctgagatctagtgccagtggatcaactagagctggagctgtgtcatcgaagctgggcgatagaagccaaactgaagtctggaggcctcaatggtggcctggaattgaggaggccggatcagctgagcaaatatgtggcctaggtattgagcataaggcagctaacaccgagccccgaagaccatccaaaattgtatcatcaatttcatagatcaggaagtcaagacgtcaaactctaagtgagagatcagagcacgaaggagccagagctggatacgagtggtagcctctctgtagcccatcctcagtagcagggtgcacctcat

SEQ ID NO: 57141 - DNA, 595 bp, Zea Mays
aacacacccgtgcatggactcctcgtgtgtcgtggctttatggcatggccggaatttctcactacgatgtgtcaccgcagcgaagacacgtcgtgtcgtggccaggctgccttacgcctctatctcaggtgagtcccacccctgtcttattgcactactttcctattcttgtggcacctatcgggagcggagcagagcgtgggaggcactagattgatgtccgccggtacggcgccgccgcggaacttagggcaccaccacctgggcgtcgtcagggggaatggggcgcctggtgccgtggatctattgttgcacggctgtgattaggtttagcgtacccctacggctattttgacccgagcctgttggatccgtctaggacggtatagattagatcatgatgaaattgatcggtgccattggatcttcgcggacgacgaagatttgaacgacgaaatggtttggctaggggaaatcatgaccattggatccacctagtgcagactggattagaccatgcggtcataaaatctaaaccgtgtatcctagatcccacgacagttgttgcatactggttgtaacaccctgaatttgg

SEQ ID NO: 57142 - DNA, 546 bp, Zea Mays
ttagggggaggaatgcccatatagtgtaatgcctcaatattctattaaacacacaaaagtcaaactgaatatgtcgttcggtgtgtactcctatgtatatggagtttgccagaaatcgttgaggagtaaccatattggtctgaatgcttctacctgatgtagatgtggatatacccgggattaatatcatatccacatttgacttattggcatttgatctattttcggggacgcctgcgaatatgatccatcagcctgagtcaaagcatatgttctgattgcagattcacgtggtctgtgataactctcctccgattaattcaccctgttggtgatttgcctcacgaagaggttcatcttgatgatgaagttcctagcaatgcgcgcaatatcattgtgctgggaatacggaacaatgaatctttcgttttgggaaatgacgaagatcattattaaatgtgggagacaaatatgtcgacacttatcttgctcctctagattgcaaatggatccaaaacaaagtcttaggcatgagtgctttaagct

SEQ ID NO: 57143 - DNA, 766 bp, Zea Mays
gccagaagcagcaaagaaaaatgatgttagaaggatcaagcaaatgtttatttccaaagcaccaatcatttctagtgcgccaaatagcccagaataaagctccacaaccaaacaaaaccaaattagcagttttgtcttttggtttacataaccagttgtcataaaggttgctgatactactcggaatcaatctcaaattcaaggccacttgaatcactctccacatatatttcgcaatggggcaatgaaagaacaaatgatcgatagattcatcaactccacagaaacagcattctaaagaaccattccagttccttttcttcagattgtccttagtaagaattttatttctcacaaccaaccaaaagaaaatcttgattttatgaggcaatttagatttccacaaaaacttatatggaatcaaaacttgatcttccattttctttttgtaaatagaattaacagagaagccttttcttcctagattccacacaattttgtcctcctgatcagacaaagtcacctgattacaacaacttaccagctcatccaataagactctcaaattaccaacaatccttcttctaaaagtaagagcctcaaaattagatgttaatgcatcattaaccgttatatctttgtcataggccaagtcaaaaagaacaggaaactgaacagataaagacagattaccaatccaaatacttttccaaaaactagtcttcagaccattacccacaacagttttacaaaatttgtaaaaatt

SEQ ID NO: 57144 - DNA, 343 bp, Zea Mays
ataaaaacagataaatgcaggggcttgcttacaatgttccagggcctgtgtaattactttacacagtcagtggagtgcgggttcatatgccagaaatggagggcctgtgtaattactttacaccgcgaaggggtatccatagtttctggccgtccgatctgtaccgaagggccatgattgaatctgcttaaagatgaaccggtacgtttctactgccgcccgaacagagatcaacgatcagcagtgattcacgtcatgaccaaatctaaccgaccgtctacgaaccaacgccctagattcgttcatctgaagcgttaacttaagctaatcgagaccacccaac

SEQ ID NO: 57145 - DNA, 1049 bp, Zea Mays
acagcattcatattccactctgtatctaacttcctatttcaaacttaactctgtaaatagtgcatctataataaacagtgttatacacacgctcccatacacggctttgctggagttggcaagtcacaagaaaatgtatacataacgctgcttcatctgaatatctagtacactaccccagcatgttggtagttccaatcttttcagagcagagcaggaagcacaggtttctacatcatatcgagatattctaccagcgagcaaaaaaaaaaaaaaaaaaagcctggacacggcactactacatgtaactactgtcaggggtcagggcatgcatggcatggcagaaaaacttcatgatttgatccgacctcggtcccaacagcgaaaggaatgcatgcatgctcacttgctcagtgaatgttataatataataattactatagttgctagttttgcaacagatggataattaaggagcctaaaattacattaattgtcttgcattgcaactgcatgcagatatagtgggtctttctttgagtggcttagcttgtgtggttgtagtacatgactacatgttgctgtctgtgatgatccgccccaatctctgactattttttgaggaccagaaagcgtttggttacggtgcgtgcatcttaagatccggtgtatatttgtctctagcccaattgaaactatccaaattattgttgatgatgtgacccacaagtccacaacaagtagctagagggatagggggaaaaaatctccacagccgacagaagtagctctccttcccattcgcgacacatgtccatatatcaatgatcgacggttgttttttttttctgttccagcacgattgaagtagatgagaaaaatagacgaaaccagcaagccacacaaacattgtgtcggggaaataatcgccaggaccctagggcccaatagtatgtaaaatgctaggaaaagttttgtctcggaaggacccgctcactaccggaatttggctctttgccgagtgccatattttttgccgagtgttttat

SEQ ID NO: 57146 - DNA, 381 bp, Zea Mays
gtaatggtgagtaggtgctactaccagttgactgtgagttattgtgaggtacggctggctcgagaggcttccgaggcaagaaacagatagctagcttatcttctggaatcactgtgtcaaggcgtgtgttgctcctgggaagaggaggtagtttgctagcaagtgtaatgttacgaagatgggatccttgtgcaaaagttgcattggagtagagtgttgacgttagtacttgagatggattaatttatggctagtgagaaaggaggtgaaatacttgtaaatagtttgcttagtcacatgtttactaacatcagacgtgtaaaattaatatattaagatgattgtggaataaaacaagattttcctagcggcgaaaatcag

SEQ ID NO: 57147 - DNA, 911 bp, Zea Mays
tcgcaaggtacatcagtgctccaatagcgctaaggtaaggaactgtaggtcccaacgatttctcatcatcgctctttggtctaaatcggttagtttccatttcgagggatctcacgaccatcgaggtcttaaagggtgagctttaatcatattaaatctctcaaggaccttacaataggttgactggtgtgcaaatattccttctaggagatgttcgatctgcaggcccaagcaaaacttggtttttgccaagtctttcgtttcgaactctgttttgaggtaggcactggcctcctcaatatcctcagcatatctaatgatattcaagtcatcaacatagacagaaactatgcaaaaacccttctgggattttctaatgaatacgcaacgagaatctagactatttatgtatcccttctttaggaggaattcgctaagccgattgtactacatctgcccagattgtttaagcccatacaacgccctctgcaacttaacgttgtacatgttgtgatttgacttggcatccggaactctcagccaatccgggaccttcatatagatttccgaatccaatgacccatacaagtatgcggtcactacgtccatcatctgcatttttaagtttaagcttgctaccagcgatatcaaatatcggaacattatgccactcataaccggggagtaagtttcatcgtgatcgatgtcgggtctctacgtcaacccttgtgctacaagtctcgctttgtatctcaccaccacattgttcacatccctctttcggggcaaacgcccatttgaacccgaccggggtaatattgggggcgtgcgggtgacaagcccaaaaacttgcctctttgtaagcgagagcaattccatctctattgcttctttccatttgacccaatctg

SEQ ID NO: 57148 - DNA, 482 bp, Zea Mays
caaagttgtatcagcctctgggaggggcgccaccaccaatgccccagcaggagcagcatcagaagagtcctcagccagcaaatcaagcatagtgcttatctctgcatcactagggtttaggggcacctcaaaatggacctgccgttcatcatcaggaatctccccgagcgaggcaaccaaggcactaacttcttcagcagagggccgcactctaagacttaagctgccatcagtgacaggaggattcgacacaaaaagagtgaaggctttgggaggaggcaagttccaggctgagaatgccactggggcaccaacatttgacactttgcctctaaggatcatctcaagtcggctcaccaagtccatagagggaattcttctgttagtaacccgagttgagtcggctaggcctcgatacagataagccgggtatgccctgtctttcaacggctgaatattcttgaagacaaaatcaacaacca

SEQ ID NO: 57149 - DNA, 450 bp, Zea Mays
atttaaaggccatccgtcgaatactcctatttgtctggacacttgggttatgcaggtatgcaattaaaggcgtcctccaatcaactatatcggttgtgtcattaactgaatcgattagggcgatatctctgctggcctcagatggtctgcggctcaggaccggacggtccgtagcccgaaaccggacggtctgcgaccaaggaactcagcgcacctttgattattagatttttagaaatatgaaatttccctcgtgttatatgatggcttcttgcgctaagctattttatctgaaattatcaactctggatatatggtaaatgtcaaattcgtcaaaagagcgcactacgtcccaacatctctcaaggtaatcatttagcatactgtctaaacattgatacttttctaaaatctgttggacaaccaactaagaatcactgaatactttta

SEQ ID NO: 57150 - DNA, 599 bp, Zea Mays
cctcgaggagcagccacggttgcagaactaatcccgcgagcgtgaccgcatccggaagcgacataccaagcactcttctcctcccggtccgtcgttgatctcggtacggtacgtgatgaagatgggatcgatgggaatggatttcgtggtgccggcgttggaggagctgctgtcggatctttcccgcgaggagcagctacggttgcaaaacaaagcccacgggcatgactgcatcttgaagccacataacaagcacgctcctcgtctccgtccgtcgtcgttctcggaatggtacgtacggtcggcgtctagctcctcatttctcaatttgaattcatctgtgcaatttctctctgccaaaatttcaatctgggtgaggaacaaaaaagagatctagcgttatttcggccgaaccgatacatttagtattttattttatttaccgaaataattatcatataccgtcttattattgcattacataagaactttgtttttatatatattgtgatgtatcatatggtgaattattggcatgaacgcacaatgtagtatacccatcgattgctcctaattgcctgcttgaatttggatggttt

SEQ ID NO: 57151 - DNA, 371 bp, Zea Mays
cctcttccttccttttatctcttgaatttggcttgtagtactcgctcaccaaattgtggatgacactcaatttcttttgctcttctcctcctctacttgctgcactaattttagttttcttttgtaagtgttcagccatgatttgttggggggtcataggcttgagtacatactttctccctttcagatctagtgtgtactgatttgttattccataatgctgagaataacggtcatattgccaaggtcttcccagcagcaagtgacacacagacatgggtgcaacatcgcactccaccgtgtcaacatactctccaatcttgaatgaaactttcaccttataaccaatcttcatatctcctgattcattc

SEQ ID NO: 57152 - DNA, 710 bp, Zea Mays
ccgggatagatttcgccaccgttgatcgctcgctgttgtgcgccacgtgtttaaacgctagcccacgtcgcggtgaatcacggtatgcatgttcggtgatcgctggagggctgccacggtgaaagccactcatcccgagcgccagtacctcttttcccctccagccgccaacacatcctcgtgaaattggacgccaccgccgttggaagctataaattgccgccccgtccgctctgctaggtaattgtgcaaccagtgaatcaacccgtgcctcaaatcctcccctagaactccccaatttgggatttcccccaaatccctcaagaacaccgtgccttgggacctcgccgtggccagtccaattcaggtccgatcctgccctctgctttcttgtttctgcacccttgcttgttcctgatgctcactgacccgttcaattgggctgagctgccgtagatcgccgggaacgcattagaatgtctgttgtccatacggtcaccatggtcagggcgtgttagtgcgccattagtgaaattagttgaggggaaacttcggttaaggcttgaattaggtgccagtcgacggagagtgctggtctttgcgtaatctggtcggtacaagctcgtcggagctctgcacgtcgccgtccaccgtcgtgggcttcggagtgtgaagaattagaagttcaggggtctaaccgtaaactgtca

SEQ ID NO: 57153 - DNA, 562 bp, Zea Mays
gcggatttcttcatggctgaccagctaaccagccaggtaaactgtgctcagccgtacactaggcatgcatggagagctagccattgtacttattacgttgcggctcaaaatgtcttgttttgcagatcccactgctaagacacctcaagttcacggggtgctacttcatggctgaaactttcagaactcacgcgtatggaagttgtaccagcagctcccaatacaagaacctggcatatgtgctctctttcctgccatactactggcgagcaatgcaggtagattgatattgaacgaatctagcagatctatctgctcatcagactaactaaaatggtctactgctgcatgctagtgtctgagaaggtacttggaagaaggccacgacatgaaccagcttgctaacaccggcaagtacgtatcagcgatggtgtttaaaccagaaagcgtcccgtggcacggaaaaccatgggagctctgacttttggttggggtgaaagagtgggtagagatgttgtgttgtttatttcgagcatgggattttttttcttctgcaaaaatc

SEQ ID NO: 57154 - DNA, 1027 bp, Zea Mays
caacatgagaaatagacatgaataattgctcattaggtggctcatcatgttctggttcagatgtttcggttacatcagcaaccaacaattcccatacttcctccatggcatatagttggtctacaacagcacacatgtatccatagctccatttttagtgcacttatcacatagaccacgagctcaccgatatcgacacaatgaagctagcttatcttcattagatacagatttggttgtgttagtagactaatcccatttaggtcgcactgaaaaagatggcatcgacttctgattgtattgatggatagaggaatccccatgatgctatcttccggaagcccgcacatcttccagtaccaaagcaagggaacaagcagtacccaacgtagatgtacgctgaaccatgattactgacttaatgttgtcgcacaaaccatcaacaaaacacatagtataatagagaggatcaacattcgcttcatatgcaaagagatgatcaactaaaaaggaaaattgctccacatatttagtgactgagcccaattgttggatatggaaaagttgcctaattagggattcatgttgatcatgcccatactgattgtgaatccgagcacagaactcagaccacgaccgataacacacacgacgtcccaccgattgcagccaacaggcagccaatcggcaaaatgcatagatacaaccttaatccacatggattgatacacctcatacatgttaaagtaattatcacaatgtgacttccacaactatgagttatcaccatcaaatgggggaaaattcagatgaggcaaattgccaaggctacaatggtacccctcatgaccatcatcccaaccatgatctcgagtatggtcagtaacaacaccaacgaaggaggaattggttcatgagacatacccttaaccgagctatgattttgggaagtaattcgagcaaactcatgctcccggtgactatgttcaacatggtggccgtctggcccatcggcaatgtggatttt

SEQ ID NO: 57155 - DNA, 1475 bp, Zea Mays
tgaaagcgcgcccgcgcccacgtgctggtagttttgcggaaaagccctcacgggtttagaataactcgaagaaagccaaacactattgaaaccagttgctgacactttgtaaaaatgcccccaaatttctattccttcaccgcctgcggtccccgacggtgcacggcacggcagagctccggcgagctcctggaccggccaaacggggcaaggataggtgctactgagcggtctacaccaaattcacggcctatcaatggttccccccaatcaatttcataattggtgatctgcctagctctgcccgcgaggacagtgaacgacgcggtcatgtgctcgtgttcctagcgattggcgggctcctagttcaattcagtggtttggcaagcatcacagggttatgagaatactcaaacgagggagcagaaggtgtgggctgacctgaatcgcgctggccgcggtgaggctgtttccacggtggcggagactgactttgggggaagttcgaaattggagctctctagtgattggttgcgaacaatacgtggtggctgggtgctggatgaccttgcggagctaggggagggctcaatttatagggagagcgagcggtggtgatcaatttggccgagccgtgctggcggccagagatgaagaagaacgcgggtgcggtgaatacgtgttcagtgtcgtggcagtaactccggtggtcgacgggaagttagagggagtcacggcgatgcggtggcgaggtttggacacgcggcgcaaggtcggacgacggctgtcgccggtgagtttatccgaagtggtcgtggcaagtacggtacggtggccggaattgtttatcggccggacttatccacgacgaggacccatacttgatcccaagtgttatccactcggtcagcacgaatcacggcggccaaaaacgcgaatccatgtgcggcggtagtcggcggcgaggtgcactgcatctctgatattttgctactgtaccatgggaaattcagtttatgacgcctgacagagcaacttcagggcaattcttctccaatttttgcattacaacttcgtcatctctttgcaccaaagttgcagggctaccatccagctataactttgctacattggattcctacaaaaagccactggatcctgcttaaaactaggccctaagttcatgtaatctttctgtcagtctgaatttcagacttcaacaggctgactgcctaactttgggtgtaattatctccaaattcttcataacaactgtgcttacactcttaagcaaagttgttcccctttcaaagagctacaaaatttatgtggtgccctaatatgaattctcattattttgaaagctacacagctctaaagttgagcctataaccctgatttcagacttagcataggaatcacaattggggtcctttttgcaaatgagtccaaaacttagggtttggcttgtaaat

SEQ ID NO: 57156 - DNA, 368 bp, Zea Mays
ccaaccatgataccttttaccatttgtccatagcatgaagttccttcaccatcatcatcaagccacttgatcaatagcccagaccaacacatggcttgataattctataatgatatgatccactccatgttatcacatggccttcttggttcatcaatttcaacatagcctgctcttcaccattgctttatgtccatcggtgctaagtccttgctctagcttcaccgccacgcagtccctcacacatgagactttgacctgcccttcacactagccactcggtccatcgaagtcaagccatattcttgatcttctccatatagccacatgacaccatgtcatgtcttcatatgcaatgagctccttta

SEQ ID NO: 57157 - DNA, 843 bp, Zea Mays
cggtgatgtcaccggagtgacctctagctcaccgtcggcgaggattcttaccactcaaccttatcaatccaccccgcacacgaatcttaaggccggcgatgcgaatcacggcggaggggtcaccggcggtggacattttgcgctggcggtctgatctgcacgagcactgtaccatggccaactccatcagacagcctgacagagcattttggagcttcatttcctccaattgttatgtgaaacctatgccaactttctgcagcaaagttgtagagctataatccatctataactttgatacaatgtgctcccacaaaaagtcactggatcccattcaaaatcgagctcaaagttcaacccatcatcctgttaatctgaatttcagaataaaccagcctgacagccaatctttaggcatgattatctccagtttttccttaacaacaatgctcacacctttaagcaaagctgttctcctatgattaggctataatttttatgtggtgaccaagggcaaaaactctatagtttgaaagttacaaggctccaaagttgagccaaaactctgaaatttcagacttagaatagaacctacttgaggtccattttgcatttaagtccgaaactcaacatttggctttcaagtccacacatttgtgaaccaaaggacttatgatacctatttggcttggtttttgcactttagtccaaaagtggactaattttgcacataggcccctagggtttagttttagggttatccagggttccaattagggtttttagtatcccaggggtataaatgtgattcaactttgtttttggggatattttataactatt

SEQ ID NO: 57158 - DNA, 443 bp, Zea Mays
ccaccactctacaccgtctaccctggcatctaccttagtctaccccatcaacccctcctcgcctcgctctgccgcacaacatctgctctctggccacatgcgctcctcgtcgttgcatatcctactagcttgagccccgtgtctgcttcttctcgccaactgtcgtccgtttcgcgcagtcgtgacacggacacagtcgtaaccacctcgtttgcctcgtctcatcgcgcaatgccccacgtgtcgtgcacacaactacctccccaagcactctactctctctatataaatatacgcccccgcccccaactccaccacaacttctcccccgtcgtgcagccatcctcttcatgcgtgctcgcgcggtgccgcgtcaacctgcctctttgtcgttgccggtggtgcctttctccggccatatcctccatctccggtgacttctc

SEQ ID NO: 57159 - DNA, 278 bp, Zea Mays
tgcacaaaagttgaaggctgcaagatcaatctattcttctgacagagagtgatcaaaatcagaagaatggtcacttagggtctcagccatgtcatcgtgatcatcatcatcttctgtgtcagaagatgaatcaagctcaggctcatcttcattgctttcagtaatatcgatgatcttccatgtcctccttctaggacaagtgcagacatctttctttcttttgccatgtcctgacactactactccatcttgtttttgtgcaccttcggctttaggct

SEQ ID NO: 57160 - DNA, 387 bp, Zea Mays
gcgatcgccacttggccagcacaatctgctgagctcgcaggcgcgaaaaacgacaagaaacgggctcctaaagtgtcgatcattgtagaaaaattgttgcccactctgccggctacaactttgttataggtcttagggtgattagggtgttggtttacaagctaatgaccttcaaagctgggtttgtcagggctgtgaatatcattgcaaactcaatgtccaactatgtcaaaatatgtcgaacagatttaaaagttcgctaactttttacatagcatgcctcaagtaattatctacaacttacataattggagcaattcaatttgaggattatcttcaacggaacatgtcaaagtttgaagagaggtgaagaaatggacttaaaaa

SEQ ID NO: 57161 - DNA, 396 bp, Zea Mays
cgtgttgattacacacactccataaaaatgtgtagattatattatttgtagggtgaagtttaaatagaggatgtgataggtcaactagacagccttacgacgatgaatgaatgcaccgttgaacgtgcctcatgcactttgtgcatgcgaaaaaaggggtggaaaattgaaggataagtgtagtcaacgaggtcaagagctgtgcctgtgctgcgcattgttgaaggatctgggaggcccggaccgcctcttcactcttctcccgccggccagtaaacttaaaactactggtagcgtgtgtcaagttgctgtagtttccaaatttaatttgtcctggcacctcctcctccttcctctcatgccgtccccttcctttccctctctgtctttgctcgc

SEQ ID NO: 57162 - DNA, 382 bp, Zea Mays
tgaaatgtgaccggattgcaagcatcatatctttgaatcccctcggttttgacccaaatgtcatgtagaaggtttgaagactgttgaatcaagaacaaactttattaaggaagcttgcccagttattcacaagaatcaagagaattcgtgggtagaaggtggtcggttcagaagaacgctgaagatcgaaccctgacaaatatctgaagaacaccaaaagatctacgacgctgttgctttggatgaacttggatgagtcggtcaggatttgatcgcctgaaagtaactcgatacgtggcacgactccgcgaacccagccgcatgtggccggagttacctcatcggcggtcgccgtgactcagcgttgtccgccgcgctgtcg

SEQ ID NO: 57163 - DNA, 947 bp, Zea Mays
attatacattaattgtttttagaaaacagtaaatatatagtacagatattttagcttgcgtcacggagggtcggccgaagcgagccaaccctaacagtttccacaaattatgccggccatatgtcttgatagccatacagcacccatcaatcgaggatggatgtggcatatatagccaaccggcccttttaatttgccacggtgccatcccactggtatttgaaagtacccgctcgcgctgttcatcgccgcctccccgatgtgggactaatccatgctgctttcaattccagctcccagacccagagacgggacttggtgtggctgcgcgagctctgctagccttctgggcctcatactctgtgcagaaaaatggaaggtctggaccatgactgtctgagaaacctgtagcccgcttcgctgctgcgaataatagactaacggcccacgggcatggagctgggcgcagttacggattggctcccctccctctcccccggccccggacggcggacccgcaactgcaactccggcctccgggactagaacggcctgtttgtttgcttcctgcgtcattattatgatttcaaatggatttgtatgccgcaatcccggccgctgaaagtccgatatcaggtgaggcatccggggacacgccgtcggtttcttcgatgtttgattgacttgaagactcgagcacaccacgatgccgtgctgccattttgctcggttacgtgctctcaaggatgtgtcaaaacctgagtatgtttatgtacttgataaagcaatacatggactgaaacaaatccttggagtttggtactctcagctgagtaataaattggtctgtctcggtttccatgcgtcaaaaaacagatatagtattattcttttataacaaatacaatatacacattttgtacttgtctacgtagatgatattgttg

SEQ ID NO: 57164 - DNA, 1039 bp, Zea Mays
caactttgatgcagatattctcttgagttgtgacacaaaaattagaggaaaacctgttacaagttgctctgtcagaacagtttcagaaaactaaaactgaacctaaggttaaaacaaggttccagtgaggtgaggtcaagtttgatgcgccatatcttcgaatcccctcggttttgacccaaatgtcctgtataaggattgaagactgttaaatcaagaacaaaccttattaaggaattttgcccggttattcacaagaatcatgagagctagttggtggaagggggacggttcaggcgactgacgaagatgtgccatggtacagtgccccgatggatcagaccgctagctaagctcgccgtcgatgatcaccgtccggattcgtgcatggtatagaaggataacgccgggaaaagggtgaatcgtacgtggcgccatctcctgtgctcggccggagtaattcaccggcggccatcgcgtcaatcctttccgccgcggtgtcctcggcaccgtgattcttcctcactgtaccaattctctacgtgcttggcatgcgcttgtgatggtattcgagccgtgaggtgatcgccggacctccgcggctataaatagcccatggttcgtggcgaggctcggtcatcacacacataccagtgaaccaaatcaagtcaaattcgcactgccctctccacctttgcccaaattgattgtgcacagtgaaagcacagcctcttacggtcctttagccccgatcccatctcccaatttcgctcagagccgccgcgaccccattccccccccccctttccgtctccggcaagcacgaaataccgcgctccgtggccatatcaccctggtaaggctctgcccagatcaaatgttgtttctgcaactccgttcgcttgtgaagctcatcgtggcgtccgattactcaatccggccccggttgtgcgggaacgcgtgcccgtggtcacggtttccgccgtgcacgtggacatgtcgttctcagtgcattcatgtcaaattgatgcgtgttccg

SEQ ID NO: 57165 - DNA, 377 bp, Zea Mays
ctaatatttatttatcttacttgccatcacttccgcactaggagcgagacatgctacggtgctacgccaaaactaccagtaaataacatttttcaatatatatgtccctcgcttcaagcacttgattgcaagcaaggtttattgttagcccgccttttatcgcccaggtttcgaggcactaattgatgctcatgacaaagaggttgaccattattgtgcaactcttgaagttacccatcgcaatctagaagccaagcagatccagttatcttagacttttggagaaatgattgatgaggccatccgtggtgtgtcgaacgctgatgcacctactgactctgcacaaggtaacttgtgtccactcttaacatttttaa

SEQ ID NO: 57166 - DNA, 672 bp, Zea Mays
cgaaattctacacgacgatggactagggagtgcggggcggacacgagtaaggtgcgggttgctcaccgaattcgcgttgaggtggatgccggtttccgggcgggtggcgaagaaggacgtcgacagcgagaaattaacggaccgctgtaggtgctccttgccaacggatggttcctacacgtgtggcgggggcgtgcggagcagcaggccaattcgtcgtggccgataatccgaccaaggcctgattcaatggtggcggcgcaactccgagattgcagtagaattttcttcttccagaacctggttttcactggcgccagagggattaagggttaggtttggctcacggcacgagttgcccacgtctaaatacacgaggcaaagccgcaacggcatcaccgagatcaggggcacggtgaggtcagccatgcgggtcttgcgcgaggtggttctgactgcgcgtggaaggagctgaaaagccggcccgcgtgacagtgtaacagatgagcgcgtggtgcggaggttgtgtctggtcacggggccccaccgcgcagcgagtcgaaagggagagaaatgcggtgccactgaccagactggtccacatgtcggcgctgcggataggtagtgggctgtacggattaaaagagaagttgggccgaattgatggttttg

SEQ ID NO: 57167 - DNA, 300 bp, Zea Mays
tgagccaaccgatgatctagtcctcactgtcagttatcgatcgaacggccgagaacccttcataccgtttcggccgggatattttacagtcgggcccctagggttttaatgagtcaacccgcagtccacaccctatgcaaagtaattacatacaggccccggaatcttgtaaaccagcccctaaatttcctgatattcatgcgcacagtacaaagagttagaaaatcagagaaattaatatgaaaaatgattgttagtgtagaaataattccagaatcttgtttaattcctagaaaattc

SEQ ID NO: 57168 - DNA, 664 bp, Zea Mays
ccattatgaaatagatcgacgatttacgctaaaattcatacccatttacgttgtgctgttttggttcatgttttacgtttaaatccgcccgagccagaacttgcgcatgatcgtacgcgtgcgattttcacgcagtaatttaggccccattcgtcattacgaaacaaatcaatgatttatgctattttgtttcacgttttactctgaaatcaacccgagtcagaacccgtgtacgatcagatgcgcgatattttcacgccgtaatttttaggcctcattcgccgttatgaaatagatatacgatttacgctaaaattcataatcatttacgcttttttggttcatgttttatgctaaaatctgtctgagtcagaacctgatcacaatgggacgcgcgagatttttacgccgtaattttcaggccgcattcatcgtttcgaaatagatctacgatttacgctaaaatttttaatcttttacgctgttttggtttatgttttacgctaaaatctgttcgagacagaaccggatcacgatgggaagcgcgatatttttatgccgtaattttcgggccacattcgccgttttgaaaacagatctacgatttacgctaaaatttgtaatcatttactttgttttggttcaccttttatgttaaaatctg

SEQ ID NO: 57169 - DNA, 416 bp, Zea Mays
taccatgtcaacccccatctaaattgattcagctggtggtagaatccaatccgatagtgtttgcttgaatgtaagtgtggaaataagggggatagtgttttctgctaatctcatagtaatgggtactcagggaatagatgtcatcctagggatgaattggctagataagtaccaagcaattatcagttgtgataagaggataattaagttggtgtccccactaggagaagaagtggtagccgagttagtctcacctaagccaagtaaaggaggtggtcatcagatggctattgatagcaaggagccagattcactcgagattatcaaggttgtgtctgaattcccatatgtgttctcggaagacttaccaggtatgccacctgagcgtaaagctgagtttgccatagagcttcttc

SEQ ID NO: 57170 - DNA, 503 bp, Zea Mays
tggctctgtgtctaagtgttttgagtctgatgattctgggagttcgattgcatggacggaggagtcttcagatgaggacttggattattttgcggcgctggatgtggctgcagtggagccttcgccgtgcacggagggttccgaggagctcccgggcgcgagtactgggcataggcggcaaagggcgatggcgaaatggagagtgagtgaattgtcgtgaagtggtaggcgttatcgtagtgagatggagagtggtcgtcttcgcgtggacgggactggtaagcgagaattgttgtcctcgccgattggggtgagtgtaggtgagggggagctgcgaaatctttttgagggtgaggaattgaggataatgttgttcaactacagggagatgggtatcatcccgaaggttgatccaatgtaatatatgatgccctcgctgtgtgtatgtaaccgctatttgtatgataaggctgcgcgccttcgttgattcggccgcgcccgtg

SEQ ID NO: 57171 - DNA, 325 bp, Zea Mays
cgtccaggcacgtgggcggaaaaacttgacaacctttttggtcgtcgttggctgaggcgctcagcagccaacgttgctgcttgtaggttgtagtagtaatgaaaggacagggccggccgatggctcgcgtgctgccttgctgcctgtctggtccgcccgcgtgggacgaaaattatacacagatacgcatcatagtgcaggagattcgtctgtttggcatggtctcttgaaaatcaagcagtagttttatatgagggggaggccggcaggtacggtggtttttaaatccggagataagaccaggtcttgggaagatcgatcgttg

SEQ ID NO: 57172 - DNA, 513 bp, Zea Mays
tgtggttggggatattatctgtatgcttttagaacatctcggcattaggggaggaatgcccatataatgtaatgcctcaatattctattaaacgcataaaagccaaactgaacctgtcgttcggtgtgtactcctgtgtatatggagtttgccagaaatcgttgaggagtaaccatattggtctgaatgtttctacctgatgtagatgtggatatacccgggattaatatcatatccacatttgacttattggcatttgatctattctcggggacgcctgcgaatatgatccatcagccttagtcaaagcatataaactgattgcatattcacgtggtctgtgataactctcctccgattaattcaccctgctggtgatttgcctcacgaagaggttcatcttgatgatgaagttcctagcaatgcgcgcaatatcattgtgctgggaatacggaacaatgaatctttcgttttgggaaatgacgaagatcattattaaatgtgggagacaaa

SEQ ID NO: 57173 - DNA, 645 bp, Zea Mays
ttccttagaccacaaataatgtttccatgtttgcaaagatcgtatgagagcatataattctttatcataagtagaataattaagaacaggaccattcaatttttcactaaaatatgcaacgggtttacctccttgcatcaaaacagcaccaatgccaactccacttgcatcacattcgagttcaaaagtcttaccaaaatcagggagttggagtagtggcgtgtgagtaagcttctcttttaaaagagtaaaagaatcctcttgtgactgcccctaattaaatgaaacacccttcttggtcaactcatgtaatggcgcagcgatggtgctgaaatccttcacgaaacgacgataaaaccctgcaagtccaagaaaactccgtacttgtgtcaccgtcgatggcgttggccaactctgaatagcatgcaacttggcctcatcaacctcaataccctgtgtagtgacaacatagccaagaaacgatacgagttcggtgcaaaaggtgcatttgtcaaggttagcaaataagcgcgcgacgtgcaaagcatcaaaaacaacacatagatggtcaagatgtttagataaacaagtgctgtagatcaagatatcatcaaaataaaccaccacaaattttccaataaatgg

SEQ ID NO: 57174 - DNA, 526 bp, Zea Mays
gccgactcataatgagtcagtctttgagtttgtgtaaccccttccaatattaatgaaaaactttagatgcttccagtgaatgttgcctttgctgctttttctgtttacacgcttgacagttcacccatatgcctaatgctgccagcgtttttagaaataactgtcgagcgatgactgatactggcggcgttttagaggtaaccgccgagtaatgcctgacattgtcggtgttttagaggtaacagccgagtgatgcctggaactttgctttcccgagtagtgacttggcactttttagaaatggtgcccgacccgggaaaccccacttatactcgtgccgacgtgcatttttttatttctgagccctaacatcacttttccacctcgaaccactcctctgcttccctgagatctcaatcctgctcgttctggcagcaagactgcgatggcgccgaagcggaagaggcagagcactattgctgcaatcatcccgcctatcgaccccaacagccagttgtcgtttgcg

SEQ ID NO: 57175 - DNA, 501 bp, Zea Mays
gtttcttacatttcaccgctacttcctattacgggagcatgtttctttagtttttactgcctttgtgtgcacacatgttttgattggcagtttcttctatatgaaggttcaagtcttgaatgcttttattcatatgatcctaccctatgtttggtcttgactagctccctttattgctttggggcattttcctgattagtaatggcaagtcctattgctctcttttctttgagtgtctccgattacttgatatttaagaagccagagtacatgttcttttgttgtgaggcctcttaaaaggatcatgtatacattctattttctttggtatttcaaccctctctggtgcaatctatgtaggaacatgcaacttaaccacgctcttcaaatcacaaaaatgatcatatagtttatttgctaaattttgcaaactagttaacttttagacttctagatttgtttctttggtgcaaggatcatgagcaaggataccaatttatt

SEQ ID NO: 57176 - DNA, 608 bp, Zea Mays
gtgagaacaggaataatcccgcgtagtctaattttgtatgtgcggctgggatcgaaggggcttaaacgattcggttgggaggatagtaaccgttgagatcgggatgagtggatgtgatttggtgagggcgtgggtgccgtccgatccaactcagacggatgagattagaagcgaggtgtactggttcggatttcggtctcagtcgtccgatacaaaacgtacacgtgagatttgatctgagaaatttaaatcgggggcgttagcttgtgatcggagggccctcggcgctgtgttggtccgcagaacctggatttaatccgaaccatcggattgaaatcctgcggccagatttcgcggatacctcttcggccagagatcttgcataagaaaccctaagctttttacaaagtaacccggcgtcctagcctttggtagaactcttactaacaggtcccagattttatgattttaaccccgagacttctgaaattctcacccgcagtccaaaagatttcagaatatagaaaataaaactagaaaattgaatttcgaatatagaaataactctataaacttagataatccataacttgctcatttcaagtctg

SEQ ID NO: 57177 - DNA, 1320 bp, Zea Mays
cttccatcgttgttggaaacgaatctgccccactcgtcacctcagtaggtgatgcggtccttccccgccctttccgttaccaacgtccttgtcgcccccaacatcattcaaaatcttctttccgtccgtcagttcactactgacaactcttgttctatagagtttgacccgtttggtctgtctgtgaaggatcttgccaccaggacccttctcgctcggtgtgacagccctggtcccctctacacgcttcgcctgcctgcttcccctacatcgacctctgcccccgcctattcttgtagcggccgcctcctctgtgacttggcatcgtcatctcggtcaccccgggtgtgatgtgatgtccaagctctccagtagtacctctgtttctggttgtaggggtcttttgagcacctctgtcatgcttgtcactttgtcagttaggtcgccatgttaggctcccattccccacctcctcttctagggcagcaggcattttttatctgatacactgtgatgtatggacatcccctgtaatcagcatttctggctataagtactatttactcattctcgatgacttctcgcactatttgtggacttttcctttacgtcagaagtcggacacttatcccaccctgtctcacttcttcgcttgggtatccactcagttcgatcgcaccatccggagtgtccagtgtgacaacgggcgcaagttctataacaatgcgtcccgtgactttttcctctctcgcggcttccacctctgtgtgttgtgcccctacacgtctcctcagaacggcagggctgagcgcatgattcgcacaacgaacgatgtcatgcgctctgctctttcaggcttcccttcctactcactactaggctgaggccctcaccactgccacctacctcctcaatcgtctgcccacaaagacggttgcccaccccactccttacttcgctcttttcggcatccacccctcctatgatcatcttcgtgtcttcgggtgcgcttgctaccctaatctcgcctccactgctcctcataaattagcgccccgctccactcgttgtgtcttcctcagatgctcccccgaccataaggggtaccggtgtctcgacctcacctcacacagagtcctcatttctcgtcacgtcatttttgaggagttggattttcccttttccacttcttccactgcctctctcaccgagctctatgtgttcctcgatctcgaccttgtgtctcctacggtcgccccccttccttgcaggtcagtccaccgcgccaccccgcgcggccccgcctgcgacgccctcccc

SEQ ID NO: 57178 - DNA, 561 bp, Zea Mays
acaagatttgttcgtgcatgttggagcgaaggccaagcactccctcaatcagtctaatccagccatgatcagacaggcttttgtgaaggtatagtttgtgaaggatacttcgacttgtgccaacatcaagtcttcaaccatgaccttcgaatgggatgaagcgaagggccacgataaccaaggagggggacccgctgtagcccacgtgcgcgtcccaaaggctcaaactttctcccaggcagcgaagaccaagtctccactaggtcagggggagctcaactttgcggagcccagaaagcaacatacaggtgaaggctgcacaaagattactgtggggcccaggcctcgccttggcaccatctgggtccatctgtaagcccctctgcggggtagattttgtagtatgtccagactaatgtacctcactgtaatgaccccgttgaggggaatattttgggaatgtagtaggtaatcagggtgtaacagtatttggggacccacctactcgccccgttacctataaatacccctgcactgtacatggatgggacacacataaca

SEQ ID NO: 57179 - DNA, 545 bp, Zea Mays
cacgaagatggcccgctttgcaacggcttggctcctcgattcacgccggccacgatagtgcgtacagtgtaaacgggaacaaacagcagggaaggggaggcagcagtggggaagatgaggcggcggtgtgaagtgaaggaaagggtaaggatggaatgttgtacggtgcggacaggagagatgggctgagtggcgtcaaagtgcatggacaaataaaatgggctaaaacgcctaagtcacgaggacggagggagtacatggtagttgtcacaccataaacaaacacacagttgttgtggtattacaagactacaaatcctttggtgtacaatcatgatacgctgaagtatctaatagcacgaggtatgcaaacctcactaacgttaaagctaaaactagagcaagcatggtttaactagctagcataagtacttcacaaaacaactatattaatcaccacgtgaatcactagacaccacgtacgtggagagctctaatagtattttctttctgaatacatcaacaaaaccagtggcggatccaaa

SEQ ID NO: 57180 - DNA, 701 bp, Zea Mays
gtgaaccctacatttgtatgcatgagcatgtaataccgacttaagtcgatccctgacttaagtcgattgctctgttagtagggtatggtgtgcacccttcatttgtatgtgtgagcatgtaacaccgacttaagccgatccacgacttgagttgattgatcccttggtagtatacaaaagtacaattgcatataggaaggtaaggaagaaagtagagctttattgaaatgagttgacagaatgacaacctaccttctagagtttatggtgctgctaagggtaaaactttctaagatgctcaatgttccaagagttcccaattggagtaccattcatctaagttagcttgtatgagcccgaccgagttacttccacgactatgaagggtccttcctagggtggtgacagcttgtggtgtccttcccccgattgtatatggtggagcaccagatatcctactgcaaatgctcggggacgtattgccttgtcgtggtagcgcctcaaggtgtgctggtatgtagccaactgaataacgatattaagccgttcttcttccagtatgttgatttctttgagtcgggttgcttctgcttctgagatgtttttgaaggttagcttgggtgccctgaaagcaaggtctgctggcaatgctgcttctgacccgtgtaccatgaagaaggggatatttccatgcaaaattc

SEQ ID NO: 57181 - DNA, 613 bp, Zea Mays
ctggagtaggagcactttcaaaaggatcctaggaaggtggaggatgagaagaagggcacatatcaccatggaaagggggagggagctgactgatcaacatcatcgccaacaacaaactcttcttcatctttagcagtcatgaatgggacaccataatgatattggtgacactgatcaatgtcgatgaaagattgatgatgaggcacatcctaagagcgaggtggtatctgcacactagggaagctgattgaaggcatatgttgtcatcagtcgctctctggcgcctagccaactcatgcatgtcgacagatatgtcacggcacatagagaatatgaccgcactaccatgcgccaaacatgatcccaaacctcgaccacgacctcttcctcgcccatcgcggtccataagacgtgttgcagtagtagcatgagaggaaaggggatggtgaggagtagtagaagcaggttcttcaaagctagcaggagcccactttaaccgactggtagggtatagatgtacattcgagccgctcggcccgacccaagcccgaaaaggcttgtattgtttgaatttcgggctgtgccgggccaacccatgtgcctagccctcggc

SEQ ID NO: 57182 - DNA, 365 bp, Zea Mays
aggatgaattttgttaccatgacgggcaagcttatgttcttttagaagtactgttatgctgacttttgtattgcaagcttccattaacatcgtgacgagtttaccttaacagcacttcttacagtggaatgcaactgcaactggttgtagtcaatgcagtgacatggtgctgttagcttggcagggacttcttgatattattatcgtcggaagattcgacaacagttccttggtttcaaaatcgatcgctactgtcgatggaatcagtgccagtgctgatgcggggttgtgcaaataactggagatagatttgtatggtctttccattaccggggaatagcttgcctatcaatgcatgctgcctt

SEQ ID NO: 57183 - DNA, 544 bp, Zea Mays
acggtcgagagtctctaaattgtaggtgcgaagacttccctcagaagtgttggctagttctttgtgtcaagggaaggggtcttcctgttactggttcgatggcggcgaggtgggcaccctttgcattgagttgttagatcttggttggcgaaggtgactttgagtttcctggtgttgtcagtggagagtatctccgtcagctcaattgggtgaagttcgatcttggagttatcttgggattggtctttatagcaaatacggtgggcgtctaatgttgggttctgacacgtgaacctaacacacttagaagtagtatggcaatggtgctcaacaaacgagaagtaggtgaaagtaacctagaaggggtaaataagtgatacctaatgggtctgtggattactctcactaatgcgagtgagattttttgcttgttatatatacaagcgtacgatgttcatcaccctaggtgaagcttcaaccaaccggtaaatcggtaacgactgagcgatcattattgaaaattactaagtatttttcaataatt

SEQ ID NO: 57184 - DNA, 955 bp, Zea Mays
ttcgtgctaagtttgtacattaaaaagtaataaattccacagaaaatatgatatccaaaacaggctaggaaacttccaactgcatggttttacctctaacagtgttattcaggatgttcactccggattaaagctagctgttcggactgctcaagctgcaatccatagaggcaaaacactagctggtacagattaaagtcaagcgaacatgctaagttgtcactatatgtttgacattactaaaacttcagccaagtcaaatgatcttacaaaataaaacctttatcaccagaacataattcgagaactcttaacatgctttaacagacaagcggggagtactaaactcaaatcttcacattgcttgtcacactattaaggctgattggtcggaaaaataggctgagactaactaaataagattggaagaaatctataaggcaagtggccaagtgctataagtcactttagcccaagtttcagatttctttgaatttctatagaaattagccatccatacttaatgagtcacttgacccgtaacccattgcatatgctagttgtcaatcatatatacattatacgagcacccttaaaaacaatgacaaggatcatttgtgggttttaaacaaagacaagctcatttcttatgtcccttgaagtagaatcatttgctgattaaggtacatgaacccagaagtgttcaagttcaactgttcaaggttgctcaacttgtctgcctatcacacttaactgcagaagcactcaccaggtggctgctaagttgttatccatcattaggcgcagaatggtaattttgcaaccatcaatgctagcttagccacagtaatcactcaaactaagttctagcatgcttgatatgttaactcgtcaacttttttggtatattttttctcaaacgcatatgaatttttggtatatgaaacatagacag

SEQ ID NO: 57185 - DNA, 503 bp, Zea Mays
gtcaaatcatccgtcatgggttagagaccagaaggacgaggtcatccgctactttttcaaggaaccagctcgaccgtcaacttatacctatagagaaagctacgaaggatggcttgatgacggatgggtttacctcgtgacacaaaccaaacagaacatgcaggttcggacttaggttcggatgattccggatgagttcatttgtcaatccaaacaggtcgttagagtccgacctgggcgggctataaaaccacgcaccctgtttccttgttgcgcggctggtcactagctggtgggcccatggggtctggccgcaccccttgcgccattgccacaaacttcgcggggctggtaagcttttcttgcgccaaatcataactgatggatgcacctgtgtccggctaccgcatggacgcctatatatgcaatacatccaccttttcttttcctccctcatctgctcgggagtctttggaatcgtcgttaccgcgtgatccgccgcc

SEQ ID NO: 57186 - DNA, 989 bp, Zea Mays
atttgatcaagtaagccctagtactacatgaaaatgggagaaaaggaacttgaaactggactgtcagatagacttagctctgaaaaccttagttcagtgacatttggttaattttggaagtagttcatggttaattcaatggagataaggtcagggtcaatgtggaaaagttgaagctctaacattagtaaacaactttgttataccaagcttgacctggcgctgaacgatttttggagtaaaatgctctcaaacttgctctgttaggagccctgatgagagttcgtgatggtacagtaacctgacgaagatcgccaggttttgtgcacctccgccggtgatcccacaccgtgatccttgccgccgttgtgattcgtgcctggtggagtgcagataactacactgggtggaaaatatcgcacaggacatgaacttggggcactatttcgccctgtcgccgtacccacttgcactggcgacgtggctacgcgaccgtcgccgttgtgccaccgtctagctcggttgtgacacgccttaagtcatctcaccactcgtcgcaagccatgaagactcgacagtgaccaccgtagaccgtaaaccagtgaacgccacgttagcaaactccggtgactcctcccccttttcaccacgcgcacttccccgtccaaattcgccctcctcgcggccgtcttctttaaattgatgcctcggcctgttccaactacttgttatgaacccagtgaaccagtccttgcctccaatcgttcaccatagcctctcaatttctcttttccctcaaatctgttttccgcgctgccgagattctctcactatggccagccctcctcaggttggttcatgcctctctgttggatgttctagcatctcttaggtctcctgtgcttgtagggtcgattgattgaactagaccgcgcttggttgccctgaacactgtagtttcttctcggtttttgccgtcgtcgtgagca

SEQ ID NO: 57187 - DNA, 948 bp, Zea Mays
ggccgcaaggcaagggggtacggcggccagccaccggagttatccccaagcgaagatcttttacctgggagcattatctggtcatcggtgacacgaatcgcaacggcggcgcggatctaggcgcacggtcgccggcggtcaggtgcgctgcactagcgatcatgttcagggcactgtaccatcggaaacagctgacagagcgcctgacagaccatattcaaggcagcttctctccaatttttatgtgacaacctcataattcatcttcatcaaagttatagatctataatccacgttcacttttgttatagcaacaaccatcaatcgagcaacagatctagctcaaaatggctcacaaacctagttctaggccactgtcagtctgatttcagacttaagacaacctgataggtcaacttggagtccaattttctcaaaacttttcatagtaccaagacttgctctctatagcaaaattgttccccttttgtagctctacaaacttgatgtggtgacctagggcaagaactttataacttggaagatatagggccccaaaattgagccaaccccactgaaattcagacttagccaatagagttcaaataggactttttgcaaataagtacaaatctcaaggtttaacttgcaaatccacatacttgtgaaccatatgacttaaggtgccttagcttcatggtttttgcactttagtccaaaagtgcactagttttgcacttagccccccagggttttagtctagagttttccagggttctatttagtatttttggtgctcttagggtttggatatcccttaatttcattaatggtggtattttatgatcattattatcaagttttgaagttttctcctatttaagcgttgtttgctcaattaagcccaatctagggttaggtaccctactctagggttttatccacaaa

SEQ ID NO: 57188 - DNA, 820 bp, Zea Mays
tttggaaaccccatcaggagaaagaatagtagttgaagacaatcgacctccagctctgattggtacatctgacaaggaataataatatatcatttagctagaagaaggagtatgtctcacaaagaaaaaaataaaatgtcaaggagttgcccctttcaagatttgtaattgtgctaagtgatatatgaataaatttggagaatctctcgcacctattgtgttttgcctctttataaagagaataaagtatggtgtcatctgctatatgcaaataatgtgatgctccactctagttgccctaaagtcctgttcaagtctttctctcaaattgtgctcaaagaaatactgttggattagaaagatgatttggatatcatgctctgaaatctataaggttcaaaagatctttgttaaggattataacacttgtacactcttgtagtatgatgaagctaggcggaatcggaaatcatccttaactaatcttatattggaaatcaaaatgttgtgtgagcactttatcttaatgtcatgcaagcctcttatgtggtctgtctcactaactcttttaccctctgactagatgatgaaccccaatggaaataaagtaaatgatgccaacgacaatattcctaccttaacaactatgaacgagaaaaattagtcatagagatattttatgaatggattgaagaacaacagaaggaatagaaaattgtttggatacatgattagtccacctcaaccacaagcaaaagccacgaaacacatggatacccaaacagcataatcaagtcaggctcagttatatgagatacaa

SEQ ID NO: 57189 - DNA, 2202 bp, Zea Mays
gtgggatttagtgaagtaatgttttggtttctctgcagatacttcaattccttgcagagtgagtgcttccatgtatgtttcttctcggatgtgaacatggttatctcggcacctacggggagtgggaagaccgtactatttgaactctgcattctgaggctcctctcaaggttcctttcaccagattggaggttcaatttaaataaaggaactctgaaaacagtatgtaccgattctgaatgccatttctgaaaaataataaggcgcttataatgcaattgcgagtttaggatttgtgtattttatttttatcttgtggttcactggatttatatggcagatctacattgcaccgtcgaaggcgctggtacaggaaaagctgcgggactggaacatgaagctgggcccattagggatcaattgcttggagatgactggtgacggtgaattttgcaacactaaagccatccatgatgctgatttaatactcaccactcctgaggtccatgtcactacttactttgacctgtagaagttaagattagcctgctaacccacttcttgctttctcactggaattgtaatacatgcagaagttcgattctatgagtcgacatggtataaaaagtggtagattgggtttcttctgtgacattgctcttgtccttattgatgaagttcaccttctaaatgatccacgtggagctgcgttagaagcagttgtcagtaggataaaaatgctatcgcgacatgataacatgaaatcttttcctctggctaatgttcgattaatcgctgtttctgctactatccctaatattgaggacataggtttgtaactctttgctgtaaatttttagcataccatttgcattgccatatcacactccaataaagaaagtgatatttccctactaaatttcagcacagtggctcttagcaccccgagaaggaatcaaaaggttactaacacattttattttgaagattttctggagtactcccaataaatttaccttatctatggtatcctccttttgcagatttggagaagaaatgaggccagtgaagttgacaaccaaggtctttggtatgattgagacttcatatatagtagaatcaaactcaccacatgtcaagggctcatgtctgtaacaaatactttacaaccgatgcgatgtaaattcaaaccttcaaacaacttgtaatctctgaacttgagccaaaagttttgccggaataaataaaatcaatcaggtggggacctgccccccccccccccccacacaacacacacacaaagaaagttaaaaaaacagatgcggtaggtactcatctggctgtaaacttgtgtgctaatctgacagtaaatgctctctttgtcacgtgtttcttgaaggacaccaagtcattaaagtgtttcagattttaccaataatgatttgactattttctatgccactgaagttacatttgatttacatatgtaaaacacctcttgtacaaaatgatcacaagttctctttcattagaataaacctgtgctttttgtgctactaggtaaatttatgaacatatatacacatggtacaaattgctagcatcttcctaacgttctttcagcttccacttcgtcagccatttccgtgctgctaattctttcccttttctttgtctgttatttaggttatgctccagctaaaaatgactttctttttgagagggtatgcatcattactatccaaaatcttccttcgtcacgattagagtaaaagttagcagggaagttttaattcagatttggttctgcatctccctgagttgtatcatattgtgccaaatagttggattttatataatgctaactgcttaattatttttgtttgtttcaacttgtagaggttgcagagttttatttatggtaagtaacatctcccgatcactcagtagctgcattgcacatatgttaattatagttttaaaattcaatagcagaaatataaatggaatatggattacagatatactgatgcaacattcaagggggaagtctgcacttattttctgttctacgagaaaaggtgcacaagaagcagcgcagtgcctttcacaaactggagcatcgcttggctattcgaatccatttatgaaatcaatgcagcagtatgaacatctaaaggcggcttccctaacctgtagtga

SEQ ID NO: 57190 - DNA, 697 bp, Zea Mays
cgaccatctcgttggcacatctgtcctctagctcattggtcgtcatcatcacagctctgttgaccctgctattaataatgttgctttcctcggtttgatccagcagctcatatgtaccttcatgcaagaaatcattcggcccctcgctgttgtttgtgttattgccaacaaggggaggggaggagaggatctcagcgaagggctgctgcacctggagtagcgcagggtgatcaccaagctcatcgtcatcgtcctccatgagcatgcgtgagatgtaagggagcgtcatgtcattgttagggacatgatgccggtcctcattgctggcattgggcttgtgggggaggtcaaggaagacaggtggggacaatggtggctgctccatgagatccttgatgaagaattcctccggtgtggtggccatgctcatgaatggtagtgctgcaggacaatagctttctgttaatacatatataaatgtcataaagggaagaaaacaaaactacttccggtttcttgtccctaccatcaggacagcaaaagacgatggctgggctgtaaccccaatgctgctagttcgatggagaccatgtctcctgatattctcaatgctacctggataatgtttgaaaaaaaaaggctagctatacacaggacacatcgaagtaatatctaggaaagatcatcgtaagaagcc

SEQ ID NO: 57191 - DNA, 735 bp, Zea Mays
acttgtaatatttagagaaatcgtagcaacgcacgggcaaataactagtcaagacataagagcatctccaagaaaccacgtaaagactccccaaaaccagtttcagatgcgaaaccttgttttttgtgctccaacagacctccccctttgtcacccgcatttatacgtgacccaaaaacgaggcatcgcgtcccacaaatatgcgtgagaaaagtactctcccaatcgcttccgcgcacatcctccgcgtcttgcgcccgtgcatcctggaaacgaggcatggtgcccgcgcttttttggcttgctagctagctgacggattgagtccagtactcaagtgcttaaaggaaggaggacgtggttttcattccagcaaagacacaagaagcacatagtatgtgaaccataaatatttgtgaactaaaacataaatcctggcgttggcgtcacaattactgacggggtgcgttggacgattacagttatagcgagaagcaaaaataaaaggggcattgacatgtatcaatgggctagccatagaggcaaactgggctggtgtcagaacctaaaatttgtaaatgttggcccagtttcgtttcagctttttattttgggaaactgctggagtatttgtttgttacaccactgaaaaagatttaatatgtccctcataatcagtttttggggaatttttagcacaaactcttggagatgctataaaagaataggtggtta

SEQ ID NO: 57192 - DNA, 636 bp, Zea Mays
aagcttgctccttgaattgtaaggcaaaagttacaagctcaccttctctagatttcaccaccttcggcaatttccacccagtgtgtgtaggataagtgttgtatgcaagaaattcttggattagatcttgagatatgatcttctcagaaacatcattgaaagctttgtaacaattctaagcagtatcattcatttcgtattttggtctcttcagaccgaaactaatctgcagcggactcatcaccatatccttgaagtcctctcgttgtttagaatccaccttagcatagaaccactctttcgtccagtcaccatgccattttgttcagtatgcaaggactggggaaacagtatccttctggtaggcgaaggaatagcagttgaagttgttacaaagaccatcagaacctctagatttcgtctggtagtgcaagtcatgcactctacagaaggcattagcctcagtacgaaccccatggcttcgtacaacccaaatgaaaacacccaatacgactatgacatttggcgtcatctgatgcatataaactttatagttctataaaaccttcgcaagcatcggttgccaaaggcaggctcagaagaagcttttgaaaaccacaacctcactcttcttcg

SEQ ID NO: 57193 - DNA, 384 bp, Zea Mays
tgttccaggagtgctccaggtcttcgccgtttggcgttgcgagcttgtaagcgctgggggaagcctttgtcttgacgatgaaagggccctcccacttgggctccagcttgcccctggcctctgtccgagctgttcggacaagtacgaggtccccttcgctgaattccctcgggatgactgcgtggtcgcgccatgcttttgtctgggcttggtatttatttagagcctgtagagcgaagacccggtatccatcgatgagatccttcgaagtgggttcgtcgacgtcggggacggctgacgaaactgttcgcggggacccatgttttatttcttgtggagtcatggcctccgatccatatagaaggcggaaaggggtgaacccgg

SEQ ID NO: 57194 - DNA, 587 bp, Zea Mays
ccctttcactatctgttactgacttgtgtgccacatatatatatttagtcagccttaccagaactccagctttctctcgagcagaacaggtactcctttgcaatcacacccacgctcattggacagtcgcaccggtcaccgtttgccacctgtagtgttggtaagaacgttgtaagggtgaggtaatatgcttcataatttgtattccaccaccaccaccaccaccctgagagatagttgtagggttcacattgtttgttgcctttttgtctctgttttgtgctaacaatgacaggaccaaagaatcaaatggacaaggacaaggggcttaagcttaatgacgatgagtgtgtctctcagctggaattgaagaagatgatgcacacgatgactgaagcttttaaaaaataccaggactctgaggcgacatcctttgagcagcttgatcgacgagttgctgaacttgtcacacgcatggacgtactggacgctcgtccccccaccaactccagccctagctcactctcctgtggacgacgacgacgatgacgacgatgtttatgcaccgttgtgacaacgcctcacac

SEQ ID NO: 57195 - DNA, 515 bp, Zea Mays
gccagggaagacgggctgcatgaaaactttggctgttataacttcgcatatcacaaggatatgaaggccccggtgcttagctatcgcaccgagtggtcaactggttggaaaagtgaatggttctacatcaaggccgatgagaagaagagggagaagttaaagacgatggtcctgagcccactgagtttaagcttcagactgactaggcccttgtgccgcatgtcgttagggtctccatgccaacaagctgtagcagaattcagggtagtagctgaacaaatcagcactagagatctggtgcaagagtacctagccaacagggtgtccccgacgttgagtgaatggaatataccgaagctgaaggggacaaaggaaaacaatgaacttgttcgactgccttatcgcttcaaatttgagaaacaattcaaagggccatgccaagaatggttagaaatgatagaaactatgtgcaacgaaattttgggcaattacactaaaaaagaagatcagttgat

SEQ ID NO: 57196 - DNA, 680 bp, Zea Mays
gacgatatgatcccgaccgagtgacttctgctactatgaatggtccttcccatgagggcgacaacttgtgccatccttctcccgttagaatttggtggaggacgaggtctcccactgaaaaggatcgttgtcgcatggccttgtcgtgatagcgtcttagagtctgctggtatcgtgctgattgaattactgcattcagccgttcttcttcgagtacatcaatgtcctccagcctagtagcttcggcttcttctatgctttcgaagatcaacctcggcgccccaaacttgagatcagcgggtaataccgcctctgacccatagaccatgaagaaaggagtgtttccatgtagggctcggctaggttgggttcttaggctctaaacgacgtagggcaattcccttatccactttcctgcgaacttttcattcttatcgaagacctttttcctgagtgcctccaatatcatcccgttagctcgttcaacctgcccgttggctcttgggtgtgctactgaagcatacttgatctgaatgcttttttgctcgcagaaatcgaagaactctaaacttgtgaagttggatcctaggtcagttatgatattgttcggtatcccgaacctaaatattatgtcttgtatgaattccacggccttagctgaggttaaagaagcaatgggt

SEQ ID NO: 57197 - DNA, 1048 bp, Zea Mays
cttcaatttcttcacacaatccaaggatttctcgaagcacctttctttggattggcgaagttcttcaacatttttctctagataatttttccagtactcgctgatctctcggttggcctgtgcaagtgcgcaattctctttagcttcggccagctgcttacgaagatcttcaatttctgctttccaggcttcagcctgagcttcatagttagcttcgccctcttttactttatttaccaaagaaatcaaaattttatccttttctagaccttcatttcttagttcaatcacttctaaacgaaggttattcagggccatcatatagctttcgtcatcaatattcttctgtgccctaagggtattactaagaattaagccctgcaagaggaggaaagaattgagtatgaaaaataaaatacttcattctcaaattcaaagttaacctttatacctttatactgttgtaggctaggctgtcggcaagatcatccttcgacaaaattgaaaggccatcttctagcttcgggaatcccatgcttttacctatcacccggcaaacggatatttctttgttgtccgggagacagtataagaaatcatcttcattgcttccgttaaaaaaaggctcctttcggatattttagtttttgagcataatgccttgcttcagcgatttcatcttcggacaatttcttccccgaagcttgtcgaacgatgtagtcgatattttcaattggagcttcgggagcagcagtctcgaccttttcaggtgcaatctgccctgccatcccttcctcaggcgcggtaggcttcatcgtggcgggcgttgaaggcccagcttcggtttcagcctgagtttttgtagcttcgacttctgcttgcttagtttcagtttcggcttgcgctttggcagcttcagcaactttccttgtaggagcagggctcaaggccttcgtagtctccagcacagcatccagcacgttggccatcctcctccccttgggagtcgcggcagaagccttttcaaccttaggcagttttgcctctg

SEQ ID NO: 57198 - DNA, 299 bp, Zea Mays
aactgggctatgcgctgaaccttttgaatgtagctgtgtaaactgttagacccattctgtgatctttcaagctggatacttgtattatcactccgtaggttaagtgacactctctattgtctttgcctgagttaatagtgtgccttaaggcctaagctctttcttctttttgctcggctagaacttgctgatggtttatttccttttgcaacaactataacatgtaaaaatagcctacttattcaagactaaaatgctttgtgtctctagttttctatgcaattgaagttactagtatg

SEQ ID NO: 57199 - DNA, 666 bp, Zea Mays
ggcgaggctaatgacaataaatgagtggtattgagctactctactttaaataaatgagcatgggctatcaagttaactctgttggtaagtttgttctccttatcagtccatgataccaaaacataaacaagagttggcttcctaaatcagcacttccatgttcccatactgtaatacttgcacattgcttcagttttgttaatccacatcaaatatgcagacacttaggacagctatattatctgtccgtatatatcctctaccagaaatttgtcccttctctttcttcaaccaaacatgcagacacttaaggctgctgcaaagagatctcagaagatagtggaactagaaaagcaactttcctatttggaggaactaatggagtaacttgatgaagcagaggaacaagaagtaacaactattctaggtagatctggatatctttcccagcaggaaatcaaatctgccattttgaaagcaacacaatccctaaggaaagcaaaaggggagtccaatggcaacggtaaaaaaacagatgcctcagcagtcgataagcatccacttgtatatgtccctgatgaaacactgacgccagaacagatgtgtgtttgttcggttattatctacagaattatattcatgcgcttctaacatctggatattgtg

SEQ ID NO: 57200 - DNA, 328 bp, Zea Mays
cgggtcgatagtcgagcaactttgtgaggcggacacgtcgagcaaccctacaagacagatagatcgagcaaccctctaccgagcaactctacgagtcggagaagtaagggcccgcgacaaggaccaatacgtctatggaccctagtcccatgactcctcgtcatgcgcctgtacctacccggtatgaaaacgaggcagacactattggcccacgtcagccacgataaggcacctcgtcatcaaacaccgtctagaccaacgacacgacacgttgaagaagtgacggggagtctctgtaaacatgacgaggcatcaccatgtactgccc

SEQ ID NO: 57201 - DNA, 546 bp, Zea Mays
aaaaaatttgcggagattatcaatgttccaagaatgctctaagtcctcgccggatggcgttgtaagcctgtacgcgctgggggacgccttcatcttgacgatgacagggccctcccacttgggctccagcttgccccgggactctgtccgtgctgtttggacgagtacgaggtctccttcgctgaattccctcgggctgactgtgtggtcgcgccatgcttttgtttgagcttggtatttgtttagagcctgtagggcgaagacgcagtctccgtcgatgaggtccttcgaagtgggctcgtccatgttggggacggctgacgagactgtccgtggtgacccatgttttatttcttgcggggtcatcgcctccgatctatatagaaggcggaaaggggtgaacccagtcgccctgcactcggtcgtgttcagtgcctagaccgcttcaggtaataggtcggcccacttgccctttttgtcgtcgaggagcatcttcttgacggctgtgaaaattttgccatttgcgcgttccacaactccgttgga

SEQ ID NO: 57202 - DNA, 742 bp, Zea Mays
caagtttctaccattatttttgtattaaaaatgaatttagaatgaatttctatgattttatttgttatctggactgcgcgcaataatacaaagaactgtagggtgctatctaaaaatgccagggcctcagtgtaaggttctttcaactgcttgggactgcgggttaattcgtggaaatcccaggggttcttttgcaaagtcgtcggccgaaggggtacgggcgatctcgagccgttagatcaagcacacacgccccagattaaatcgcgactcaagtgaaccggtaccatgttgtagccgtcggatgatcgatccacggctcctatctaatagcacgaagggatatacttaatccgatctcatccgttcgttctcggatccacagctcacgttgaactgaaccctggttcctaatctgggtcacctatttctcattcaacggccgataaccaacttctattatcagccgctcatctagatctaacggcgcagcgcgtttcttcaacctcccggttctctctcgctcctatttctttcctcagccatttcgccgcggccgagcgtcatagacgcgacagcgagcgattccgagctcgccattcgagccctaactaccgcccggacgcctcagccgctcatctagctcgccaatcagcaggtaggagaaactcacccctggtaaagcggtagaccgagcagactcaaccactgctcgccgaggaggtccacgtcgagactccga

SEQ ID NO: 57203 - DNA, 583 bp, Zea Mays
tctccaatgcgtggtgtcaggaggttccaagtaaaaggaaagctagccccgcgtttcgtcggtccctatcccatcataggcagggtagaacccgcagcataccgtctggaattaccggaattcatgtccgacatccacaatgtgtttcacgtatcccagctccgcaaatgcctgcaagcaccagaaagtcacctcgaagaagaaacagtgcagattcagaaagacctttagtaccgtgagaagccagtgaagattcttgattcagcagtcagaaagacccgcacctcagaggtgaagctctgtaaatgttcagtggagcagagaaggagaagaggaagctacttgggagagtgaggactccttgaggagggaatacccttatcttttctcaaatccagtctaaatctcgagggcgagattcctttaagtggggtaggtttgtaacatcccaaaatcccaaccaaggtttgaaaccctaacctccaaacccccctattttatttttctcccttaaactctacccttagaaccccttctcatgtgcatacacttgaaataattagagcacctcacatagactata

SEQ ID NO: 57204 - DNA, 543 bp, Zea Mays
cactggacggctgagattcatctggtgctgtcgctcaatggggaactcaatcgtgaccgtcgatcagagttcctaggcgtaggattcaatcccgtgaaggtgagctcacggccgttgatgggcgatccagcgattgggatcgcgcaccggttcacttgagtcgtgatttaatccgggccgtttaaatctaatcaagcggccacaatcctcccgtaccccttcggccgcaagttttgtaaaagaaaccctggggttaatggatatcaacccgccatccagagaaccctattctctgggtcttagaacaatatgcgcagaagccccatttgttctctgatattgacgcccagtcctgaggacatataaaataggtaaataaatacagaaattgatttttaatataaaaagaattcctaaaacttgtttattccatagaaaattcattttagctccaaattgaaccattccaatttctaaaattttgtaataagattctctatcatttagtatctctgttttgacatgaacacaataagaaaatta

SEQ ID NO: 57205 - DNA, 323 bp, Zea Mays
gtggtgcgtaaggccttacaaggagcacgacattgttacttaatacgaggtgatgagcctataactcctcaccgttcgtcgtcgtcgttgcagctattccctaaccctactagcctatgagcttgggggcatcatgctttggcgcacacgtggtgctctcccatagcacgacgacgtgcgtggactaagaggagcggtgtgtgaggactaggaggagaccgatgaccttcaagttggcgcacaaggagcaaacttttccaagcaacgatttgcttcaaatcaaatagaaactacctagatagtatcgtttgattcaatttatc

SEQ ID NO: 57206 - DNA, 524 bp, Zea Mays
atgccattcaccgtgagaaagccgaagaggctcgtaatgtacgtgttgcactggccacagatgggttcaatccctatggaatgagcgttgccccgtacacatgttggcccgtgtttgttatcccaatcaatctgccccccccccccccgtgtgtgctttcaaaggcagaatatattcgtgttgttgataattctcggatacccggagaataaaatgggcgtgtacatggagcctttgatcgatgaattggtacgtgcttgggaggaaggggtatggacgtatgaccgagctacaaagacaaacttcaaaatgcatgtttggtaccagtactccatgcatgacttaccgacgtatgggctattctacgcctggtgtgttcacggtaagttcccatgcccagtttgcaaggaagctcttaggttcatttggttgaaaaatggtggcaaatattcgtccttcgataaacatcaacaatttctccctcctgaccatccattctgcctagacatcaagaactttacgaa

SEQ ID NO: 57207 - DNA, 349 bp, Zea Mays
tataattcgttctagctatttgaataaagtgggttgtcattttgaagtttcaactctaagcagctacacagtaggcgtcattcgatgattattgtttcgagtgcttttagagaactgtttcgttctgtgagtttccttggtgatttttgttgcgtttacttccgaatactttctgtgtgtggtttgtagagatcaggttacacctatatggctgagccacacccaactctccaaatgattactttgacatttcactcctatctcatccgtgttgtttgagcccatcctatatggaataatgcaacaagtcacactggttacggggcagctttatattttaattagtaca

SEQ ID NO: 57208 - DNA, 900 bp, Zea Mays
cttatcgatcaacacacggatctggggtcgacacaacttatatagagataaaggaaggcccagataagtgcaataaaacgcagagaactcacagggcagcaagcttttagccaccaccagtacttctgagcaatggatgggaaacaccttgcttttttggacattagtcttgaggcctgatgctgtgccaaataaatgaagactattcagcatcaaatttaaatcaggggggtcaggccgaagaaagatcacagcatcatctgcataaagcgaaatgtggtgttgcaatggttttgagcacaatggttgcaggagatcttcctcaacagccctttgaaccagccatgataaaatgtccatgactaaataaagagcataggcgagaggggatcaccttgcctcagaccccgttggtgcataatacgctctcccggaataccattgactaaaatctgagtagaaaaggtagccaatagcccactgataatatcacaccaaatctgcctaaagcctaacttcttcattacctcaatcaagaaggcccgagaaactgaatcgaatgcttttgtaatgtccaatttgagaagaacgcggggtgcttctgttggtgaagaaaacaggttgtttgttgcactagcatgaagttgtcctctatgaaccgattcttgatgaaagcagaatgggtttgagtaaccataagctgcagctttccagctagcctgttggacaggatcacaggagctttgtgactagtttagcaaagctgtggacaagactaattggtctgaaatctttcacattttgagccccctccaatctctactaactattaagaagctaacgtagaccacaccgtgcccccgcctccccttatcacgcgtcgtatgcacctctcattgc

SEQ ID NO: 57209 - DNA, 513 bp, Zea Mays
tggagctggttgtggtggtggaggtagtggaagattgggagagcataggtatcccgctactatttatgtgggatataaactgaacaggttgaggtaagaaagattatggcaagtaaaagactttatccaaaatgtttaagtcttgattcatcacgagattcactttcactgttatacccttccttatcgatgttgatcttttctcctccggtcttggtctcattgtttcgaggttagtgtatattatcgggggttgggaaatatggttaagatagatatggaggaggtaaaccacatggtgtagatcaaaagtttgtttgatgttaggtgaggatagattaattataccattgatcatgactctatgggttgggttaactcttatgcatgtggctgagttggtctaatgtactgagttaagttaatacctagctcagcaaagtcttatctctttttattagtatcactagtctgattaagtagaccacattagattggtttagtagatggctg

SEQ ID NO: 57210 - DNA, 403 bp, Zea Mays
cttatagccattgatgtagttgttgtaactagccgttgcgatgtaactgttgatcttgtaggtgcggactgtccacgagtgcacagaagcacaataacaactatatggtggttggaggctataaattcaccccaacaacccattcaatgacacccaagcaatccaagcacttcatttcattcctattcattacaagagcaagatcattcactccaagttacactcaaagcaatcaatagcctccaagtgtcacaattgagaagcgatcaactagccattagtgccttgtgagagacattgaagaagagtgtgccttgaatttcttgtgcactttcttgcttggagtttttcatttgtgttttcattctcatcctcaatctcattctctttgtgtaaaggctag

SEQ ID NO: 57211 - DNA, 447 bp, Zea Mays
taagttggtgtcaacaacctatttaggaccatgagatcgaggtgcctttttcttttagtggatcaacggtattgataagtttgatgcaaggtacctacttttcaatgactagtggatagggagacaaccacagaaggtctttgagcgatggttccacctcccctgaatcctccccaaatgatggacggggagaagaccaaagccgctaatgaagacattgagaatcctcctctatttgattgcaaaaccgtaattgtctttgcatctaggggtttgtttgagtttgagtgtgtcaacaagaataaagtaagtgtatctttgtttctcttgatccttgcatttgcctttccagaattattaatattccctcatttgaagtacaaaattggaagtgtcattttattgagtgggtgtatggacctaagccccattgaccagagctataaa

SEQ ID NO: 57212 - DNA, 443 bp, Zea Mays
aaagattgcaccaatcaaagagaaatcaaacaaggacaaaagtggggagaaggacattaaacaatacaagtttgaagagtaaaagggcatcaaattcctagacaagcgaagcatacaagtaggggcaaggtcttggatttctttaatttattgtgcatttgtttgtgcataacatgtgcttgcttgcatagtagttaaattcaaaagtatatacttgtgtgtgatgtttgctatacaatagccttgaatgatgcaattagcactagttataggcgtttattaaattgtgtgcttctaaatgtgtgttaagtatgcttttgaagtaataaaaccatgtttcaagtgatgtctagccaactacgatactaaggaggttccattgtggtaaacatgctacaaaggtatgtttatataaaccttagcatcacttagtagtgataatt

SEQ ID NO: 57213 - DNA, 555 bp, Zea Mays
ggtctgcctagtgtaatgaggcctttgaacagttgaaaagattactgaccactgccccggttttggctcaaccgaatattgtgaagccatttgatgtatattttgatgcatcaggcattggacttggatgtgttttgatgcaagaaggccaagtaatagcttatgcctcaagacagctgcgtcgacatgaggaacattacttgacacacgaattggaattggccacagtagttcatgcccttaaaatctggcgtcattatctgctgggaaatgtatgtcatatgtatactaatcataagagtttaagttacattttcacccagtcggagttaaatatgagacagagaagatggctcgagctaatcaaggactatgacatagagatttactatcatccaggaaaggctaatgtggtggctgatgctttaagtcgtaaagcattttgtcattgcctcactgtgggattgcctgacactaccttatttcaagaaatggaaagactaaatcagggaatagtgcaacaaggagccttgatgcacttgaagcttgagtcgg

SEQ ID NO: 57214 - DNA, 731 bp, Zea Mays
cgcttgccaaggcaatgaggactttaattatatacttatattcttataacatcccaagtgttattacaactatgatggattcgaagggtaagtatcctgccctagtctatagagtagttaatataactaggcggtcaaataagaggaaggcccgtgcgcttgagacggggtggttaacatgaccgggcggtcaaataagaggaaggcatgtgcgctcgagacggggaagggggaggatgccatgagggcatctccaaagttgaagaccaaagcagtgtcgaagggcacatcgaaagctcaggatgctgatgtggggcccactgtggtgcttgatgtcaacgattttgacatctctgatatgggtctgggcacaaaggtagggacagagtttacatctccgtcaggtgcgagtatatatattttattgtgattgatattgatggggttgtttttaaactcctagcaaacatagggggtgtcttggctaccgtgtgccaccgaaggggaccttggaggccatgtatgcttcactgcgtgtaagactgactccaacagaggccatgcaaatagagcagccattcaagcctttggctagcgtctctggtttgcctgtccagccatatgacacacgctttcaacagcaaaggcaaaaaggcagcggtagtatagtccaacaaatggagcagatggtgcggtcatgttctcagacatagaaaaaggaaatggctgcc

SEQ ID NO: 57215 - DNA, 656 bp, Zea Mays
ggtaatttgtgttttcattatgtgtattggtagtgcaataagtacctaattcaataagtttgtaatgtgtcgtggtcatccagtcaagtatgtaatggtcatttgtaatgacactcctatggtccatctgcaatccacaatcagagctacctctggtaatgcatatgaagtacaccagtatgacaaatgtcacaaacaaataaacattcattccaacaaattgtttaggtactagaggaacataacaatgtctgaccaagcaaacatgatactagcatattgtcctcatcaccagacaacattattgactttgatacgaagtttcgaaaaacaaatagttcgatgtaataaacatgatacaaccatgaatcatactcactcgttacctgcagtcgtgcccttaatccttgttaggatttcatgttgcttcacttggtgtactctcgaagcaacatgttgcatttgttcagatccatgctaaggatcatatccttttcctccttgtcctcattttctttctgcatgtccgtcctcacatgctccagattcaacttctcctctatgatgagcttttgtctgtgaattttgtcatatgcctccaactttctttcttccaccgaagcaactaacttgtaaacagacaatcgttccaaaga

SEQ ID NO: 57216 - DNA, 411 bp, Zea Mays
ggaaacacacaagcttgagcaggttcgggtcgctttgagaggcgtaataccctactttttgtggtgtttttctgtatggggatgggtttacaagttgtgactggtaatatgatgggttgttgatgagatgaaaatgataggggcgcctcctggccttatatacacaaccagaaagggtccccgcacaggtgttgattacaatctccctacttatcccctaattagtagcgaacagtcttccattattttggggaaatccggctctcccgcgcccgagctatcgccgacggttcaggatgtcgggcgcgcggaacaaacccgacccgacatattcgcgcttatgccacggctaactcggacataggcctctttcacctctagactgacatccttctgctggttccattttcc

SEQ ID NO: 57217 - DNA, 441 bp, Zea Mays
gacgggtggtgatggatcggaggcgagcgtgtggcggtgtaggggacgagaagacagcggcggtgctggtggagtcgaaatggatgagactattaagatcccggactaatatatagggcaacaaaccggctgccgccagggccatgctgcgtttggatattgcaatagccaatcggacatatacagctgtaacagatctatctctgctgtaacagatctatctctctctatgttggtttcaattgataaggtcaagtccaactgccagtatctggtgtattgagctgtttgtggcgtgttcaatcttactatgataatactccttccactttagaaagaatactagaaaaccacgcgcggcgttgccgcaccgctatgcaaatggtaagatattctagtgtagataaaaatcaacgttagatattaactcacatatacgcc

SEQ ID NO: 57218 - DNA, 481 bp, Zea Mays
tcaacttccagtggaattttttggattggggcaacccgtgccacacttccaatttgaccttaacatccctcccaatggtgcaattgaaatagaggctgaaaatgccaacaatgctgatgatggttgggacccttggccggttgaacaggtccagcacgaacagccacctgtgcctgtaccaatagccaacaatgaagaagaacaattcagttaccagttctccggtcttgaggaccttccttcagatgaatcagtgggtcttttcaacgatatcgttatcccgcaagcagtcaacttcccttaggaggatgtccaagatcatgaagttgctgtgcttgctctaccagccctccccccagcggacccgtttttggagggaaataacgagcagaacgatcagggcgagcaaaatttgaatctgaatgttgatgaaaatatcattgtgggctgcatgacacatctggatcagccctctcaggac

SEQ ID NO: 57219 - DNA, 1108 bp, Zea Mays
agcacgatcggtgctgggtccatgccggcaaggcctgatggctagtgtcgtgcctatgccgagcacgctaggccggcacgggcacaacccaattagctacgaagcatgtttaggaccgctcccgagttaacctaaatcctgtcgccccctccccccattgggcccgccttgtcagtcacacactcgtttgcctcgcccgttgtctctcgcgtctcgtcctcgttctctctgtctgcttcgggcgatttggggacgattcgactccgctgccgcctcacctccgggctctagcctccggtagggtcctccaccgctccacctcacgtctccctggtttcccctcacctggtggctgcctggctggtggttcggtcatggatttggttacggtaagcttttggtgttcatcatgttttttctctagtcgacgactccgatgaggttgagacttcttaatcctgtgcttgttcttgtgatctgtgctcgaaccccgaaccctaatctactgtgttgccttcttgctctgtgattgtacctgtgaggagccgatctggtgttccggctttagtaagtgcttaatctggtgcttgttcttgtgatctatgcttgtgatctgtgttcgaaccctaaaccctaatctactctactaccttcttgttctctgattgtagctacccgtgaggggccgatctagtgctctggctttggtaagttcttaatccggtgcttgatcttgtgatctatgcttgtgatttgtgtaccaaccctaaaccctaatctactctactaccttcttgttctatgactatagccacccgtgagggaccggtctggtgctccggctttggtaagttcttaatccggtgcttgttcttgtgatctgtgttcgggccgatctagtgctctggctttggtaagttcttaatccggtgcttgatcttgtgatctatgcttgtgatttgtgtaccaaccctaaaccctaatctactctactaccttcttgttctatgactatagccacccatgagggaccggtctggtgctccggctttggtaagttcttaatccggtgcttgttcttgtgatctgtgttcgaaccctaacctaa

SEQ ID NO: 57220 - DNA, 743 bp, Zea Mays
tttttctgcgtggaattttgcgtttatgagttgacttcgtgattttaggggtccttgcatacttttttttttctgattcggctgcacccttggacaacttttgtttggattttttgtgtctctaggatgattttgcacccttaggtgtgttcgcacactttttgtgttgatccggctgcacccttggacaacttttgtttggattttttgtgtctctaggatgattttgcacccttaggtgtgttcgcacactttttgtgttgatccgactgcacctttgagcgacttttgatgtactcgtgcacttttttgtggtggtccggctacacctcgagggattaaatttctctttggggagttaaaagaatagagtggattaaaggggcttaattactacctcttactcccaagcaaataaaccttgaattatattttatgtgaacagagatactagtagactcgaataaaatatacccgtagccagtgatatgggtggactagcgaagggttccatcggaaggtcacgtgtgcagtggttggcgtgttggagtctttgcaggacggcaatgccggtgggcggtggcagatcagtggaagaaaagactataaaaaacattgagacgagggcgtaggctgcgtagcactatagaaaaaccagggctaccacgcctagcttgtgacttgtgaacaggccgatgaacaaaaacgtttcgataatccttcaaaagtgagaataacaacaa

SEQ ID NO: 57221 - DNA, 1146 bp, Zea Mays
gcgaggaggagacaacaccatgacggggacctgagcttcgggcggatccagtccttgcagttgggcttccagggctgcaatcctggcgttgggcattctccagctccaagtgcaccctagagagatccagggtggcactgtccaggtcggtgttgagaccggccactacaccagctagggtgttgaggcgatcctcaccagcttcacctgggacgatgctggtctgacttcctccacgcagacgctgaggaagatgcctgaacctcatgttctgcagctactgccggtaggtgtggctgagcgaccacagggtccgacgggcagcgtcgctgaccgaggcagtgtaggtggacagtggtgtcagggactcgtgagcagacagagttctgaatcccctgtcccctgcatccatcaccctgacgtggatgcgagtgatgtaatagcaagcccgaggaggctcgctcactcgccttgtttcgtacagggggcggacgtaggtgcctagcgcgtgcagcacttcttgcagtaggttggggaagtgccctgtctcgaacattgatgtataatgttcgacaataggatcaaaccccatgaagtagtcctgctgggcgtagtcagcttcctcgtggacgtgttcatctccaccttcttcgtcgtcgtcgtcctcgtcatcgtcgtctccggagtcgtcagggtcgttgcctccgggtgcaggtgcttggaaggctggtgcaggcggtgctgacgttgatgacctagctgcgaaggccagggactctgccaacggggtgggcgtcggcagctgctcctctgagctatcctccaggttgactacattctccactcggatgggagggagatccgccggaacttcctcgactaccactgggtagaccgggatctaccgaggctgaggggcgtagctggtgtagatgtgggtagtttggagagtacgaaccatctacaagagaagagtcaactcagttgaaattttaaagaggtaaggctgataaaataagttataagaatgaaattagcaagttttgaataactaggctttccatttctaactaatctaaccgcctagggtcagcatagctttgataccacttctgtcacacccggttctagggggtagaaccgagc

SEQ ID NO: 57222 - DNA, 1724 bp, Zea Mays
acaagcatataggtctgtactgttctatccttattgcctcagccaactttgggattagaatgatcgtcccaaaattgaggttgtgcagcggtagagagcccctattgaagtcctcgaacagagccatcaaatcctccttgatcgtttcccagaatacctgataaaattctgctgaaaagccgtcgggaccaggcgctttgttatgttccatctggaatatcgcatacttaacttcgtcaatggtaaagtctgcggtaagactagtattttcctcctcagtgatttgcggtatatcctctatctgtctatcatccaagtggacattggattcatctgcaggaccaaagagggatttatagtaagatgtgatatgctttttaagctcatcatctccactaattatccgaactccatcttgtagtttataaatcctagtcttcctatgtttaccattcgcgaccagatggaaatatttagtgttcgcatccccttccagcaaacctttagtttttgctctctggtaccacttaacctcctcttctcgtaacatggccgcgagcctattacgaagaaaactgcgcatgtctacttcttgtgtagaaagaagacatgtttcagctttcttatcaagggtgtcaagtttttggagaatttctttcttttccttcttatttgatccactcgtgttttttgcccatcctctcaagtattgtcttaacttccttatttttcgctgccatctctcaatggcagtatctccaccatactcctttgaccaaatttgagtgaccatctcccagaatccctcccgcaacagccatccaagttcaaacttgaattcaggctgtacggaggaagcaaggttatcgccactatttaaaattaaaggggtatggtccgagatatctctagagtgagcaactactgtggacctaggaaactttaattcccattctgtggagacaagaatacgatctagcttttcatatgtgggaatagatcttgaattagcccaagtgaactgtcttccggacagttcgagctctctcaaattcaagccatctattaccgcattgaatagaaaaggccatctcgaattaaaattgtcgttattcttctctgatgagttcctgagaatattaaagtctcccccaatgaggattgggttggtaacatggctcaccatattaaccagttcggctaaaaaattctccttaaggttatcctgtgccggaccatatacgcacacaagagaccatttgaacccatcatctttgttgcgaagaagaaatttgacataaaagtctccctcatctatcgaacctatatcatacacattgagatcaatacccataagtatacctcctgaccgtccccttggttccttgcaatgccagatgaactctctaccagcacaaaggtttttaaggaacgtatccgaaaaaacattcttgccggtttccgaaagcgcaatgaaactaaggttgaattccttagttagatcagccacaaagcgatgttttttcgggtctttaaacccatcacaattccaaaagactcccttcattatgaccttcttttatttttcctcactttcctactctttcccatcttcattcctctaccatatgcagttttaacagaggatgatggacaacctgactcttgccaatatgggttattaacaaggtctacatccatcacttcatccgttatttctccac

SEQ ID NO: 57223 - DNA, 529 bp, Zea Mays
tttttatgtaacttaacgaggaggtataaaatcaatgtttgcgaaacttcctttaagaagcttcgtaaatttcataaagttgacagctagttttattttttggatgaagaagctgaaatgaaaccagaaattttgaagttgaaccctcctaaacagttgcttaactatggctaagttataaaaataagtaacttattatttgcctaaattttagtttatagtaaaacatggtcaaatattaaccaaattttggtatagacacataaggccttaatccaaacagacaaatattcagttttttagtctggtaggatggtatttcagtttggtaccattagaaaatgactatttcattagcgtagagcgaactccaaagttccggccggtgtgttcctcttccacggcctttgctccaggccttcagccccaatgtcggttgctctataactaggattcacctccccggtgccgtcgctgctcagctcccagtcctcaccgctccgccgagtttccgctccctccctcctgc

SEQ ID NO: 57224 - DNA, 584 bp, Zea Mays
cttcactgataggtaaatatgtatgacaatgagtgaagggagtgcttggtttgaagtttggcagagggaaaataattttggcacccggctcgaaaaggatcgccaaaaatatgaataggatgtgtaaccggtgcctggagtattggatagtcatgaaatttggcatgagaggtaatggtagtagctggcgtgtgctggaaaaaattgggttcgatttgagcttgtttggctggtttgtgtatttcaccgagcacatggcgtgcgatgttttagaaaggcagaaatcaaagctttttaaggtgtgaaacccccaaggggatgaagcacccgcaagggaaggtacactagtgcaccaagatcacatagagcactggattcacatgatttcacagagcgttgattggatttgaggggtggaagggattcttcaatggagaggaaaaacagagagagtgaggaagaaggagagggtgaagctcaccatggaggagaggaagaagccgagcacgggcagcttgccagagatcggaccaaagtgatcgccggcggtgaccaggtggtgacggtgagggagtgcactagac

SEQ ID NO: 57225 - DNA, 524 bp, Zea Mays
aaaaaattaggtaaacatcatggtaaatatggagagaggtcaagggtcaaaggtgataataggcaaggatataaaggaagaggtaaatgtgcataaaaaagaggaatctaggtacaatcaagaatatagataagataagtcttgcaagtggtaaagtataggatataaccacgagtgagataagtaagagaccacgcttgaactaaagtgggagattggaggttttagataacgaacatagcataatcaccaaggtaagattgagagatgagaatggtaaaggcaataagaaacaaaagcacaacaaaggatgaggttacaaactcgcgagccaaagaagaggatacgaccaagagaaaaaaggtatgagacggaagaggggcgattttaaagggcaggtatgagacaaacatcaatgtaggatatagaggtgtcaagggtgcatatgataataattaaaagcataacaaaggatttagttaaggcaagactcgcgaaacgacaaagtggagaaaacaatcaag

SEQ ID NO: 57226 - DNA, 854 bp, Zea Mays
gtcaaattcataaaaggacaggggcctaaaccgaagttttctaagactcaggctatagttgccgaggacggtgggttgatttccggagaggttagggtctcttttacaaaacctacggccgaaggggtatcgcttaatatcggccgcccgatcgctgatcgaccgtccggatctgaaacgaggcgcccagattaaatcgcccaaagtggcgaagcggtacactgcgcaggccactggatcaggaatgcacggtcacggtttaatggagtcagatctaatccgagtcgtgggatcacagatctatggttatgattcaatcatgcgaatgggtacataaacatctaatctcagcccttcatcaacggatcgacgacggtcgacccttcttcctcccaggcagccgagtctggcggcgcgcgctagccacggcggagtcgtcgccggtggaaaccaatccagggcaccaacgcccaaaactctaattcgttaggttctacactacggcaaggtccgggtgagtaccactcagggttttattaccaaagatggacgacagtggaggtcaatcgtggcgcacagcggtgcccaaatccgtcgagcaattcacacgattagaccgatcggctacctcataccggaattttgagttgcgcagtcgccggtccatgacgaggtgcggcgccgtagggttcgcccgctccggcgaacgatttgtgccgcgcagggccaaattaaaatgagggagagtcgagggcaccttctccgttgtttggggaggagcctgattccgtacttcgaggtcggcaacggcactgacgggatttccccaacggcggcgccgattcctatttttc

SEQ ID NO: 57227 - DNA, 277 bp, Zea Mays
gttcgatgagccaaacgatgactggctgaaatgcatcgaagttacaagtgatgaactgcttggatcatattccaaggcagaagataatgcattatccacagccttcagaagtcggggaaagaagagattgaatagagtttttgatgctattggcttcgtctaccccgactaccgctacccgctgcgggggctagggaagaaaagaaaagctgctgctttggctgccccagctgagactatgccgaaggctgcgggcgaaaagatgaaggtacttacc

SEQ ID NO: 57228 - DNA, 372 bp, Zea Mays
ccggctccgagagcaatagaaggccagagtcaagctagaacaagaagcaatttggcacgtactgacctgaggagtgctggccacggagggattcttcacggcggcgctaaagacagggaggagggggatttgtggacagtctgagttctccggtggaattgagccgattactcaagcgatggggtgtgcgatgtggtgaagaagctgtgcccgggctcaatttataggctgatggccggagatggatgagattcactaagctgtacccgcgctggcgagctcaccgcacgacagagccacgacgaaagtccggtgaccgctgattaaccgggcagtgccaccgcaacgttttagcgccacgtcgcagatgat

SEQ ID NO: 57229 - DNA, 697 bp, Zea Mays
ctggtggtcttcgggttgggtggtcgggaatggtcggcagcgagggcaacatagcctttttggtggcaagggctgccctggcgtcatcgtcatttggtggtgggctagaacgagtgctcttcttgggggcatcgtgggtttagtcttcatcgtacgaacggtgggcgccaaatgttgagtactgacacgtggtcaggtgggcccaaacacttagagacagatagagagtacgagagagcgacaagacggctggtgggaactatagcttctcgttatgtgtgtcccatcccgctacaggacggtggtatttataggcccgtccatgggtaggtggtccaaagtatggttctacccctggttaccaactacgtctagggaatattccatgtaacgaagtaattacagcaccgtgcgtacactagacagtgcacaccaaataacacacccacaaactacgctgataggtggacccctagggatgccctccggtggactggtgacatacatggcctctctgtagccctcgcccttggagcccttgcgtcatggtacccttcgttgagcctagtcaaatgaggagcagtggagcccctagggcgacgcagtcggtgaacaccctgtcctatgtcaatcgctctgtggcctctaccgttgttaccacttgttgtagtcgcccactagattgatggccccttcg

SEQ ID NO: 57230 - DNA, 525 bp, Zea Mays
agcttatcgaagaccagggttaagtattccactagggtcgaccctctcttagtcttgaccatgatgtcatcaacgtatacctctactctgtccctgatcaggtccccgaaagtcttactcatcacccgcacaaatgttggcaaggcgttcttcagaccgtaaggcattacgacatagcagtaaagctcatccactgttacaaaagcagtatgcttcctatcttccctagacatctggatttgatggaaaccagagtaagcatctaagaaggacaagaggtcgcacctggaggtagagtgcacgatttgatctatacgtggaagtggatacaggtccttgggacaagccttattaaggctggtgtagtcgatgcacatccgaagcttcccattcgccttggggacgatgactaggttggccagccacactgggtgatgaacctcttcgatgaagccggcgtctagcagcttccggacctcctttcggatgaagtcctaccgctcaacggactgtcttcgaggcttc

SEQ ID NO: 57231 - DNA, 468 bp, Zea Mays
atagcatttgtttgaatgtaagtgtggaaataagggggatagcatttcccgctaacctcatagtaatgggtactcagggaatagatgtcatcctagggatgaattggctagataagtatcaggcagttatcagttgtgataagaggacaatcaagttggtgtccccactaggagaagaagtggtgaccgagttaatcccgcctgagccgaaggaaggaagttgttatcagatggctgtcgatagcagtgaagcagacccaattgagaggatcaagattgtgtctgagttcccagatgtgtttccaaaggacttaccaggtatgccaccagagcgaaaagttgaattttccatagagcttcttcctggaaccgcccccatctttaagagagcttacagaatatctggaccagagttggttgaacttaagaagcagattgatgagctatcagagaaaggttacatccggc

SEQ ID NO: 57232 - DNA, 422 bp, Zea Mays
tgcagggacgttggtgctatccaatcgagagatgtctaaagactattcaaaagaaatgtagaaataaatgcaaaattgaggctgacattgcagatgcatacattctagaggaggtgtcaaacttcacaacaacttattatggtgacaaactgccgagtgtgcataatccaccccctcgttacaatgatggcgacaatgaatcgaaccttaacatatttcgaggccaactcggaagcacaagtggctcaaccaccaagaacctgacacatgaagagtggcagcatatcatgctatatgtattgactaaccttgaagaggtgacgccacacattgaacaatttcttcatgaattctgatgtcgatcaagggactccactccataggaatatgacactcttcttagaaagggtgcgagaaatggg

SEQ ID NO: 57233 - DNA, 850 bp, Zea Mays
attggattcatgccaatcaatgtataccttctacattacatcaaatgttaatacaatgggtaggcgatgatgtagaacaagtacatgctgatgtatcggcctgtatcgctgtggccgatgcccctgtactctggacttatgagactgctacatgtctcacaggagtagatttttctgattatcagttcataagtatagataagaagggtttccttcctgtaatgctaaagccgatggagaatcagctaaatcctaaataaagtttaaatgatgagtacacacaaagttcatgagtctttggtcacggacagttcggcttctaaggccggatggtctggtctttcataaaacagttcggactttaagaccgaacatctacctcagcgtaaagacagtgttacgaatgacccggtccccaagaccggaaagcccgccatcacacaaagatcatctgattcctctgtaggggacatgatagaggaattcaaagatcttgataaactaggacaagggtttacatcggctgatcctttgaaggagattgacataggagatggtaaaactccaaggccgacttttgtaaacaagaccctggagaccgatcctagaaatgagatgatcggtctattgaaggaatattcagattgctttgcttggaattacactgagatgcctagattaagccgagagatcgtagagcatcggttgtctattaagtccggtttcagacctttcaagcagaaagctagaacattttgtccagaccttctcccacggataaaggacgaaatccaccggctgctagaagctgattttattagaccttgcagatacacagaatgggtctcta

SEQ ID NO: 57234 - DNA, 469 bp, Zea Mays
ttttaaagcttcacatttatgagttgatgcgattgttgacaaattaacctcattcgtcattactatgagcaggaccacttgatgattcttcgctttcattttcattccttctatttgtgttataaggcatgcaggagcacttcacattcattaaggcaggagcgctgcccattcattaaggtaggagcgcactaagttcagtacaagcaaacacctcttttggtgatcaccctgctctgtattgccaaacgcccagatcctttgattttctcttttatttgttcttttttggattcctatttgcttgttgcatgttgtgcttatgcttggtaccacattgatggtttgtgctcatttgattttgtagagtttgatgacttgaaagaatctgcattgtgggactagcaaaaatgacctgctcaacttcacaatagatggtaggctccttgcgcagagtgcggcactccag

SEQ ID NO: 57235 - DNA, 908 bp, Zea Mays
tcgactttgacttggttaaacttggaatcagaacacttactcaaccaagggtgaccactataccctactaacggagcaatcggcttaagtcggcaatgacttaagacggtgcaacatgctcacgcttactcgacttagggtgaccactataccctactaacggagcaatcggcttaagtcagcaacgacttaagacggtgcaacattctcgcgattactcgaattagggtgaccactataccctactaacggagcaatcggctaagtcggcaatgacttaagacggtgcaacatgctcgtgcttactcgacttagggtgaccactataccctactaacagagcaataggcttaagtcggcaacgacctaagacggtgcaacatgctcacgcttactcgacttagggtgaccactataccctactaatagagcaatcagcttaagtcggcaatgacttaagacggtgcaacatgctcgcgctcactcgacttagggtgaccactataccctactaacggagcaatcgacttaagttggcaaagacttaaggcggtgcaacatgctcacgcttacgcgtcatagggcgatctctatgccttaccagctgatcaattgtcataaattatgaaaagactccaaaaaccagcatgccacgcttacttctgcaaacgttcatagcgatcgttgaattctaacaatagaaacaaaatgttatagctttcaacaccaagaacacatcctaatatcctaccgagtattcgaccgcactgatcacacacacatatagttcacaaatacatttagtatcttctaaacacagcaaaacatctctatttggcaatgtctttcgcaggagcaatcgaggaggaagggcgactcgaagcattaggcatagcctttgtaacacc

SEQ ID NO: 57236 - DNA, 564 bp, Zea Mays
taattcaaggaaaatacatgtcaactacgttaattatggatataatggtacgaatcccttaaatttcgaatcaaaatgatgtgtcatgatcgacgacataatcaactcttggttgctatcattagatcgacatgtgttatagtaacgataaaaggggggctaccagttgaagaccaacgtcacactagttaagaagttttacccctcacatttcttcatcaatcatcactagtgcggtatcgatctaaaggttgtgccatatgctacgtctacgctaattcagaatgcagttaaaaaaggtcgtagagggacagtgccgccggaggccggaggagatccatcgtccacataaatgcacattcgacgccaccacaagcaccgtaactcttaatttcgagtcgtctgggtatgatatgtgcactgagttttgtcattgaagtgtttaggctctggcttaaatcctttgccacttattagatctaacaaaactagcttgtggaccccacttttgcaagggtaacatagtctttctattgtccttagagtctaccaccaaataaacac

SEQ ID NO: 57237 - DNA, 1493 bp, Zea Mays
cttcaactaggggcagttattcttgaagtgactggggtctccgcagtgccaacatgcatttgctggcgattggttgcttgcaaccgaggggggctaaaaggaactctgactctactggctgaaacgtgacggagcgggtccagctggtctattgaagcttggtcccttgggtggaagctcgaaggatcgagctctctggtgtcggtcttgctgctgagctcggagaacttggaatttcctcttgaggtgacctttttcttcttcttttgccctttccacttatatggctttgttggagaggtgcgagaagctgaggaaatcttggctggcgaggatggtcttgagttctggtcttagccctttcagaaaacgggccatcttcttggtttctgtgctgacatcgtcaggcgcgtaacgagccaactctgggaatttgtgcacgtactcactcacagatcttccaccttgagttagttcccggaattcatcttccttgagctgaatgatcccctggggtacatggtgctcacggaaagcagtttcaaattctgcccaggtagcgtcccttacggccgcgctaaaggtatcccaccatgctagggccatcctagaaagttgatgagcagccaattgaacacgctgattttcagggcatccgatggcttccaatttcctcttgatcgtgcctagccagtcatcggcatcgaggggattgctggatccagcgaacgtgggaggcttgagtctcagaaattctcccatcctgtcatgtggtcttccaccacctgggcgctgattctccagacttctagtgaggacttcaacgagtcgggtttgattggctagaacttgggccaaatctagtggtagttccggaggtgcggggaggtgggtctcactcccttcttcgccagcttctccttctgctcctagggcaaaccctgctccaatcctggaggcggtaggcgtggttttatccgaagccatctgccaggggaaagagttactaccatgcacatgccaaatttttttaacaagttactttattcattacacaagttcattacaacatacaactaccataagttcattacacgcgagtgctatctagggtactcccaaactccttctctaaagtgtccccaaattccttgaggaggtcatcaaggctagctagggacatttcctcggtgtcgaacgagttctctatcctgataggaggtagggctggaggggcttcttccttctgctcagtctggcatccttggcttctggtcttcttgcggattttctttgcaggggcgagcttctttagcttcttgtcgtaatccatcttcagggttcgataggcttcacaggtgttggtttcctcgccttccactatctcgagactctcttggagggacgccttttcccttgtaagttccctgacttgttgctccaggctttccacccgggagtttaggtgagtgcagtgggaggcaaggtcatca

SEQ ID NO: 57238 - DNA, 1085 bp, Zea Mays
tggcgaccagtatgtgagtataccctcgttgagcttttttgaaagacccgatcatgtccagcccccatcatgcaaacggccagatcacatgaatagtttgcagctgctgcgtcggtaaatattgttgttttgataagaactggcacgcctcacacttctagactaactcaacaacatcactcttggtggttggccagtaaaacccggatctgaaagcttttcccactagagtccttgatgcagcatgcacaccacactgccctgcatgaacttcatctaacagctgtctcccggtagctgagtggatgcacttcatggggacccctcctgctcctcttctatacagcaagccccctacgattatatagtgggctgactgtcttgcaatgcgttctgctgcagccttgtcgtccggttcctcttcgttctttatgtacctgatgatcggctctctccagtcattgggatctacctctggctgactcagggcattgcactcttccacctgatctgtggtgatgcttggttgctatatttcttggacgaagatcctaggtggaacttgggcttgactggaccccaccttcaacaatgcatcagctgctgcattacgatccctttccacatgatggaactccaatccttcgaacttttcttccaacttacgcatgactgcacaatatttgcccattgagtcggtcgagcagtcccaatctttgtttatttgacttatgaccactagtgaatcgccatacaccatcaacttcttgatgccgagtgaaacaacgatgctcagcccgtggacccgtgcttcgtactctgctgcattattggatgctggaaacaaaagctggagtgtatacgtgagtttctctccttcaggagcaataaagagaatccctgcactcgctccttgcagcttcagcgagccatcaaagtacattctccatacttcagcaacttctgggctttttgggacctggtgctcagtccattcttatatgaattcaaccagtgcctgagtctttatcgccgtgcggggtcggaactctatgtcgtgagctccaagctcgcatgcccacttg

SEQ ID NO: 57239 - DNA, 583 bp, Zea Mays
gtgaaatatgtccctgaaggcccactctgtcgcgggttattattgggcgtgagcagcattatcggtgccctcgtgtcgggtaagaacactcccttggagttcgcgttggtcttctatgtgtgcagtatcatcaggatcataggttaccaaccaatgtcggtggggcgagaaatccggcttggcgccaccgtgtgatgtgggcgccgccgcactccgtctgtatggtgagggttgggagaaaacggtcctgagcctttgacttcggaatatgtggcccaaattccaaacaaaataccccttcactcgattaaatccgatccgttggttgtgggctgagcgatcgagattgggttagggcgtggatgtctcatggccatcagatctttatccaacgacatccattgtgtactggttcggggtttaggaaaatttaaatgcgaccgtcagatcgagatccagcggctagcgtacgccgataaaccttcgccgtggcaaaattcataaagagcccttggagcttttcataaccaacctgcgatccctcctatttaaaagaaccttacattcgagccttggtatttgt

SEQ ID NO: 57240 - DNA, 507 bp, Zea Mays
atcgactcgaggcacccccgcgcatggcccaatagtgacattaagtacgatggtcacgggccaatcagccgtgggaataggcatagcagttggcatgaccatagacgggccggcagtaattgcatcaacaggcacgtaggagcagcagtccaaccgccaatcagactctggtcccacctgcatgctcgcatcctcccctgaggcgggcccagggggcactgtcgataccctgaatcaggggtaccctcttctacagtatgaaggtgctgcactcgtacgacacctctaggtcatacggagagcggcacccgaccccaccacatgggcagaactaggggcaccacgtggcaaggaaagataatacgtcccgtggtgcatcgatggatccggacctccgagggacaccagacccctatgcgaacggttccggagctcccaagaaggcatgccgggtccctcgagtaagggccaggccttggcaaggtctcgggacgaggaggaccccga

SEQ ID NO: 57241 - DNA, 395 bp, Zea Mays
attttaaggggggtagaatttgtaacacctcaaaatcttattgtggtgattagaaaatttctatgaaatatttggattaaagatggtttgtccttgaaactatttttctaaaaccaaataaatgggaaaaataaaatattagctatttgtttaaatcattttaaaacataagtcataggatgaatacatgaattattgtttttttgggagattaggtggtttcaaaaaaatagaaaagttatttgatttttaggaagcatgaactacgcattcaaaattaaactattaattaaaggaataaaatgaaccttgcattgcatgaccggtaaatttatttgtttgttcattttaaataaatcttgaaattcaaagacctgatttgaattgggattcaa

SEQ ID NO: 57242 - DNA, 1153 bp, Zea Mays
ctgcctctgaagtagcatccgattccaatgcgtcagagacagagctccttctgggacggaggcaccttgtgatcttaattgactagccatcccatcgaccaaagcctgatattgaaaacaaatgagtacaaagacagtaatttgcctagagtatagctagaacaggaaaagccaaattacctgaagattagagaagaataaaggaaatcccaaatcatgagaagccaggtggtggctcgacgaaggaatatcaaccggggcaatttgaagaacatcactagagatcaactcagcaccaccagcaggcatcagaactctagcatccggtgcgccgacctctaaggcgacttcctcatttgaagcatgcgctattaccatgccctcagaatgtggaggagaagacccaacgtggacatccatggaggtatgagaaggggagcccgcttgaacaccctcgggggctgggttggagcccgcactacccatcggagccagatcaccaccggcaacaccctcgggggctgggttgcagctcacgctacccacccgagccggatcattaccagcaacaccctcgagggctgggcaaccgctggcaccatccttgaggactgggttctctgcaacagccacctctaaggctgaaggactctcagtcacctccataggaattgaacaaccttgaccaacctcttggctccgaagaccgccttccaaggtcaatgaggcacaagacgctactcgggataactctaatcccacgtctagaatatcagaacaaacgtccatcatatcaccgtcagttggctcggacagcatatcctcaggaacgacatcctcgagagcctgatcaaaattggctatggataattcttgcagaccaacaagagcagacaaagctggagaaggaatatcgctactcccccactgactctgtgacgccaactgttcttccgaattaaggggacttccacttcttcttcctcgtcctcgtcaacaatacggacaataaacggcacagggtcacacccattgggatcagctctgacagggtcacacccactgggatcagctctgacagggtcacaccattaggatcagcataagcaggaccacaaccattgggttcagtttgccgtcgcccatgccgtcg

SEQ ID NO: 57243 - DNA, 757 bp, Zea Mays
tgggaaaactcaaagccagaggctcatcaccaatccagaaatttttccaaaaactagtacgacgaccattaccaacagccatcttaaaatgcttaaagaaactctccctgagatttaagagttttttccaaaaatgtgagtcagtctgtctttgattaacagaaataaggggttttcccttaatatatttttcagcaattattctctgccataagccattagcattttccaaattccaaagccatttggatagcagcgcatcattcatagaacccaaattcaacacacctaaaccacctaagcttttggaggagcaaactgtctgccagttaaccaaatgcatcttttttgcctgggaaccaccttgccaaaggagactttttctgagtaaatccaactttttaataaccgatttaggagccggataaatcgataacatgtacagaggtacattagaaagagaactgttcaaaagggtcaatctacctcccagactcaagaatctccctttccaaccagccagccttttgtccattttttccaacataggacaccaaagagatttactaatcttcttattgtcaattggcacaccaaggtatttcattggaaggctaccaacaggacaagggaaaatgtcagcatataattcagtgaattctttagcatcacccaaacaaaaaatttcacttttgtgaaaattaattttcagcccagacatatgttcaaagagacaaagaatgaatttaagatttct

SEQ ID NO: 57244 - DNA, 381 bp, Zea Mays
ccaagaaaacattcaaggtttgccaacacctttatttatgagcccacaacctcaactagcagttggaagattccgcccaaaaaatggaggcaccaaatatgtttgatggagcactagagctcacatcacacgacaaatagttcccctcgaatagtaacttgaaaaatagtcatttgaatagtaagacatccaatggagaagttcagtgctcacatgatagccctagtaagtgtcaacaactaacttcccgcagagcagcctctcttgtagaatggtgttgtgcaccatcccgtgcctgcactggacatgtcatgtgcacaatctcaaacaagccatcaatgcaaattgcactctagtgttctaccatagggagcatcagac

SEQ ID NO: 57245 - DNA, 509 bp, Zea Mays
gtgaaattacgctctcttatgtcaacataatgtgcagtagaagccccgacccctttccccttccagagaaaaacactaaggtcggtcgaaggaccttcttcttcagtatgataccgtgttggctgagcattcacgttgttagtgtgtgataaatactgacttgagaagattgtgatctctttagctgcaaaggcctctgcgatacacccctcaacccttgctttgttccgcacagtagctctaagttttttcaattctctttcttgactatacatccatcggaactgcactggtcctcctaccaatgcttcataaggtgagtgcactagcaaatgttgcatcacattcataaatccaggcagaaatactttttccatcttgcatacaagcaccacgatttgtttctcaaattgaatcatcaatttctttgagatatgcttagcacatatatgtctatatatgtaactaagttcaacaatcatcttccacagaggaggcttcaaatagcc

SEQ ID NO: 57246 - DNA, 1025 bp, Zea Mays
cactcacattatcacaatacataatggtcgccgaagaaacggagatgtgaagttcttgtagcagttgttgtaaccagcatactcggcgatggcatgggtgatgacacagtactttgctttgacactagagcgagagacagtcgtctagcgttttgaggactaagagaatattatctcctaggtagatacagtggtcgaaggtagaataccgggaatcaggatagccagcccaatctgcatctctataagcagtcaaggattgaatcgggccagtaccaatgtgaaggttataggacagtgtgctcttggcatatcgggggatatgcttgatcaacatgagatggggctcacggggatcatacataaagagacgtacttgctatacaacatatgccaagtcgggatgagtgagcataagatactgtaaagcgccgacgaggctccggtatgtgatcggatcagcagcaggcgtgtcgtcagtggaagagagatcgataggagtgtcaacaagagttgatgtagtgtgacactcggccatacctacccgctgtaggaggtcaatggcatactaccgctaggaaaggaagatgtcgttagtggagcgtgtgacgaagatgccaaggaagtgatgagagcacctaggtccgtcatgtctaactcgatgtggagatgcatggtgaagtgctacaacagccgtgtcgagtatgcgatcaggacgatgtcatcaacatagagaagcatgtaggcaacattgtctccatctttgtaaacaaagagggacgtgtcggaggctgaagcgatgaactcgaagcggtgtatgtatgtgtcaaagcactggaaccattcccaagagcctgcttcggttcatagagggaattctgcaactgacaaacatgattaggaccaaaggagtcaataaagccagacagctgctgacaatagaccatctcctcgaggtggccatgaaggaacacattcttgacgttcaactgttagatgggccaggcacgagaggtcgcagtgct

SEQ ID NO: 57247 - DNA, 715 bp, Zea Mays
gggatttccgaaacttgaagaaggcctttcggttttgtctaaggatgatcttgccgatagcctggcgtacaatagtataaaggtatacaagttaactttgaagttgaaaaatgaagtactttattgccatgcgcaattttttgttctttgcatggcttaattcttagtaatgccttgagggcacagaagagcgttgaagacgaaggctatacaatggctcttaacaaccttcgctcagaggtgattgaactgagaaacgaaggtctagaaaaagacaaaattttgattttattggtgcacaaagtaaaggaagacgaagctaattaccatgctcaggctgaagcccagaaaaccaagattgaagaccttcagagacaactggccgaagctaaggagaattgcgcgctcgcacaggctaaccaagagattagcaaatattggaagaataaattagagaaaaatgttgtagaacttcgcggttccatggagaagtgttttgaaaaatccttggattgcgtaaagaaattaaaaactagcttctccaaagtgggcgcttattcttctgaagaaaattttatcagaggcgaccctgaaggcgttattgaatggataagtggagaagccaaagccttcgaggaaatcttgaatgatcacggggatatttgtgcgttttccggtgctcaaggaatctcagctattctggagaaggccagat

SEQ ID NO: 57248 - DNA, 427 bp, Zea Mays
gtctatacttatgaattgataatcagaaaaatcaacccatgtgagacatgtggcggtctcataggtccaaagtataagggcatcgaccacagcaatgcaagccgatgcatcagcatgtacctgttctacatcatcgcctacccattgcaacaacatttgatgtaaattagaagatatacattgatttgcatggatccaagctctacctaaggttagactataatttccttctatgtcgacgatgaagaaagcgacaacaagggccttggtccctatggttaattcaaaggacgtaactcccttggctttagtggaactgtcggtcccaacgccattgagcatcatattagtcttgactagttcatcatcctgcttccctaatttttgtacaatgagtaagatattaaattaacggccgccccaccat

SEQ ID NO: 57249 - DNA, 951 bp, Zea Mays
atattgagccttgacagcacggtagactacgagacaagctcgtctaggattgaattgaatcgcttgttcatctctggtttctcgctgggcacggtggtacagtacgagtagctagcaaaggatcaaagcaggaagcaaccccgtacggtatatgaacagaattgcagaaacttatgcgtatgacctagtcaagtctcaacatgaggatcagaggatgtatcgaaaacaacaaaagaacgagaaagagaatcaagttaacagtcacaaatcccaagataatatactagtattatcatgtcatcactcgagtacgaccaattatcggtgtcaaccatcaccataatttagtctgaacactgcaaaaaagagagaaaaggagaggtggagaagtggacaagagtacatgcatccgcatccaaagcgacaaagcaggaggtgccccactgccactcgatggaaaacgatgagtcaccatggcccctctcgggataagcctcgacacctgtggtggtctcactcaagctggtacgaacagataaggaatcatctcgtgctttccatccggtttctctcccttgttctctcacacgaacccacgacattgcagagctctactacttgtttgttgagggcaagattcatcgttagcaacaatagaattcagcagaataaccttagtagttagtccttgaactctcgccagtcgcaacatgttccaatgtttcatgtatccctgaagctgtccatagaaaccatccaagtttcttcatctataggctaagtttgcccctaggccacgtctagccgtgggagatctaggatgaatcaagcatgtgataaatttttcccgttgcatcttgctattacacgggctagtaattttgaaagtcgtcggtgttatgaattcttaggtataaatctgcaccaaaactaattaaaaatttctatctt

SEQ ID NO: 57250 - DNA, 573 bp, Zea Mays
acttgtccaaccggtcggccacttagggcgatagccgattactcgggccttcgtatcttttcgatatgaaaagttgtagcagccaaagttcttatgaagaccatctgctctggccttcgtctagtagtgcagctcatgcacccgacagaaagcttcggcattagcactcataccctggccttggagagcccatatgtaaacactgagtctaactattgcattaggtgttaactgatgaaggtatatctcaaaattctttaaaacttctcctatcatgtcatgtagagggaaccgaagccctaccatgaagaagctcttaaaaacaacaacttcgtcctctcttggctgcggaaccacctcctccccagcaaagcggacaagcttgctctcggtttccccaaaatagcccagttttttcatcataaccatgtcaactgctgtcaaagtagatttcacaaattcattgtgactaggtttcattgggctcagaacactgttgtcctcttcactttcgttgtcacttccgcctttagccacaatatgttcagcttcagcattggaggcacctttggt

SEQ ID NO: 57251 - DNA, 363 bp, Zea Mays
gttgggataaccaggtcgaggtttgcttgggacaacaaaggttagggttgacctggttggtgtgactataggtcatgattgctatggttggggctgattcaattgggatgaccggatcaggggcgacctagttgggatgaccagttcgaggctattcgagatgatctgggttggtcccaacttggttggtgtgactatagccatgtccactcggagcgaccgaggttagtgccgcctggtcggagtgaataggtcagggtcaacctggtcgggatgattaggtcagggccgacttggtcgggatgaccaggtcatgcctcacctagttagagttgattaggccatctttggtctaaatcgagt

SEQ ID NO: 57252 - DNA, 654 bp, Zea Mays
ggaaaagattatgacgaattgataaggttcgctagggacgaagtaattttagagccaagagatgatgaagttgttgtttttaagagcttcttcagggctatacttcggttccctctttatgaaatgatcggtggagttttgaagaagtttgaaatctaccttcatcaactaacttcaaatgctatagtcaggctcagtgtgtacatatgggctctccaaagccaaggaagcagtgccaatgctgaagaattttgcagggtacatgaactccattaccagactaaagcgagagtagatggactgcacaagaacttcgggtgttacaattttgtgtaccgaaaggatactaaactctcgtaattggatatcgcaccaagtggccgactggctagacaagtgaatggttttatgtgaaagctggtaaaaagagaagggagaagcttatgactatggtgatgagtcccctgaaattgagcttcggcatgacaagaccattatgcaacatgcaactcggcttcccctgccagttagcccaagtggaattcagagtcatggcagagcacattagtactcgagatttggtgcaagaatatctggctaacaaaacctttccaacatttgttgggtgggggatgccgaagaaggaagaaggga

SEQ ID NO: 57253 - DNA, 477 bp, Zea Mays
gtcatgggccacaagcagcgggtctccgcctgagcgggaagcggaggcgaggcccgcacacgtgtcagcgccgacccctgcacacaccagggtccttctcgctccgggactggagttcggtcttacccgaaggctccggactcgtatataggggtccggtgtcctttcgtgggggtccggccttactggggtgtggtgtctttccctgccacgtggcgtcctttggcctgcccatccggcggggtcaggcgtggtcctccgcgtggctagggaacgtcgcatgggtgcgatgccttcatgctgcaggaaagggtaccgatagtggcccccggtcccgcctcaggggaggatgcaagcttgcaggtgggaccagagtctgattggtggttagaccgctgcttccgtgcgcctgctgctgcaattactaccggcccgcctatgaccacgccaactgccatgcctattcccatggctgac

SEQ ID NO: 57254 - DNA, 332 bp, Zea Mays
tgcaaagtcatgttataacatctagatgccagcaaaaatatgtcttaaggaataaccttctgttaaatggtagttgtatttcaaaccaccccttatgcccaaatatttaataatttttctaggaagaactacttacttgttaaaccccaaattttgaaacagaggattatacaccagtaagaagccactgtaatttttgcagaatttttggaaatttattaatataacttgtagttcaaacccaccttaaaagcataaaggaaataagaagaagaaaggaaaataataaacctcgctccaataagtttaactagaaatcttatcaaattctc

SEQ ID NO: 57255 - DNA, 495 bp, Zea Mays
ggcgtccagagaggaggaggggcactggcgcacgcgattggtggaaattaccgtagcaagctcaccggcgatcaccggatgggctaacgtgagtcacggcggtgtggttaaagtgccgaggcacgtggcgcaaggttggggggctaactccggcgagcctatccagaggggccatgacacaagcgggtacggtggccagagtaaaatagcagccggagttcatccacggggtgatatttcttacctctctgcgttatccaaccgcactgagcacgaatcaccacgacggcgtgaatccacgtgcgagggtcgccggcggcaggtttactgagctggcgctctgatctggtcattgtaccatcgcgtagctccttcagtcggtctgacaaagcgtgtttggggtcgatttgctccagattttatgtagtgaccggacgaactctctacatcaaagttgtagactaacaaactagctttaactttgttataatgtcc

SEQ ID NO: 57256 - DNA, 1020 bp, Zea Mays
gtcggttcagtggagcaacgaagatcagtggctcaggaaatatctgaagaaaagatctgcattactgtggattcagatgtgtccaagcgaactagagatagagacggccgtggcgggatacttgagccaattcatggtcttgcggattaggtcggggtctgggtggagatatttcaccggtggtcaccgtggctctgtactttcgtcgccatgtcactcgctcctcaactctacctcactgtgctccttcgttacgtggtcgtgatgcgctatcgatgtgcttcgtgaccacggatagttagccaggtcgtcgttcctttaaatagtgccataaaccacggtgaggtcttcactgtcttccggtgtgctcggtcgaagccaaaattcacactgtcttctcttcctcgccccaaattcgtagtgcatggtgaattagtagtcctttacggccgtatagccccagtgtggctgcctgttgccatcggaatttgccgcgacgcccatttcccctcatcggaccctgtagagcacactcttctccgcgctccatggtcgggcgaacctggtatggttccatgcatttgaattgatgtttaagcatccatgtgtgcccatgaagctcactgtggcggtcgtttggccattactggcatggttttgttgaaacacgggctcgacgtcgtgtgctctaccgagtacgacgcttacgtcgaccaactaggattctgttggaccgacgctgatttaagggagcaccatgacctacatgaccccctgatgctcttcgttcccttaatttgcaattcccatggcgaataccccatgaacgtgcgccgcggaaccggcacaccgtcgtggccatgggtaggtctctagggggtttgtgaactggattcgtgtccaagacggttcgggttgagtctaggttaagtctagtaggtgtctatggggcgctcgagctcttcgccaccgtggcttggtgggtggtccgtccacgccgccgtctggggtcaaggaccc

SEQ ID NO: 57257 - DNA, 1095 bp, Zea Mays
agaaatcattttcagaatttgtttttatgaattataagtgctgaaggactacgggtgtatttttagcaagggcaggggctaaactacaagttctaggaccttttcgtaatggtttttcatgacacggtggacgtcgggttgagtttttttgaaacccgagggcctttcataaaatggccatagctgctacaacgcgggccacgaggggccacatgctcctcgatcgatggtccataatagattgcgaaccagtatgtgctattggcctttggatctggatccacgacccgaaatcaattaattgagatctcctcaggtccatccgatcaaagatctacggtcagatttaactcgaagtgaaagggtatgggatcatctaatctggcccgttgccgttgatccaacgactggcacattccttccccaaccggatgcacagccgtggcggcacccccaaggcggtggcagcgcagactcctgcaactacgattcacgcgccccaagctttaatctcccgttgagcaggtgatacatgaagatgggggaatgtcgaacacgataagcgcacatacctatgacagaggatgccatgatgggccggacaaggtgaatggcggcacagtggcaccagtgaactccggtgaataatcgcggaggccctggtctcccggcgcccattgatccccgctcaaaaccttcaccgacacctggacatccacccggttcccctcacaagtcgaatttgtggctgactggagctccctgtgctacggcactcctcaccactcttcttccccacgcggtttgtctgctgcgctggactcaccgaaatgcccggagtacacggttttatagcccttgagctatgccgattgaccagttggcaagatggggggttgcaaccgaatcacacaaatcccggggaggccgctacgccggcacgaggtcaggccgctataccttcagcgtggagtactccacgcggaggctggatggtgggtcccatgggtaggacgagtgtgcggctagcttaggtgagacagacatgtaggcctagggtgtcggtgccaaatccccagctgagttgagaaggag

SEQ ID NO: 57258 - DNA, 550 bp, Zea Mays
caaaaaaatagaagcccactagcccactagaaaaccctagtcgcctggacaatttctggtcgatttaccatctagtcggacgactaattgcccctaatcgacggctagtcggacgacctgatactctagtcgagtcgtccggctgatcaaccactaccaggcgacctgcctgactaatcgcgattaatcccgattagtgggacacttgaaaacagtggaaaatttatcaggggaagtggaagggttattttgaaaactgatgcacgatgggagggttgttttggaaaattatcatgactgcttgcacggtttggaccaagtggttggtttgcacctgatacattccctttacacaatatttactaatgatggattttgtagtgcagatgaagactggatgtgttgcacttgtattatgtttaaacataagtgttgatccacctgatgtaattaaaatttccccttgcgcaagattggagtgctggataggtaaacttttagttgactatatatttccaaatttcaaattagttgaaaaaatacagtaaat

SEQ ID NO: 57259 - DNA, 939 bp, Zea Mays
ctggcgtgcaccgggcatgtcagccgtggtcgagcacgtggcatggtttcttctcctcctattctaacgccgatagggcgcatatcttcgcgaatttgggcaagatcgtcgcgtagtatttgttccctgatgcaagctttgtcatttatgtgtggcagtcgagcggtttccggcagtgtgcagggagtagtcgtgtcggcaagatggcagtgtcaacctgctgcgtcccgaggcaaaattgtgtcaacccatgtccaacggttgagatttgcccccaaacgtttccaggatgtgcctaaggtaatttggcgccaatttggtatttggactctgtgtatttgagctttggaaaacagagaacatagctgaaatttgtgaaggggttaaaattcaaattctgaatttctgaatttttcctagaggctttacttcatgggctgttttggggattttggaaaattcagatgaccaatcttccttactacattttgtaggttatttaatgtactataactttgttaattggttcataccaagattttgtgtttttcccaaagcttttcaaaatttcccttatgtgctcaaatggccaatttggatggtgttagggttttggatgtttttcttacttaaggtgcatgatgtgcttagtgtatgtttcttgagctgaagaagatttgcttaggcttttaatccttcaagtttggtgtttcttgcatcattagagccacatgtgataatgatcccaagttggggtactggaaaaccctaagtaacactagggtgttacagggcagaggttcggacttcacgaaggatgatcaatgcacaatctggttcaagaacaagatatgtgttcctgatattagcagtctctgtgaaaccatattgaaggaagctcatgactcagcctactccatccaccctggtagtaccaag

SEQ ID NO: 57260 - DNA, 746 bp, Zea Mays
ttttggtctgcccgcgcgccagaattttttttggtctcagcagagcaggcgtgtcagggcgtttggtcacagccacgctcctgtgcagtgcgcgtagcttttttcagtgtccggtcgctgtctgccgcgcagtaattttttttgtgaccggtcgcttctgcaaaagttgtgtcgcccgcgcagcaaggaaaatattttttttgtcacttccgcgtagaagtgtgagggcagcagggcgcgcagaaattattttttttcacagccgagcaagcgtgtcctgtcaggtcgccatgcagatttttgtttttatccacagcctcgctcaaatgcagggcgcgtagaacttttctttcgcgcaactttttcttttgccgtccggtctcatctgcgcagaaacttttttgacttgtgtggcgtatggaatctctgcagtacactttttcagaatcctgcgtcagaaatttgaatttttggcgttttccctctgctgtttctagctctctgaccacactggtcagaaccagttgaactggcccatgggggcggttgaaccggtcctgaggaccagctcaactgcctatatatatttgacactccacttctcttctcccactccttccactctcgccttagtcgcttcacaacatttagagccttctctcttacacatctcaaccggttcacagtttcaaaaccttttcaatcatggtgcgtcgtcgcaatccttccgtgattgagtttagcag

SEQ ID NO: 57261 - DNA, 549 bp, Zea Mays
agttgttataaaaacatatcgcatcatcttattgagaggaaagcctgttgttggacccataggttcgcatagtactcgttctattatctttggtgctcagctcgctgcctcttatattgtgcttgttgcctaaaagcttctcgcgacatagtaatctccattttctgggcatgggcacacgaatgagatgcttatgcggaagatgatacaaactatcaacctcaatgtctcagctccctagagtcaaacgaagaaccaatatactcactccactcaatactcagtacaatcataaacatatatgagcataacttaaaaatcaaaatgaaatactctcaccgtccatgggcttgtcctcttgcgttcgcatatgccgcctcagggtcaattggttcgctcctctagttgtagtcaaactcatagcgctcaaccatctgctccccatatgttgtctggacaaaaacacaccaaatatcaagacatcatgatggtgatgcaaaaacatacattacagtaaaaatctcaccagctggtcgatggttgtctaag

SEQ ID NO: 57262 - DNA, 827 bp, Zea Mays
ctgtaatacagtatgtcgagctaggtttgaagtccttttgtgaccaatctagggggtttaaggttgtgagttatgtagacaaattagagaccattagaaggtgattaagtgttcttaagacaagtaggcttgatcctgttcaaaaattaggggaaatgaggctcaaagttgggctgtcaggctcatggattctgactgacgatcaggcagatttactctgaatttcttcctgtctgatcaactttgaggccttgcagaagctattctatgtgacttggtgctaggttggtttgagcaaagttggagatctagtattcatgagcaagttttcttaggagactctggcttgatgtcatatagattagaagataagggtgctcaaattgtctctttcgaaaatggagaaatcagatgaagactgaagattgaagttcagaaaattggaatggtaccagtgtgatacaactggtttttgggtactttaatttgtaatctatgttgtttaggtccaagaaccctataataactttgcagatccttgtttagtgaacaagctctgttaatggagactgacctattcttaaccagaataaggagaaaaggatgaatgaagaggggaagattagtcaagtgctgtagattcaaaagtgcagaaatatctatccctgatcttttcctcttgtcgtgtcttactttggaatagagtgaagatagagatgaggagatggcagggatgttcaaaactttgtccatcactgaaatatcacaaagtctgaaatatctgctacagtgacatcttatctccctaccccctgccatggataaac

SEQ ID NO: 57263 - DNA, 613 bp, Zea Mays
tatagagcctcaaacggggacatcttcaaactggcctagtagctattgttgtaagagaactccgcatatggtaagctcttatcccagatgccaccatgtttaagagcacaagctcttaacatatcctccagtacttggttggtcctctcggtctgcccatcagtttgaggatggcaggccgaactaaatttcaactgtgtgtcccaacatgtgcaacttctgccaaaaccgcgaagtaaactatgaccctcggtctgacacgatcttcttaggcactccatgtagactaactattcgagccatatacaactctgctagttggttcccatgtaattagtcttcaaaggtatgaagtgagccacttttgtcagtctgtccacaatcacccaaatggagtcgtaccttgcaggtgtgcgtggtagtccaacaatgaagtccatgccaatttcttctcatttccactcaggtattttcagtgggtgaagcaatccagcaggtctttgatgctcgacttttaccctctggcaaacatcacattccgccacatgtgcagtaacatccctttttagtccataccaccaatacttctgcttcaaatcctggtacatcttgg

SEQ ID NO: 57264 - DNA, 445 bp, Zea Mays
caatgagtaagatacatgcatgatatgatatgcaatttagcaattaaactttgatggtgaatgatcattttaataaggtagggcttaatcttgctacttgaatgttttggtggtacacttagcaaattagggtcaagcttagttaagctaagtggtaagttcattttgatgttccactgatttccttttaatgtcttagtgagaatttaataagatttctagttgaacttatcggagcgaggtttatttttcccttctttccttctattccttttatgcctttaaggtgggtttgaactacaagttaacttaataattttccaacaattctgcaaaaattacagtggcttcttactggtgtatacgcttctgtctcaaaatttggggtttaaaaagtaagtggttttctctgtataaaattatcaattattagggcagagagggt

SEQ ID NO: 57265 - DNA, 667 bp, Zea Mays
ggatgttgtcggagggaaaactcctccgaccgagtggcggaatgcacctgccctgatcctaagatgagaagggggcctagggatttgcctgattagctggaagaacacgagaacacaagagttagagtggtttgggctgtcggagcgtaataccctacatccactgtgagttgtattgtttgagagtctctatgccttgtttcctcctcgttgtaacgttgtgtgccctcccttttacagtctaagggggcacatacaagggacccgagccccgacagctaggcccagtaatctattgctagatatagagtgagtggagcggcgactcgtggagaacgggtatcttctcctggacttcgtgtagatctcctggcttgtcgtgcctttgcctcgtctaatcggagtagggcgcaggagtaggttgcgacgtaggttgatgcgctacgcatgtaggggtgctcaggcgacgtcgtcctgtcttctccgcctgctaccctttgcctcggtaacacgcgggctacaatgggagtcatgatgacagcagcccacacgacgcagagagtcaatggtctcgcctcgataacgcgctagttactgtgcgactcatgtactgcggatgcaccccttgccactagagcggacagatacacgtcttgtccgcagttaa

SEQ ID NO: 57266 - DNA, 602 bp, Zea Mays
cttagcctcccccaaacaataaatttcactcttgtgaaaattgattttaagaccatacatgtgttcaaaaagacaaagaatgaacttaagatttctagcaccttccagacaatcttgaatgaagaaaaaagtatcatcagcgtactgaaggcaacaacaaccattatgaatgatatggggaataagacctttaataaggccctcatcctgagctttatgaatcagacaagccagcccatctgcaaccagattaaaaaggaggggagagaaaggatccccttgcctcacccctttatgagtggtaaaataaggacccacaatatcattagtcttgatgacaactttaccacctctagcagttctcataacccaatcacaccaagtattcccaaatcctttttctccagcatgcagtacaaaaaatgctagttgactttatcataggctttttcaaaatcaattttgagcaccactccactatgctttttctttttcacatcatgaagaatctcattgagagataccacaccatccattatgtatctgccttgaataaaaccatattgagattcacttatcactttagtgatacaaagggccaa

SEQ ID NO: 57267 - DNA, 399 bp, Zea Mays
taagtgctctacgtttctgaacatgttagtttagcaattgatggattgctttattcttgtaattttctcggacaaatgtgcaaggttatttgattgtttgattacatgtcatgccatatctgacaaaagctggtcgacagatcaattgtacagattgtaactacttgagtgcttttttgggcactcgatttctaagcagcatttgctacgaacccacttgatgggcagcagttcaatttcagagatgatgtattgtactgtttgatcttggaagcaaagcataaagtttactttcagccagtttctgtaaaccatcatacaaactttcggatgctgcacttgattggtttgcaattattagccactactgttacaaagctgcatgtttcacctttttgg

SEQ ID NO: 57268 - DNA, 559 bp, Zea Mays
tacaaatgttacgatttttgctcatgcattaattcccatattattttctacattatttcgcctagcaaataattagcagaaaaaaatttcaaaatgtatatgaagctataatacacatacttcaatcgctctaaatatttgtgttgcgttgagttttcatactcacggcgagcaattaaattgtatagtgggtactcagacacactcatcaagttatgttattatcggttgagttatggtattagctgaatattgactgcaccctggcaacacgacgcaatatttgtgccgtttgaccttggttgcgtcatgtgattgctatgtcgcgctctcacttaatcggatcgctcccgttgagtcgaaccgccatcgctgagtcacgtatttttcgcatgccctgtaggcactgtccgtctgccgtgatcatcgagccacaattgcgcctgttgcgcaagttgcgtggacttatcgtgtaccccgactatcgagccaaaattgcgctttttgcgagggcttattgtgttgttgtagcactgatggccgcacacgaattgacacc

SEQ ID NO: 57269 - DNA, 343 bp, Zea Mays
cagccagcccatgctgaagtgcataactgaaaccgaaggcatacaaatcctccgtgaagtccacagcggaacttgcggctctcactcaggacccagggccctcgccgccaaggtgattcgccatggattttactggcccgcaataatttgcactgccaatcgagtcacaaggtcatgcaaagcatgccaaaagttctcccctcgctcaggcagcccctcgcaattcaccaaactcatcgcccatacatggccacttcaacgctgggggctggacatcgttggaccactgtctacagctcaagggaacctcaagttcaccttcgtcgccgtcgaatatttcaca

SEQ ID NO: 57270 - DNA, 807 bp, Zea Mays
tggttgaagaaccttgaatggatgaatatttgtttttgtcgtatgttgaagtaaaccttgaatggctggagtaaaccttgaatggttgaatgtttgttcctattgtacatacctgaacaaaaccttgaatggctcaactaaactttgaatggttgaatatttagtgttgcgcgttgtggacgacaggtggaacagtcccattaatcgtgtgtggttggtgctgctaattagttgggccagtttggttggaccttttcgttcatgtgatagaccacacctttctctggatgccatatgatttgactagtgctcatttcactgaaatgattcatgtcatccatgcttaaaccaaaccttatattcctcgcatgctttgcaaattctacatatgttatgttgacttatctcttctaggacctatcagcggggtgcctcaacatattgtcttccttacgcttttttgtgccatgtcatcattttttcatgttttttgttgaaataggagtttcaaacatgatattatatgaaagtaccacatgaccttagcaggatctctcttacttctaggttcccaatcaacattactatagggtcatcatatcttattttatattgtgatgttttgtagaccagatatgattctaatttctcatactcaccatggtataggatacaatcattaagacatacatgtatctttcgcacttccaatcatatagggtgagcaacctatttgtcttcatatgttgtagcaggtaatttgttatccttaggaaacaacttcttcatgagttttattatatcatt

SEQ ID NO: 57271 - DNA, 543 bp, Zea Mays
gcattgaggtgatgactagcgatggtggcatgacgagtaggtggcagagcagtgatgtaacgagcgggtgtacggaaaagaaacaacgcgggcacatggaaaagtgtgaccaccaaaacagcgtctagggttatattcatttactttaatggatgttttcgtggtcgttagagataaggtaacttccaacagctggcaaataagatgttagaccttgcattaatgtttgaccgctattatgcacggttggagattccccttatatccagcgctccacttaggagctgtcaaaattaaggcggtcacaaaacttctttccctttcctgtagtggtcccctatgggattgcctccacctagccaccatgcaccaattttgggagagcactcgctatctctagcgctagtcctttgagctagtcacattgagataaaggtgactgatcatctcttgactaaggtgcaaaatagtactacttccaccattgatcatgtggtaactactgcaaaatatgtgcaagagttttgtcacacccagttctag

SEQ ID NO: 57272 - DNA, 474 bp, Zea Mays
aaaagattaaatccaaaaaacaacaacactggaatggaaagcagtacaatgcaattatgtcatgcaagcttcattaccaaacactattgctatgaagttgagatgaataagaatagtttgctgttgaaaacattttggttttgaagtaaatatgacagtagagataatatgacagcaggtcacattcaataagtgtagatgtgcaaaccatgtgtagttgattccacggacctgtttgcactgtatgctgataccatgtgcacttcgggcctatttgtttgtgttccatgcagacttgtcctgcaaggatgcaagcaaacatccctttcaaaatttgtgctagaaatttctagcagtttctagcagcagtgcattaaaaaatacgtaaagtttaccaagatatctgtgaaaatccagtatattaaggctaacttacctgaatgtctagaacaatgcagcccagcttgctctgtc

SEQ ID NO: 57273 - DNA, 1086 bp, Zea Mays
ctcccatggtacagtacctggctgggatcaaaacgccagcgcagcagctcttaccgccgacgactccctccgccgtgattcgtgtcaccggcgtcaggattcgtgcctgcgtggatggatagcgtcgcggggtaaaagatcttcgccgccggtgagctggaagccactccggctagccgcggtatctctcccctgctcaccgccctcggataaggattctcaccgccgtcgagctgtcgtcgttgcgcgccacgtgcttaagcgctggacttcatcgcggtgactcactggatgcatgtccggcgatcaccggagcaactgccacgttgaaagtaactttttccacgcgctgagctcgcctcccctctccggccgccagcaccgctcggctgaattcatcaccgtcgctcgatacgcctataaattgagagcgccgcgagctccgttgggcagtaaactatccagccaccatgaattagcctcgatcattcaccagcgcccgcgaattttgagttctccccaaattggttcaaacaagccgcaaagacacttcgctgtggtcagcgcaaatcaggtctgatcatattgcctttagtcttgttctagcatccctaagcttccctcaaactcatcgaccctttagattgaactaaatcgccatagatcactgggaacaccttcatctgtccgcaacactctcggtcaccgtggccagggcaaaccatttggccatagatgaaattgtgttgggggaaatggtcggggtaggtccaagttcgtgtccgccgctcggggccgccagtcttggctctctccggccggtacaggtgctcgccggagttccacagcgcgcgccgttgttggggacctccccctgcgaagaaatagaacatggagggtttttgcgcaaactgtcagtgacacagaaaaatagtaactgaacctatccccagttagtcaaaaccccgagggcccttctgcaagattgccaacgcgggcgtgggcgcgcccccttttcctgtgtttgtgggccggttgggctagaaatggcccagtactattgaagcttttcctttttctttttca

SEQ ID NO: 57274 - DNA, 563 bp, Zea Mays
tttcctatttccattactctctggattgggcgccaatttctagaaaactcagggacttgggcgtaaaagaaactgagaaacagagtgctgtacagggtggactgcgggtttaatcatcaataacccagggtctctttaagaaaaatgtgccgcgaaggggtatctagggtttctgaccattggatcggcaatgaggggctcagatttgatctcatccctccccaagcggtatgccacgacagccgtaggatcccgcatcaatggttccgaattaaaatatatgcgcccaactggaatcgtccgatcgtgatcggacgcgtcatcgcgctccaccacaaacgccagctccgatccatcccgaccgcccattttctaatccacggacgtcctagcgtcttcaacctcccgccgcccatgcataggcgccaccctccctagtactctctctctctctctcccattggtcaaccggcgtgaacaccgcccggaccagtacccgacaccgccgttctccggcgacacacccatttcggactgcacctaaactctgcttaggactactg

SEQ ID NO: 57275 - DNA, 915 bp, Zea Mays
ccgcgtggatggcgggttgattgtataaaactgcaggggttcttttataatttgtcacggccgaagaggtatcgattaattctggcgttggatcagagatctaggattcagattaaaataacccagatcgattcctgatcgctggatacgagatccacgatccagattagatggtgcaagaggtaagtgcgcaccaatctggaccacccgcagtccgatcaacggtccaagattaccaaacagaatcagacatatctatgagatctggtccgcctatccatattttaacggctgcgatcacaatacggaaaggcgagttgacgtttaaatcgtgatcgtccatttgaatcggacggccactagcgtgcttctatacccggtggcaactcatggtggagccactcaccacccgcggcgggccatcgccggagcaatccccatcaagagtccccaggcacaaaacgttgatcccgaccgagctacgcaaggcgagaatcaaggagtgtattatgaagggccttaccagcggctatgtcgcagtgcggtcagcttatagtgtaggggtgggttcccggtggagttttgctccgatgagtaatcaggagcgcgcagagtggtgttgaggcacgacggttctcaggacgatacttgcttctctctgcacgcagacgcgacagcaacacccgcggcgccagaggagggttgagcaccatcagatcgatgtcggcggtttgagttcctccacgacggcgtagactggagtcaagcacagaggcgacacaagttctacgacccggagagcgatgggaatggtcggggctttatatcagagcagcgtctggattgcgaggccggctggcgcggttagttttaacagctcgcgattcacgcgcatctgttgaagctttgcaagcg

SEQ ID NO: 57276 - DNA, 529 bp, Zea Mays
taatacatattaaaacgtgtcttcaagtagtaacggttaaaagcgtatctaatttcatatcaactagagatattttgttatcacataaaaacatctctatgtggctaagaacggttattcgatgcgctttatgacgtatcttcatgttagtcacgtattgaaagcatgtctaactatgtcattttatacgtttttaattgcatatcaaaaagcgtcttaaggttcctatagacgaatttaatatgtgttttgcaacgtgtctataggttactgatgattgaaagtgtgtctaatttcgtgtcattctaatacgattttaatagcgtgttaaaaattgtgtttaggtatctcttcacgttgaaagcgtgtcaaataccgtaacattttgatgcgttcttaaaattgtttcaaagaacgtctttatgtaccgtcgtatagacgcttttgtgtgcgttacaactaaaacatacctacaaggggggttttgtagtagtgtatagcaatgtcgaagaccaatacagaaaaaatc

SEQ ID NO: 57277 - DNA, 331 bp, Zea Mays
aactcaattggatgggtcgaggagtatcaagagcacatagggatgctaaaacagaagctaggagggcatgatcagacctgtgaagagctgactgcggtgagcttacacagcacggtgttcttgaccgatttgggagaagtctcaaattagggagctgtatgggatgattagaggtgagagctggttcactagatgcacaactacctagcggagctgatggcaaactcaatttataggattaatgaacggtggcggataatttggagaagacgcgcggcgaccggagaggggaaagagcactggcgcaaaggattcgtggcgttcactgtgg

SEQ ID NO: 57278 - DNA, 574 bp, Zea Mays
caaagttgtaaagggattatagttctacaactttactacagaaagttggcttaggtttcacatgaaaatttgagaaaactgggctccaatttgatctgtcagtcaagtcttttactgaatccaaagcactgttcatcgtcatcagataatatcgcacggtggataaggttctggacctcgccggcgataaggacgccacggcggtcggaatggactggaggccgcggtaaatatcttgggtcacgtggcagtaaccctctgtggtggcggactccggttaaacgacgtcgccgtgccatccccggattctaccgcgcggcaagctcacctgcaccgtctgaaatccgcgatcctcatccgtcgccggccagccgtctataaatagagcgcgggcacggcttcgtcaccacattccgcacatcaacaactgagcttttgactcgagctcaccggagagcccccgtagccccaaatttcctcctcccctgttcttagctccgccgcaaaaatccttccgtgaccagcgcgattcgagatagcttacgacttctacttccccgtttaagtattccca

SEQ ID NO: 57279 - DNA, 366 bp, Zea Mays
tgcgtaccggccgattcacgcaaggactggtgccctacttcggccgaaaccgaattcacatcctaaccaatgtttcccccaggttaatttcaagaagggcgacctaatttgctctggccatggtgacaacgcgaatgatcaaaggaacaacgtgtacccaatgatccatggcagtcaagctcaatcagaggggtcgaggagtttgaggaggatctaagaatgctagaacaagcgatcaaggcgctggaactgacctgtaataggccggccacggtgaggtgttcttgcggcgtgttcgaaccgatttgggggaagttagaaattggagctcactggtgatcaaccgaggacaatacttggtggctg

SEQ ID NO: 57280 - DNA, 1405 bp, Zea Mays
caaataagtagcatgaactcatcaactttcaaattgtcattaaaagactgatagaaagtaaaaatattttctaacaagtagacatgtgcattctggtttttacacttagaatttataatcatcaacatataaaattgctcagtctagcaaagcatgcatgtaaatggaaaacaacctcctgtaatcatcaatgaggagatttaggaatagtcaccacactccgctgcaataatattcctaacaacatcagttcaacccaatcacaaaaggacgggcaacaagacgctaactgggtagttaaaaaatgcatgtatgtaccttatcaaacgaaatgggttgatttgcttgtatcgacgtcttctgcatccaaaacaaaatgacggggcaataaaaaaggctggtacgtatctctgtacgttgacgacatgtacgacgtggaggacctgaaaacattcaggaacgggcatcacatggatccaacaatcagcatataagaggcgttgcaatcagaggaccctgcttggaaacatgtatcgccatgaaacatgtctagtccaggtccaggtctaggcagccaactggtccatcagccgagaataatataatggtctagttaattagcgcccttatcagtatatactactaacatatataatattgttgctgctactgttttgctccgcttcctgaaaccatcgacctgcacgtatggattccatgtctgatccttgtttcccccgattgaatctcctcgtgatcttgctattcattaagtgtgtactcaaccacatgaagattactactactaagttcgtcattctccttttgtttcgtgttttctttttttgttttaaaaaggaaacattctttcacgtagagttagtttttgggttctttctgttgtctaaacatctcttatttgtctgtcctgctgtcaaaattttcttccatttattttaaccttggcatatctagtacgtattattatctatttgttttcctttacaacttattaaaccccagatatgtccatggccttcagaccaaactacctgaacatgttgagaaaaggactgaagccagaaatctcatcatagccttcagtgtgggtctgctacctcctcctcctactatactcagattgtcagcttcacagtcatttagaccattcagcaccggatttgtacaacacagtagttgcatagcagttcttttgctcgggtcatgggtgtgcggtgtgccctgctgcacagggtgtcgaagaaacattcgcacagggccaacaccactgcatgctaccccgacttttaacaccactgctacttggcttgtgctgccgcctgccgatgcggttggttgcgcagcccaggcgcctgaccgcccaattgacacttgccggatccgg

SEQ ID NO: 57281 - DNA, 748 bp, Zea Mays
gccgggtccaagatacactcgcgaggtccaccatccgctcccggcgcgcgcgcaggtggctgcgaagtctgcaataccggggctgcagcgaggatcgattggagttgcgcccgtgatttctaggacgcgaacgcgaggtcagttcgagcctataacctaaggagaccgcggctacttacatgcatctgggcaaggcactggggcggcggatgcaaccccaacgaccagcgaaatctgcgcagtcactagcggcggaaattgcgccgttcagctgagaccggttcagcgtcgagcgagtggggaagaaggaaacccccgacatcctgggcccgcatggaagtgaaggaaacacggccgaacagggggtaaggggctgacccgtgggtccaaagcgtcggcgcccaattcctggtgtttgggctgtgcggttgagaagttgggccgaggtggttgggccgcaagtgggagaagggaaagtgggctgaaatgagctgaccgagcctagttggttctgtttttattttccttttctttttctgatttcttctcccttttttttaaaattcaaatttgaatttaaacagtgatgtgaacttacactcaaattaaatatttaaaataaacttagtagtatgaaaggaggtttaatatgattatttcctttagtattattattatttgtttgtatagtgtcctttcttcttttctcaaaatcctaatctccaaatttggtttaatgcacattttc

SEQ ID NO: 57282 - DNA, 650 bp, Zea Mays
agtctggctttcaattgactgaactggttcttcatctgcttctgtctgaaaagctgaagtcgctgcttgtttagcgctttcggtgtcatgcgtatcgtcggcggtaactgcacctgatggcttagctccatcaaaatcctctatatcatgactcatagtgtcggtctgatcttgatccgagaagcattggctcactacgtactttaggatgaggcagaccttgtctacgaactttccaaggttgcatttcccttctagtagctcatgacggacctgaaccagtcgctcgaagcggcgaaacagcttagacttgtcgtgcgacagcacacttgatcttgtgacatcgtcttctcctgcatatgccgcttggatcatggaagtggtctcctcaaccatgtatctcaccgccttctctatttcagactggccactcagtacatctgaaccatctctcgtggcatgagtagctatctgctccaatgcctggcttatctgttcaataatagcttcaaagctttccccgctcgcttcatgcttccatgtaccgccgccgacgcctcgatccctttgtggtaggagaccatgttcggtatgtccatgggggagtaggtggagcgacgcctagactacaaatataattattgtttatc

SEQ ID NO: 57283 - DNA, 437 bp, Zea Mays
cgtctaatctgctgacgtacggcccatcctatatatttgagttgcgttaaggttttagactcacgctgagcgattaaattgtatagtgggtactcaaacacgcgcgatcaggctttggtgttaatcggctgagttatgatattggctgagtattcactgcggcctggtaacacgatacaatatttgtgtcatacaaacttagctgcatcatgtgattgctatgtcgcactctcgcttaatcggatcgctcctgttgagtcggaccgcgatcgtcgagtcacgtattttttgcaggcccagcagacactactcatctgccgcgaccactgggccactattgcgcttgttatgcctgttgcgtggacttatcaagtgctccgactaccgagccacaactgcgcctgttgcgcatgttaggaaggcttattgtgttgtcg

SEQ ID NO: 57284 - DNA, 1241 bp, Zea Mays
acaaactagagtagagataaaaattaaaaagtaagaacaccgacgaggtataagtacttgtgtatgtgcagctccccctaaatatgtgcatgagttttgtgacattcatattgacttgatatgtcaatttgcaacatatttagagagagtgaacaaccaacacaatacacaaaaaatgagggatgcaacagaagtatattaagatgtgatgataaaaagaatagcatacaaacaagtccatcattgtatagcataagatatgaagtgttactactagctattacaataaggtcatcacatcacatcattaaaaagtttgtggctctaagccatcaccacatgcatcacaagtcagacgaataataattattacagaccaggtgttcattacataaattaaaagtattgctaagatgagaatcattctccccctttttggcaactagcaccaaaaaggagagaaccaccaggcacacatcaccactgaggaggaggcagaccaaagaattgatgcgccaggtgaatagcaaagtgttcttccccagactgtgctgggggaggatagcttcctgaaggatcatggggcggaggataagaagaggattgacccggatccccctggtggggaggcggggcaaactgctcacgatcatcaaagtcttcttcatcttctggagtcatgaaaggcaccccatatgcctgctggtgccactcattgatttctggtggaggaggatgaagaggcacatcaggcgaacggggagcaaatgtcatacccatagaggaagcttgacgatgaagattgtcgtcagtctcccgctgccgccgagccatctcatgcacatctgaagatatatttctgcacatggaaaagaatgctgcaataccatgggccagacgagcacccatcccacgaccacgacctcgaccacgaccacgaccacgtggtgtgggagatccgcgaccaggagatggacgcgagggtccggcagcagcaggtccacgagagctggaggacgctttcctcagacgccttgctggattatttggatcaatccagaagggggtgtaagatagatgtcttgtgcctttctcatagcgaaattgagtcaccacttcaatcatcttcatgatgaagggggcgtgaagacatcccttaagaggaaagcagacagcatgaataatttcttgccaaatcatgtcaaaaacattgatactttctgaactatttggcttcataa

SEQ ID NO: 57285 - DNA, 478 bp, Zea Mays
tcttggactagatctctggtcacgatctgctcggctaccacccggaattctgccacagcttgtcggcatggtgaccccggctccatacggcacaacgacctagtcaacccgtatctcaaactcagagggctcagtactagcgtcttgagcttctccctcctcttctcatcggccttcacataaaaccactcatttttccaacccgttggccacttggtgcgatagctaaccaccgaagtcttcatatctttgtggtaggcgaagttgtaacaaccaaaattctcatgaagaccatcttctctagcctttgtatgataatgaagctcgtgcactcggcagaaagcttcggcattcagatatattccttggctttggagaacccagatgaagacattgagcctaacgatagcgttaggagtcagctgatgaagatagatctcgtagttttccaaaacttctccaatcatttcattcaaag

SEQ ID NO: 57286 - DNA, 413 bp, Zea Mays
gccgaagccagacaatcttggatggatctagattttagaaaaccatattggttggcatggataagggggagaatgacttgttgcagcatgtttgccaacaacttggttataagcttgatgttgccattgagcaaggagattggttggaagtctgccagttttgtagagtgatccctttttggaatgagtataatatgggatccattaatactccttacacatatattcccatcatacaataccagacatatatcatagaaatcattctttagggtaggccaatatttcttcatgaattcattgttaaagccatctagtcatgatgatttatcagttggctaggtcaggatgacattatcaatttcctccttagtgaagggtggtttaaggcattcaagattattgtgattgtg

SEQ ID NO: 57287 - DNA, 433 bp, Zea Mays
cactctttttgtgagagtcctgtgccctatatataggatgaaaagaacataaatggaaggattcaatccgaacaaaaggcgattgttagctatgctcgtgtaatggatattaatagaactcaaatagcatctgtagctaacatcttagttgtgtcctaggagttttactgttactgccctttttgtaagagatgtaaatttctccagaatcacactttgtccaagctaatcaattattgaatactatgctaatcaattattgaatactatgctgatttcataatatatgcctgaatgaaacatcaaaaggaatgctaatttaacgtgtttggtgtttgcacagtgcacacgatttaaaaagtgcccaatgcaaatacgtgagtaagtgagtaacatgggagcgaactttttttcctcgaataaaaaaaacatg

SEQ ID NO: 57288 - DNA, 341 bp, Zea Mays
attacattaaatttggacaatacatgtggctccagccgtattgccctggtcacgacacgcaggtcatgaataattcattaatatgcaccatatacacacaatagccataccgatcacaagatgtcctacaaaaacaggttagacaaacacgtttctatatgttcgccactacagcagatagccacggcggtccatgcatcgtatgtatggaaattccactgaaaatctcatgcggttgatcaaatcaacccaaatccgagactttcgacccgaagaagattacactcatgacgtcgatctgttacgtcaatctgctagttgtgtacgcagttagccccgat

SEQ ID NO: 57289 - DNA, 433 bp, Zea Mays
cttgctgcatagtgcacaaccaagacaaaataattatttagttaatcaaagcaaagaaaatgcttcaaaaatataagtatttacctttcttgaacatcaagtcatcaacctatggagcattcaacatatcaacaatttggttcatcctaacaaatagtgaaatgtacaagtaaatataagtattcggtcaatgaaagcaaagaaaataaatgttaacaaaaccactattaccatttgttcctcttcatcctccaaacaagttgttagtgcatttataaaacaagattgatcacctaacatgtctgcacgagaccaagcttgcatacacatcaagccttcaactgttttttggagcaagtctacttcgatgtgggctaattaccctccctccagtactaaaaacagattctgatgccactgttgtaactggaat

SEQ ID NO: 57290 - DNA, 970 bp, Zea Mays
cacgggtacgtggaagactacttccttagtaaaaatttgacccccatgttgaataataagacctttctttgattcaaaactatgtatgcaatgcttctcaacaaaatccttgctcatgaaagtatgcgatccaccagaatcaaaaagaatgacgacaggatgattggcaacgaaaaacgtacccatcatcacaggctctccttctggtgtggtagccacttaagtatagtagacccttctagttctcctttcacctttgcttgtccgagtgcttgccacatttcccttgccttgagatatgcttccagaagccttttggaagtttgatttatttttcttcggataggaacaatccttgatgaaatgcccagacttcccacagttgaagcagctattagatgaactcggtagggctgggaaatgagtaccaggggcactcggctgaatattttgagtagggacagtagttggatggatgaagaccagttgcttgaaaggataggaggatgggcgaggaaaagagcgatttgggttaaagggacggatcactagccttgaccgcttttcggatccttgagaggacccctcaccaccttcatgtccaaacctttttgtctttccatgtcccgaattctttgcctccaccgaaagtgctaagatcatggccctgctaaaagtgagatctagacaggtggccatcttccgctatagtcgatcattcagacctctcatgaaacaattcttcttttttaggtccgtgtcaacttgccctaaggcatactgagagaaatggttgaacttggcaaggtattgcatcaccgagtctcctccttccttcaagtgaacaaactcttccagtttcatctatagaacaccatctgggatataatgctccctaaacgcttgcttgaactctgcccatgtaacaagatgaccttcaggttgaacagctacaaagtttgcccaccag

SEQ ID NO: 57291 - DNA, 417 bp, Zea Mays
gctctgaaaagggaggaatgcacatccatgagtaggcagcaacataaatacaagcagaggcaattacacaaaaaagaaaacgacaatgcagttggtagtagtaatataaatattactgcctacactctctgcataaatacaagcagaggcttcatttctactacatttaataaaaatggtgatgaaaacattcggtcctaggaagcgttcaagtcgatcttacagtctttgcaccttgtgcttgtctggcttccagaagctagaagaaatgatgcccccgagctcgagctgcatgtatggaggatttctgcacagaggaaaacattagggaagggagacgatcaggagcgaaagcaaaccaacaaaatctaatgcacgcaccaagttttgctggaacgccacccagccagcctgccc

SEQ ID NO: 57292 - DNA, 634 bp, Zea Mays
gtctgcaaatccaaatatcaccagctcgtaggtgacaaactgcaactagcatgggacatggacatccagattcttcatgcaagtcttcggcagttactttaacaggagaaccaataagccaagtagccaaaatcgtaaaaaccaaaaaaaaaaaaaataccgagacgagaaagtgacggtcctcatggacgacccgtggtgttcaatactccaatcgccctgggtatcggtcgccctgctccctcgtgtgcagcagttccaggcacgaagcaggtgtatttcggcgatgattaagaatttaggatctagttacctgcagcatgcgtgatccagagatgtccgtgccaaccaaacagcacccacggaggcacggagccgtccacctgctccgtgaccggcgacgactttgacgccgtgtccaaccaaacggcacttcacagttcattcgaagcagacagtatcgcgtcacagtaaaggttaaagaagacgtcagaagacagaagcaataactgcagacagcaattgtcggggtaacaatcaacacccattactgcagaaatggactggtatttcggagataatccttgctctttttatcagctccaaaattaaccttcccatatcctcctttttc

SEQ ID NO: 57293 - DNA, 4271 bp, Zea Mays
gtctagtccacgtcctacaattttcccttttctctgaccaccattgctcccaaatatgatgtcttctatcgtctatacgcttgtttctcctccatattgtcgtatgaattatgcgatcacgaaagggaggggatactgggtagcaattggtgtggagaggaaaggttcaagttgattttaaccaaggcagcacgacggcagcgacgacgacatacaacaacacgacggtaggggtgatgatggcagcgccatcgggtggtggatgcagtggctgtcttgactgcctgcatgatattgtgcatgcactatcgatgggatcatgcctgacagtagagcagcggcctgccatggctacgggaggtgcgcacaaagggagagatgtaaaagagaggaaggaaaaggtggagggtaggataataggaaatggagtgggtaatttggcttgcatgttcacgcgacaggggaagaagggtaccaaccaggatgccatggttgtttgggaggtatgttcccatcgaccttgattatatttctttacattgctaaagggttcacctcttttacactctgttctttttaaatttctaatgtttattatcattcagatcgtctatctataagaatcaataagaaatacatgcatataataaggcatattgaactagaaaagaaagactaaaaatcaaattttgctgagctatccacccttttaatatctaaggtgacattatatattgaaacaattcagtttttgtacgtgatgtatcttggtggaaacaatcaatgacgtagagtattggccaccgatcttcattattcctaaaactgtgcatagcctcttgttcctcctctacccttggatgcacccctaacctattcttgtccattcagcatgctaccaccctcccttcttttggcctccctcaactatcaccttttgatgtgtttttcttcctccttgcacatccatagatcaaatagttaattttggatttctcattgcgttctcatggaatatttctttcatttttcttattttctaaaaatataatataatgcaccaatcaaaattataaaaaggacaattcaaaggatggtttagcgatggagcaagcaacatctccatcagggatggaggcagcagtagggcgggcgctcgagccccctcctgttcctgagaccatggagtcccactgaagtctccactaaaatttaaaatgtacacaatataatataaaaggggcttctatattgtagtgatttagtttaggctctcctaaactttctcttggctccgtctttgatctccatacagtttcaattaaaattagaggtttggatattacaaacaatatattgatttataaaaaaacatcttgtgatttgaccacctcaaaatagtatcactgcttattattaatgtagtaaacgaagattgtgctttgggagatgtatgcaataaaaatatttaaatatcgattcattattgactgcagtgagttgtatataaacatttgaagtcaaaacaactatgtttctttgttgatctacaaatatggtatatataaattagagcatgtttggcatggctctggctcttttaattatgctccggctctggcttctcttcaagagcaccttatctataggagctagtgttttttaacaaaatcgtttgataaaacagctcctcttgacacaagagaagggcaatatggagagtgggggaggagccgctaggagctagttttttttgctctggcttctctctataaaaacgactctggctcctcagtgctctttgttgagagctatttttagaccatttggaagggctcctacaggaactggagccggtttggaagccctctcaaacacgcccttagttgtcaaagttgtattttgtagattctgtgatgtccaaaacaaacttcctctgaccagatcaagtacattttgcctaagttttgacaatgaaactgttgagatttaaatagcagaacgtgacacgagaaaactgcggagagagtggcagaggggccctttctccctcaagccatcacaatgcgcaattgggtctaggagcaaggttttggtgtcgtgcacaaaaattccaccgtgcagcgcgttatccttcggtagtgtgtggtggtgatacaagtttgacgagttttgtgggtttgtttgttcctgccatttgcctgtctgcattggctaaaaaccttggcaagcataggttagatccaacaatggcgaccctttaggcaccactctcttcttggaagcattgccaaatttcccttgaaatatggggaaactctgccttcattgttaggtgcgctagggctacctgtgcgtaggtagctgatgcccgaagatgtggatcaagtagatgagagatgatgaggatggttggttccattggttgtatgttcttgtcatgtttgtgttggttgcttccggttggtcagtcaagatgttgtttggaggcttttcgatggttttcttcagtgatctttttgtttctaaggtctttgaacctatttaaccttataaacttagtcaattatcttctagctacgatgaatagtagatctgccccatttctgaagtttcatataaaaacataatggatatatgttctaggttcaacaattctatatagggggcattagtctagattttagaatcattataacgctgtatcccaaaagacaagtagaaccacatgctaaacacaataagaacatgtctcaaattattgaccaatcctaaacaataaagaccattcatgggatacaaaagtctgcatagctactgcattcgaattgtgggaatcatgcattaataggtacattgaataatcggtttgatgcaagtgtgtctagtgcgagagtaagtcatgtaaaagggtttttgtttagacatcccaaaagaaagttcattcttttaagccaatttatgcttcaaataacacccacaattgtcaatagattcacactaatagtttatcacatcgattcaggtgaatgggattttcccccatatttctaggtggtgtaaattgtaacacaatatgagcagtgtgtcgaataaacataacataatggtagtcaagaaagagacattgaatggattaattctaggtacaaaagcatcaatgtttactttcattataattcattagcactagattatgttccctttcattacaaatttggcttattttcacttccattttgacatgctcaaataaatgttgtgtcaaaacgtatttcataagaaaattaataaaacatatttaatgatgtagatgttgatgcatttttctaaaaattgggtcaaatttagcaagactcgtcctatctttagtagtgtaagaatatattaatcttcataggtatcttaaataaaaaatatgtgtagagttctagatcttgtcgaatactacaacatagttatagagcatttgtccatccatggttgtttgactatttttttttaaaatagcatttaaagttttgcatacttgaaacatataaatgggtctctagaccatctaaaaaaatagttgccaccttgcacaatttcaagataaagtttgtcttcatcctttttatttataaaaattataaattccatgctgcacctatttctaaggtggtccatattaccgtacctaaggtaattttaaatgcttgtttttctaggggtgcttggtaaaccaacccttggaatcactttccgttgagggtttgtctcaatatccatttatatgagcagctgaaattaaaactgcgtctaaaacaagtgcacctctaaaaactacttcgtgtaatactccattcttgtttttctaccacattaggtttgttctaagtaaaacattactatctttgaccttcattttgaaaaatacttaacgttatggattttatatattgaaaatactttttatagtcactcttaaaacctaaatcttatattataaatatatatatatatatatgtatatatttaaattaagtcacttttaagacgtaaatcttatattacaaacctatatatatgtatatatttaaattaatatctaataatataaacatttgactgaggataaacctaacatgatatgtaaataaaaacggagggagaagtgataaaaggatgacatataagcttgaaatctaataaaaatagagattgaaaattttccattaaggcagactccatctttctttgacaatggcgccctttaaactaataagtac

SEQ ID NO: 57294 - DNA, 512 bp, Zea Mays
atgaatttcgctaaggctttggtgttctgcttgctggcgccgttgtccagtgtctgcttatccaccgtgacctcctcgggctcgcggcggatcccaatggcggatttctcccagacttctctctcttctcttgtgatggcggggctcggtgcgtcgggtatccatgggaaaggggactgggcacggtcggcttaaatacctggggagggcatgcaacaaccgcggaagggacggagtttgttgagattttccccgtgcgcaatctccactaaaatcgcgtcgccgacgaggactgtttccgcacgggattgaccccaaggtgcagcagcgatctctaccatccacgcgccggcctggagcaaaaaccatcgtgcggtcacacgtccgagctgggcaagaaggcgcggcgagaatctcgtgatttgcttggcgcccacggaaccatagcagactacgggagggagaaggatccgcgcagtcagttcatcgcgcggcgtgagcggaattttagc

SEQ ID NO: 57295 - DNA, 355 bp, Zea Mays
aagtactcagaggtttcgggctgttcctaagcccgggctggggctggtgtgtttccgctgtggtgatgcgcatcgccgtgcggagtgccagtggagtggcaggtgttctatctacagtcaggaccataaggatgtggtgtgtaggaggaatcctaatgggaagctcagatgggagccggtgacttcctcctcttctcagggcactatcaacatgatgtcaagtgctgagcagcagttttcagttcctcttcctccgcagcagctctatgtgcctgggacttctcagttcgtgccgatgcagggttttccttagtatcaggccgcgcctactcctacaccgtctactcctatgtcg

SEQ ID NO: 57296 - DNA, 531 bp, Zea Mays
tcggccgccagcacctcccttccaaatttggagccgccactcaaacaccctataaattaatgccccagcttgctccgctaagtaattgtgcacccagtgaaccagccctcacctccaatcatcccccacaactccccaatttgggatttcccccaattctgttctctacgccaccgcgaaccaccgtgccgtggatcatcgtttccaggtccgttcataccctcccgaccctcgttttggcattcttatgtgctatagatgcttatcggcccagccaattgagctagaccctgtcagattactgagaacatattggattgtcctcggtgtgcgccatcaccgtggatagggagatgttgagctagaactttgcatttgattggggggttaaggtcgttataggtagtattcggtgtcagccaggttagggctctgatcattaagcatatctcccggtacaagttcaccggaaagcatgctcaccggcgacctccatcggggacttgacgttgtaaaggaatcagactccga

SEQ ID NO: 57297 - DNA, 495 bp, Zea Mays
cacgtattcatcgaaggagggcagtagctaatccagaactagagatgaatccccatccaaatcctccacctgcttggactgatgctatggtcgctgcccaaatgcaactgctgcaacagaagtccaacatcatggcagagatgcaagctcaactccgccaaaaccagtagcatccaccaccaccaccacctagggataagcatcacgagttcatgagccacaagccacccactttcttcagctccccagatccactctaggctgatgattggctggagatagtggagaagatgctcaacattgcccaatgcactgacaaggagaaggtcctatatgcatcgggtcgtcttactggccccacgctgactggtgggattcttactgtgctgctcacgccgctactgacaccgtcacctgggcagagttcttagctaatttcaggaattatcatattcctactgggttgatgaagattaaaaagaaggaattcatttc

SEQ ID NO: 57298 - DNA, 647 bp, Zea Mays
gtggagtaggcattggccaaaccatgggataaaatcgccgtgtctcgtgtccatttactttattacgtattgtcttcttgagttctcatattcacctgtattatatctcctaaggttgatacacatttcaaaggagcaatcaagtgaagagttctcctctctccatctctactcataacaacttggttttagcattcactaacactcattataaaccaagtttgtgttgtttagagttgatttttgcaggatcacctattcaccccctctaggagctctcaaatgtacgcgtcagctttccgaaagagctgctcgatcgtcgtgggggcctcttgaaggatggcccgcacaaagacctcatcatgggaaacctggtagaactcctcgatcatcgccacgtcagtaatgttagggatgcggttcctcatggtctggaaacgcttgaggaatgagcaaagggactcgtcgttcttttgcctgacagacttgaggtcccatggatgtgtgggcttgtctgagagtgattgaatgttagaaacaaacttgttgcagaagtcggcccagctgttgatgcagttgcagggaagatggcagagacactgaagcgtgtcttgccccagcacgattgggaggtatgccgtcatgat

SEQ ID NO: 57299 - DNA, 433 bp, Zea Mays
aagccaatggggtgagtggacagctccaaggggtggaatccgcagaaagtggtcaatctgtgaagagcgatcgcctcgatagtatcctcagcccagtatccaaaaaattcagagtccagcgaacgccagcctggctgcaggggatgaggctccagggtcatcctcaccctacagcggggcactcggtgcttctcgaactgctgcaccgcgtactggggaggtgtcatgtaaccagctccttgaagtacctcccataaaatacgggggaaaccctctcgtgcaagcccgtcagtgtgggactgtgcattcccttcatccgaggatccgtgagaagtcatctgtgtacggttaagcgtaagtaaaagaaaaagaattataaaaagacaagggatcacaactcagcctctctatgactatgacaatggtactggat

SEQ ID NO: 57300 - DNA, 337 bp, Zea Mays
tgtttaaggtacagctgatgatgacaaagctgagctaaaactgaggcaaggtgctgtagatgatcctcccaggttcgactgtatacaagaatgtcgtcgaagaagaccagtacaaatttgtgaaggaacttagagagcgcttcattcatcaaggcctggaaggtcgaaggagcattacacagtccaaaagccatgaccaggaattcaaaatgcccatggtgagtgcgaaaagccgtcttttccacatctacttggtgcatccgaacctggtggtaccctgatcgcaaatccagtttggtgaagaattgagccccatgcagttcatcaagcaattctt

SEQ ID NO: 57301 - DNA, 486 bp, Zea Mays
aacaaattaaaaactggaaataaaaaagaaaaggaaaaacgggaaagggaagaagtcgcttgggctgaaaccgtgcaaccgacccactttgacctagattcatcgtggcccatttaccccaccgcacaggcttttcttttcccaacttcttcctagtgtcacttacatgcgggccagtcttgtcagctccctctcctttcttgagtttgatgaaaacaaccgacctgaggcggccgcaacaaacctaactaggattccctatggccgttgtaacaaccccccctctcgtctggtctcaggggggaataaatactcacctgctatcctcccctcatccacctagagctgtgtcgaggaaactatcgtgtgacagagggcaggatggagggagaagttgctgctagcgatttgtgactacgacaacacgctgcccacatgggtaggtcaaggtgagtcaccggcaagcactgtgtgtttgaggctttg

SEQ ID NO: 57302 - DNA, 477 bp, Zea Mays
gcagtacgtgcttcaaatcgggaagtcgtcttagaggccggcgcgcctgacgctagagttttgattcctgctggtgatgctgagttgatccccaatgatgctcttcagattgcctcggttgatagtccttcgtcgagtcaccaactggcttctcatgacttggggcttccttcgttcttctccaatcttcaggtaatttggcttttcccgatttggctatccttcgggcgaaatattgtctttgcactcattcgttttcaatattaggctttggttgacgagatggctggtcagttgagatcacagggtgcctctgtcccagaaagagctctgtctctgtcgcattgtaatccgatgctgcttcaacgacgtgtatttgacttggagatgacaaatgctggttagtgcctctgtttcctctttggctacttgattaatctactttttgactgaatatccttcttcaaccattccttg

SEQ ID NO: 57303 - DNA, 691 bp, Zea Mays
ggatggtccgccgccttgtagagaggtccctaagatattgttccccgtgagtgggatctagggataattgatatttggcccaaaaaggcaccaacacactttttggtgactccgctagggatgaaagatcggatctatcagatctattaggttagatctattagatcggtcacgatggttgatcctaaagatcacaacgacgtttccctagaaaatgatacaatgtcgactaatttgtcgtccgctaagcgtaaggaattggaagactacatgaagtttgacaaggtgttccagcgatagcaagctcaggggcgcgagaatatgaagagttggtacctctcacactttagggtacatcgccatcataggtcgtccaagagagggaactaaagtttgctttcctaacagccctattgcaacagcccccatggtaagtaacattgtgtcatcccacaatattcaattgattaggaattcttttgatgatcatattgaaattatggtggagtctttggataagatagagcgcgcaatagaaaattttcatatacctaattttctgtcacacaaatcgagcactaaaacagccacgccaaacacatcgaccacaaatgggttttctcagtcccaaccatattatggtactgatgaactcaaatccagggcaaccactgccaccacctacattgta

SEQ ID NO: 57304 - DNA, 736 bp, Zea Mays
gggggatccttggatgaaataaaccactgagctcgccggaattcctcactgtcgccataaacccgtgctgcgccgtggccgggcgttcctgtgacccaatagctggtaaggagctttcctttgagtctgttatcatctccactttgcgtagctttcatttcatcggagttcaggctttgggattgcggggctgtgtcacgtcggccatggcgccaccgctcggctttggggcgtcgctgccctgtgtccggtgggggaagagatgagagagttgtgttgaaggggataagatggggaacctagatctggaaactgacggatgagagtcgactgtgggcggtattaaatccaaaccgtagtttcttcttccagcggctatggggagaatagggtgtcgcgaaccgtggaccgtggatacgtgatccagtggttgaaatgcaatgatgggccctcgggaactcgatctaattcgggcgctcgattggggatccaacggctctcaaccgtccgtaccccttcggccaagatatcttactaaagagacccttactttttcagtaactaacccccgatccactgtcgctgtgcgctgggtctcgggattcttacatggtggcccctgccttctctagtatttggcgcccagtctagaaattaaagaaaacaaggaaaatagatttagaaattgattttgagtataaaaataattgtaaaacttgtataattcatagaaaat

SEQ ID NO: 57305 - DNA, 380 bp, Zea Mays
tatgttcctaagaaaggtttcacgtctctatataaagagatatatattataccctttataagagagtagaagatagaaagagggcagagacataaccatacatattgtgtctcatttgttctctaagtgtgtattgctgggaaagggaacgaacttctatgacttttcacgtcccgactgctgacgggagggaagtgaacgaatctgatgatccatgataatatagtccttgacacaaagcaacagcgagccaatgacgctggaagccaagttggtggacgaagcagcttgaggctcggggtctagctgctagctgttatagagtgagaaaaagggacagtcgtgagccaggttcccacacttttggaccaacaccaaca

SEQ ID NO: 57306 - DNA, 667 bp, Zea Mays
gtcgctgccggtgacgttcgggttctcagcgtccccaccacgctacagttcgccaacaccgtcaccaaggggttaccgtcgagtgtattcaccgattttcaatccagtctcaacgtttgtacagaatagagttgaaactgcggtgttgtgttagagtaccagtttaaggttttggggttagcccaatgtaattacagtcgtacccctgtgtaataggacaggcccaacaaccttgagtctattaatatatctcccaaccctgagttagggttaaggttttattctccaaatataagtcataataataagagaaatcgttagcatttagcaacataggatactcacagttccaagggtgagcaaactcttgtttatgtatgaaccttctttgcgccgtaaaccagttgtttcagttttggaactctcagacccagcaagatcaatcaagttctgataaaaggatataaaagaatacagtaagttagaagtcaagatcgctactcatgtcttaaacttctgtatgctaaatgcccatagaatcaaaggtacaatagactgaatgagaataaaattaagtatactaggggagaggactcaccaactgagacaacttgacttcttctgcttcattttcaccagaggggctgctctcgattgtctgcagtat

SEQ ID NO: 57307 - DNA, 810 bp, Zea Mays
tgatcctgttgttgttctttttgtccatgtgaatccatctaatcaatggcctgatgtataagaaacttttttgtaatttatttggattacaaatgtgcataacattggtccaaatatatgtgtcggtgtgtggacccgagggcctaaccaaccagtgaaataatgttgtgtgcccctaacccagatggtgatgcaagatggcacaagtctttatcctggttcgagcaagagaaagccctacttccagcagagggagatgagacttatattacttgcacctatgtgcttgcagtagggaatacaagctaagtgggagagggaaggatccaaagtccttggggttgattgaggctagtgccaatatcgtgatggaggagaaaaccgtgaagtgttcgcctacctccctgaagctgtaggctatcctatttatagcctcaaggagggctgcctagagtactggagttggccgtgtatggtgaggaggtgttgtcgtgcctctgtagatggtatggcctagagcatggtcttgtacttgctgtttgacttgtgcccgcttgatttctgctgagagccataatcaggaccaagggctcgatcacgtacccgagccctttggcaagggggttgcccataccgtagtggttgacacagtagtaagtatgggaaaaagcccccaaataatacgtcagctctgcagtatatggtgacgttgggcacctttttgttgcggatatcgaggttggagctaggcttgggcgaggcggaggtctgcccgaggtcgcgatcgagctcattccaggattcgaagac

SEQ ID NO: 57308 - DNA, 414 bp, Zea Mays
gtcgaagtctcgatctgcatggccgatcggcgtagtgcagacatggcagcatcccaacgctgtaaaacatggcgtccaggttgatgctaggatctatgacgcctagacgtgaactctaatccttctactgcttttgggcctttgctctgcgctctatgttgcaataggttaaatttcttctgtgtgcttttgatctcttaaatagagttgggtgctatagaaaaagtgggaaaaaagaaccaattgaccagttcttaccctctatttcaaacacatacaattatgtgatgaaatatttttttcccgcacatcatcacaggtccacaacgcttccgccagtaaaactagccttagacatgaagagcatcaccaaaaggatatcataatcctgatcctaatctcgttccatcaact

SEQ ID NO: 57309 - DNA, 914 bp, Zea Mays
tgtgtgacttggagtcatctagattgaaccaaggatgaagacacgagatcttcgaggtactagagcaaggtggaaggtcaaagtggctgaggtacttaaagccaaggtaaagaagaggctctacaaaagtcaaggttaattatgtgaggaaggtcatggtgcattgaggattgcaacataaggacatgacttgggaccattgaagtaattcctatggtttatgttcaagtcataagtctcaagatcatagctcaagaagatggatatggtcactagaagacaagaagtactaaagtcagaacctggaagggacccaaaagagataagtttgctttgatctttagtttgggtcattcttgtgtttggatatcttttatgtgacctttgtagggtgttggagctcatggatagctttagatatcaagttgtgtcaacttggtgcttcagagtccaactccaacctcaaacatgccaaaaaggagaaatcaattaaaaaggttaggtatgcaaggtttgaatgcttggataagttgcatactccttttactacgtgtttggtactttggtttggctactaactcattttcgcaagaaaagtacattttgaacttagattgaactaaatttcaaatcttggtgaaactatggtgaaaatggtgagttttcatacttagttcatttgattatgtgctaataatgttcgtttaagtcatagggaagctctcaaaaaagtccaagtcaaatggtgtacaccttggttcaaccaccctgacaccctagttgaactgccctggatccaggttcaaccgagatcaggctggttgaaccgagtacttcaaccgggattggctctacataatgcatgttcagctaggattaggctagttgaaccaggaacttcaaccgggatcagg

SEQ ID NO: 57310 - DNA, 296 bp, Zea Mays
cggggtgagcctcgacctctcttgcctttacccatggtcggatggagaagaagacgaagttagaggaaagcaacagaagatcaaaaagatgagtgaagagaacaacggtgcaagcaggctatttatagaggccaggagtgaccgtccacttcctaccatgctcgccgaacagccgcaagtattcaataagaaattcaagccgcctgaaaatgagtcaggcaacagacgccgcttcgcataacacgacaccatttggaccaaggtcaatgctcgagcggtatgattacaccctgcgg

SEQ ID NO: 57311 - DNA, 623 bp, Zea Mays
ccggatcccgcaaaaacttcctcaacatagagacatgaaaaaccgggtgtacccacgccatggaatccggcagttgcaagcgataagccaggctgcccacttggtccaagatagtgaacggtccaatgtatctcaggctgagctttccggagacaccgaaccgaacaactcctttagtaggtgataccctgagaaggacttcgtcacccactgcaaattccaaatcccgcctcctcacatcagcataactcttctgacggctctgagcggccaaaatattctgacgaatttcccgaaccttttcagaagtctgctgaacccaatcaggaccaaccagtgatctctctcccaaagtctcctaacacagaggggagatacatcgcctgccatacaaagcctcaaatggtgccatcttgatgctagcctggtagctgttgttataaacaaactctgccaatgcaagatgatcctcctagctacccttccatgacagaacacaagcacgcaacatatcttccaaggtttggatcgttcgctccgactgaccatcagtctaagggtgaaaagcgacactaagtgaaagcttggtgcccaatgcactgtgaatactctcccagaatttg

SEQ ID NO: 57312 - DNA, 699 bp, Zea Mays
aagggtatttggtaacattcattgtgtgggagcaatgggtgttacagttggtatcaaagggataggctgtaggtcctagcaagtggaataataataaattgacacactgcacatgtaggatgggtttcctgctttactattgatatcttatgttattgtcagtgctggattgacattgtttgatgaagtgatatgccaatcttatctacttatttacttactcatgtggctgcagttatgccacctcgtagggctcgtggcagcccgcaagcccctagtgggaattctatgagtccggcggcaatgttagccgcgatgcaggccatgcagcatgagttggccattctgaggcaggctattcctgttgctcctgcgggtgctgctcagggtgctagtggtggaggagtgcccgagggcgctgttcccgcgggtgctgcttcaggtggcggggctgaggagcctcttcccgtcagtggtctttctctgatgcagtggatgggcatgaagttggatgcttttgatggcagtggtactccggtcgaggcggcagattggctaacttacgtggaggataagatgaatgtcttcgagattgtgtatggggatcgtgttcactttggcacacagctgctaaagggagaggctcaaatttggtggagaggcgtgcaggcagctcactcctcttcaccaggagtcctg

SEQ ID NO: 57313 - DNA, 373 bp, Zea Mays
gctgaatagagtttttgatgttatcggctttgcctatcccgattactgctttccggctcggaagcatggggcgaaaaagagaattgcatcatcgaccccctctaccaagccgcaaccaaagaaaatgaaagttgtgactcacagaccgaagtaatacatcttggagagggctgctatacttcctgctgcggggatctcaaagacagaagctatttagcttccgaatatatcttcccaactttagaggtaatatccgctgtagcagccgaagtttccaccattcagttggagaagacagaaccagagagctctaagaccgaccagtagccgaagctacagagtccttctgtaattccagggttgtcaaggacag

SEQ ID NO: 57314 - DNA, 1544 bp, Zea Mays
cttcgtttatccgttgtccagtgagttgtgtgatgattgccggacgccatgagcgtttttgaacgagagatgcaatgtgcatggactcaagaacacttgggtttggtttggcagctgcatcattctgtcgtcggcctggccatcacatgaacgtttttacacgcttttctcgagggcattgaaatactgccaacgattaccaagaagagtgtactttacggagtcttgtgctttcaaacaatgtccctgcacctagaccttgtcagaaactcgccggagagacaacctccaccaggtcgccggcgatcactcaggtgaacgggcacgcacgcgaagctagagagcaggacacgagttggtgctgctccaattggtagaaacgttttctgaatagattaactgactgtaaaaatgcaggcccaaggttacataagcgtgtttctacttcagacacacaacaccacacatgcaccacaccaaccttctcattaaacacgatcagatcttgcttacactatcagtcaacaggttctgaccacgaaactgacaacagcgacacacaggctaaaatgagcggccaaacgcctatgacagactgaaactggacaaacacactgactgaaactggacagactgactgactgaagactgaacaagtgtgctcaaggattattctgacatacctgaacttggaactttcatcattgatcaatgactgaacggcctacatctctacagtctgcacataataaaataataatacatacattttatattttagaagtaactctagtgggattctatatcctcggagcggtagggggctcgagagtcgcccgccccacctctaaccgtccctgactagtgactacgaccgtttcctgaactgcacaagcatcgggtgtatcttctcgaaggccgcgcatatctcttcctgcaccttcgctcctgtgaggacaatcttcccggagacgaagacgaggatcacgaccttagggtccaccatacggtagaccagcccagggaagatctctggttcatactgtcaaacaccaagagagcaacaggctaatgagtcaatggggatcaacaacgacacaacaaacacgtttacaactaaagaaagagctgctataaacttacagtggcagacaagccactggccaaagcgaggccctccagacgaataggaaacttgaggtcacatgacccaactatattttggaccttgaaatcctgcatatgtcagaagaacccattgagtcaatgtgagagaccagcaggaatccgatcgatcagagtgacaaaagcattaccttgaaccgagctgggaaaccgagcttctggacgatacgcgcgaactgcaatggaggatagatacgtattagtcacacgtcaaaattcagcaaaagcatccaaaattggcatccatgcatggcgaaacaatatgacaagcagtttccatgccttacgcgcagcgagccttgaatcggcttcgctctttgctccggtgcagaccatcttccctgtagcaaatatcagtg

SEQ ID NO: 57315 - DNA, 428 bp, Zea Mays
tgaatctcataatgtcaggatctcttatttaccaacaaagcctctaaatctcatagttttgtgccgcttaactgaagtagactagggtcaaatggactttgttcctgaacaactagaataacttgggcagtcccagattcgagatcactaaaaaccctccttgagcccaccaagaaatcaagtgacaaagtagacatcatcataagcagagttataacacaaaattcgttgatccatctactcaatgtattccacgatagaaccagtctgctttatattgtccatctacttcatatgaatgtgatattgattaccaaaacaagcacatactgcatcgcagagaagaggccaagagccgaacctgccccctgagctcaactgatggcaaccaggtagctacagccccttcaaagttcagcgcagcaaaa

SEQ ID NO: 57316 - DNA, 545 bp, Zea Mays
ccggagacgagaggaacgggcatggcagggctctagaggcttggggaagggctcaggcgcgatcagggcgacctggcaaactgagtctctagcacaataccggcgtgggggcactagagagcatggaacacggcaaggcggtctaacgacggtgtggatcaactccggcgaggaattgcgtgggcactagggcagtaaaggatgaattaagtgcatagggaggttgctaaccttgagtgcgaactcaggagtgcctggagatggcggggatacggtgaagccttgggtcgacgacggcggactccggctgcacaggaaaacactcaacagatgtcgtggaacgggcgacgagctttggtgaacagcggtggagttgcctggttgctcgcgcagggcgggagagggggcgagagagctcagatgagagcgcaaattagcagggggaagtgggcaagcggggtgcgggctctaaagggacgagggcatgaggaggtggccggagaacgcgtggatgtgggtgcgtccacggcgggggcgtgggcgag

SEQ ID NO: 57317 - DNA, 585 bp, Zea Mays
ggcaattcttgaggtcccatgggttgttaggcacacatacgaggtcagtctagctctgaatgtagctaggcctctagttctccaaccatgtccaggccaagttagctaggtacaagggaacatttcatataatgaagtagtcatgatccacccctctggcttgacatgtcaactggtagtccttaagccataggttggggtttgattctcccgaatatttcacaatgtttgtgggcgctcgatacagttgagaaattggtgcttggagaatatggtgaccgaaggcctgagggcctaataggggtgggctcaagctttggtccttgtcttgatcaaaatgaccacaacggcttttgttgtaccaacgaccatcgccaggtattttggggactcgctacgcttggtttctaggatgtttcgagcatccctgactggtcctaggatttggtggagcgagggccgaaccacatttctgacactgtgctcaggctactggactgatagagagtcttatcctagttgtgttgttatagtgtgctggctgacctcgggtccactccatcgtgacatggagctcttagcttg

SEQ ID NO: 57318 - DNA, 594 bp, Zea Mays
gagttatgtgtattgaactcaatggcatctatgaacttgcctggtaggctagagctgcatgaggaaacagtgcatcatgcactattaaataacttaacaaaaatactttgagtttagcatttttttagagaggctgcaatgcaatcacaattgtgaaaattaccttgacaatatctgaggaaaacatgcaacaatgccaatagctcgacatgcagctgatcttacactaggaaccatatcatttaacgccgcatgaacctaaacaagaatatttcaatacaaatatacatacaacgtttctgggtaagaaaacacaatggaatattgaaatagactaatgagattcccgacttacagaagaagaggtcacatagtctctcttattttcaggcagggagaagaatacatcagaagtcatgccagcaaagcatgtgagggatgctgtcctgacctagaaataaacagatactttattcaaaccagggaaaacacaaacaaattggtcctagttctagctactccctccatcccagaaagggtgcacatatcgttttctaagaaggcaattaatcttaaacttgaataagtttataa

SEQ ID NO: 57319 - DNA, 401 bp, Zea Mays
cctaataatataggagttgcaactattagaggaaagcaagaatttaagagttagtctcctcgtggcgctacccaatgcccaccaacacaatgttggctctgatgttgtcacatccttcacctattctacgtgtcaacacttcccatgaaatatgagtcatccatttcccttcagttgtgttttgcacattagcaccttccaagtttggtcatgtattcattttatatgttccaacttgtcatgtagtacaatgtgaacaagaaatatgttaacatgagataatatgtactaccatggtttgcatagataaaaaattgtattatacactagtaaatctaagactgatttggatctgttgtttatccttgtaataataatggtgctaatttcacatacatgca

SEQ ID NO: 57320 - DNA, 590 bp, Zea Mays
gacaagtctatcttttagctccctatttgcttcacttaatttttcacatttatctttggcatctttaagggaggttttgagcttatttttggtggatgacatagttttattttcttccttcatttcttcactagctttaacaactatatcatacttggcaattaagaactcattttcatcctttaacttgtcacatttagcttttcactttctaatgatttgagtatattcttttagtaagtcatctaattcatcataggtaggagaagcatactcgtcatcactatcactatcacaatcatcaacaatatcatttttaggttgtaccttcccttcacctttagccatgaggcataggtgtgaagtggatgaaggtgatggtggtggtgaagaaaaatccccaatgatggcgacaacatttcatcattttcttcttcacttgaagaagacccacttgaagattcaatatcagtgagctagtcaccaacaatatatgcttttccatttttctttttatggaatctcttgtgcttgccttgctattgaagaatttcttttccttattctcatcatcactctcatcatctttc

SEQ ID NO: 57321 - DNA, 311 bp, Zea Mays
cctccatccgtggggtgcatatgtgctgtgccaataaaaccttgtaccggtatcagacgacaaattacctgtgatgtctatcacttgagtagtacagaagacatctagttgagattgccgtggccgaatgaaatgaaaccatgtggcccgaggcgggctcgacagcaaaacacggttaacgagcttggcgagtgaggccacggctgacgctctgtggctcccgacagcccacgctgacgctttgtggctccaaggtcctcgcttccatccaccccgacaggccacggctccgcccccaccgctctcgctag

SEQ ID NO: 57322 - DNA, 751 bp, Zea Mays
cacttgatttctctggacaataataaaatctggatggcgttccagcgttcagcttcaaccaggatcatcaatttgatagggacatcaggttagggggttcgattttttcttttcctaataatactaactgtatgaatcccaattataacgcgcagcgcatcatctgttggcgttgttgcgctcacagttgttatgttagtgctcgagtatatatacatcgagtgaaaagtaggtttggaaagttgctggatgatggaaaggatatgatgcactaaagaagcggataaaaccaggcagccagctataaaagatcctagtatagcgttattaagtggttgctacatagaacaaggacaagtgggagctgacaaggcagtaccatgctccattcattccctaatatttttagataaagggtgtcttgatctcataatttcatttgcgggtgaagatgtaggtgccaaattttacttcaataataggaacgctccgtgcctccgtacttattcgttcaatgatctgtggcaatatcatatgattgcttacttgctagtaagttttctaaagtctaaacacgcaaagcattacaaacatctgttgtgcccatttttttgtacctaatcaaggaatgcaaaattaagctacgttggtaaggtagcatgattttgacaggcatgaactcggagccttaaataaactaattggcaatcatgaaaaacctcaaaatttaaatgagcacacgagaatcttc

SEQ ID NO: 57323 - DNA, 483 bp, Zea Mays
cttcggttgggtcacgaactgtgcaatgtcattggtctcctagaggatatgtcgaaggaagttcttgaagacctggaggacgacttcgatgatgttgttgacactgtggttgatttcttcccattggaggaaatcgtctttggccctcgcatggattaatcttacatattaggtagaatgtgatctctggtccttgacttttcatgctcggggtctttgttgtaatgggaccctttttatgacatcttcccttcatcatttttattgggttgtgatgccgagttgccttcggcagacgtcattcgactcctcaacctttctcctcagattccatgtgtgcgaatcggatctgtatcccttcccttttctagtttttctacatgaaggcaccggttgtgtccatttccgcatgtttagagcaagcccccgagtctttgattgccccaaaggaataatcctgaggggtgggagggcgcatcccga

SEQ ID NO: 57324 - DNA, 377 bp, Zea Mays
gcccattcaagattttggaaagaaaaggtgaagtagcctatcagttagagctacccgatagtttgtcggatgtgcatgacgtatttcacgtatcacaacttaagaagtgcttaagagtaccggaagaacagttacccatggaagaactgaatgtcaatgaggatttgacttattcggagtacccagtcagaattttggaaacatctcgcagaattacacggagtaaagttattaacatgtgcaaagttcagtggagtcatcattcggaagacgagaccacttgggaaagagaagatgaactcagagcagaattcccccagttattctcggaaggttcttaatctcgaggacgagattcttttaagaggggtaggttt

SEQ ID NO: 57325 - DNA, 688 bp, Zea Mays
ggtcaatgggagccactacaaaattctcgaactgcgagagctacacttgtgacttgattcccaaaattaccatgaaaacccaagtaactcacaaagaactagatgactgttgttagacacccgggaacggggtgcctaaaggaagcccaagaaactccttgaaatggcccactgaccaactctccgtcgagcaaccccgcgaggtagagcagacgaccaactatatgccgagcaacaccacgaggcggagcggacgaccaactatccgtcgagcaaccccgcgaggcgaagtggatgaccaaccctccgtcgagcaagcctgcaagaggggagggcccaaaccacagaatcacatcgacacgacaagacgcatcaacaccaaatcatgttcgaaccatgggtatagagctgaaaggactctgtcatacatgacgatacgccctcgcgcacatcctcaggtatgccctcgctgacttgagggatcaatcaaacccgatcacagggacctcatcaccagggtctctacagtgacccgcataccgagagggatgggatggtacaccatactgggtgtatgcctgcgtatgctaaaaagtgatgtgaggacatgacaaaaggcagagttgcaccaaccacgaccctaaaccccatcaactctacagtatgggacacattgggcgctgctgtg

SEQ ID NO: 57326 - DNA, 769 bp, Zea Mays
taggatacttcatgaatgttgtagaaacacttggcttcttgctccatcccttggctcctcatggcccaaataaaaaccccactttaattaaagcttcgggagtaagttgatgaaggtatatctcaaatgtctttaacacttcaaccagcatcttgtgcaagggaaaacgaagcccagccttcctaaaactcttaaaaactactacttcgtctgcttcaagaagaggaacgttactctctccccaaccctcataatggatatatcagggaaatattttcccttcatcgcttcaatctttcctggcttaatagtggattttccaaaaacaacatgactcggcctccatggcccgatcttcgacatcttcgttatcgatatccacatcgaaactatcactgtctctggaattcccagatagcccagccaacatttcatcagtgatttttcaatgttggtcctttccatagcttcgtaaaaaccagcaagtgtggggtctacagtcttcttatcttcggccatttcaatgatgatcacagcaaaagccgaagctcaaaaaatagttgcgctcacagaagaagaaagctaaaacgacaatcacagcacaaagagctagataacatgaaaaatattcatagcgcaagcctctgtatatatatacacaaagcaccactgagcggtgggtcccatgattcagaacgattcgctattctagcgaagggaaggtgtttttcggacccttggctaaaggcctccattcatgtcgcaatct

SEQ ID NO: 57327 - DNA, 502 bp, Zea Mays
agtggatttccaaatcataatctttaattagctcaagccatcttcgttgtctcatattcagttctgagtgggtaaagatatatttcagacttttgtgatcggtatataaatgacaagtatttcccagtagataatgatgtcatatcttaagggcatgaacaactgcagctaattccaaatcatgcgttggatagtgctcctcatgccggcgtagttgtcttgaagcataagctatgactcgaccctcttgcattaggacacacccgtgtccactgcctgatgcgtcacaatacacatcaaaaagtttttcaatatccggttgagctagcaccagtgcagtggttaacaacactttcagctgttcaaaggcttcattgcattttagggaccagtcaaactttgtatcattcttcaataaacccgtaataggtttaacaatcttggagaaatccggaatgaacctgcggtaatatccagccagtccaaggaagcttcgaacttg

SEQ ID NO: 57328 - DNA, 470 bp, Zea Mays
atttctgaccaagacaaacagttgaaaatgttaagcaaagatcttgaaaaagtaggcctgacttttaaagatattgtaagccgctacgaccatgaagccgaagaactgaagcaaaaagtcaaagtcgaagtagaaaaaagttccaagttatccaaagcttttagagtgcttcgagacacctgtttcggttttgtaacccgatgctcctcacgcctgcgcgaaatcttcaactcagtcggaacagtgttagaagatgtgaatcattctaccgacaatattcagaaggtgcttgaatttgttgaaaaagagatcaatgatttcgacgaagttatggtggggcacatcgatttttgtgccctagtggctgcccggggaactgatgcgatctttgccaaagccggatgcaatcatttgaaaaacgttaacaagcctacctttagtattttctggctgaccttgagaatattcca

SEQ ID NO: 57329 - DNA, 834 bp, Zea Mays
tttttttcatttctaacgcttccttcatggccgggtcagcttcgaggttatatggctctggtggaggtgaaagttcagctacatgataaaaaatgtttgttaattccaaagttgaaaactaattccgaagctaaacctcaataaaggtacctacaagccttgcacgctcgacaacttcttcagctcgtttagctttttcttgagcatcgtgagattctttttcattttttctaatcgcttcgtcagctatctcacgaccgcccttcatccacacctcggagtaaaatctcccgcctagcgcagaagcttcagccgaagggtctttgatgtcatccaacgagaaaacaaatcctagctgaactacaaccttagcatattcgcagccagctttctctaagatcgacatggccccctgtgcgccaggaaatgcgcagatgtctcctcagtcacttaaaatttcttcaaaggcttcgacttcttcgctgatccactagacgacaccatcagggtcgccacagatgaatttttgctcagaagaatatgccccaactctagcaaagttgtccttcaatttcttggtgcattccaaggatatttcataacatttctcttttgaagcacgaagctcatcgcagttcttttgagctctagacctttcgatctcgcaaatttcatgtttcactgcttcgacttcaaaattttcagcaactttagcaactttctttttctgctcctccaattcggctttatgagcttcggcttgtgcagcaagactagcctcgctagattttagcttctccactaaggaaagtaatatcctatccttctcaagaa

SEQ ID NO: 57330 - DNA, 500 bp, Zea Mays
gttaggagcgggtggctccgtattagaatcatgcgatggaaaactagaaagagtagatttttcatatgaacgtgcccatcctttaatagattcatctatttattgttttaactgacctcgttgttctacgaaagccttaaaagatagattcgaaatacttacaatgggagcctgaggtgaaggtaggagagattccatatcgatctctcctcgacgaatgatgttctggtagcggtccaccgtgaagtatgattggtacttttccttcgccttttcgcgtcgttcggcgagctgttggcgcacctcctcatcctccttgtcgcaccgttcggcgagctgtcgcaacacctcctcatcctccttgtcgcgccgttcagcgagctgacgcatcacctcctccttatcgtgcctccatgggcggcttgatgatgttagtggtggagacattggtgtgatatttggaatcggccatctagggggcgattttggatagatctaaa

SEQ ID NO: 57331 - DNA, 604 bp, Zea Mays
gtgtttggcaggggtgcttgcgtggagtcactccgaatggtgagccacaagggggctcgaaggtggatctgagataggggttatactggttcaggcttgcgccctattctaatgtagtgttgatcttagtattgcttggagcgtgttatagtagagtgcttgtgtgtagaagatgggggttgtcttgcccttttatagctcaagggtagattttacagtgagaactcgtattcttcccgggagaggtttagcctgttgccttgggttgccttagccctcttggcggcgttcgtaggggcgctgccatattactgatgtggcattccatctttgtctagccaacatttgtgtctctgtagtttgtctgatgccaacatagcggtacccggcgggccccgtagaatgacctcatgatgaggtccagggttgtattcagtacaacatcatcttccgtcatgacccttatgtcacctttcggtacgcgttgcatacacccgatatggcgtactatcccgttcttttaggtattccggtcactatagagactccgatgctgaggtccctgcggccgaggttgactggtcccaccggtcagcgggggcac

SEQ ID NO: 57332 - DNA, 437 bp, Zea Mays
atgagttcggcatttcatcctcggtctgatggatagttagaggtggtgaacaaggttatcaccatgtacctatgaattgtgatgcttagcgggtgatagtctcaaatcttggttgtagtggcttccttgggtagaattttgttataattcatactaccaaacaacactcaaatgttctccttttgaggtggtatatggaaaacctcatcctaccattctgttctatcagccagggttagctaaagtggtggcattggacaatcaattgcaagacagagagcaattactggtaaatatcaaagagtgtctgattcaagcataggttaccatgaagagctatcaagataaaacatgttgggaggttgttttaagagaaggtgattgggactggttgcgtcttcagcatcgaatagcagtcggagtaatccaagtcttca

SEQ ID NO: 57333 - DNA, 406 bp, Zea Mays
gacggccaggcgaaggtgttacagagagaaattggaaattgaaaaaagtgaccgcgtaagtgttacagagatacgttataaaaactattttgcattaaatgtacaagaatcgtatctgttttagtggtcattgggatcgttaaaatggttgaagtgttgagtttgaatctctgtttcgatccattttttgcatcaacagaccattttttaccctgttacgggtctacatgtaagatgaggtgatttccgagcataggttaacggtataaggggaaaactgagtcgagcaggagtaaaactgagcagccaaaactagtgggtgaactataaaatccccaaaaaaaggttcacaagatcttgtttgagagcaaggagattgtagtggatcgaaggggctaaaatcttt

SEQ ID NO: 57334 - DNA, 364 bp, Zea Mays
gtcgaagacgggatcgttccatccccatccgtcgacgcctcccacttcgtgacatcttaccaacattgtgcttcgacaccacccttcgctggcggtgctcttcggctatcatcccagccgggggagcagacccttcacgcacttcaggctacatcaaggactccaccgcagccacatccaacgccacaaaataatttaaatcttcatcagaagactcctcaatccatgaaaacgggctctcaaaatcacccttgtcagacgaccaagactcagtttcaaaaccagacgaatttccattaacaggcactgcattcgcagccgccacaaaattaatatcaacatcggtaggagttgcttgcgcggg

SEQ ID NO: 57335 - DNA, 312 bp, Zea Mays
catgagcaccagttggccttgaaatggtacaagtgcttgtttggagaggagactgtggcgtatctcatccatatcatcttggccgctagcatctccatggacctggagaagatcgtagttgtggaggcatgaccgcgaccttcgactctccatgccctatgtggtttcctgagtctcacaggatactaccgcaaattcatcacagggtacgacaaagtggcgagaccattgacaatgcttcttaaaaaggaggcctttcgctggtctgacaccacggaagaggccttcttgctcttgaagcaggcgctcatg

SEQ ID NO: 57336 - DNA, 786 bp, Zea Mays
aaaatgctagtactggccctaggagtagtgatgcctcgataggccatgtaggtgtatcaacgcgccaatccaaaagatctacacatcgatgatgattgtgataaaccctaatctaattgagtggtgcacatggtataccttcttgtctagcattgatgttggtgaagttgtagagggtgacaacacttgttgacattgacgctcctccctatggagctcttccttctgcagaggctctagcatggttgtcctatttagtattagtgagatcgagggggggctcctcgatccttcctcccatgggggttggtgacatcgtggaagccattagaagtggcgatcccgatcattggtgggtgtcgggtacccaggaaaggggtacccaaggcgaggctcgtaaacctctctctagcccatttaccaaccaagtccccgccgagtaagtctgtgatgtcaggcgaatgaccaagcccctgccaagcaagcctgcgaggcgagcgaccaagtccccaccgagtaggtctgcgaggggggtgagcaaccaagtccccgtcgagtaagtctgcgaggcgagcgatcaattccccgccgagcaagtctgtgaggtagggcgagagaccaagtccccgccgagcaaggtctgcgaggcaaagcaaacgaccaaacaaacctgcaaggagggagcctaggccgacgtcgttagtccatgacggtcataataggtcgcgtcgccaccaaaccatgtccacaccatgcgtacagtaacaagagggtcacgacaacaaa

SEQ ID NO: 57337 - DNA, 435 bp, Zea Mays
tcggataatttttccccgaagcatgtcgaaaaatgtaatcaacatcttcgactggaccttcgggggcaagagattttactttttctgccatattttgccctgctaccattcgagtacctgaagtttgctgatcagccctgtcctcagacacgataaccttcgtctcaatgggcgctgaaggcccagcttcggcttcggcttggattttggcagctttagcaattttcttagtagaagcaaggctcaaggactttgtggtctccaacacagcatctagcatgctggccatcctcctcctcttgggagtggcgacaggagccttttgcaccttcggcagttttgcctctgctggagggctcagatttttttggcattctcactgttttttccacctttggctcttcggccttatcatccttagcttcgactggcccg

SEQ ID NO: 57338 - DNA, 377 bp, Zea Mays
tggttatttaactttacaacaactagaattcagattgcattccttgtttactattctccaccaagctccacatataagccatcgtaaccggtcctctggtcttgtattcgcttaaccatcactttattgttaccaccacacatttttcttgcaacccgtagggacctcataagagctttggttggtaagagtggtgaggttgtgagattctatatagcttcatattccacctatatttttttgccttgtcaccactaatttcgtaggaagatggatcccaacgttgagattgaagaatgtgtcaccctgatacaatttaatgagctcaaacaaagcatagaagacaagcaagatcagttggcacaagatcttcagac

SEQ ID NO: 57339 - DNA, 750 bp, Zea Mays
actactcataatcgggttttgcaacatgtatttgatcacattggtttgaccagaaatggtgcaatgactagacaacaaataacatctacacttggtgcatgcataaaacaaacataagcataacttctcgatgaaagtgtacctcgtttcagcatccaccaaccactgacttagataggtcaccacatgctcctttcctccggtctcttgcgtcagaacagccccaataaccttatcttcagctgcaatgtacaatctaaacggtactcctacttgtggtgcttttaacacgggagtcgaagacaaaattttctgatgagatcaaacccttcctgctgttctgcccccaggtgaattcggcatcattgttaagccgaaggataggggtgcaggcatcaatcttcccggttaggttagaaataaacctccgcaaataatttatcttgccgaggaacttctgcacttcgaccttacaggtcggaggtcccatattccgaatggatttaattcggtcagggtgtatctctataccatgttcatgaatgatgaatcctaagaacttaccagccgacactccaaagcacatttacatgggttcattttcagaccataccgacacattttatcaaaggctttgcacaaatcagctatatgagaactaaactcagccgatttgactacaatatcatcaatgtagacttccatagtgtttcccaacaactcgtgaaagatcaaattcatagccctctg

SEQ ID NO: 57340 - DNA, 691 bp, Zea Mays
gaggcactgtggctaagagtgggaccattgaatctgggtctatccttcaacgccagatgcttggtgctaccacccaagctttactgagttgagtggccccaaaagcttgacctctatttattagaataatatgatgggaccattaacccaactgaatttctttagatttacattacaaccaccatcatcaccagcggtgatgagagagtaatcgcaaattatttccacatagccttgattggccctgctcgattgtggctcatgaaccttctagatgcatcgataagatcctaggaggacctctaccactagtttgtgttcaactttgaggtacctactcccagcctagcatagagttagatcttcatgacatctagtagcaacctagtgagatcttgtgcattcttgcaaatgatttgatgggtcacaaacatgatttcacttgtcatccctaccttggtcattatcgcctttcacaaggtgagtgggaagagaaaattctcaagaagctagcaatcaggaacatctaggatgttagggagcggctcaccatcactgacaagagtgctacagaagctaaagaaagagccctacatgtgcctaaggacttaacataggctatcagaatcagggccccactcagggagcccaacaaaaaacaagaaaaaaatatggtagggacccaccaaat

SEQ ID NO: 57341 - DNA, 824 bp, Zea Mays
gttttaagtcggtgcgacattctcacgcttacatagcttagggtgattactataccctactaacgaagcaatcggcttaagtcagaaacgccttaattcggtgcgacatgctcacgcttgcatacttgagggtgattacaacaccctactaacggagtaatcggcttaagtcagaaaaaccttatgtcgacacagtgtgctcacgcatacatgaactctataatgcgccttctccacaagaaataccaactcaatgaaaattgttttctgttcgaacgaatcaaaatttgtcttcattacacaattattgtgcaagagcattctcgcaggggaccttgccagcaggatcgggagaaggtttacttataccagcagacgtagcaagaacgtcagcaacaatgtcctcaggcaccacaacaccatgtcttttcatcaggatttgaccagcacgaacaactttgtccatcgctttatcacacattggtttcatgataccatggtcatcctctaagaccttaatgtcacgatgagcaatttccaactcctatgaaacaagtttcttcgaagcacacaattctttgatgacagaatctattgaagatagtaacttattaagtcgggacacttcagtttgagaaaccctcaactcatccctatgatggtcaagctctcacatagtaaagcgatgatcctcttcaaagtagtaagggagctactggcatcacggtacagtttgtccagactgtcacgagaatcaagaagtcttcgcatctcctcctacagacgagaagagtactaaacatccaagcaaaggtgcgaagcaa

SEQ ID NO: 57342 - DNA, 422 bp, Zea Mays
gccttgcaagagagtgagagcgagagagggcgagtagtagagagcgagagagagagggtccggcccctgctcgtcttctcccgccgtgcgtacgtatgcttcgtatgctcgttccttcgtcctctcgcccctttttttgtcccccccccctcgtggggccctggacacccccttttatagacgtaaggagatgcccagctatacaatggggtgttgctgggagcttaacgtggctggcaggggagtgccctgagccctgtacagataaaaacgtggccaccggggggatgtcttaagtcctgtagaggtagtatcgtggccatcggaggagtgccttgagccctgtagcagtacagttgtcggtgttgtatggatcctactgacatctccttgcttccgtagggggcttgagaaccaccaac

SEQ ID NO: 57343 - DNA, 1729 bp, Zea Mays
tgccatcagaacatatgtagtagttgtttacactgcaatatctggcaccactaaccaggatggcagtggttacagcacaaccataccaatctgacatagaaatgttgatgtacatcacccagcattttccagaaaggtgagcaaattgcagagctgaccattggcgtgggaactaaacagacactgacgcacaactgcacaggtatatttgagctggaccaaagcaattcaccaaactcaaacatcggctttaatctccaagtggttgctgtatttgacacctctgaagtttcaaacgactcacaaaatttggccgtagccaaatgaggatatcctgcccatgtgaccatcagatctgagcagtgacctcccttctggttgggttaaaacgccattcttcaatgctatcatggttttactgcaaaggttccccatggtttcacaaaaggtaccatcacctaaagcacacacttgagtgagactgtccttacagaccaaacacaaagcgaccaaaatgtcacagtgccagtcagaagtccagttcacctgaatatgctgcttagttactggtgcactactctggaagacagtcatgcatgcttaatgattcagtgagcaaaccaaacccgcagggcattagaactcttccagataatatccattttgtttgacccgtccagatactttaagcaataggtaacagccactggtatcatgttctccaagcccaaagcacacaaatcctcccagtgcaactccaaactgagttcaaataggaaacgataatagaacggcaagttttccaaatacttgaaactcagttgagtacaaggtagcttttgaggaatcagtttgattccccttttcaaaaagccaaactcaacaaaagtatcacatctcaggagaatggattctcttccgctcagccatgacgatgactgccaatcagagcgagcatgatctgcagaagtcaaatgggaaaaaaaagaggaaattgtaaagcttccatttcttttggttgctaatataggcaggaaaagggtaggagatgaaagtggaagtggcgaattatgaattgttggcagttattcccttgccagagggggtccagcaaatagtgaaagctatacacagatacacactagcaacatggagagacatggctcccatgttatcccgtgcaacccctgttccccacttgtgcccctcccgttgcacatggccttgtaaccaaccattccacccttcctagagttaacattgccatgggaccccctttccatacagaacaattatcaccaccttccttcctccgttcctttgtaccctgtacttctgtattcaaacagtgctttattttaagttggtatggtgcggcaatatctctactacggtataagaaattagcggttacatggattattactggcactaactagccttgttatgaacaggatctcactacagatcatgaaagtgcaaagaaaaaccatatgtgacaaataattgcaattagggaacctttaatcagcatcctgtaccacgtgtaggacttgagttcattaagtccagggatgatgttgaagataaatattccatatttgtagagtccccgttctttagaaagcaatagcttttatcatttttactttgatgcctatctacaccatctttcactatcaggctagtcatggatgtgctcatttagcaagttatagatacaaatata

SEQ ID NO: 57344 - DNA, 1054 bp, Zea Mays
cgcgtggactcggactcccctgccatgtgggtcccacacgaagttatctcgacgagctcaaaacagaaaccgcgacagcaaaccaaattcgccactgctcgctgatcccatgctatccgagttttcccagcgccaataaatagatgagccatggtcctgccgtctcctcatctacctaggacaatcggaacttgcacaatacttcgccagattttctcaaacactaccggaccatggatcatcgtcgtcggcgttctctgacactctcctcctcggaatggtacctccctttgtgtttgccttgagctctgcttcgtttagcgttgtctcagggtgaagttcgatggccggacttgggatttggggtggtggcaattgcgtcatccacgggcacaatgggcaccgttgccgggcgctatcgggaggaagaaggtgacgcgatagccgtcgatccaaaatggatgattgtgattaagtactgcgtactggttcgaccggattgatctgaaccgtggattgtgggtttgagggatgagatcagattggtgatgtttaaaaaatccgggccactgatccagccgccgacggttgtgatcttgtcatgtataccagttcagttggtgggctaccgtggatgcgacgagaggaagaagataggttagcaccgttgatccggcctggaaccgctaagattagacgtctgggtgccccttcacgcatctaaatccggtctctggatctgatcgagtggtcagtattgactcaagcgtaattaaatcgtggccgtttgatctcgcgcgggcggctcagattaaatcttagggacacccttttggtggtataatcggtgtcatagatcggtgatccggtggccgtgatgttgtatcggttcattgatctaatcatagcccttgatgcaagatccaatgactatggctccacgatacccccccttcgcccgtgtagttttataaaagaaaccccctggtttctagtattcaacccgtagtccaaaataatgttaaaactattatagtgaggccctcgtttttgc

SEQ ID NO: 57345 - DNA, 643 bp, Zea Mays
caagagctttctgtactttcggtaattttgcctctactggaggacttaaaatttctggcattttcactattttttccacttgtagctcttcggacttatcatcctcagctttggctggctcgactgtaggcaccttcgacattacaatggcctcttcggcgctctacacatttggagcagcttgctttacttcggaagtagaagaagttccctcgccaaattcagacaccacgaccggttcaatgtatcgcgaccggtgggtcaggaccttcatcttcttgcccttcggcacaacagtaatggccgaagcgatagtttttattttcttcccttgcctttgcaccgggtagtgataatcagggtatacgaagccaatgacatcaaatactttgtttaatcttttcttccctcggccctcgaaggctgcgaacaaggcatcatcttcagccctgctatatgctccaagtagttcatcgctgatagcctcaatactttttagtcaatcgtcatttggctcatcaaaccggtctctgaacctgaaggtgtatttcaatcgaatcaacccaccttcagttgactcggcagtactatcctttggcatatcctagtattctacaagtggccatattctgtacgctatgtg

SEQ ID NO: 57346 - DNA, 1308 bp, Zea Mays
tacccaggagagcggctcaggcattttagaggttaatgtgccaggtgttgtagatgaatctattactgacattgtctctcacccagacattgaaatcccaatgggtgtcgtgctgcaaattggtcctttgatttcttctgctatcgttcatgtcaaccctataatccctttctgtgccgctgctcgaaaagaagtccagcttgtgccagcttcatatgagtcagatttccttgttgatctctcggtaatgacctttgttgcttgttatcctgtctttttgccgactggcgtctgatttattgttttctcctatatgatactttgagtcaggtcgccatatctttgcttcaggctgagggtcaactaaaaagatgctcagactgattccgtgagaagcactcctcttagctatagtctaaagttgtgatgctcaagaagaaactggtagacctgtaggtccctcatgcgacgtagaatcatggcaatgttgctatctccttgcattcagtcttgttgtatgcttcccatcattgacttatgtggaatcctacagttgcttcaaagaaacactttgatcttgaagataagttggcatgctcccaggcggagttccgtcaagtgtttgtatttctcgatggtgcccatgaagcaaacaggtcattgcaatggaaattcaacatggaggaaaagaatcatgagatatttggagcacttcaactttcttactccttgttgttagtccgctatttggagcgctttgatacgcgggatgaagtgtgaaggctagaggtggaggttggtcggcagaaggaagaatatcgaaatcttatccacttatcgagacaacttggaagaattgtataaagatgttgttgttgatcaaactgccatatgaaatagccacaacctaactatgacagagcttgagaagagaaaaggcaaattggctctcttacaagagttggtcaacgggatccatgagtcactgtccttcaaggattctacgcttaaggacctatgtgatttgtcgagatctcaagcaagaaaactagaggttttggagcacaacgtcaaggtcttagagaacatctgcaagttattgaaagcctctcatgataaagccatggacaaggtgatatgcgtcggctgactacttgcgaagaagcctaatgcagtcgttcccaaggacattgttgtggatgtgttgtccacgtcagggttggatgcgagacctcctccgagcgattctagatcagctcccgtcactaaagacgacgctgcttgatcttgtaactgagtgtgtcatga

SEQ ID NO: 57347 - DNA, 369 bp, Zea Mays
atcatgtaaacctttgagcagaatgttctccctattctttttgaagaaattttttgcatagctatccattcatctattttatatgttccaacaactatgtagtttggatcaaactggtagtgttgcttccttgtctgcctttccgtatgtgcccacctttgctaatctatatggaaatgaatgcttgcatggaccttgcatccatgtatgtatgcatttctgttccctttttacctatcggcatacttgtgtgtgtatgtgggtattttgcatcatgggttgtttgttattagcattgatggacaagttgtgtctatctctaatcagggacaagaactatatgaagatgcaagtttgttcttatcaaat

SEQ ID NO: 57348 - DNA, 977 bp, Zea Mays
catctctccgcgtggcccaacttcggctgatgtgccgacgcatggggccatggtgtcaggtcttcccctccattggcgtcggtaacagaacccgagctcgccgggggcagttgagctcggccgggattttcgcttggattccgcggacccgcctcgcaccgccatgctttaaatcctcgtccccatcatccgaagcaccggaccatctccctcggccgcctaacccccaagccgtgtgacgcccaaatgcccctgtaacaccgccgccgcgtgccgtggagtgtggagggagtgcggccgcaatcgctccttgtcggtgcagccaattgggacacgccactgcaccgcgaccctctcggtgcggcagtgaccgctgggcgaaataggacatcgccacgacatcaattggagctcgaacccaccgtgctcacacctcgccgtggacgaagctgggcgcaacgaagccagtggtaaagaaactcccatttctcgcttagatttcataccctgtcgtgttccatcaattcggtttgggaatggcttatcgatgcctctggaattgctcaccggagctattgctccgccattggtgccgcgctttgtcgagggtagggcataccaatgcaccgctcgggttgggactaccttcaacatgttcgttatggcttagggttgctcttgcaatggaaaaccgtagttttaggaaacccgggcgaaattccatgcgtctccggtgaactcgccaccgtgggcggtggcggcgccgccgcatcctgaggtgtaggttggggcgatcctgtccgttggatccatggtgggcgcactcgattagatctgagtgatctcatagcatcgggcatcgcgggccgttcatttgttgatgagcgccttagattaaatgaggggttagaactgatttgagccatccgatcggatcgaacgggatcagatcaccatcgtgcggttataattgtgta

SEQ ID NO: 57349 - DNA, 344 bp, Zea Mays
attggcttcaatggcttggtcagtaaactcttctctgaagccgaggcttgtgattaggggtggaaacagatcgaatacacacgaatatgaattcgaatgttacagtttaccatattttagttcggattcggatacgaatacaaaacggatattcgaatccgaattcttattcggatatttactcaattcaactcaaatagcataccctaaaatttaacatatgtatatgtggatttttatttaagtacaagtttataaatagtcaaaacaaacttaaataaaaatagatttctcatgatcctccatatctaagtcaataaaactatataaataatatttttaaa

SEQ ID NO: 57350 - DNA, 682 bp, Zea Mays
ccgtgacggcgttccacggtggcgacacgacgttccggggatcctgctacggtagagttcaacaggacgggtcaatgagcattgtgacacgtaagagaactcaaaacactctcaagctcaactgtagttacctccgagagctctggccacagcgaaatgtctcgcggtggcgtggatgaccgatttgggggatttccgaattcctgggctacggtggatggcacgatgtggttggggttgcgttgggttcgtaacaagggggcggagcagggagagtcttcaatttaaaggaatcggctcagctactcacggatttgaacgaagttaggatcatggcgatgacaggacatttttactaaggcaagttcactgtggcacgcgatggggcaaagtcctatggcaatcactggttactctccacgaatcacgacgacgtggtaagatggcctatggcatggtacgattgaggccaccggcatcccacgacgacatcggccgctcggccacgtcctagagcaatagagcatggcagatgagctcacgccagagaccatttccacctcccttccgatctttttgcctctagcagttatccacgcgccaccgagcacgaatcataacactagcgtggatcacgacatggggatcaccagcggcaggttccgtgaatccttgatctttt

SEQ ID NO: 57351 - DNA, 1140 bp, Zea Mays
gtctagagctactataggagtacaactttgcttaagggattaagcattgttgttatacaaaaagtggagataattggccctaaagtctggctgtcagatatacagagactgaatattgactatcagtgagttttgaggaactttaggcttgattcatgctcaaaggagtaagcaactgagcaagatctctatagcagaattgtagtttgtatgtagggatacaagtttgttatagatgtattggcatgttcttgcacaaaaatccaagttctaggcgttgcaactctggctgtcaagcgctctgaattgggtttccaatggtacagtacactgaaatatcccaatccactgaacctcgccgccgacgagccgtgcactcggattcttgcccgccgcggtgattcgtgctcggcgcagttggataacggcaagggggtaagaaatatcaccccatggatgaacttgagccactattcactccggccgccgtgtccgcttagctcacggccgcttcggaaccgtcctctccggagttagccaccttgtgaccttgcaccacatgccctggcatcttaccacgtcatggtagctcgcgttaggcatatccggtgatcgtcggtgagcttgccacggtaattgccaccaatcgcttgcgccagtgcatctccttctctctgactgccaccgcacgagctcgaattcactggccaccgctcaagggccctataaattgagcacaccctcagctccattaggtattcaagcatcaaatccacccgctcgtgcctccaattactcactagagcccccaaatcgctcagttcccccaaatcagttttttgccaccgtgaacaagctctcaccgtggtcagtgcacttcaggtccaatcttgccctctgctctcttgtttcagcactcttacatgccagtgatgctcctcgacccattcaattaagctagaccgcgctagatcaccgggaacacttctgttcatctatagttcgcactatccccgtggacagggcgatttagagctctgattgtgcaattgatcgaggggaaaaggttattaggggttgaattcggtgtcaaccgcacaggagcaccggtagttgagttatccggccggtacaggctcg

SEQ ID NO: 57352 - DNA, 466 bp, Zea Mays
tgctcttgatgcataagcaatgactcggttgtcttgcattaagacacaacctagttcagtgccagaggcatcatagtacacatcaaatggcttgctactgtcgggttacgctaacactggtgctgtagtcagatgttgcctcaatgcatgaaaggcatcttcgcacttctaaccccaaacaaacttggcttctttcttcaacaactcagttatgggcttcgcaattcgagagaaatccggaatgaatcttcaataataaccagctaatcccagaaaacttcgaatttgacggacagtcgttggtggcttccaattcatcacctcttgcaccgtatcaggatcaacagttatacccgcctgagagatagtgtgacccaagaatttgatctcctttagccaaaaatcacattttgacaatttggcataaagatggtgctctcgcagacgttgaagcactacatgcaaa

SEQ ID NO: 57353 - DNA, 584 bp, Zea Mays
gcgagctgttccatcggggagccatacccggttctgttcttctgagaccatcatcgactccagcccgtcacacgcgcgcgcgcgcacacgtcttcggaagtttacaagaaccacgtactacgcttggccaatgcagacgatcgatcgttcgtgccgtcgctgtgtactcgttactcctgcttgtttctttgttaccacttaccagagggatccaggatggagactgttcttttcggttgcatttgcatgtatatgcagcgcgttccccaggttccgggctatgctgggaggcgggagagcccatctgtcgtgctcagacatcagtctgtcatccctccgcctccctgtagacagaaagctacggcaaacaaccgcctattgaagaggttaactgttcagtcgcactcctcgtcctcgatgagggccacggaccagtgaatgccggaggatgccgcctgccgaaagcgcacaagctgctcgagtgcgcctgcaaaaacaaaatcttttaggacttattttagaacttgtttaggactaggtgattttgctatttaattcttttgttcctacctacacaagtcttg

SEQ ID NO: 57354 - DNA, 753 bp, Zea Mays
gagaagttatcttagtttggtttattttattctagttatttatgtaataaagcttgtgacattggctgatcatgacgcacgaataaggtgcttctcagcatctagatttatccttaacgttagtgcatgcaagcgcattccatatttcatgattccagtgccgttgcagtcagggaactcgagccgttggaactttcaggcgaggagggtgtttgaagaatgcagaggcatagcccatgacctcctccatgcatggctgtcctcggaacggaactccatgcggacaggggagcaacgaccagtgctccgctctgcaagtcacttcatcgctgcacaggacccttctgcttccctgaaactgacgctgtcacgagcctgactagtcgatcgactttatgatgatctctgaatgatgggagccttggccgtttccgtagctctcatgcgcctaaaacaatttcgaggttcttcagtttcaggtaaaagtaacaggatgactgttttttactatatgtaaagggatgtttagtttgagtaatcactccatccatcatgaggtgattgaatgatttttcactactaatgaaggttattagtactagcaactggaggaagaatacgatggtggggatttgactggcaggcagcacctgctcctgctctggcacagtgccgccgccctgtctctacactctacgtaccagcgcagacatggtacgacactgacacgtaaaccgctgcactgcatggctg

SEQ ID NO: 57355 - DNA, 368 bp, Zea Mays
ccccactcatgtttacttgacataaaccacattgtttagtttttgctggagaccatttatcgatcaaaaatcaataggtgttagccttcgatattaacgaaaactcagccaaaaatgctggccatatgcccattgatcgagagtgagaccctcctattacttatcacacacttgtttcattgacataaaccacattttcttgatttttggtttagaccatttatcggtcaaaattccataggtgttaggctttgatattaacgaaaactcactctttggccgttatccgccaaaaaatactagccataccccattgatcgttagtgggagtctcctattacttaccctacacatgttttcttgacata

SEQ ID NO: 57356 - DNA, 388 bp, Zea Mays
gagaggagaaacgagttgtaaacttgtagtcagctttggcacaagaaccaagaagctttgtaagagagataagtggggcatgcattaatactgaagagataaccaccatacggatggggctaaatggcaggcttcatggatccttatggctaacagttggctctattattatacttgctcttataggattgtcgacactggcatcacctgttgttgatttagacacgtatctaatgcttgaatttaacattggcatcacctactgttgatttagacacgtatctaatgcttgaatttattgtctttcgtcactgcattggaaatggattagacatctctcacctacttgtgtcacaagcgcaggagcgaatcgaggctgcatataaat

SEQ ID NO: 57357 - DNA, 742 bp, Zea Mays
gcaaaatattggggtttgatttttcagtggaattctgaccaggctgcctcaacacagtagcagatgcactctcccatcgcaatacatatgattcagctatttcagcaatttcaggaccaacatttgccttttatgaggaacttcgccaggccaccacataggacccggactgtagctctctacgtgactagattgctgctggcacactagcaaccccgtggcgagttcacgacgacctcatcctgcatggtcgttgcatatatgtgcccccatcttcagaatgtatgcaagagctcttgcgggctgtacataatgcagggcatgaaagcatctagaaaacattaaccagattgagggccgagttctacattccacaggacaaagctagagttaaagacttcatatgtgcatgtgcaacatgtcagcgcaacaaaacagaaaacctccatcctactggactattacaaccacttgatgtcccttctcagatttgggctgatatctccatggacttcgtggaaggcttgtcacgagtccatggcaaatctgtgatcctgacagtagtggacaggttctcgaaatacgcccatttcattgccctcaatcacccctacacagcagcaacatttgctagagctttctttgaagcagttgtaagactccatgggataccttcctccattgtcagtgatcaagacctggtttttactagtcatttatggagggacctctttaagatgat

SEQ ID NO: 57358 - DNA, 1000 bp, Zea Mays
ggccggtctgcttcacccatcgtattagatgtcccatcggggggatggcaggcggcatgcgcgtactgtagcggggtgtaatcatgctattgcgcctggatatgactactatcttgttagccactgtgctccaactgccgcggcgtggggtaggtatgtgcaataaatgcgagtgttccccacctatttttggaagccttagtcttatctgcctaggatcagctcgggcgtgacggacggagcggtggtgacgtcggatgaggcagagttctgcctaaggtgggagactcttggggagaggcctcgggttaggaggtatctcagttgcttccccttgggggttatgtctttacttctcctgagtgcattttcggagggataatctaggtaccactaattatcacccccgataagatctactaaacatcatcctctagatgactggttgtaaagatcacatcaacgtctctgccaccaacatcatcaagccaaccctagaggcactcccagctgataatcagcaacacttttatgacagcatgaggcgagagccgaacagcgtgagaaggcgaaggaaaaatacctatcatacttcatgttggatcgccaccagaagatcatctgtcaaggggagatcgatatgaaatctctcctaccttcacctcaggctcccaatgtaagtattccagatcaatctttcaaggatttcagaatagcggggatcagctaaaacaatatatggatgaatctgttaaagcttgtgcgcgttcatatgaaaaatctattgcctcttgttttcccttgtgtcaacctaatacggagccaccctcacctaaaacatcgactgcaaataggtcatcctttacctagccattgtatggtatgccgatgaatacgttcatagcaccactacagccgccgccacctggcacgcaaccggctctggacaaagtcagactgtcctgctacgtcgcgaaccgtccgacatattttgccgaac

SEQ ID NO: 57359 - DNA, 821 bp, Zea Mays
atggctggcttacagattgtcagttactgcatcatttaatcattgcaaactcgctctcagagtaactcttactctctaaaagaccaaatataattttagataaattttgagttttatgaggacttaaaaaatagatagcttcttaaacggtgagggtaaactaatggactgtccaaatcttatctatcaatattcaaatcgattctgcgacgccatgagaaattaatcaacgaacaaataatacatttctcgataagagtagtttgatacaatggtgaacccaggatttagagacagcctaagagattaggctacgatattctatgtctacgccttcatcatgtacttgctacactgtttgcttgcttcttttgcttctatccatcatgacggcaaagcagcctaggctaccgactgaggtgcctgggtgctgggtacgtcgctggcttgacagacacatcatgtattcagcctaatgagcaacagcattgttgtgatgatatctgcaatcaatagagcagattgtttttgcagataatggcacgtcaagacataaaagatcatagcagctggtaatgaataaagcagctctagttgcagcaccagtccgtagaaggcagcacttatctccctcatggcctcccccatcactctgcggcttcactctttgccttggggcgtagagcgagtacacaacgtctctgcttttttagcttctagccatcagaagctgccgcggactgccaaacatctaacttttcagaccgtttttatgagaatcactttggtaaaaaaacagttcaaaatcaatgtgaacatag

SEQ ID NO: 57360 - DNA, 349 bp, Zea Mays
tgcggacgaagaatgtcacaccgtcagggggaggagacgacgaggaccctcctcgccccttcagacaggtcaaggggaacactgtctatcttgaacagcaagagggcaggaagaagaggcgtatggacagagccgctcgtgcagcacttgcagcggcagcggcggtagatcaggctgaacggggaggccagctccagatttcttctaatcagatagcctatcgagtttgtcgcctcatgtctcggcctcgctccactggtccccccactccttccaccacagtctccactccacctcccacttcgccagctcttgtcgctcccgagccatccaccacgcccgctgtgtc

SEQ ID NO: 57361 - DNA, 786 bp, Zea Mays
tagcacgtcaacacacttggttgatagtaccagagcccaccttgatcagcctcctatagctccactaaaaacctgaaccgggacgtttgacttgtgatcctttcgaccgctctaccacctctgtagaagctatcacaccggcaccatcacggtcatagatatcaagaaagagcttggataagtaagaggtgagatcgagtgttccacaaatactttcatattctactttctcttgcttccctctaacatggtaggatccaattcaagtgttcatggtggaaaccatggagacggagagccccctgtctctcgggctaaattgcatcaaatggccgactcactcgtgggggccatggaaaggatgttaaatgaatgtctgcccacgacaggaggttgaaggctacatcatcgtgatccagaagaatttaaccgcgaaacatctgaagatgagaattctgttttcggcaatgaattcgatcccttcagcgatggtcatagaggttatggtgatggtcgccacactgatttcgataatttgcatggaaggcgtcgtgcacacggatgccgagtaagatttgaagacgaggagtctgaagaccatgatcatgaggaaggatctgatgaaaatccttttgcaaatgatggaatgtttggtcggcgtcatcatcaccgacatgctgattttgaaaatagagaccattatcatgggcggcatcatagaaatgacccaaaccaaattgtccgagtcaagttggatattcctaaatttactaggaaagaaagtgc

SEQ ID NO: 57362 - DNA, 673 bp, Zea Mays
tccgagttcaatgccgtccctgcggacgcgcttgcgctcttcgctcgccacgaggacgatcgtgctaccatctccaacaactccttcagcagatcagcgacaacctcctcagcctcgtccatgacttccccgacctccgctccacctcaggatggtgttcccgtcctctccatcttcaccgccgctgtggatcctaagcacaacgtcacgccggacacggatgtgagctctagcaagccactgatgtcttcttcttcagcatcagccaccgtcgccaccagcaagctggcgtcacccttgatttggacaggcatcacccttgatttggactggagtcacccttcatcaatgactcccacgccatcacagaaggttgtcctcacccttgatttggacaggcgacacagtatgcagaagggcgcttgcaacctattggatgaatccatcaccggcggaggcgagatcgagctggatgccaccaccatcctcgacgtgctgcccggcgcgcacacagtgggcaaggcgcgatgcgcctcctacgccgaccgcctctatgcctccgcctcctgcaccacacctgaccaggcgctcaacggccactacactgataagctgctgatgctctgctccagcaacatcaccaacaccatgcccacaaggtgttcgacgctcg

SEQ ID NO: 57363 - DNA, 657 bp, Zea Mays
gccgtaggatatgatgggaagttttgctgggacgaattgggatccaagtaacaatccccctcaaaaaattatgcgccggactgtctggttggatacgcggatcgtcctgtggtatgcgcggactgttcggtcacgtggccggaccgtccgttgttgtatgcggaccgtccgtcgctatatgcggacggtccgactgggtagtttagggtttgtgcagtacgtggttgctcgggcgcatgtctcggtaactcagtaaaaatgggaccggccgttgctggcccggacggtccgcgctcacgtgtggacggtccggatatgtgcaaatcagctaatatattgctgatgtaaataggaggttgtggttgctcggggtatgtgtctatcagtatcccataaaagggttgtgattggtcgtgacaacttgtagccgatgaattacacgtgttttcccccaattcaacctcgtgcgaaggaaaatttgcgacggtagatttatcgaacacacgtactagcctcctataatccttttgcataccccctatgatattttgcatttggtctcgcttctcatctatataaattttaagagattggagctcgtttgtgttgcttacctcgggggtagtcgtggtaggtcgaagcgaagccagatctgtc

SEQ ID NO: 57364 - DNA, 546 bp, Zea Mays
acgatttggaagcgaagcacctggtaccaaatcaatttgatgctcaattccatagagtggaggaagtccagatggtatctcatcaggaaaaacatcttcaaagtcctgtaagagatcaagaacaacactaggcagcgatgaaggtaaatcgttagtgaaagtaagacctccttttgcaagagcacaaagaatggggctgtggtgtttctcacttctctcagatcactcttgctcacaaagagacactcagtgtggtgtggctgtttaggattggcatgaggctttacatggctagatgggttagaactctctcccttacttcggttgggggtctcactcaattttcttttgtctgattcctctcttttcttatgagtcatatctgaagtatgtatctcctctggagataatggaacaagaaccaccttcttgtcattgtgaatgaaagtgtatttgttagaccgtccaaaatgcactgagtccacatcaaattgccagggccgaccaagcagcaaatggcatgcttgcatgggggcaatatcacaa

SEQ ID NO: 57365 - DNA, 676 bp, Zea Mays
aaatttccaaaatacttctgtagcttgtagttttcacacgtatatgactctagttccatgtttctccttttaagtattgctttggtattcaaacaatcccgcaggaatagccggaagaagagtttctgcttcgattgacatttggatttgcagagttcgatgaacatcgggggtgacggtggagccattgtcatatgcgtatattcttatatgctcataggccccacttgtacgtctaaacgtcacaatggcccaatgtatgttgaccttgaagtgcatcagtaaagaactataattgtgcgaacgcctcaactaacatgggaaaatgaaacatgtcctgatgtcgtgggatcacttttgcttgcatgattgtaatgtccttgttgatgtagctctagatatggtggggaatgtgttttattctcccacacatcacaccacattcgaatagtgtgaccatcttcaatggttgctttggaaattcctcttaaggtatttaggtttttcatcacttctttccaccagaaggaccctacctttttattacagggaacctttccagacttgtagtggttgttccagatcaggctcacccaaggcatatcaggactattgaagaatttgtgcaaaattttcatcaacagagcttcattgtgagttgacatctaaaggattc

SEQ ID NO: 57366 - DNA, 304 bp, Zea Mays
tataaattgagcccgagcacagcttcttcaccccatcacatacacgagcacttgtgcaattgactcaatcccaccggagaactcacgtagtccacaaatcccctcttccctgttcctagcgccgccgtgagggaccctttcgtggccagcactcctcgggttagtaactacccaattgcttcctgttctagcttgtttatagctttctattgctctcggagccgaccaactgaagtttaccagagtcccatcatcggaacactcctctgctccgtagaacgccgctgcgacaccctctctgtcg

SEQ ID NO: 57367 - DNA, 430 bp, Zea Mays
ggtcattgataaatgcaatcgaggctgaactaataatcgcaaaattaaagtcgcgaacttgaaccaataatcgcataatgtgtggtgaatgtgatgattcaagtggtcttgtgagagacccaccccacatatgtgttgaataaacactgttccgctatgtaatatatctggcaaatggcatgaattaaaatatgcagttaataggattctgaagatccatcatgagatcctatgaggattcatatctttgatttataaatatgcaacatataaatctcgtaccgaataatacaatcctgacgaatgagcactctcctatgtagagagtatatatcctagatgagattatagttccttgatggaacctttccagaagaaataaagtctgtgttaaacaccaaagtttgataatccctataaagggataaag

SEQ ID NO: 57368 - DNA, 1242 bp, Zea Mays
gaacggggccatgaccggcgctcccgagcgacggacaccaaatcggacctaccccgagcatttcccctaacttaattgtgcaaatggtgatctattctcttctgttcacgagaacagcggagactacggacatttgatcgtgttcccgacgattaacgaggttctagcctaattggatgggtcagcgatcatccagagcaagtgagaatgccgaaacaagaacgcagatggcgagaagggacctgatttgggctggccacgacgaggtgttcttcgcggtggcagagacttgatttgggggaagtttgaaattccaaagctcgggtgaacgattacgagtgggagtgggtgctaaggcttcacgatgacatagcgcagctgccccggccatcaatttatagagggcatcgacggtggccgagaatttgaagaaggatgcgcggcggtcggagataagaaaggaccctggcgccgtgggttcgtgtcctcagtcgtggcgagctcaccggcgatgatttaacgactgtaaagagtcacggtgacgcgacagaggtgctcggatacgtggcgtaaggccgagcgacggcgatccccggcgggcttatctgctcaagccgcacggcagaggggaagtactgggggggtcaccggagtgctgtccagcgcatggctttaccgagcggtcttatctggtcaccggcgacgtgaatcgcaacggcggcggtgtgaatcttgacgcggaggagtcgccggcggtgaggatccaacgctggcagtctgatccttatcggactactgtaccatcgaagtaggattcagttggcctgacagtcaatgtttaggcttgatttgctcacaaatccctatggtaacatactctatgctctatagaaatgttggagagctatataccacctatatttcgactatagtgactgaactcatttgatcacaagatcaaggttgaattcacactcaaagctggctctgttccactgaatatctgaatttcagaatggaaccagcctgacagccaagctttaggcttaattatctcccaaattttcttaataactatgatcacaaccttaagcaaagttgttctcctatgtttgctctacaactttgatgtggtgccctagggcaaaaaccttatactttgaaagttacaaagctcaaaagttgagcccataacactgtttttcagacttagagtggaatcacaattggggtcctttttgc

SEQ ID NO: 57369 - DNA, 735 bp, Zea Mays
tccaatttttgcatagtccctgagttgttgtacgaaccatctagccgaagagtgcagaccatttgcaggtgtccatattgatttgagcagagactatatatgtgattctagtagtttgtattgcagaccgtccgtgctcatgccataggtagtactaactcataggtcgtggactgtctagtcatgctcggcgaatggtccgcccgtattaaaatcaggtgggtagagctcatggtattcaagttcccaggtcacggactagctggtcagggtcgacaggccacctgtgtcttgcttttctgacagctataacacacttttcaaacaaaagtagctgttaaagtgaagggcgaaccatctggccctagagcacggactgtccgcgaatgcgtagaaagtggacagtttgcccataacgtctagttgtgtttggagggctataaatagaagtggtgttcctagttgtgtttggagggctataaatagaagtggtgttcgtgtgtggtagctctcttggccattctttgcacacattaagcacacttgaatcttccaaacactctcactcacaactgttgattgggattgcattctaatgagtgattgagtgattctattgtgttgcatcatccgattgatcttgaggcactatgtgaatcatcaagcgagcgtcatcggtttattactctcggaggttaccacatcatagatggcttggtggtgactccgtcgagc

SEQ ID NO: 57370 - DNA, 427 bp, Zea Mays
cgcttacttcccaattcatgaacacataacgtgtattgacccgactcaagatatagaggaagtgatgactactttggcatgtcaccacctctctatataagccaaaacaatttctactatcgactaagagttctaagtattaaacacattattaatttccacgcgcaaataaacctcaacttaacactagtgacaccgatggatttttactaaactcatcaggcgcataacctcgtctcgcatacaaccatatggtggcgtgcacccaagacacttcaatcaatgtggcgcgaccactaatatatgaactccgacactcatgtattaataattcatccttcacgcaaattagcattgtctaaactactcgtcacattaacaattatatcccctatataatcacgaatcccatcacattgcataaaac

SEQ ID NO: 57371 - DNA, 743 bp, Zea Mays
gatctatcttcggcgtttgagggcgtcgggcgcgggaaagacaaatggctccctcgagattatgcctaatccacgaacgatccgggcgtgagcccatcgccttcttggattggcccatttccactatagtccttgcccgacccacgatgagatgaccttgtggggtgactggtttgtggccccacgcaagggttttcgccttctagtggacccgagggatatctgtcccccacaggcgccatcgccagcaccacccaaaacccatctctacgcgctcaaacttcgatcgggctaggtctacacgactaggatgcaactgtgaatgtatgggtgaggttcgtaccagtattcaagcggtgtgctgccctacccacggtgcacggcgaagccacaacgacgacgaagaattgcggtcaccgagatcgcccttcctccctgccaccacccccgatgcgatccagatgctcgataggagcctcctgaccgcgcacctatccccaaagaagaacaccagtggtgattcctcacgtcgactttcctctatccctctctcacttccggttgtttggcttgcacgacggcgggtctgcgataagtggcaaggtgggcgaggaagataaccgtgcgaccttttatgcgccagagtagctcctagactacgcaccctcggattgcgtgcgggttgttgcgtcgccgcgataagtccacacgatgggattctgaggaaggggacggcgcagttg

SEQ ID NO: 57372 - DNA, 651 bp, Zea Mays
cggtatggtagctccctctatgcttgctttgagctctgcttcgtatagcgttgtcctagggtggagttcgatggccggactggggatttggggtggtggcaatggcatcgtacgcgggtgcaatgggcaccatcgtcgggcgctgtcgggaggaagaaggtgacacggtggccttgaatccaaaatggacgactgtgattaagtaccgcgtaccggttcagccggattgatctgaaccgtggatcgcgggtttgagggatgagatcagaatggtgatgtttaaaatccgagtcattgatccagccgtcgacggttgtgatcgtgtcatgcatatcggttcggtcgggggggcttcacgatcgtggattgtcgataggagggtggtgagcggttttggtctcataaaaccctggtggtcgaatcccgatctgatggctatccaagcgtaccgcttggggatggtgaggatataatcccagtcgttgatgcacgatccatcgaccctcatgacctgataccccttcgtcgtggcctatttgctagagagacctcgtattcttctccaattaacctgtggtccttccacctttaagaatcataacaagcggttcctggaatttagggtttgaaccctgagctctcgggattttg

SEQ ID NO: 57373 - DNA, 527 bp, Zea Mays
tgaatggcttgaagctgttgaggacaagtgcaatgaggtccttggaaacttcaacaaaaacgagaacaaagcactgaccgtgaccttcgaagcccggaagaagcgttgtttgaatcatgtttttgatgctattggatttgtataccctgactacctctagctagctcagggtgggggaaaaagagaaaacaaagtagacaaagtttgccaccaagcaccaaaatatttccattgtggaaggtgttcgcgctagtgccgagaagagctatgaagagatgacaaccgtaatcgaactgaagccaattgttggggcatcgaggctgtggaaggtttgaaatgaattttctatgcaatgcttatatttttgctgatgaactaccatgttttttgacaactgcattttttcagttgagtttgcagactaaacaggttattgagctacccattattaacgaaactcctttggcgaaaatgagtgtagagccaaggaggatactgaccctaacaccttctgaggaggcctcaag

SEQ ID NO: 57374 - DNA, 464 bp, Zea Mays
ccctcgcgcgatctctgtaatcacgatgttgattttttggctcaagtttggaggatgagggagggaggtcacgtcaactttatagggacaaggtgagcacccaatgcggcgaggtcgaggtgacatatcacgagatctatggggcatttgcgtgacgaccgggctctgttacaagagcacgcaacatagagaagaggatactatcaccgaggccccacatgtaagtgctactaagaccagagcccacacgacagtgtgatcgcacacaatattggcactcgcgcctgaatcagggggcccgcacgtcagcgggcgaggtgaggaaacagggccagccaatgggctccgcatggcggtggtgcagcgcgtgaggtgtattggttgggcgcgaaatgggccgatggtttgttgctggaccgcgatagagaagatttggccctggcgctctcttctctttttatttt

SEQ ID NO: 57375 - DNA, 579 bp, Zea Mays
ggacagtcttaatcccacaaaggcttgtgctctgatttaatctcatccatcgattaggatccaacggctgagcgccatcttctccacccgacggtagaccgcggcggcaccctcatgccctcgccgacgccatggccaaattccacatacaccgagcaccagggccctaattccttgatccgaactattctaaacgaaacccacaacactctaaacccagaaaccacccttacaacacccattaacaggctcggtccccttaccacgatgcatggcggacccaccgcaatttaccaactccggcgagcgattcccaacccttcggttgctcctactcaatttgatcggaacgaaatgcggatagaacaattgctaaccaaataaggttttcctcacttgggtcggtggtggcagcggcgttgcccacgtcgcacgaccatcagcggcggaggagagaccacgacaagtagtcttagatcctcgcgacctccttcccacctagcgacagcacgtcccggaggacctccctaaccaccatccgaagccccagtaccggtgcaccggagttgtctccgcggc

SEQ ID NO: 57376 - DNA, 392 bp, Zea Mays
ggatggtatgttgagcttctaatcacagtggttcccagtgacctttggagttgctcccaaaaacgtgccacaaacagtgctcctctatcagatacaatagttctcggaattccatgcaaacgcactatttggtcaatatagatctctgcatatttctctgccttgtgggtggtatgtactggcaagaaatgagctgccttggttaatctatccacaatgacccaaatagaatcatggtgtcgggaggtgttgggcaatcccataataaaatccatgcaaatatcctcccatttccaagatggtatgggaaggggctgtaaggtacctgctaccttcaaatgactagccttgactctttggcaagtgtcgcattcagatatatacttagcaat

SEQ ID NO: 57377 - DNA, 958 bp, Zea Mays
tcctgactgtgtctcgcccctagggttggcctcgtgcgagtcgtttgcagagttggtcggtggagttgggcaccttccggtgcatcgaccgagatgttctcaggtgagtcagaaatgtgatgcttgtacggagttggtgtcgggtgagtcatgacggtgactctgtctgaggttggccttgggcgagacatgattgtctcccgcttggggttggcctcgagcgagtcatgactgcgtctcccgcctggggttggcctcgggcgagttgtgattgcgcctctgtgggtcatgcaacatggtgcaaaaggagtagccgatgctggatgcggcatacttgtgggtcggggcagagccggtgagcagagttgtgactagaactccctcctgaggttggtctcgggcgagtcatgactgtgactcccgcccgaggttggcctcgggcgagtcgtgactacgttttttgctcgaggttggcctcgtgcgagtcgactgcgtctctgcaggtcgaggtagagttggcgagcggagtcgtgataggatctcccacctgaggttggcctcgagtgagtcatgaccgtgtctcccgcccaagattagcctcgggcgagtcgtttgcagagttggtcagcggagttcagcaccttctggagcatcacccgagatgtcgttgggtgagtaaaaaagcactacttgtccgaggttggccttgggggagtcgtgaatgtgtttcccgtccggggttggcctcaggcgagtcgtttgcagagttggtcggcagagttgagcatcttccgaagcatcgcccgtgatgccctcgagcgagtcagaaatgtgctgcttgtctggggttggcctcgggcgagtcgtgactgcgtctctgcccgaggttggcctcggacgagtggtgactacctcccgcctggggttcacctcggtcgagtcgtgactatgtctcctg

SEQ ID NO: 57378 - DNA, 433 bp, Zea Mays
gaggaatgcctggaagctttgccagaaacacgtcagcaaagtcacacaccaccggatgtcctgcacccgcaaggcagcgtcaccctccaccaccatggagaaaaagatccccgacttccttgaccggcgatcaggaagcaattgcaccaacaaggataacgtgaacttcagggaacttcccaagaataccacctccttacccgacggtgcctgcaataacactgtcttccaaaaacaggatataaccgcgtgatactaggataaccaatccatacccaagataacatcgaatgcccccagggaaatcaccaccagattggccgaaaagacctcatcagcaagaatgacggaacacccctgacaaactgaacagctactaatggagccattagcagatctaaccaaaattgggtgacccaacctctgcaccgaa

SEQ ID NO: 57379 - DNA, 380 bp, Zea Mays
tggaccttattattctgtgggggacggggagatatgacactgagaatgtaaggttcgcagggaattgccccccaagtcatgagctaagctactactctgttgtgttgtgggaaggtttatgcatggttgcagctacactttcgtcaactctgctattgcttttcgcaaaattaggctaatggtggtgtgatgcaatattgccgtcatcatcaactagaatcttctgtagggcaacagtgatggttaaggttggttaggctcataaacgctcgattgatcagtcaataggtagcagggtggacctcagttttcatttaaggttagcgatggatggggtcagtgtagtgtatgctagctagatattactccctccgtttctt

SEQ ID NO: 57380 - DNA, 294 bp, Zea Mays
caagtgtgatattccatataagctgaggtgaatattgattatggatatcataggtgaagctaattgaaggatggacattgactatgcggccgagacttaatgtgcatggcttagatgtagttgattgaaccgaggacgaaggcaagaaggacttcgaggtactaaagcaagggagaaggtcaagaggatttaggtacctaaagctaaggtgaagaagaggttcttgcaagagatcaaggttggtgaagctgtgaagaggcatggtacattgaagaccatgatataagattgttg

SEQ ID NO: 57381 - DNA, 386 bp, Zea Mays
gcaggagtcgtctcattgtagacgaacgtgtcgagcagtgtcatgcagtcaccgtcgcccttcacatcctcgtgcggttcgtcctagtgctccagtacctcttaggtatccacacgtatagggaggaagcaccgcataccgaactactaggttcacgacggcagcttggcgagggaaagagggacgtggctgctagtttgatggtggacgaaattagattaaccgtaaacgcgcccctagccttcattatatacgcgttctggttggcttctaactccaaggcccatcagcaaccctaaacccagtctaatttggatcctattcgagttaggctttcttccccttaagtgtgtgaccttataggttcaagtacacatagacatgcc

SEQ ID NO: 57382 - DNA, 837 bp, Zea Mays
tcggcctccgaaggccgaaggtagctattgaaagtgacatcgaagcatgtcagaaggcctttagcaatgtttgcgccttcattggcacaagagatataattcaagagcatatagcctacaaagtgtggccacttgtggagagctgggatatgccgaaggagactactgccgaatccagtgaaggtggcctagttcgattgaaatataccttcagatttagagagaagtttaatgaaccaaatgatgactggttgaaatgcattgaagctaccagcgacgagctgcttgggacatattccaaggccgaagatgatgccttgtccgcagctttcgggggtcgagggaagaaaagattgaatagggtgtttgatgcaattggcttcgtataccctgattatcactacccactgcgaaggcaagcaaagaagagaaaagttgccgcttcggccaccactgctgtgccgaaaggcaagaaaataaaggttctgacccactggtcgcgatatattgaaccggccgtagttcctgaacttggcgaagggacttcttcaactgccgaagcaaaacaagttgctcccgtcgtgcagagcgctgaagaatcgattgtagtgccgaaggtgcctacagtcgggccagccgaagccaaggctgatacggccagagagccagaattgaaagaaacaatgatgatgccaaaatttttgagcccaccggcagaggcagatttgccgaagatgacaaaggctcctgcaacaactcccaagaggaggaggatggccagcgtgctagacgctgtcatggagactacaaaagccttgacccctgctcctattaaga

SEQ ID NO: 57383 - DNA, 867 bp, Zea Mays
cgggtcttaccgcatggactgctgtatgcgctggagaggggctcgaccaccacggtgcgcctgcagggtggaactaggcattggcaccgccatggctgtgcaggcgagcacctgatcgcacgcacgggatgggggcaagggcttcgtacttggatgacggctgcagtcacgtcctctctctctctgtctctacgctggatcaaccaggctccgtatggagatgcacagatggttgcgcacgggtgttttggttcaaggtgcttcgggttgcattatatactgctagagaagacaaccgatcccaacaaccagtgatagaatttaggataaaattacgcttttctgttggagtttgttgcacgcttgattcggatcctagccaaggaagagggtaatctgccaggcgaggtccacacaacagcgacatggagacacatcgtgagaaggaactggtgataaaatgaacccaccggtcagtgaggatcttgtggcgcgtcgagagggattaatttaatggatgacatcagatctcgcattagcatgacgtcgtatggggctagaaatcaaaaaataatagaagagacgtgggcttcaaccgaattgcagagattgtgggctagttttgtttttttcctatttttatttaatcctttcctgttgtcatttgttttctctttccttatctttttttccagtttccaaattaattccaattcacgtttggtttttaagtttcaaactccaatttaaatgcacaatcaaaaatctcgtcatggatgtaaagttagttgcatacgcttatactaattattttagccaatgacgaaagtacaaagtgcacacaccaaagaatttagtatctttaag

SEQ ID NO: 57384 - DNA, 393 bp, Zea Mays
aataataatggtggaggttcttctcgtgatatccatcctctagctgctactctcaggggcgaagccatgatttaagtttgcggaggacaaatcggattgaaggggctgctatgggatattttgcattatttacatggtaattagctaaggaaattagtggctcctatagaattaggaggcattaggagggacattgccccctatgcccctccctgtctttgccctgactactctaggtatgtctagaggaacctccataacaacattaatatagactataagttccttagcttctaatgcttatggacttatatcctacttggactgtcataatgtcagctagttagatggtgacttcaacatcttgaactggtgacatcatcacaaacttac

SEQ ID NO: 57385 - DNA, 415 bp, Zea Mays
ctaggtgcatttgttaacccgaagggcatcaccaaccattcatgcaacccacattttgttttaaaggctgttttccattcatctccctctttcatacgaatctgatgatagccacttcttaagtcaattttagtgaaaataaaaacaccactaagttcatcaagcatatcatctaatctaggaattggatgtctatacattacagcgatgttattgatagctcgacaatccacacacattctccaagatccatcattcttaggaactagaaggacagggacaacacaaggggaaagactttcttgtacgtaccctttttaatcagttgttccacttgttgctgaatctcctttgtttcttctgggtttgtgcggtaggcagcacgatttgggagggaagcgccaaacacaaggtc

SEQ ID NO: 57386 - DNA, 332 bp, Zea Mays
ataatgttccgactcatactaggaactagataacaattatttaactccaaaataaatcctgatggaaggtgcagttgcatcatcccgacgatcaacgcagcaactcttgcactattgcctactcagaaatcaacttctcctcttttcacgcttctacttcttatcattccctgcatcgaattgcaaatatgggcaaccgatccggtatcaaatacccaagaatttatataagaatcaacaataatttttttgtaatgtgaatagcaagtgtacctgccacggttgtacccttaccgtgtgatccttaatagaggccaagtactgtttgcaat

SEQ ID NO: 57387 - DNA, 1314 bp, Zea Mays
agtcaaccttgtcaaactctgaatgtgagatcaaggcaccaagaagccatagctgaatatgtgtagtggcctctctatatcccatcctgggaagcagtgtctgtctcatcagctcatataagtacttcgctgcagtggtgaagtcagctggagagcgtcgcgacccatctgtgaaaggaggtctgaacagggtcgcgatgtgagctgcggccgatgcaactccgttgtgagggcgatgaggaggatctgaggtaccatagcacagactgtggagctgagtcgacgactgtggaaatccaaagagctagtgtatctggctggcatgcaaagtgacatcctctctctcgaagcggaaccacatccactgatgatcaaggtcaatccacattgtagcataaaacactctgacccactcctcaatatatctaccactcacagtcagtagagaaagtagtcctagcagataagagagataaacgtctgaatcggcaccggctacgagcagaaaagcaggtaaatccaatagctggtgcgctcgcaaggcgatctgtgctgacagttgtgcccgaaagaaggattcctgagtcctagtactgaagagagccgtcgttgcagggtccctttgagctggcaaccaggactcaacgggtacgtgtctgaatcgacgtacctaggctacagtggcacgctgaaggtcaagcagtcgaggatcaacagctaggggtcgcacctcagtatcgtcacgctccctgaagcgaggtggtggaatgggcagagcagaattgggagcgggagggggaaaagtggaagctggagtggtggaggtggtgggtatagcggaagtggtggatggctctggagcgacaggagctggtgaagtgggaggtggagtagaaacagtggcggaaggtgtagagggagcagtggagagaggtcgagatgcgaggcgacgaactctgtaagcaatctgatcagaggaaattagcaactgtcctcctcgctctgcctgctctgttgctgatgcctctgcaagtgctgcacgggtggctctgtccacacgccgcttcttccgaccttcctgctgctcaaggtacacagtctcccccttgacctacctgaaggggcaaggatggtccttgtcatctcctccccctggcgctgagacattcttcgtccgcaccatcctgacctgagtgttggaaacctcacgagagagagagagagagagaatccaggcaggacaggagacgggcacacgggcaagcgagatcactgaaatgacagaagaggtgagcacatatcagtcacatagtc

SEQ ID NO: 57388 - DNA, 1130 bp, Zea Mays
gtctgaaattcagatattcagtgtagcagagccaactttgagtatgaattccaccttgatttagtgctcaaatgggttcaagtcctatagccgaattattgttggtttatagctcgacaactttgttgcagaaagtaggcttaggttccacataaaaattggagaaaacagggctccaatttgatctgtcagtcaagctttttactgaatccagtgcactgttcatcggttttcagtaaactcgccgtggataaggattggcccgccggcgataaggatgtcgccgtggctcgggtaagacgtcggcggccacgacaaaagttaccggcgacgtgtcaaagcctccctgaggtggcaggccccggttaaacggcggtcaccgcgctgtcaccggaatccgccgcgcgggtgtgctcgccagcgcagtcacagctcggggatctcatccctcctcggccggctgactataaattggaccctggcgttgcttcgtcgttgcatcacgcgctcaagcgatcactcaattgaactgaagaacccacgagctctttcctccctgttcttagctccgcaagaatccatccgtggccagtgcaattcgagatagctcgcgtcttctacttccttgtttgagtattctcaggtacccgtgatgcttcccgacctatccaattgaattataccgtcattaatcgctcggaacatgcggttcctttaagattctccgctgtcgccgtgggcagagggttgtagagctccaaattagaaattgagtgaggggaaatactccttaggggtagaatctggtgtaaactaaggattagtgtcggccttcgccccctccggccggtatagctcgccggatttcagctgccatgcggagcgccgtcgtggacctggccatgtgaagaaatagaacctcagggacctcagtgcaagttgtcagtgactgatataaacagtgtctaaacctgttcgcagttagacagaaacgcgagggcccctgtgcaaagtcgccagcccgcggtcgcgggcgcctttccctctgaattgggccgcctgggctgaaaccagcccattactgttgaagccttttcttttttctttttcagcagagctttggaaatctg

SEQ ID NO: 57389 - DNA, 390 bp, Zea Mays
ggaggacctcgctgacgtaataaaccggcttctagacggtctgggcacccaatgctggttctaagtcctcaggtccctgtccttctggtgtcgccctttcggcgactaataccatgctcactgcttccgcagccaccgcaatgtacaggtatagcgtttctcctggctctggggcgaccaggatgggcagggaagttaggtgctgcttcaattcccggaaggcttgctctgcctcttcggtccaggtaaaggggctagatttccgtaggagcttgaagaagggtagagccctctcagccaaccttgaaatgaagcggctaagtgcagccaaagatcccgcaagtttctggatgtccttgacacgggcggggggcctcattatctagatag

SEQ ID NO: 57390 - DNA, 360 bp, Zea Mays
ggcaatgatattagtatcacaagtgacattttcgatgttcactaaagcgccaagttttctcttttctgactaaacgccatcttcgctagacctacgaagaaaagaagctctttaggaatcctttaaaaatgacatacaaacgatagattggtaatactgtgaacagggtccactattgaaagaatcaagaataaatgacgcatatggcatgtctagtgattttacattgcagaagttgattttgaaacctatacttgtctctatagcttaactaacgcaggacgtgatgaatttttgcttgttagaggcaattcggcaatccaaaattcacacacacttgatctaggtctaatacatgac

SEQ ID NO: 57391 - DNA, 462 bp, Zea Mays
ctcacaaagaaatatattacatcattaaatgcacagatagttgataagtgtttcttacaaaggcaaaattctatacagagaatctaaagtcttaaatgataagctctagtcgtcctcttttagaactttatcggcagcttcctccaagagtgtgttgacagcttcgtcaatgtcttcattagcaatcctaattacatcgagcgcccccttcagagatggatcatcttcaggattgtatggctctggagggggagagatctcagttgtaccacaatacaaatctgttactaccgaagctaaaataatttatgaagctgaatcatgaaaggtatacctataagcctggcacgttcagcggcttcttcaactctcctagcctgttccaaggcgtcatgagattctttttccttctctctgatagcttcatcagctatctctcggccacccttcagccataattcg

SEQ ID NO: 57392 - DNA, 399 bp, Zea Mays
tgatgataccacccacacatggtgccacatagtttgcccaaatcggctaactgtggttgtgtgtgttgttatggcctctacacccacatgagcggtgtgatgttgagcaatgtcgacctatgtttgcattatggacattgctctatttgtcagcctaagttcacaatgtagcattgctctatctgtggcctgggctgcatagatatgtttagttacactgagtttgtcgcactcgattttaaggacaaacaaatgcccactatacatgcaatcagatcaagaatcagatgtataacaggcaggggaatgaacgaggtctagggtactcgtagtgaccgtgcagaactccgacggcagcatgggaccgtaggtgctcgacgatggtgaggcagcacggag

SEQ ID NO: 57393 - DNA, 613 bp, Zea Mays
ctactatataacgcacttgtttatgtgtttccacggacgtcatgcgttagcattccccttttcaatagggacatgatattggaagcccagagcttctaatagttacaggaagccccagccaatacacgcttcgagttcgcaccaatttcggtttgaggtggtgccactaaatctaaaggtatcattagactagggcttcctttagttattagaagcacagaaatcacgatataccgtctccctatatatatgggggtgaaggcaggatttggggatagggggtgtcagggatatgatctcggtccctagggtccaccggtcagcgagcacatcggggaaaaggccttcgacaactaaggcccaatgatcagttagaggagacaggtaatgtcgaccttagaagaacccgcccttggacaaacctcgcggcaccaaacctgaggtcaggcatggcagaaccggacaggtgggtcagacgtgtcaaagggaaaccattcgagtggatcccacacctggcccgagaccgatccgtcatgaccggctgcgataaattgtgcctggcgccgagccacagcagaggcgtcggtctacctcccactcacgacatacgaac

SEQ ID NO: 57394 - DNA, 782 bp, Zea Mays
caaaaacccgaaggtgccttcccaaagcgttcacgccgagtgaaccacccgactgcacctgtcgaggagaagaggaaaaagaggcaacttcggtgactgtcgtgtctggatcaggatgctggtccttctgtgccgatccttggtgatgtcctggtggacgccattcccgaggttaatgccgaaggttgtgatgatgcgtgggctgctggcgacgtgtttgacgaggatgaagaggaagaagaagaagaagagattccgctgatccacaagaatagctgtcactatagaggcagcgacgggggtagcgatattccctcccaagctctgtcggcactcgtcagccttcaggggctttcaatatcagactttgatcgggcactagaagaggtcattcctgaagacatattatcgaagcctcctgaggctgacattccaaccgtctgttcagaggtcccaaatggtggactttcgctgcttgattctaccgagcaagaggtaacccgggtggtgtctcgtgcatcgtcgaccttggagggcagccttccatgcaaaaacactgatctgagtcgtccaactcctatggaggtggctgaggggccttcagccttagaggtggctgctgcagaagacccagcccctgagggtggcgctggtagtgacctagcccccgagggtgttgccggtagcaacctagcccccgagggtggtgttggtggcaatctagcccccgagtgtgttggagcatgctctctctctactgcttccatggacgtccacattgg

SEQ ID NO: 57395 - DNA, 641 bp, Zea Mays
aattccaaatcaagcgcataagtactcattggaaagataagacaaatccctacatgattatcatactggttaacactaattacccacgaaaaattctcagaaactgctaataccactgctgttcacccacctgaaaaatctgtttttttttggacagcaacataaccggattcaaacaacgatatctcctaaattataactccgaatcgagcgcataagtacttgttggaaagataacataaagccctacacgattctcatactgattaacactaattactcccgaaaaatccccagaaactgctaatactgctgctgttcatccccctgaaaatctgtttttttgacagccacctacccggtttcaaacggtgataacttttaatttataactccaaattgagcgcataaatactcattggaaaggtatgccaaagttctacatgattcccaaactgattccccttaactctccacaaaaaagcccagaaatcactaattttgctgctgttcgtccacccccttaaaattctggacaacccttctaccaaatcgcacacgcaacatttaaacaattggattgccgcataaaataaacaagagataaacacaaaaatcaccttgggttctcccccttttct

SEQ ID NO: 57396 - DNA, 429 bp, Zea Mays
gtctcaaccttagctcaggataccatcaaatccaaatggatcccaaagatatacctaaaacaggcttccagactcacaatggacattttgagtatagagtgatgccctatggagatactggaggtccagccactttttagctcactatgaatttagtgttgtctccccttcttcataaatgtcttgtcgtctttatcgatgtcattttaattttcagcaaatcttgggaccttcacctacagcatgttcgaacggtcttttccctattgtagcaacatcaatttaaagtcattagtcaagtgggagtggctacaaatctggaaaaggttgctgcagtttagtcttggtcgaccccaaccaatgtcaaaaagctccgtagttttttgggtttagtaggttactacagaaaatttgtaaaaaaaaattggc

SEQ ID NO: 57397 - DNA, 1054 bp, Zea Mays
gtcgttttaagtgacatgttgatcccaaggcgaactatatgatctcttctccctgatggggtccctctcgagggagagggggggcagatccaggtgctgctagcgaatgccaccacccctgcgcacatgtggaccgtttagctatcaggcgcggaccatctggtttgacgcagggtcacagatcgtttgtccctaggccacggatcgtctgcgtcgccgcagagtgcaccgctaccggtataccttgttagtgattgacgtccagatcgatgtcaacacactttttgtcgacctcgctggggaacattattaggtgtgagttggcatagatcgaccctatatggccggttccaaggaccacttcgatgttttacctaacaatatcattgagccgattatggagactctgtcggctgaagatcagcaggaattcgagaagcataaggagcagctgatcagagaggttaaggcaaagtacctggccaatttcaaggtggtcatgcatcaaaaagccattcggatacaggagactgacctggcgtcattccgacctactgcaattatccccaatgtaagtagcacgaatgacgtccaatctcttcgatcttacgtaaatgaacagtgagaacaaatgcaacaaatattagggggtatgcaagaggattacagagggctagcacgtgtgtttgataaatctcctgttactaattttctattgtacgatgttgagactaaagaaaacacataagattcatcggctggaaatgggcatgcccaatcctagccgctttatgggatgtcgatgaactctcacaccaggcagccacatcctccaccacttgtatggcaacaacttgtgcccccgcgcatggccagacagtcctatcttccacgatgaaccaccgaaatccatgctagggacgactaacatgctcggactgttcgactctaagcacggaccatccgagtatagcaccagaccgtttggatattacactggatcgtccgcgatggggtatgtagaacaaaactttgattgttactagcaaccctt

SEQ ID NO: 57398 - DNA, 586 bp, Zea Mays
cctgactccttctccaccggcacaatattggagacccactctgcgtatctgcaaggtctaataaaattagcttctaccagctggtggattttgtccttgattcgtgggagaaggtctagacgaaatgttctagttttctgcttgaaaggtctaaaactggacttaatgggcagccgatgctctacgatctcacgacttaatcccgacatctcagtgtaattccaagcaaagcaatccgaatattctttcaatagaccgatcatttcatttctaggatcggtccccagggtcttgttcacaaaaggtggccttggagttttaccatctcctatgttgatctcctccaaaggatcggccgatgtaaacccttgtcctaatttatcgagatctctgaattcctctatcatgtcccccacagaggaaccagatgatctttgtgtgatggcggactctccgatctcgggggccagatcatccatgataatgtccttacactgtggtagatgttcagtcttaaagaccgaactgttttgtgaaagaccggaccatctggcctcacaagccaaactatccgtgactagggact

SEQ ID NO: 57399 - DNA, 899 bp, Zea Mays
gtcgaccggcgcggcgctgccgctgcgtggactggagtgctcagcaggagatggcataatttcctacgcgtcctgatgagggcgacgtatccgacttcggaagggaatattttccccgtcgcctcagcgctggatgcctgcaaaatcctccaaggttggcgtcgttctcgaaggctagtttccagccatgccgtgtcccaggatcgttggacgggcttgtagtagcactgccagtctaccaccaccttcccaccctttctcctctcaagctggaacgtacccatcttatgtttccaaatgtcaaacgtaccttagtattagggtgttacaatttgaacgcatatttcttttattgttcttgttctaaaggatgaacataaatcgttgattcctctgttttcacgggtaacgctgtgtttctgtttcatggtttttctcggcccatttgaatgattatatgtaggtaatcttttctcgtcagccaagtttctttacagatttcactaacaaagagcctacacgtgttttctacggtttccatttatacttgagtatagagtataaaacataaatacatgtgtgttttgttagctagttaggcgtgaatgtgagtttatagctaacaatcatggttcgaatctacatttgtacataattttagtttttaccagttaaatgtttaattgtggatccgattgagtcagaaagatggcgggttgattataaagaaatataggtggcttttgtgaaattgacaacggtggaaccatggaacgagaaaaactggttctaatatagtagagatagagatgttagtaggcgcaacgcatatgtctcgtttcgctgctagtttggctaccttcccactacctcatcttgccctagctactccatttggg

SEQ ID NO: 57400 - DNA, 583 bp, Zea Mays
cttgcttggatgtggttgatgactcttctttctgaaaggacaggatgttcgatctgtggtgcttgcacataccagtcgaagaccgaacgcccttcgcaggtacgcccttcgcaggtacattccttcttttttttcctctgacaattggaggagacacacacgtgtacctgcaagtttagttccacacactgacagatccactctggaaccgctgatggagcacagggctggtcgagtatgtggagagggcagtaaagtcggagagctcaagagcgcctgacagaccaatctaccttgttggagagtcagtaggagcgtgcgtcgctctagccgtggctgcgcgaaacccaggcatagacctggtactgatcctagtaaacccaggtcagcattgtgtttctctggactttcgagtgaatgatatgactcctcgtttctgactcctgctggagtcttgggccggcctcgtcttgcaggaacgtcgttccacaggtcgcagttgcaaactctctcggccttcttggatctggtccctgaacccttccatttgaccactccacagctgctaaattttctgacaggt

SEQ ID NO: 57401 - DNA, 569 bp, Zea Mays
cttaaataggagcatagaatctaatgtgatctaactaaatgatattcttaaataggagcatagaatctaatatgatccaatctaatgtggtctacttaaacagattagtgagacttgtagaagagattataccctaatagccaggtgtagaccaactcaaccataagcagaagacctaaccatatgagtcataatggactgtataatctatctatccccacctaacatcaaacaaacttttaacctacatcatgtagactatctcatcttgataagattctatcttacctttggatattcaccatatacgactagttaccccaatttggacataaatcaaagattaagccctgctaaagaatcttcaggacataaccaactattagtctattcattctgcttaccaaatactttccattgcaaaactatcctaccttatgcttctaactttgatggtcaaaaccaggaaggaaagactaccaggcaacaacaaacagaaatgaatcctccaaatcctccaccggttggaatcgatcaagtggttgccacccaaatgatggtaatacaac

SEQ ID NO: 57402 - DNA, 735 bp, Zea Mays
gttggagtctgtaataatgcttaattcagtgtcttagtcttagccagtcttagttagagttagtttgcttatcatatgttttgatgcttgtcatgatgaacttgtaatggagttgaatctttgtaacgattatcatcaaggtgtgggcatctcctgcaacttggtgtagttattaagaaagccagttgtttagttgggcaacctatttatttccactttcctctttatctgagaagctgtttcaagagtcagtgaaaatgatcaattgttcagtgctataaagattttcatatatcttttcttatgctgaaagactgcagagtcagatctgatatgtgtgtgctttctacagatgtctgagaacaagtgcagaggtggaaggtgtgctcagcaggagcagcaggcaccctaggaggaggcagctcagcagcagttgccaccggcacccccgatgactattgagcagatgttcctgatacaaacccaagcagtccaagcaattggtcagactttagcaacaatgcagcaagtgcagtagcagcaacccccacctcaacctcagttgcaagttcagatgccataggtgcccagagacaagcgggcataattcatgagggccatccccctatctttgcccattatgcagatcccatggacgccaaagattgtgtaacactctagtgttacttagggtttttcctagtaccccaacttgtaaccattatcacatgtggc

SEQ ID NO: 57403 - DNA, 472 bp, Zea Mays
tcccaaaggtgctcaatttgaattaattggatattcggactcggactatgcggggtgcaaagttgatagaaaaagcacctccggttgttgtcaatttcttggtagatctcttgtttcatggtcttccaaaaaacaaaattcggttgctctctctaccgccgatgcggaatatatatcggccggaaattgttgtgctcaactattatggatgaaacaaactctattggactatgggattattttcaagaatgtgcctctcatgtgtgataatgagagtgcggtaaaattgactacaaatctggtccaacactcaagaactaagcatattgatatacagcatcacttcttaagggatcatgttggaaagggagatatctctatttattccattggtacggatgatcaattagccgacatttttacaaagccattggatgaaacgagattttgtactctaagaagtgaaatgaat

SEQ ID NO: 57404 - DNA, 621 bp, Zea Mays
gttgtgtcacaccgtcacattttctattcatttttcttgccgtgggagctagtctgttggctcctttcctagatacgtcatcccaggccctgtaacaaacgtcgcgggttgttgcgcatgccaaacccatcgcgcgctgggcatcgatgtcgttgaccgcgaaaatctccaacgaacggagccacctccccagcaaataaatatgaaccgacgcccccttttattttacccccacatcatgcaactccatcgggtatggcgggagagagaaggccgagagggagaggtagtgaaggtacccggtatgacccgctggtgtctccgtcgtcgatctgctcctgcaacatcggaccagtcttggtcggccgggtcggcgctaaccttggtaagctttgttttcctctctgcggtattacataaactatcaaggtttccattgccggttggctggggtagtgttgggcgagcgcttgggatttagacaccactggcggattctcgaggtggtctgtgccatgggcacgtctgcctgtatggcgcacggccggccccaggctgggcgtctggaggtagaagaaaggggataacggctcattgggaaatgaatggctaggatctgat

SEQ ID NO: 57405 - DNA, 441 bp, Zea Mays
gaggagaccaactcaaatacgcgcttcagctcctgttcccaacctccaacaatgcaacagagtatgaggccttaatacatggacttaacatcgatgtgtcactgggcatcaagaaattaatggtatatggtgactccctagtagtcattagtcaggtcaacaaagactgggattgctccacagattcaatggacagtaactgcaccatgatgcgaaagcttgaagacaaattcgaaggcttagaattccaccacatagagagggatcacaatgcagtagcagatgcactgttgaagctagggtccagttgggcgtaggttccacccgacatctttgttcaggagatacgacagtcgagcaccacgacagggcccaccgaagaatgcaaagcagtgtactaggcaaagtcagacccaaaagacttgagggagccgattatca

SEQ ID NO: 57406 - DNA, 498 bp, Zea Mays
gagcgaccgaaatgactcgatctaaaattctcaaggtcatgtttgacccgatcagagatttaggtcgtgtgaactcttgatagttctgtccaaatcatggtgacctagtcggggggctaggttaaacatgtcgtagtcaggtctgatctagctaggctagacttggttggggagttaagttgtgtctaccaaggtcaggctcgacctagttggggaattaggttgggactgattttgtttgagggactgtcttgggttatgtagggtcttaatctctaggaggggtttttgtgctatccttgggtaccccgtgtatgggtacatgttagtcgtgctctctcattttccttcgacctttgacccgacgccgcacgaatggaagcggtggctagctagggttcttcattgtcgtctctgtcggacctccccaacccaataattgaagcatgaccgccctctcaaccttatctggcctcatttctaccttctctaggcaac

SEQ ID NO: 57407 - DNA, 675 bp, Zea Mays
ggaaaactgaaacatttatgctattttgcatgcactgtgattatttaaatggcttcatttgaaaaaagggttttatgagagaaatcatgaagagaaaaatgatgagaattcagacagcgaccttgcattcactggtgagattttattatatgttgtagcatattttacttcgttggtttcatgttttcgaggagtttgtagactgacttcgaagttccaatgaggttcattgtgactggaaactcagtacggcagtaacacacaaccttatgataggagctccaataatctgcacagtcaggtgcatgtgcattggccagatttcagatttggcaggtttgggtttgcatagcttatttaggagtctatgcagatgattagatttgctgaaaaataaaggtaactccattcacactcgatggtgctttgacaccaccctttcttttctttttatgagaatgcttcactaccgtctactacgagtaacagcatggaatctttaccaatactacaatacgtgtagatgcttgtgttgattatagcttctcattatcgttttgagcaacaaatttaccgcatgtgtcatgttttatatagttcctcaatctacccactctgtcgccctatttgacagctctttgtaagaaactaagaatatcatataaatacaatgtg

SEQ ID NO: 57408 - DNA, 548 bp, Zea Mays
taaagatcgtggaatgcacatgtgcttattcggtgaactacaagtcctttggtacctcatcttattccttctcgagtttgtatgggtctttatccctttatacggattatcaaactttggtgtttaacacagactttatttattctggaaaggttccatcaaggaactataatctcatctaggagatattctctctacataggagagtgatcattcatcaggaatgtattatctagtacgagatttatatgttgcatatttataattcaaagatatgagtcctcgtaggatctcatgcggatcttcagaatcctattaactgcatattttaattcatgccatttgccagatatattacatagtggaacagtgtttattcaacacacatgtgggatgggtctcttacaagaccacttgaaccatcacattcaccacacattatttcaatagttcccataaatgtccgaacttcaagctcgtgactttcattttgcgattattggttcagcgtcgattgcgtttatcaatgacccgataagagagcttca

SEQ ID NO: 57409 - DNA, 718 bp, Zea Mays
gcacgacacagcaagttgtgcacctcaacgagaagaaggtgttcccggcgcacagtgatgaagacaagaatgtctgggtcctcgatacgggggctagcaaccacatgacggggaggcgcgaggcactcgcatcgctagacaagtctgtgcgcggcacagtgcgttttggcgacggctcgctcgtagagatcgagggcatcggatcggtggtgctccagacgaagaaggagggtcacaaggtgctaacagaggtatattacattcccaagctaaaaagtaatattgtgagcctaggtcaattggaagagggaggatgcaaggtaatactggagaacggatactgcaatgtgtacgacatcgagcgcttgctcttggcgcgcgcaccgcgagtgtcaaatcgtctctatctgctgaagacgcacctgactgctccagtctgtctgaaggcgaagacagatgatcaagcctggctctggcatggccggtatggccatctcaatttcagagcactcagagagctcggacagaagggaatggtggatgggataccactgttaaatcgtgcagaagaagtgtgtgatggctgtgcattgggcaagcatcagcgacactcattccctcaggtggcaaattatcgagccaagaaaggacttgacctggttcatgcagatctctgtggccagatcagaccaaagacaccaggtggtaagagctattt

SEQ ID NO: 57410 - DNA, 1067 bp, Zea Mays
ttttgaagctcgtttatgggatatagaagtcatccctatatgagtagtcataagcacgtcatatcgccttaaatcgctgcggacttaagttgattgcttctgttcgtagggcatagtggtcaccccgagttacgtaagcgcgagtatgtcgtatcgccttaagtcgttgtcaacttaagccgattgctccgtcagcagggcatagtggtcaccctgagttaagtaagcgtgagcatgttgcaccgtcttaagtctttgccgacttaagtcgattgctccgttagcagggcatagtggtcaccccgagttaagtaagcgtgagcatgttgcaccgtcttaagtccttgccgacttaagccgattgctccgttagcagggcatagtggtcaccccgagttaagtaagagggctagtcaagcatgagcaaattgagtgtctttgagaccttctttattgatgacatatctcccgttttacagagtacattgtcgtcccgatagcctttgaaatttagctaggggtaaaacttcctgaggtgctctatattctaggagttcccaatttctgtgccatccatctgagttagacgatatgatcctggccgagtgacttctgcgattatgaatggcccttcccataagggtgacaacttgtgtcgtccctcccccgttagaattcggcggaggacgagatctcctactaagaaggatcgttgtcgcacggccttgtcgtgatagcgtctcagagtctgctggtaccgtgctgattgaattactgcgttcagccgttcttcttcgagtacatcgatgtcctccagtctagtagcttcggcttctgctatgctttcgaagaccaacctcggtgccccgaacttgagatcggcgggtaatactgcctctgacccatagaccatgaagaagggagtgtttccatgtagagctcggctaggctgagttcttaggctccaaacgacgtagggcaattcccttatccacttccctgcgaacttctcattcttttcgaagacccttttcctgagtgcctccagtatcatcccgttagctcgc

SEQ ID NO: 57411 - DNA, 671 bp, Zea Mays
tcctggtaatggcttttggattatctggagctcctgctacatttcagggtgctatgaacaccacattgcgtcctctcttacgcaaatgtgttattgtcttctttgatgacattttggtgttcagttccacattcgaggagcacctgactcatttggaacaagtattgctctgttaaaaaaaagactcatggtttgtcaaacgttccaaatgcacctttgctgctcgatctatatcatacttggggcatgtcattagtgaagaaggggtggccactgatccttccaaggttgacgccattttgcactggccgagtccaactaatgttaaggaattaaggagtttcctcagtcttgctggttactataggagatttgtgcgccattttgcagtcattgccaagcccttgactgacttactcaaaaaagggacattatatgtatggacatctgatcatgagctggcattttcaacactcaaacagctgcttagttcagctccagtgttaagcttgcctgatttttctaagcccttctgtattgaaacagacgcttgccaaacaggagtaggggttgtgttacttcaggacggtcacccattggcgtttattagtaaacctttgggaatcaagacacatggtctctcaacatatgaaaaagaatatttggctatt

SEQ ID NO: 57412 - DNA, 417 bp, Zea Mays
ctgtggctggtttggtgaccacggatcatgagggagagggtagagagcgtagacgaaccgtgagcatgaggaaatacggaacagatcagataaacataacaatattaagagtttgtttggtggacagggatatgaagggggtccatagaggagggatgtccaccaaactgtccctaagcggcgttggttggggatttggatgaagatctttgtcaccgtccgtctagagtctagtggggctaccagaattgagtagtgacactactgttttatcttgtgtcgttgtcgtgacttgtttccagcagattatacgtcctcatattcaaacttcactttgcaaatagtgtaggctacaacagtgcaaaactgtgttttaggtgatcatatggataaatacagccctcacatgagtcttag

SEQ ID NO: 57413 - DNA, 367 bp, Zea Mays
tggaggaactgtgctagattcacccgtcttagagttatgttgtatcggtggaggtgcaagaggtgacaatggtggtactatgttatcctcatatgagctatcatcaatggcatatctctactcaaataattattcaaggtccaactgcttgacctagctcacagactgccttgtcctacttctactcttgcctaagttaccataccctcaggaggagttgtcaagtgtcatggcccactatggatggttaatcagtagtgagaagatgtaagacaggtagtgagcagacgaaagatgatggcaagacttaataccatccaagataatgccctaaatctcatagatcatgtagtccacaatgtcaaac

SEQ ID NO: 57414 - DNA, 551 bp, Zea Mays
atggtagttttataggagtttcattctcattaaatggtgtgccatgtcaacaatttgaatgatgtgacaagtaattaatgaagaaagatatgaaatgagttttatgggaatgaaaccatgtatgcgctgttttctaggcatgttgtctcttgcatgttacctatgaaactgtgtgaacgaaactctccactgtgagagactatttcaaccaaggtttcatttattccttgattatgtatgtggcatcttggaaacataaatatgaaacctaccactataaatgacctaatgccacctgttgattacatgttgcatcaacatcgcccaaaacaaatcacccatgttctgctatgcacctcagtttcacccgatgatttgcatgtaagcagtgatggatacatggctgttctgattttttaccccccccttcaaaatatcagaaaatcacataatttgtctatctcgttctaatggtgtttatatagttattctaatgcatgatttggattatctttataatatatgtttttcatacttgtatcatgttgatg

SEQ ID NO: 57415 - DNA, 842 bp, Zea Mays
tctttgctcctcattgttggctggatcaagacacatggctgcctcctcctcgacgcctctggctcctaaagacgtgcatcacacagtcacacacgctctatggaagtgaaaccattggccaacaacctatgataacaaaagaccggttagatctacaacaagagaactagagagagaaaggaaggacgaaatgaggagatggcacctccgtagttggagcaccggattcatcgatgagggagaataaattaaagcgaagatcttaactagaaagaggaatagggttagggttatgatgagaagaggaaagaggatgagagttggggagagaggggaagggaatagagaaagtgagcagaggagctgtgttgtggcaatgacaatggtgagtcaccgtctacccgacatcccacatatcaacatgagtgggactaagggagaggaaaacagaggcagatgcgatggaaagagaaaggtgagatgcttagggttacagtaatttagaggatgacacgagagagttatatacccaagatctctgactgatggtgccgaaccttatatgggttggccgttgcagtcaagccatacgtcacatgctctgtgccagctgacccaagcaaagtcatatgatttgtgcctatctaacacaggtacgatgccagttagaccatgtagtgtcagggcgatgcttctggtgaaccgtgctttagatcatctggtctgtttgaacatgtataactcacttgtagaatctgtactagtacaatttacttacatctatacactatatatataatctatcagattaaattttgcaaaaccacacccaaccaaatcac

SEQ ID NO: 57416 - DNA, 582 bp, Zea Mays
gcttattccaggcactgcccctatttccaagagagcctatcgcgtctccggaccagaattggtggaactcaagaagcagattgatgagttgttggagaaaggctacatcagaccaagtacctcgccttgggcaaccccggtgttatttgtggagaagaaggacagtacaaagaggatgtgcaatgattacagatcgttgaatgaactcactatcaagaacaagtaccccctgcccataattgaagatctattcgatcagttgagaggagctagtgtgttctcgaagatagatttgaggtctggttaccatcagctcaggatccgaccctcggatataccaaagataacatttatcaccaagtatgggttatatgagttcactgtcatgtcattcggtctaacgaatacgcccgcttaattcatgtacttgatgaacaagatattcatggactagattgacaaattcatagtggtgttcattaatgatatccttgtatactcccacaatgagcaatagcatgaagagcactagaggaaagtactacagaggctacaagaatgtcagttgtatgccaagcttag

SEQ ID NO: 57417 - DNA, 611 bp, Zea Mays
gtgaatgatgtgtaacatgactcatctgacgtgtcaagtagtcgggaccgaagaatataataatgatcttgctttgtttcaggtctcctttccattttccatgccaggtgttgacctgacatgcattgaacctacactcagccccgtcggagaggtgatattgctcgataaagccactggttggtgttggtttatagttgtgttatattagagatattttatctgacctttgtcgcttttgatctgacgtagtgacatgcggccatgtgggctgcggcaaagtccattgttcagaatttgaaagatgggtatttaaaagtgcttacttgatgaactgtggagctggtcagcctctctgcgtctaggaagtgggaaccctcagggcgggcgggcgggtgacgggcaatgcggcgacgttgtggctatgtgcagtgcgctgcgttagggcgagtccgcgtcttcgtcttcgcagtatagatgaccaaccggccgcccgcacggcactagcacgccagcaccggcaccatatggcacgtcacggatcatcggcttaggcacggtgactcagcagtgctagtgctagcacggtactaagtgtctcgtaagaaaac

SEQ ID NO: 57418 - DNA, 1043 bp, Zea Mays
gcatcctagttaataaacttggtgtcaaaatactactccacgtacactcaaaagtgcatgcatatacgagtataaattttaccgggaaataaataaaccttttcttaatcaaataattaaaagaaataaatgttgggatgaccgccatgcagaaaaaacttccgtgcctcgcacgcatgcttttgaatgccacatgcaacgaagccagccatccaggcgcgcgtcctttcccgctcacaatttatgcacgtcacccacgaacacacgtctctcagcatgcagtttagtcgcgcccgcgcgtgatttttcccacgaccactgttcaacttgttcacggcgcctataaataaaagggcacagcgagcgtaaagaggaggagaagaaaaaaggaagtgccgtcaggctgccgctttgagttgcctgctgctgcgacgacgaagaaaacaacaaagcatcgtcaagctgcctctcggcttccccggcccaaccaccaccaggcttctacgttcagagagctccggctgcagctgtgcccgctgttcaccaccactcagtgccgtgagagcggatccaaaccaggagcacatcgcgactccatcggcaaggaaagtcttccgtcaaacacctctctagggcataccctagagagactggttccagaaatctcaagggcatacccttgagaaaaattgcgtcactcgatcctacacaatcttaagggcatactcttaagagagatcacacgcacgggcatatacgccgctgtggccaatcgaaaaggtccactccaaggtaagaaaagccccttatgtcgatatactattccttgtcttctttgccatcgtggtagaactatgttcttcgactcgtgttgttgatacaaaattaggaacaagtgctaaagtcgacatcatgccaaaaataattatactccacacacatgtacaaattatcatgaatatatgcggtaagttgtacgtggaaattgaaattctatgttaaataatgttcaaaaatatatttgcgcgctccatcggcaagaa

SEQ ID NO: 57419 - DNA, 446 bp, Zea Mays
ctgagattgacagcctccgtgagactactgaaggaagcccatgactctgattactctattcatcctggtagcactaagatgtatcaggatctgaagcaaaagtactggtggtatgggctgaaaagagatgtatctgcacacgtggttgtgtgtgatgtatgtcaaagagtcaaagctgaacatcaaagaccagctggactactgcacccgttaaaggtacccgaatgcaagtgagaagaaattggtatgaatttcattacagggttgcctcgcacctcgaagggttatgattctatatgggtgatcgtggacagattgaccaaagtggctcacttcattccggtcaatactacttataaaggttctcagctggcagagttgtacatggcttgaattgtgtgtttacacagagtaccgaagaatattgtttctgatcgtggatccca

SEQ ID NO: 57420 - DNA, 369 bp, Zea Mays
attttaaattgaccccctttatagaagttcctcctagaatatttaaatcgatatcgatgacctttactgacccccttttaaattgtcattgtatcagttctgtaaataatgtttcttaagtgggggctcttgttaggctatccaaactcctgtttgcttattttcaactgttattttcttctcattatgtgtaactatgtaagagctgctacatcatcgagaattccgtagcttattttcaacaccaggtttgcatgtttccagtttcattttatttaggcccaatcttcaatactagcagatttttagcaagtagttaagaagtaggcaatcgtagtagtaattgctgcatcaattaggagggtttca

SEQ ID NO: 57421 - DNA, 347 bp, Zea Mays
gtaaaggatgaggtggatgggaaaggtgcctttgatgatgttattttaagcttaattgtccttcttgcttattttggtgctcaagttgtagaatgtcatccccagacctcacaagtccttgtgaaaataatgcatatgtttagggggaagatatgctacaatttgaccctttgagactaatatgtttgcttaagtgattttggtgtagtctcaaaggtagattgaaagggaaatggtggactgagacaggaaaatgcttccactgcataacggtatcaatgtacctttgtcaagttgcccttggtgttcattgtcttcttgttctcaaattcataatttttggtgag

SEQ ID NO: 57422 - DNA, 945 bp, Zea Mays
taaactttgcatccaagagccgctggttttcggccttaggtgcctctatcttctgatctgacatcttgaggagtagttgtttcttgggatgagtggaggggtttatatgcagtctgtgttcaatgatactccggctgactccgaccagatcagatgatgacgaggagaagatgtctttgttcttgcgcaggcagtcgagcaagctggcctcttcctgcggagcaaggccttcgccaattaatactgcgtgtttggggagagtggtattgaggggtactttcttgccccctcgtcactttggatggggctctagtgcttgttagtcttggccaacggctctagattatgtgtctatgtactggcgcccaagtaatgaacatttcgttgcccaaggacgaagtccctttctatttgacgggccacctgctgatctccgaagactgtgataactccgcttaggtctaggattttcatgcacaagtataattcgtgaattgttacttcgaatgcattgatgacaccctacctaagattgtgttgtatggatacaccatgtcaatgatgttgaaggtgatctgctctatccgcgcgtttggttggtaccaaatgacagtggtagtatatttttttccaaggggtaatgtggccttgcctccgaatctgaactggggattgtctaccagctgtaactattttggatttatacccatcctctcgaagcgtgcaggaatatgatgtcggtctagctatcattatccacgagggccttgcgaatctcccatcctgccacattgcagccgatgaccatggcgttggtgtgcggggtgttacggaggttaacatcgcttgcgtcaaatgtcagggggatgtgggaccacttcatttggataaccggcccgttgacggtgacatggttaacacttcggtagtattatcttctctcga

SEQ ID NO: 57423 - DNA, 313 bp, Zea Mays
ctgtccgaggtgacccgcaccataaatgcctcaaagtagtggcgcaacttgcgcgatgccatgacgactgcgtaggaaattttttctaattccgtcatgttgcatttggaagtcgtgaggacttcagagacgtagtataatggacactgtcgggtcgtgccctctctatcttgctcttggaccagcgctgcactgactgcatgtggtgaggctgcaacgtagagcagcagaggcagcgaggagtcgggactggtaagaattgcaattctgacaggtgctacttgagtgatgcgaaggctgccgcttgttctgg

SEQ ID NO: 57424 - DNA, 1331 bp, Zea Mays
atctccacgtctaaggttaggcacacctataaatgtgtggcagttgtttggattactaccacacctaaggttaggcacaccattaaatgtgtggctactatttggtttatcgcttaactcaatttgtgccacgcttttttaatagaactgacaattcataaacagtgtgagacgttctccttgtgggtgcaggtcatgccagaaagtggccagaggtgttgttgtgttacatgagcaatcacatgagcactatactatcacaaccataagcactatgctatcacatgtactctgttagaaaggcagcgaaaagagtaccagtcatagaagcaccgagcttatgaaacaacacacaaaatttaggctaacagcacacaaaatttaaaaactgtctccaaagggtctcatttttcactagaagcattatagaaaaatctgacactactagaacatttgcaatgcagaattggagcaaaaattattacagtccaatgccttccttgctttgcagagattccataattgtaaaaggtactggtgctatgcactatgctcattggtaccctcaaagttaaaaatcaacaaaaagagcaatgtaatagcagacacaaccaccaaccatatccatcagttgccacccatcaacctagaagaaatgcaaaaaatcaactatcacaccattcatctcctacatggatcatcctgctacaattgcaaaattatctcaaattattataagcataaacaatagagctataatgatagaaagtacaacaaaaaattacctagtcgattcacaggtccaaatcactcagatgctttagtacccacgactcaaatgttatgtctgatgcagcagataagaaaccacgcatacccttttgatctttgtgtgctagatacgttcctaccattaacttttgatcagtagtaattgtcatattctcaagcctttgccacaatattgcatcagggttaacaaaaggcataggcactggaggtgatggcttcttgagatcatttcgaagttctaccaaagtagcactgagttcatctactatctttgttgtgcgactctttggtttcacattcctcttcgctggtactccctctcattgtgggcgcttcagtccagagcttgatgagctatgatcaacactttgagatggatgatgattgggagatggtaaagtgtcagaatcatcacctagatcatgcacatgctgaggatagttggagaagtcactgcacacatcaatgaagtcaccgtcatctccaggatgagtttcattcatgcaagttgtagcttccatggctagagagccatcagc

SEQ ID NO: 57425 - DNA, 502 bp, Zea Mays
cagttgaaacccaaaaaataatgtgtgcatgaggcaatccacgtttctgaaattctaccgtgtgcagaactgcatgttttgacaataaggttattaagaagtgtagaaatatttggtcaagaagaatctaatactacaaacaaaatgtattacaagggactaattgttggatgtattttttcagcagtgatgaaagagcatataaatttagtcgtttgtcttatagtgttagttgatacctagaagattacgtgtgcgtaaggcaagacatgtttatgaaaatacacattgtgcagaaacacgtgtactgacaataaaactcataagaagagtaaaaataaaactaataggaggagtaaaattgtttggtaaaggataactaatcactgtaaatgtgcgttatgaagccatctgtttgttattattaaagatactatgtatatggaaaccatgaatgctttttatagcttacatgcatgttttctccttttatggtcttgtt

SEQ ID NO: 57426 - DNA, 776 bp, Zea Mays
aacacatcaaacctatagagctatgtaaggagtacaactttgctatagggattaaatcatggtcacatgaaaaatttggagaaaaatgtgctcaaagtcgagttgtcagactattaagtctgaattcagactaaccgtaagattaggtaatctttgagcttagatttgatcatgatccaatcattatttggctatgattactatagcaagattatagctggagtatcgggtaacaactttgttacaggtggattagtgggttgccacataaaaattggtgatctaggctctgcatatagctctgtcaggcacctgatcaaaaccccaatagtacagtggactgcacaagatcactgatgcagtgtatcttgccaccggcgaccccgcgcgtaggttcatgccggtgaggtgattcgtgctcaccggcgcttggataacgctccaaggtggaaagattttctccccccggatgagcttaaggcactgttgtccggccgccgtgtccgctcaatcccgatcaccttgaatcaaccctcgccggacttagacatctcatggtctgatgccacgtgcctcagcactttaaccacaccgcagtgactcgtgctgacctatccagcgatcgccggtgaggttgccacggtaacatccactaatcccctgcgccagtgacctcctctttctccgaccgccgcgcgtctcaatccaaattcaccggccaccgctcttgcctactataaattgagcccgccgtgagctccgtagggtaatcaccc

SEQ ID NO: 57427 - DNA, 349 bp, Zea Mays
ctgggactctcctaaatagctataaattttttgttagatatcaaaccactaatttattgagaaccaaatgtaatgatacttgtgaaatgtatcagcggtggcatctcagactcataaccaccaccaacaacatctctaccaccaccactaccactagggcctttagtataccattagggttgaaaacgaatgggtaaactcccatctcgacttgtactgtccatttgatctgatcgttttcgtatttgcgaagaatatggaaatgggaaggaaatgagagaggatttatctcgttcatttttgtcggatcccgttttatctgaattgaacactatcggtgtcacacccg

SEQ ID NO: 57428 - DNA, 631 bp, Zea Mays
tgaaacttgtttgcgggatatagaagtcatccctatatgagtaatcgtaagcgcgtcagatcgccttgagttgctactggcttaagtcggttgcttttgttaatagggcttagtggtcaccctgagttatttaagcgcgagcatgttgcaccggcttaaggcgatgccgacttaagccgattgctccgtttagcagggtatagtggtcaccctgagttaagtaagcgtgagcatgttgcaccggtttaagtcatggccgacttaagccgattgctccgttagcagggcatagtggtcaccctgagttaagtaagcgtgagcatgttgcaccggtttaagtcatggccgacttaagccgattgctccgttagcagggcatagtggtcaccccgagttaagtaagcgtgagcatgttgcaccggtttaagtcgtggccgacttaagccgattgctccgttagcagggcatagtggtcaccccgagttaagtaagcgtgagcatgttgcaccggtttaagtcgttgccaacttaagccgattgctccgttagcagggcatagtggtcaccccgagttaagtaagcgtgccatgttgcaccggtttaagtcattgccaacttaatccgattgctc

SEQ ID NO: 57429 - DNA, 1060 bp, Zea Mays
cgagctatatttttatttatttttaaactaaattttatttaagatattaataaactataaaaaacacttggaacttaatccattatcatctctagcactactagagtactaggccaataaactaagctacacagacgtacgtaaagcgcgcgatccacgtccatttgaaacctactcctagtctatcgcatgcacatggagacacaagctaggatcgatcacgagctttgcgcctttgcccaccagctatgtaacacgatacacatgcacggtcacacttctcctcctcttctacaagcttgccactagaaaacgattgtgccctgccctgctgatttgggtggttctaagattagtggcaacggtgcccgctatcagtctcctcccctaatactgtaggtacgataggggatacagtgtcactctatcgctcgcatcgtcgcccccttcgtccacccctacggtgttgtgagcttctctctccctagatgaagagctaccctttgagtcccccaacggtggcttctcgcgtacgcaaccactcgcgcgcgcgggtggaaacatcatcttccgctcccgttggcttgggcggaagtgaggagtcacgtagaattcctgccatctcccgagcttgacaccgtcggaaggtcgattcatagtcgttagtcgtcctcggtgatgaagtcacggcgaacaggccaccagttttgaagtgggttagtcgttcaactcgcagcaaggagaaggttaggcgtcatcgtcgtcgtcgatcttccccgagtttgtcaccgtttgttctgacctttgtcacatttgtcgccccctccgatccatgatttcttcaatcgatgcagtaaatcacccacgcctaaatcctttcacggttcgaatccaagttcttgttccatttatgtgtgcaccagttgtcaagaaccaaatccgagcacttatacactgttttagtacatagatctggttccccactttagcgaggtactacatctggttctcatcacttgtgctcttatgtttgtaagtagtagagcagattaggttttag

SEQ ID NO: 57430 - DNA, 487 bp, Zea Mays
atagatcatcttttaaaccagaaatagtgtttttatgatattatgtgtgttgtattcccacgagagagtattagagtacaactagtgaatgaaaacgttattgggctagctaatgaccttttgtgataccaagtttgccataatcccctctatccaagacatacctagatggtgcttatgtccactcaagtaaaacacaacacatcattatgccacattgtttctcaacctataataaagaccacggaaaatttagccaaattgcatgagagaactgtccaaacacaggataaggttgtaaggcacctttttccaccatacagttgctaaaaagttggaatataaagaattcaaaacaacagatcaccttttagaccacaaatggcgtttctttgatgtcgagggcattctattcacacgagagggtattagagtacaacaagtggatgaaatgttattgggctacctaatgaccttttgtgatacc

SEQ ID NO: 57431 - DNA, 671 bp, Zea Mays
tttcaagaaagctcaagggggatacacccatgtattggtagcaatcgacaaattcactaaatggatagaattcaagcccattgcttctttaacctctgctaaggccgtggaatttgtacaagacataatattcagattcgggataccaaacagcatcataactgacttaggatccaacttcacaagttcagagttctttgacttctgcgagcaaaagagcattcagatcaaatatgtgtctgtagcacatccaagggctaacgggcaggttgagcgagccaacaggatgatactggaggcactcaggaaaaaggtcttcgacaagaatgaaaagttcacaggaaagtggataagggaattgccctatgtcgtttggagcctaagaacccaacccagctgagctttgtatggaaacacccctttcttcatggtctatgggtcagaggcagtgctacccgccgatctcaagttcggggcgccaaggttgatcttcgaaaacatagcagaagctgaggccaccaggctggaggacattgatgtacttgaagaagaacggctaaatgcggtaatccaatcggcacggtaccagcagactctaaggcgctatcacgacaaggctgtgcgacaacgatccttctcaataggagatctcgtcctccgccgaattctaa

SEQ ID NO: 57432 - DNA, 440 bp, Zea Mays
caaatgcaacaaattatagggggtatgccaaatgattataagaggctagtacgcgtatttgataaatctactgtcgcgaattttccctcgcacaaggttgaatctggggaaaacacacgtgattcattggctatagattggcatgtccaatcacaacccctttatgggatgtcaatagatacataccccaggcaaccctagcctcctacgcaaatcggaggaaacctgtcaatctatgcacaaccggaccatccgcgcgtgagcgcggtccgtccgggccagcggctgtcggtcccgtttttagaaccgaaataccgaaatccgcgtctaagccgccacgtcctgcgcaaaccctaaacgaacaattcggaccttctgcacatagtgtcaaacaatccgcgcacgcagccggacggtccgcatatttgaccgtacggtcc

SEQ ID NO: 57433 - DNA, 290 bp, Zea Mays
aaagtaaagttcctttactcttttttctttcatcatgccaatttaagtaatttagtaaagtggatctaactttaattcgtctttcagagtttgttgctgagcaaggccctgaaaatgcagcaggatgacaaagacaggaaaaatgagtttgttatcgaaggcttgggaaagaggattaatgaacttgaaacttcattgaaggaaaaagacagtctgctgcattcgggcggaggttctctcgtcgaagttcaatctcaaaatgaaaaactaagcaaagagctggaagaagc

SEQ ID NO: 57434 - DNA, 358 bp, Zea Mays
aagaaactacctttttcttttcttatgtttttccctcagctcgcgtcgattgttggctagctagctagaatacggttccctgcttcgaatccccatcataatacaggcctctgaatatgactttgatcggttgactgataggggtcactccaagagcagatgaacctgtctttcctgccccccattatccatagtgtttcccttgcaaatttttgagggtgcgtgcgtcatgagaggccattgcagttgaacaaatccatttgaagttcacacatcgaaccccagagatgagcagctaacttactccaacaggaatcaaagcaacaagagcccaatcattattctcatttctatattt

SEQ ID NO: 57435 - DNA, 719 bp, Zea Mays
tagtgtcatgtgtgagctaccactcagacccataatgtcggtcggggcattacatgactaagaaggcaagcactattaagcctagctcccactaccatttatctagtcatcccattcacatccgtcaatcatcaccactcatccaccctcattttggtagcctgccccctagccctagatctagttcactctccttgccttcttgtagtctctgtatcgcctaagctcctctacttggcaacatcgcgccttgacgtctctccgctgttagctcccttgcctcgctaactttcgcattcctcatcctctctctctctaatcttcatcgctctaacaacatgtagaccataagattttctaagggccccgctgtattctccttcattggcgtgctgatcaagactctagattcttccttcgtctcagttggtcaactgtttcacgcccagagtatgaagccgaagctcttagcttcgctttcgcttgtgtcgtcgggctgaaggtacaaaacaaaggtggtcttcattaccccttcgaaacacctaaaataaacttagagataattgacaacttaaaatgatttgaggaccttcgacaagagaaggcccccaacacccacacactcatctaatatgaacaatatcatcgtgttgcgacaccaacgtaccaagagtactagagaaaattaaagagaaagagaggggaataagcatagaatc

SEQ ID NO: 57436 - DNA, 794 bp, Zea Mays
gaactcctaaagcaaagcagacctacaaacttaaagttttctgatgtggactgaacaaaagcaaatcggagtaaagtaaaaggccagggcagaacatacagtttccaggcagtttaatgccaacggtcatgttagtctaaagtatagcatctataaaactatgcctcaagcaagcatattgctagcaaaaatagcatttaaaattccaattaatgattatgcatcgatctccgcaagcttgatggggagctagggttgcatgataatgttgggggaaatttaatagtaacaggtggaatagttcatggcattgcacagctagatttggagctgcaactttatttgcaatacaaatccaatgcctgtgtcttaaggcataccgctacgttctgtatagatgtggtgcctgattctatgaaactgcatgtacatatctttttggatctaccaaaacattagaaacgttaccgttctttattcttcttttgacagattattgtaggaaattgtagccctcaaaatgaaggggccttaaatctcagtacccaccagtgacttctatatgtatatagatacagaacctgcacggtgtagtgtcagatatattcgatcatgacgaattagtgacataggaggggcacaatagttagagaataaatatctcattaggctaataaagatctgattagccagccaatgacagcatatagatgcagaacaaattctcattgtctcttgaatattcaattcacacgatccactgccactagtaatataatcctagatcattaggt

SEQ ID NO: 57437 - DNA, 432 bp, Zea Mays
ggggatagcccctgctgcttgcgtgcgtgcgtgatccatgtcgtcgtcttcgatagatttggcgagaccggtaccaccgaaccgtgcatgccatttgctcgctgggggagtttttttttccttaggcaggggccggacctatttaggcgacgcacctttgtgacactgcatcaagctagattcaagagcctgcgtttctggttgagcacaaagaacgacagaacaggcagccaataataacacacgcatccatcattcctggcttattaggtgtagcacattgattagtgcaaacgcggtggcgtactggcacacacgcttgttgggcaggtccacgagcgatcgaccgagctgggtgtcgttactggatcggaacagccgggaatcacgatcgtcgtccaggtggaggagaacaacgtacgcacgtactac

SEQ ID NO: 57438 - DNA, 672 bp, Zea Mays
ctgcacgtgagcgtggaccgtccgggccagcaatggtcgggcccattttcaatgagttaccaagatatgcgtccgagccgctacatgttacacaagccctaaaccacctagacagaccatccgcatatgatcactgacggtccgcacagccgaccggacggtctgtcatagggatgttggaggaagattgttacctagatcctcgtccatcccagcaacacttcccatcacactagacaatgcaccagcccattaatacagaatcccaagcccatgggagcgagtactttccggccccgcttagaaggccgaaaaggaacagtcaatcctatgaaccatatagggcaaatagtaatgcaccacataactcaaaccaatggtgggaagacaacatgctaatatccagtcaacatcacctatgtttgaccagagagccggtggtctcgcactggctgccattagtataatgagggaagaaattgtcggggcgttccaagataagctcggaggaagcatggtccctggggggcagtcatatcggaggcttatgacagccgatttgaccaccacccatacccacaggaaaccaggatacctgaatttgcaaaattttcgggtgaccaagggaaaaacacacttgaacaaataggtcagtttatagcacaattaaga

SEQ ID NO: 57439 - DNA, 429 bp, Zea Mays
gacggtcctcgccgtggagatcgccgttcaccgtgattgtgccatgccgtaatcaattcaccacgtcgtcgcaaactgcaaggactcagccgtgacctttgtagacagttagccagtgagtgcctcgttagcgacctccggtgactattcccacttctcactgtgcgtgcttccccatccaaattcaacctcctcgtggtcgtattctataaattgatgccctagtctgctccgctagcttgttgtgaagccagagcaccagccctcgcctccgatcgtccaccgtagcgccctaattttgtttccccccaaatccactctccgcgccaccgtgagtcacctcgtcgtggtcagccatctacaggtccgctctcgccctcctggtttgtgtttcagcactctagcatgcttgtgatactcgtcgacccc

SEQ ID NO: 57440 - DNA, 637 bp, Zea Mays
gctagaggcatgactttggtgatggatgtgctcttcggaactctgttcgtcggggagcccgtggaaaaggtgtcaagtccttcgataaaagatggagatgaaagcatagtggttgtagcgtagccaagagcagccgaagccgaagatgttgctaccagggagaaggttaccccgtggaaggtgtcgaacagtgaagttgatgaagccagggagccacgaggagaaaaaataaagttaattgaagaacaagtacccctgcttgaaggtgcaaagaaaatgaagcaaattgagtatgtgcttcatcatgcagctgaccaagtgctaacactgaacaagttgccaaggtgcagacttaagccgaagggctagggcatctggcaggagcgactatgtttggtggcagtgatgaagactttttgtacaacctgccggatagtaaagagattgatgtggcccaaattataatgaataacaccggacatccaaaacttgaagacaaattatctatgacacatagtgggatcttgtgggttgtctcacatatacatttataaaggttgacacttgccttattttggtttatgaataattctcatttaacacttgccctattttggtttatgaataattctcattc

SEQ ID NO: 57441 - DNA, 558 bp, Zea Mays
cctctaatgcgtcccgagccaggttttgtggagtttataagttttcctgattccactctatgttccctcttttttctcatcggtttcacaccatacgactccctccttccttgatctagccctcttctctagtgctgcgggacgaccccactcccctaccgaaaagtggggcggagaaggaggcggctcgcacaagtgtggagggataaaaaagatagggtggacaagaaggtgtggagggccgagtgtcagatgcgtagggaccacggtgctgagaccgacttgaccaatgaagatgagaacgacgacaatgatgcgagtgcgggctctaaccttggggccattccgaattcctcccttgccgtgtcaacagctgactccgtctcggtctttactagcagggcggcaagtgccttctcgatcatggaggagaccgacttcccagaactcctcgccctattctctgggccgatgactttggtggtactcattccctcacccactaagcccccgtccggctgaccacaaaggtctacttgtgtgggaagctcctcttcc

SEQ ID NO: 57442 - DNA, 497 bp, Zea Mays
ctcgttctataaaactccatcgaaaccccaaccaaaacaggaatttcgatctacgctttgatttctatgttgctcgggttgatacttcaccagtagttatctttatccttgcgcaaactttctacaaagtctgaggcgattctagctcgttgtgagtgcctagcactgtcgcgcacctctgttctgtgattttgtctctaattttttgcaaatagttgggttgtttcttttctaggcttttggtgtattcaaattacattagtttgaactgcatagtgatctagtgatttatgagtccctaggggttctaggttaaattgggaatcaagtgacggtgttgttctcaaaagcgaatttttagtggctcccattcaccccctctagttgtctcaccggtccttcagaggtcatgagtattgtagcccaacaaggccaagtctagggtgtaggagcttgccactgtcctcttggcgatgctctcgttccaagcttggagg

SEQ ID NO: 57443 - DNA, 601 bp, Zea Mays
caaaatcaaagctagtatgtagagcaacaactttgatacgacggattggtagcttcccacattaaaattgaagaatagggctcctcgagttgctctgtcagaatgactgatgaagatcacgatggtacaatagatgaaaagatcttcagtgctgtgaactcgtcgccggtgatctccgcgccgcgatccacgccggagctataatttgtgcttagtagtgcgtggataactgctagcggtgaaacatcttggtgttgggatgagctcgggccatgttgtcgctcagttcgccgtacccacttgcatgacgacgtggccggacgatcatcaccgtggtggccaccgttctttgcgattgcgccatgccatgaacatttcaccatgttgctataaccgtggccggcctggagttactgctcttgagtcgttgtaccggcgggcgccacgacgaactcatccagtgtaatatcccaccgccgccgtgatcgtcttcatctcaaattggagaagcacatagccagttcctttaaattgagcactaccctcactccgcctctctattatgcgctcataccacccgcagttagcctctatcgtgcac

SEQ ID NO: 57444 - DNA, 907 bp, Zea Mays
gattttttggtagtaaatttatggggtagggcgtgagatcgaaatctaaaggtaaatacacaagagacaagaagatttagagatgtccgagctctcaatgcgagataataccctacgtccttgtcggggttaaaaaccccaggcctcaaggcccacgagtcaagatgagtaaaatcgctccaaaggggcctaatgaggcccaattaacacatggtcgtggacgagccgttgttgactctgcgaagtggtgggcattcaagccctagcgtggagcaggggccggcacctggggttggacgagacagaagaggatcgggcgaatcgtacccgacctaaaggggtcagtgaatcaaacacggtcgggcgaacgacacaccattcgagggtcaaacataggaggctgaccgccccatactcagcctccatcgttacaacagtcttcgcaacatggagaagaatgagggtcgtccctgttttgcctaaccttcatacatgttatgtctaaatcaactatgagctcccactccaatcgtataggggtgggaaattatgtacgaatggacttcaggggcctggcaaaccagcggatatgggggtacgaatgaacccatcggtactctggcccatcctggaggtgagaatcatcgccacaggtggcactatactaccaactctagtataggtcctcatatagggctaatgacggttgctggtatggaccattgtaccccccacgaactgcacgcaacccattcgatcaagagaagtcaggaaggttgtggctacaggggaacaaacgatgaggaagaagaacatcgatcgagtgaaatacgactgttcttcacgtagacatcatcttcttcacaattgtagccaacccctcccttggcatataaaagggaggggc

SEQ ID NO: 57445 - DNA, 476 bp, Zea Mays
cggtcaataccggccaacactggaacctgcctaagggtggaaccagtgctagtagcccttattgtccaccatgttagctatcgaacatactatcgaatatcgatcattgttagttcttatctaccacaatgtttcaatgtacaacctttatcgatagtagcgccacatcaacttttagtcgttattaggatatctttgggtgcctatgctaatacgtactgtccaaaaagcatcaataacatcactagtcttgtgtaagtagtacttagtattttgtggtactaatgtgtagtgttaatactgaaggcaattatataatattcagtacttaataattagttttatagttaattttaatgggcaattactagaggatgcaacttcatttttactcttattttttaagtttgcgtgtatgccccttcttgtttgtaacgaacatccaattactcctattgcttaccaccacttaaaac

SEQ ID NO: 57446 - DNA, 312 bp, Zea Mays
gggcggcccaaggcgaggtgcttggccggatgtaacctttctctgacaactcatcgatctgcttcttaagttcaactaaccctggtcctgatactctgtaagctctcttaaagatgggggcggtgccaggaagaagctctatggcaaattcaactttccgctctggtggcatacctggcaagtcctttggaaacacatctggaaactcagacacaaccttgatactctcaattgggtctgcttcactgctatcgacagccatctgataacaacttcctttctttggttcaggcgagactaactctatcacca

SEQ ID NO: 57447 - DNA, 607 bp, Zea Mays
cgactggtcgggggggaaacggagcttgtgaggaggatgtgcgacggaagctcggagcgcatgattaatgggaccgtcggcgatttctcaccgtcgctggcacttctacttgagtccgccccgcgtcgtcgccgtggctctcggctataaggcacatggtaagggttcaccagatcaatccgtcgtggcacctgcattgtgttgcatctagtcgatttgggattcttgtaccgaaaggttgtcttggccactccggcgggctcgccgtcgggtgtgcgcgcgccgccgtgctggttcagctgatgggtgatgatagctgctggtcgtagattagcctgtgtgcggttcagattagaatcaaggcaacagtttgcgtaagtgtgatctgagccgttgatgtcaaatcggacgtgtgaggctaggactcggttacgaggagtgcgggcggttgatccccgatccaacggtgggatctcttaccgtttcgttttatgttagatcagatctggaccgtagcctttaaatccaacggttctagttaactcataccccttcggctctggcagtctttcaaaagagtcctcaacctttcaaggatttaacccgc

SEQ ID NO: 57448 - DNA, 645 bp, Zea Mays
gaggcgacaacgccatggcagggacttgggtttcagggggatcccttccttgtagctgagcttccaaggctacaatccttgcgtgggcaccctccagctccaagtgaaccctagagagatccagggtggcactgtccaggtcggtgttaagacctgcctaggaatgggccatacaaactcgtgggcacaaagggccttcaaacccatgggctaaacaatttggatttttttgggttttccactaattagggcagagttggattgggccattctaataaaaggattagcatggatctgtgaccaaacatggcccaaacgtacgtttggatcgaacaaaatggtgcagcccatggagcagggaggtggatcctctgcaacccgtgcttcttcgtttactgctagcttctcacctgtaggcggcgccgcagcatcccatgcgttctttgttagatctctactgctagcttctcggcggcgtagtaagcagacggcggcccagatctgccgcggaggagctcgacggtaatgtttttctttattctcgtctaccatagcgctaagttagccagttactggcacctatccccggtgtgcaagaaagacgagaggagaccgtggccatgccccggtactctctcctctccc

SEQ ID NO: 57449 - DNA, 448 bp, Zea Mays
ctgcttcaagagtaaaataatcaggccttgcatttttaatttaagtgccatatgaggtggtgtctgattcgacagaaacaagtgttgtatagtcaggaccaaaatcacagaaaacactgccaaaacggttaaattcaggaccaaaatcactgaaaactcagatgttttttctaggctggcagaggacagcgatagcagggggaggtgcgtcagatgcaatacgtgcggaggatggggtctcggcggtgccttggacttggaggagctggatttgatggccggcgagcagacatctgcctggcttcagcgctggactagcctatggtttcaaacacacgccatttacttctacccaatctatcaaaatgtaaattttttacctcttgagatctccctggttcatacaccgacatctccctctcccaatcaacttgcatcgtggcttcgg

SEQ ID NO: 57450 - DNA, 420 bp, Zea Mays
ctaaaagaaagctccgtgcaaaagtagcctaagggtgcagccggataagcacaacaactacgcgatacgaagtcttttactaaaagacagctccatgcaaaagtcgcctaagggtgtagccggataagcacaacaagtgcgcgatacgaagtcttttaaaaaatacaactccgtgcaaaagctgcctaagggtgcagccggacaagcacagtaatgtgtgacacgaagtctttcccactagacaaccccgtgcaaaagtcgcccaagggtgccaccggacaattacaacatcacactggcaagcgaagggcaacagaccacattacaatacaagtcacagattacatacacacagcgaagggtcaccagacaagcacagtaatgtgcgacacgaagtctttcccacaagacaaccccgtg

SEQ ID NO: 57451 - DNA, 324 bp, Zea Mays
ttccactccctggctacgaagggcccaaatataaacacttaatctaacaatagcattaggggtcagctgatgaaggtaaaccccaaacttcttcaacacatcagcaatcattccattcaaagaaaatcttaatcctgctttaaagaagcttttgaacacaaccacttcattcttttccggcttcggagtaatctcctccccgccaaaatgaaccagctccttttttgtttcactaaagtagcccagcttcaccatttttggaagatcagcttcagagatggtggactttccaaagtccaaatgactaggtttgcttggcatccc

SEQ ID NO: 57452 - DNA, 619 bp, Zea Mays
gtgatgtgtttgtcgaatctgtgaccattattgcacttgatgccctaaatggaaacgtcgaactgtgtggcagcagaggcaagggtggaaaatgtgtgagatttcagtcacaggtggaatgtccaaagttaatgcaaaaaatcaaggatggccagatagtacttaatagctagagacgttgacacttggtgacgtccatagctcacaatatataagctgaaaaatgcgagttgtatgtgacaaggatgcataaaagggaacacatgtatggcgacccaactgacaagtgtgacacaaaatgtgatcaacacgcttattacaaggaatagcagacaattgtgttagtttggacacaatgtcgtggctaggatgaccaagacaccggtgctaaagggaagtgttggtggatgcaaggagagcggacgccgaaaggtgcaacatgtagaggtgacttgagctgtcacatcggacgatctctcattgagaccaaggttcaaggaagcgctgagcgcgcgctagggtggtgaaaaagcttaagcgcgattaagcgtgcttaagcgtttttgttaaaaagagaaaaaaagacatgatattgggccaccctgcagcagcccttaac

SEQ ID NO: 57453 - DNA, 812 bp, Zea Mays
catgaaacactttcagatcttcttgactagggagagcttcttcagcctcttagcatagtccatcttcagggcccggtatgcctcacgagtgttgtcctcctcaccttctgccatcttgagactgtcttgaagagccgccttttcttccttcaattccttgatttgaagctataggctttccacccgagagtttaggtgggtgtagtgggagaaaaggttgtcaaatggttgtcaagggtgtggagatatccggtgatgtagattatggtagggtcatcttcattatgatctctccctgacaaagcctagagtctttacctccaagtacgggtatttttgttgctgggtggaaagtagcggaggggtgtctcagagacttccctaatgtagttttggcatagctggtggagggtttttaggcagcatcctggcaggtatctaggaaatggtggcaagtggcggagatctgaaagggagagtgattggggtagcttcaactttctcccaggtagaccgccatagagcatttctcaaacccgttctcgcggtattccttctaaacatattatggcttcttgcggatccccatgcgaagcacacaactccgaaaaaggtgagggaatccttccaccttcgagcaataggatgtcttaaggacaaaggtgccttccatctggtagcaagagaagaagggtggttaatactggggacaagagagaaggttctttaagaggttaagaggtctttcttttgaggaaagctttttaggtcagggctgcgatctacggccagtcctatggctctgataccac

SEQ ID NO: 57454 - DNA, 469 bp, Zea Mays
gtaccagcttataaaccttccgagttcagaagaagcaatcatgttcatgtgctcttgctagtgtcaactcgtgttgttttttttgcgcgagcggacgtggagttggcacgtgggcggcgtgcagagtttacacgctgggaatggacaatgggaatgaacgcggagtttgcattatgggaatgggagttgggaatgggagtcgggatgtggggctgaacagagcctacatcacgaaatggtttccgggaataagaattgaaatagtagaaacaggaatgacagtctatcccttaccatcttagtagcagtaaagatttgagatcgttgtttctacggaataacttttactacctacctactatacgatatacttggacagtcaacaaaagttattgtgtatatactaaaaaaacaaaaatagcctaccccgagcgatacgcgacaattggggcttcccctttcagcttgt

SEQ ID NO: 57455 - DNA, 503 bp, Zea Mays
atcaataaaatagctaagtggtagaatcttcaagccgacgtacttcgttcacaagtgacataatgggttagtagacataaattagtttttttcttttacaggttacatagtacagatgctcacaacatatacacttccaagaacagacgcaagcaaattcaaatcgtatgagtgactttaaaaattggatcaacaattttttgagattgacgatgctatcacgcaggcgtctctcgttgtagaccagtacgttgtctactactgaaatcataatatcattaaattctaaaatattcactcgtacatagagccaaactcacaaaatcgtaccaataccactataaatatggcgacattgcttcatttctgaatagaagcgacataacctcggtagcacctatcctttccatgaatatatggtagcacattagataagattattatgagcaagctacgggtactggacggaaaaaaagacacgggaattggagacatcgagaaag

SEQ ID NO: 57456 - DNA, 530 bp, Zea Mays
caggtatgcagtgaggtacacgactgtggggtcgtcctcaagcagctgcttcccttccaatgcatgcatcctggccatccaaactagacggtctctctgaaagggcggaaagaatctgagcggggtgtcgaccacttcttcttcatagatctgacattgggtcctcaatgccttgcgggcgacgacttggcaggtgtctctgaatctgtgcccagcagcagtgacactccattccacatggtgcggactggatccaatgtatacagtcacgacacacttctctgtgccatgctcgacgaattcacgaccatcatactctggctgactcctgattcatgctctcagcaacttggggaaaccatcttcattctggcaaaagctggtttgacaacgaacctccatctaacttctgagagaaggaaagggggaaagcatttttgaaatgaagggatgagagcaagatttttttaagaaaatagtttggactcaaaaacttttggatcaggctaagggttacgtcctgcggccaa

SEQ ID NO: 57457 - DNA, 343 bp, Zea Mays
cttccaaaacgtggacatgccatgtcatcacccgactgttatctctaaaacgcgggcgtgccacatcatcactcggccgttatttccaaaacagccgacgcggcccattctaactcagcggttatttctaaaaacgctgacgttaccagacttcacccggccattgtttccaaagcggctgacgtggtccgctaccactcggctgttagctctaaaacgccgacgtcaccatcagtcactcggttgttacctctaaaacgccgacgtcgccatcagtcactcggcggttacctctgaaacgccgacgtcaccatcagtcactcggttgttacctctaaaacac

SEQ ID NO: 57458 - DNA, 863 bp, Zea Mays
cgtggttttatccgaagccatctgccaggggaaaagagttactactatgcacatgccaatttctttttcaactagttattttattcattacatcagttcattacatagtacagcacacagctaccataagcttattacacaagagtgctatcgagggtactaccgaactccttctctaaagtgtccccaaattccttgagaaggtcatcaaggctggctagggacatttcctcggtgtcggacgagtttcttatcctggtaggaggtaggtctggaggggcttcttccttctgctcagtctgacaaccttggcttttggtcttcttgcgattttttcttgcggggacgagattcttcagtttcttgtcgaaatccattttcagagtgcgttaggcctcacggatattggtttcctcgccttctgctatcttgaggctctcttgaagggacgccttttcccttgtaagttccctgactttttgctctaggctttccacccgggagtttaggtgggtgcagtgggaggcaaggtcatcatattggttatcaagggtgtgaaggtatccagccatgtagacgatggtggggtcatcctcaatagggtctcctcctgacagggcctgaagtcttttcctccaggtaggtgtatttttgttgctgggtgggaagtagcgaaggggggtttcaaagatcaccttgttgtagctctggcatagttgtcggaaggctttccgggcaacatcttggcaggtatctgggaagcggtatccggtaaaagtgacttggaaagaaggatggtttggatagtttcggctttctcccaggtagactgccatagagcatttttccattccgttctcgag

SEQ ID NO: 57459 - DNA, 517 bp, Zea Mays
ctaaggtccagggcgctcccacacttacggtgccaatccgtaaggatatactaaggtatgggccccttagtgtcttgagacaccccaactagaataatacaagtcttcaggggtccctcttgtccttgaatgctcatgaacaatctaagcctctaaagccccttgtgcttccgagtgctcatgaatccaagttctgagagtcctttatgccccaaggcgctaattaaggatttaggtgcctaggaacctccaccatgcatttaggacactctgtattacttagtctctaaggaccctctattgaccccaaattctttaggtccctaacctcacgtaagataggtaaccacgaccacgagtccctaaggacccaaaaactcctatgggaataagggacttcaaatgactaactgtaatcctattgtaaaacagagcgatgtgtctaggctaagaaaggcattataacttcgagaaagggatgccacatctaaaggcctactatcaggtctattgtcat

SEQ ID NO: 57460 - DNA, 377 bp, Zea Mays
cgaaatgaagcggctaagggctgccagtgaccccgtaagcttctggatgtccttaattcgggcgggaggcctcatcacctcaatagccttgattttctacgggttagcttcaatgccccggtatgaaaccaggaaccctagcaacttccctgcggagacaccgaagatgcatttctccgggtttagcttggtgcgggttgcccgcagcttgccgaaaactagggtcaagtcttccactatagtcgacccctccctagtcttgaccatgatgtcatcgacgtagatctccaccttgtcctgaatcaggtccccaaaggtcttactcatcgcccgaacaaatgttggcaaggcgttttcagaccgtagggcattacaac

SEQ ID NO: 57461 - DNA, 1262 bp, Zea Mays
ccgaaggtccttaaaacacttatattgtataaatcaaatgtgctacatgtgtataacgaaagctagacgaagtcgcccttgggctatttcaggtatgtaatacaggctggacgaagctggccgtcagccaaagcaacatgaagaagagcttcgcctatgtgcacaagcaacgaagatgcgagtcgaagtagccaacctcggtggggaagaggtcttgaatgaagaatgacgaagaaggcacaaagaaagggacaaagacgacaatatatctatggcattatttgtaaacaatgagtgtaaagccctgacgggtgcaattgtaattttgtacaatggtggttatggttccattagctagatacataatagtagttagtcatggatctcgtgacgaccccgacgcggcgtcgcatggaggctggtttggtctctttttcccttagcttcatccatgttctagtctcaattgaggttggaattagggttagggttacaacccaaccaatcccacttttttgaattatattgttcttcttctcatcccttctctggactagagtcaataggggatctcagtatggcttcgataccgttgataggttctaggatccgaaagatatcactgagtcccaattcgattgtctattaattagcagtagatgaattttcttagatttatcatgtttgaaaggggaaagaggaagactaaggttcatacctttggagtcgaggtgtagggttgttgtggtcatcgttaaggagcctggtgtgggagggatggcatccacgagtcctccatctcctccttgccctcccggtgttttaggggttcatggtggcgtgtaagtggccgatgcgaagggtgcactagactcagtcggttcaggacactagaacaatagaaggtgatcgagaccttggaaaatggggggggctaaggtttacggaggcagaaagcgttcttttccatgctggtgtcatgcctctgttcatataccgtctgattggttacctgcaccgtcttatcctaaaccacctcgtgcgttgattttgcgcaaatgtttgtttggttggctaagagcgggagatgcgtgctatattagcggatgtaaatcaagccattgttagaccattgcctgcatcggcacgtaccaccaaaatgccggtacccagccagccaaggtcacgcgatgatggttgggcgcattcaggtggatagttcctatgaccgaagaccacacccagggatacacgttgcgcct

SEQ ID NO: 57462 - DNA, 498 bp, Zea Mays
agagggacaccaaggtaggtgaaaggcattgatcatgtctgacagttgaatgttctagaaagaatctccatctttgctgggcaaacattgatggggtacatacttgatttatatagttcactttgagccccgtcgaggttacgtaagagttaagaactgctctgaggaaaaatagttgcctggggcaagcttccattatcaataatgtatcatcaacatattagacaatcgagaaatcttggccacagttcttagtcaggggcaactggagtaagtcttgttgtctcgctttattgatgatactttgaagcagatctgccgctaaaacaaataataaaggcgagagggggtctccttgactgaccccacgcttgtaatggaaagttttccctgggacgccattaagtaggaccgatgacgtaccagactgaaggatattcctaacccagcccagccatttgggcccaaatcctctatgagacaacacttggaggatca

SEQ ID NO: 57463 - DNA, 349 bp, Zea Mays
ctcggatgtgtcctaatgcaagagggccgagtcatagcctatgattcaagacagctacgccgacatgaggagcactatccaactcatgatttggaactagctgcaattgttcatgccctcaagatatggtgtcattatctactgggagatatttgccatttatatatagatcataaaagtctgaaatatatctttacccagtcagaactgaacatgaggcagagaagatggcttgagctgattaaagattatgatttagaaatccactatcacccgggaaaacccaatgttgtggcagatgcactgagtcgcaaggattcctgtcattgtcttacagttaggacccctg

SEQ ID NO: 57464 - DNA, 1122 bp, Zea Mays
atcgacttcaagctaaattctgagcatgatccagtggaaatctacctatgattgccatagcaaggttgtagttggtataatgctctacaagtttgctgcaaagattaacttgtgttaccacaggaatttgggagaaaatcaagctccaacttggtatgtcagacaagatttgtactgaatcaaggcgcactgttcaccgatcttcagaaaaatcgcgccggcgataagaacgccaccgcagcgtggatggtcgtcggcggccacggtaaaaggcttttgcaacgtggcgttaaaacggggaggtgccaggctctggttaatcggcggccaccgtgccatcaccgtggttctaccgtagctaggctcgccgtacctcccttgcgcgtcgactgatcggataagacctcaccgccggccgattactgtcgctcatcgtggtgactcatcggttgcatgcccggcgatcaccggagccactgccacggtgaaagccacttttccccgtactgagctcgcctcttttctccggccgccagcacccctcagccaaattcttcaccgtcgctcgatgcgcctataaattgagtgcgccactagctccggtagggtagtcaagaaccccgccaccaagaattaccctcactggatcccccaacgagcgcgaatcttacaattcccccaaatcggttcaaacatgccgcaagaacacttcaccgtggtcagcccgattcaggtccaatatcgccctcggtttccttgtttcaacatccttgcttgctcttgatgctcaccgacccgttaaatcgaactagaccacccccaatccgcgggaacgtgtgctcccacgctcggtttccgccgtgaacgtggaccggccgttctcggggtgttcgggtcaaattggtgtgtgttccgaggccgtcgtaggtcagtgaagcctcataaatagttagcttgagcagtcttcgccaaccatggccggtacggaccgcgtctgggacgatctgcgtgcgcaccgtggtcaggggcattcgcggggaagaaacagaaggggaagggcctttctgtgatttgtcagcgacacatcaaaacagtagaagaacctgtctccagatagataaa

SEQ ID NO: 57465 - DNA, 432 bp, Zea Mays
gtcggctagaccacccggatacttgaaacagaaccccaactctatcagatccgtgagcgtctgctttttatcttgttcttgcttgttctcgattgcttgcaggttcaaggctgttcttggcacggcaagagcagcaacaataggagccggtgtaactatcgctaaggcgcatcatccttgtggttgttgtagtcggatagcacaacgtcgacctccaccccaaatcgtagttatcaggagacggtgtacctgtcgctcaaggcgccacaccatcttggttgtggtagtcgggcagccaacgtcgttctccaacaagttttccaccaccatcatctctcatcgaaagatcgggcacccttctacccgttgggtttatcaccctgtgtacatgccaacgtggctgtcgaagagtgctagagccctgtgtatgcg

SEQ ID NO: 57466 - DNA, 363 bp, Zea Mays
tatgccataatgtatcatcctttaaaaacctctacgggaaaaatagatgatacgacatagaccttgtgttgatgttgtctcgttaaaaactttgaatgagaaacccaaacaggggaaaaactcatgcaaagaaaagagtacaacatgatgtataaacaagttctttcgatcaagagggaaactcccccctgatctttacaaaacactaagtcatcccatacatactcacaaacacatttaaaatgtggagtaagttccagacttagttggtaacttgtttgtcatctaaacaacacaaactaatattatcttcatagataataaggtcactgatataaaatcatgaccaccacataccctctg

SEQ ID NO: 57467 - DNA, 1440 bp, Zea Mays
accaaggacatgttaatgtctaattttagcttcaagctctgtggtgatgtgggatttcatagttatttgtctactcttctcacttctggtagatcggaggtagataatggtaagcatgccaaagggtggaatttagtgtagttcggctacataaacccccggtatgtgtccattcaggaccgacctttaccatttagcttacagtgtataccaaacttgtcaaaggactatcctgagttaattcagtgactataagtatctacaattccgagagatgtatgcgacacaagcatagaggtcctagatagaacgagtaaagtggttcaacgggaacacactatggttttcacaccaacatagtgaaaaatttctcagaataacctctcggtatactcacaacttcgtgttgctagcggttaaatgtccttgtatctcatagtttgcttcatgtcatccaacgacaaagagagcaatgtgctaacatctggttgagcaatgtatgactgagatttctgatcttaaattatttggtaaggtctttttgcttactaatataatcccaatttgtgatatcttctataccaaaaaggctttcatgcattatattatatatcttcgggttacttcgggtaaaactttatgcatgaggagagagcagaaaattaacttatctttgtttaattgtatttcaatttaatttcccagatttccaagcactatagagcttgatatagttgttaaggccacttggcgatacatataaatatatgatgatgccacacaacacaatcaaataaaatatagagctaaacaaaatatttacgaaggttgcgttatgatgtgactaaggggcttgaacaacccaccacaatccacgcgagtacaagctctagtgtatctggcgtcaacgcgtgtgcggccatcagggctacgacaacacaacaagccttcataataagcgcaataggcacaattatggctcggtaatcggggtacacgataagtccatgcaacgtgcgcaactggcgcaattgtggctcgatgatcacgacagacggacagtgcctacagggcatgcgaaaaatacgtgactcggtgatggcggttcgactcaaccggagcggtccgacaaaacgagagtgcgacatagtaatcacatgacgcagccaagttcgtacgacacaaatactgcatcatgttgccagggctcagccaatgccataactcaaccgattaataacgtagcctgatcggcatgtctgagtacccactatacaatttaatcgctcgacgtgagtccaaaagctcaacacatcataaatatttagagcgatttaaaaatacccaacatagccttcacatgcaatttaattattttctgttaattatttgctgccagaaataattattaatacagaaaaaataaataccaaaattaat

SEQ ID NO: 57468 - DNA, 315 bp, Zea Mays
tttttaagaaccgttaattgaacaacacttatctgtacgccatttgtcctcgctgtgtgtagtgctaccaacttctccttggtacttggcccccctgggatgtaggctcgacgtggcgaggctggataccagcataccaaagaaagaattggtgacctggcccccaggatgtagtctggactgggacctggacctgtacacaactttggctaggaagttttagtagcgcacccataggacccaccaactggtatcttttatcctttgattcatgcaacaagacctgcaggatttagcctgggaagccaagtcgta

SEQ ID NO: 57469 - DNA, 760 bp, Zea Mays
cttggattcgatcatgatctagtcattatttggctatgattgttataacaaaattatatgtaaaaacctaagatctacatgttattatgtaaaaacctaagatctaagccctgcaaagtggtctatcaggcgctctgtcaaatgtttcccatggtacagtaacagacagaatcccatgttcagccccctcgccgctgacgagccgcgtgcggattcgtgctatcgccgccgtgattcatgctcagatcagttggatagcgccgggggtcagaaaatatcacgccgtggaaacactccggccattattttactccgaccaccatacccgagcagaccactactgatttggatgagttcgccagagacagccgcttcacggcctcgcgccacgtgccttggcacatccaccacatcgtcgtgacttgcattagccgtccgttcatcgtcggggagcttgccatggtgaaagccactaagcttgcgcgccagtaaccttcttcccctccggccgccagcacctcttcgtgaaattggacgccaccgcccccggagcctataaattgagtgcgccatcggcttcgctatgtattcaggcatctagtgcaccgacccgtacctcagatcctccaccagtgagctccaattcgggattttccccaaatcaaccaagaacaccgtgctttgtgacctcgccgtggccagcgcgtctcaggtccgctcataccctctgccctcccgttttagcgttattgtgtgctcc

SEQ ID NO: 57470 - DNA, 977 bp, Zea Mays
atcagttctagccattcaatgcacggtttgctaaacttcttctagaatttaaactagtaagggagtcaaacaagttcatacttctttccttcttcctttttcttcggcattccccaaccactagagggtggaaatgtcctgttcgccaagtattcttgcaccaagtccctggtgctaatgtgctcagccacaactctaaactccacctcagcaagttggcatggggaccctagctgcatattgcacagaggtcaagtcatgccgaagtttagtttcatgggactcattaccatggtcatgagcttctcccttttcttctcatcggccttcacataaaaccattcatttgtccacctggtcgggcacttggtgcgataaccaatcacgaggcctttgtgtccttccggtatgcaaagttgtagcatccgaagttcttgtgtaggccgtcagctctcgccttcgtttgatagtgaagcttgtgcaccctacagaacccttcggcgttggcactttttccttggcttcgaagagcccaaatatacacgctgagcctaacgatggcgttgggggtcagctggtgtaggtagatttcaaactttttcaaaacctcaccaatcatctcataaagggggaaccgaagtcctgccctgaagaagctgatgaagactacaacttcatcctctttcggctctagaatcgtctcctctccagcaaaacgaaccagttcatcatcatcttctccaaaatatcctagtttcttcattagaactaaatcctcagctttaaccatggatctcctgaattcagtatggttgggcttagtcggacataggatattatcatcatcctcactttcagcttcagccacagtctgtttagcttcggcatcagtaatacctttggcaataggttcttcctgcacaaccaacccagaatgcctcatcatttctaagatgggagctgtctcagtcgtttca

SEQ ID NO: 57471 - DNA, 1351 bp, Zea Mays
tttagtgcccgcatcccccaacgaggcccatttgatttggcctctttgcttccaataggcacgctgattggagagaagaccctgcaggtgttggactagagagtgcttaaagttccattcttgaattgttagatctctgctttcctcaataaaatccatcaattgaataatcaattccgtcttaacaatcaacttagctagattgggtaaagatttctgccacccattgatcacttttcttgctcttttaaatttggtcataagccgttttgcaggatcagactgaaagagattttgttcccagtaatcttgaaatctggaatgaaagtcctcaagctgaagccagtagttctcaaatctgaaaatgggcggtttgggaacgttagattgaatgttgacaacccagggaacatgatctgaggcgctcctggccagggaaaaggcagaggtggtcgggaacatggaagaccaggcaggagaaacgaagcaccagtccagtttctcaagcaaaggatgacgctgcatattagaccaagtgaaagcttgccctctgagaggaatttcttgtaaacccagctgactgattgccgcattaaaattgagcattctaatagggtcaccaccttgcttgttacgattttcagggaacctaatcatgttgaaatcaccaaggaaaatccaaagtttgtcgtcatcaatttcaaggttagaaaaccagacaagaaaagcttctctaccatgaggatagcagggggcataaatgttagagagccaccagacttgcccatttagattgaattggaaacaaatagtgtgcccaaatgggttttgatcaactacctcagtctcaaagagggagcttttccaaatagtgatgaatcctccagaggctccaatagaagggccgagggcaaatttatcaaaatggcgattgcagaagagacgaatataagcgtcatcgaaggattccttttttgtttcctgaatacagacaatgtcacatttggattccaaaatattgttccgcaaagaattccacttggagagtcagagttaatgcctctgatgttgtgagacaaaattttaattgaccgacgagaactctgaagaggattatccattgaaaaccagaagtaattcactgaagaagtcgagtataccaagcatacatcgacagaagccccagcaatcaatatgagtggggtatgctaatttatagtttcccagaaaggaggggcagtgagtgccaacacccccccgaaatccagacataataaaagccaaaaaggcataaacaaaccccatagattcattgaacccagaaaactcataccattcacccataagacat

SEQ ID NO: 57472 - DNA, 559 bp, Zea Mays
gaatggagaacgactaggccgaatgataccttgggccagcatctcagtacactgacgctcaatttcatccttctggcggtgtgggtaccgatagggtcgaacaaccactggatccgacccttccttcaaacaaatgcgatgatcacacggacgggagggtggcaggccctgtggctcttgaaaaagatccttaaatgtatctaggatcccctgcagacgaagatcatgtccaacttccaaactgcgtaactgaactgacttcccatgatgtagaaggccttgcaaactgacatgtccaccctcgaggaaaagagacatttggagggagtcaaagttccagctgatatcacccaatttctggagccattgcaccccgagaactgcatcaaacccttccaagggaatcaccaagaaggaatccgagaaggaatgatcctgtataccaaactgaacggccgacagacgccccagacatggcagtcgagctccattggccacctgcacctgctgcttggttcctgacagttgtggaatctggagtaaggaagccgcatggccg

SEQ ID NO: 57473 - DNA, 533 bp, Zea Mays
taagcgtgagcatgtagcgcagacttaagtcgtttttgacttaagccgattgctccgttagaagggtatattaggcaccctttgttttgtaagcgtgagcatgtagcaccgacttaagtcattttcgacttaattcgattgctccctgagagtatgtctgtatgtggaggaatgtagaagctttattgagaatgaggtcaccaaattacaaattgtagtctaccacctagagtttatggtgctaccatggatagaacttctcgaggttctcgatatttcatgagtccctacatgagtaccatccatctgagttaaccgatatgatgtaggctgagttacttttgctcatgaaaggtccttcccatggtggtgataacttgtgtcgtccctctcctaactatacgtgacggagcactaggcctcctatcgtgaacgcccggtgtcgtacaactttgtcatggtagcgccttagggtttgctaatatctggccgattgaataacaacgttcaaatattcctcttcgagtagatca

SEQ ID NO: 57474 - DNA, 361 bp, Zea Mays
aaaatataaaacctgagcatgtgaaatttatacattagtcatgatttgtcattacctatgcttcataaaaattccagccccaaattaggtagtttcatatggtgctaaaataacacccattttataattataagaataattagtgaaaaattagaagtaaacaagggcatgcatgtttcttgaaatacttaagtgccttgatataaattgaaactttacaactaagtcataatgatttgaatttaagaaattggtgatagtatctctctatgagtttgcttggtgatttagttaagtgctcttgtgctagcaaactgttataaggaatattatgatatgactacattatttgaatatgctt

SEQ ID NO: 57475 - DNA, 271 bp, Zea Mays
gggaagtcggctgtgtcagataggtccaaaccgagacaaaaatggtgccaagtcatgtcaaacgccctagggtaggtgtcacctctttccagggcattctagggttaatttggcaccactttgtcaattgggtcgaagtgttttgaattttggattaaggtgaagatgtgggatctttgttcaagggttagtttttatacttaggcaaattctgaatttttcccttgtgctcaacctttggtgaactttttggggcttttctgaaatcttt

SEQ ID NO: 57476 - DNA, 592 bp, Zea Mays
gatcaccctgagttgtgcaggcgtgagcatgtcgcaccgacttaaggcgtttctgacttaagccaattgctctattagtagggtatagtgatcaccctaagtcgtgtaagcgtgagcatgtcacaccgattaaggcatttccgacttaagttggttgctccgttagcggggtatagtgatcaccctgagtcgtgtaagcgtgagcatgttgcaccgacttaaggcgtttccgatttaagctgattgctccattagcagggtatagtgatcaccctgagttgtgtaagcgtgagcatgtcgcaccgacttaaggcgttttcgacttaagtcgattgctccattagtagtgtatagtgatcaccctgagcgtgttgtgctgattttgaattgagcccaacctaggtcagttgttgatcgagaacttgtatgccttggaaaatggaagctttattgataatgaaaccttctgcttacagagtacaactcgtcctcaagagttttgaggcattactaggggtagaatttcttgaggtgctcaatattccatgaattccccacttcggtgttgtccatctgggtgagccggtaggat

SEQ ID NO: 57477 - DNA, 636 bp, Zea Mays
aaaaacacttcacgctcggttccagcccttggcttcttacagcccaaacaaacaagcccattctaattatagcttcagttgccacagtagcagtagatccgactagattgccttccgagtctgtcgcctctcgtctcgggctcgctccacccctgctcgatatgatcccttagaccagtcaccactccacctcccactacactagctcctgccactcttgagccttacaccacacctgctgcacccactatctccaccacaccagcttctactgctcctgctcctgcttctgctccacctcgcttctgggagcatgacgagactaaggtgcgtcctcttgctgtggacccgcgtctgctcgaccttcaaggaccacaactatcagggtgcatcagtttagacacgtgcaagtggactcttggttgcttgctcagcgggatccgacagctgcaccactcttcagtaccaggacccaggagtccttcttcaggtcttagttatcagctcagatagctctgcaggctcaccgatgcctggatctctttgcttttcgtacagcgaccggtgcagattctgagggccacatcacatatctgccaggattgtactctctgctgacttttggtggccgataag

SEQ ID NO: 57478 - DNA, 417 bp, Zea Mays
ataaagtaagagagcttgcatatcaaatcgtcttaacaagaaaattcttctttccttctttttccttggattccgcaacaggtcttgggaccctgatacagttgagaatctgagatcggttcaccggtttcagatatcgcgtgcatgcacagacacctcgtacattcctgacgaataataacaagatgagtgatgcaaaggttcaagcatagatcctatcccacagccactaaacatacttttaatcacatccacggattgtccaaggccccttaatcagagaaaaagattgctgcctcgttttttttcttcttcttcaaaagtcaaaacgtgcccgtgtggttgcatttagctttagcctgggcactgaaccatttccttcccggaaaaaaaggagaggctagcaatcatctgaag

SEQ ID NO: 57479 - DNA, 615 bp, Zea Mays
ctccaaattgatactgttcatggcataatataaaattgaggataagttttccacgagaatggaaatttaaatttgaaaggagtttgaatgtgaaaaggagaaaaagggaaacataaaataaaaagaataaaggaagataacctgctgggccgatttcctcattccggcccacaacgcttcctccaccgcgtggcccaacccgtcctcccgcacgcgctccgcactgcctgtcgcttgcacgtagggcccgtgtgccagccactaaactcctatgcgtgcgcgttgcctctgctcgcactggctcgctgccaggtggggtcctcgtgccagtgaccgaggacgcggtcctgtgtttcttccccgcgcgatgcgcgaacgctcaacagaacaccccgcgacctccgcaatccggggactcaacggcatttccgcgattcgctcggcgcaacccgactgcgctccaccttttatagctcggtcaacccctctttccttcccccttcttctcatccacgctgcgcgtagccaccatcgccgccgactctgtgcctcggcaataccccgcgatagctgccgttggaccatccaatcagtccggggcgcttcggatcatcc

SEQ ID NO: 57480 - DNA, 1239 bp, Zea Mays
cccgcatgtctagtgcctaaggagcatgggtcacacatgctcgctgctgcctctcgccctctccttcctctcctcggcaagtgagataggtatgaaccaacgaggaagagcacccatccccactgcgcatcttcgattcgattccgtccccttgcctcttgcctcttgggcgtctccgtggctagatggcgtctccccctcccttcgacctctgcggcgatctcaacgacgacgacatcgatgaacccgtcaccaccgtccctaaggatcgtcgtctccctgccgccacccctacgatgaacggcctcaacgaccacctccttcgcttcacctgcagactccagcgccccgcccaaaaccctaaccctagccccaatccgccaccgtctccgcccccaggtactgtacgaccttctcttcttgcttcattgtttttcctcgcccttcaatctacttaatggttctaatttcttccttcgcaaaagccaccgccgaataacaagtcaagaaggtcaagctagatggtgtctccgtggctagatggcatctccccctcccttcgacctctacctccactgctgagttcgccgcctccactgctgagttcgatttagtggagcctacaaccaaataaaatagtgtaatctactcctttctcatcgagttcaatctccaaaacagccaagagaaagaggaaattgtactgcactaaagaggtcagagcagtgaaggctgaatattttactccctcgcacatagccatgtttggaggtcgaattctgctactgacagtgagcgattgactgctgcagtgttgatagttcagtttccatccgcgaggttagattcctaccaacactagagctgctcttagtccattcattcgactgctctcgactatccaaattgcagactccacgctctaagactcaccccggaatgagtctcactgactgaaacaggattttttagtattgactaattcttagagtaaacgttttagtatttcccgattgtattaaggcttactgaggttttagttttagtgttactacttacactactttgctgtgtgcccatagtagttggtgcccttattttaactcagggttgtaattgtttattgggccttgtttacttaattagtgtaggggcaggggaggcttttgtttacttttcgaaggatagcttcttattattgtaatgatctatataagtgtgaacatgcacacccacatt

SEQ ID NO: 57481 - DNA, 321 bp, Zea Mays
ggggcacgaagagtgagcccaagggcaggctaggcctggacgtcctggcagtcgggcgatccctgggtacggtggttccagtcgagcccgcgattactagaatagtgtgatggttacctgcaactcaagagcccgcgatgaccgtcttgttgtgcccaagagcagagaactcaagaatcaaatcatggatgaagctcatctttctaagctatccatccatccagggagtagcaagatgtaccaggatttgaggtctcggttctggtggacaaaaatgaagaaggagattgccgcttatgttgctagatgtgataactattg

SEQ ID NO: 57482 - DNA, 361 bp, Zea Mays
accgtgtgggctttgtccttcatgggctcgggatggaccgatacctccctctcttggtgagagggccctgctcgttgttccgaggcaagttcacaaagtcgagaagcagagctctcagctgctagactgcagcgcactctaagagacctctgatttcgctatggatttggcatcgtccggagcaagattgttgccgcaacgaggatttggctggccctatgaaagggcggaaggggttcagccctaacgtcttccatgatacgatggtgaacgtcacgtgacttggcgcgtgctcccccgtcgggggctcgacctgctgcttcttgctcgagaacgtgtcgaagttgttgtagccgttcct

SEQ ID NO: 57483 - DNA, 779 bp, Zea Mays
tggtgctccgcgtgtctcatcagctgttgatggtgtgatgtatgtcgttcgcagggtgagcgaggggtagaagatgactagctgcctgagtaagcaaccatcggtaaccttccacatctagggttcgtgggaggccatcggctatctgtgtcagtactcctccaacttcactcggtgtgttcagtgctcgagcgaaatcggggtacaggtttcgagcgaggagagggttctctcaccgaagcctggcgtcttgttcggctagctctctcttcgatcttgagcctgtcagcgatcacagttgtgggagttacacctttttggtgtactcgttcgtcgggagtttcccccacttctgaggcttcatctcaggacacgggctacgctggatcttgttcctcggcttcatgatgtcgccatacgttccggtgtctgtttcttcatcgccgagcatcacgctagggaggttcctccccttacatggtaggctcatcgtcggagatgggcgctgactccaatctcccctggatgaagaggatgtcagggtagaaaggagccagcacgacggtgttcttcttcccatccttcttggagggaggaggtatcggaaaggtagcttgacctgttctccttccctgacccgggatgtttatctccttcttctgagtgattcgtgtccactccttagtgggcgaggtggacaatggagtttttgggttagtgaagccccgactgatcagtcttccttctcctgagggctcttgaatcccggtctgcaaaag

SEQ ID NO: 57484 - DNA, 366 bp, Zea Mays
ggggttgctgccagacctttttgtgtcttcggcacctccactcctgccgaagggcttagaacttctaatgttttcgtcccttcgattctcggttcttcaattttgtcagcctttggcattgtagccggttcttcggccttctgtataggagtaggctcctttggtgcagcagctgaagaagtttccccgccaaattcaggcactatggccggttcaatatagcgcggtcggtgggtaaggaccttcagttttttcctctttggcgcagactcgcttagagcagctgaagtagcagccttctcagaaattgcaccctttcttttctgcccccgcggcgggtaccgatagtcagggtacacaaaccca

SEQ ID NO: 57485 - DNA, 914 bp, Zea Mays
cgactagaaccatgctcaccgcctctgtagccactgcaatgtacaagtacaacggctcccctagctccggagctaccagtattggtagggatacaaggtgctgcttcaactcttggaaggcacgttctgcctccttggtccaagagaatggtccagacttccgtaggagcttcaagaagggtagcgccctctcagccagccgtgagttgaagtggctaagggtggcctgggaccccgtaagcttctagacgtccttgatccggactggaggcctcatcgcctcaattaccctaattttctctaggttttcttcaatgcctcggtgtgaaaccaggaatcccaacaacttcccagcggagacaccaaagacgcacttgtccgagttcagcttcgtgcgcgtcgcccgcagcttgtcaaagaccagggtcaggtcttccaccagagtcgaccccctcttagtcttgactatgatgtcatcgacgtatatctctatcctgtccctaatgaggtccccaaaggtcttactcatcgcccgtacaaatgtcgacaaggcgtttctcagaccgtagggcattacaacatagcagtaaagcccatccattgttacaaaagcggtatgttccctatcttccctagccatctagatctgatggaacctagagtaggcatctaagaaggacaaaaggttgcacccggaggtagaatccacgatctgatctatgcgtggaagtggatataggtccttgggacaagccttattaaggctggtgtagtcgatgcacatccgaagctttccgttcgcctttggaacgatgactgggttggccagccatacggggtgatgaacctcttcgatgaagccagcgtctagtagcttctggacctcctggcgaatgaagtcctgccgctcaacg

SEQ ID NO: 57486 - DNA, 367 bp, Zea Mays
caaaaatgtgcctaactaacccctctacctcatatcagaagatggcatcgggacgcgtgatctggacacgtcaaacccaggatcttctctctgtgcgcgacagtgagacaaacccgatttctcccctctctatctcttgatccagtcagcaaaacctgcaagcctcgacacacaaacgacaaaggaatgttagggaaagagatctctcaacaggatcatggccataatctcaaagatttggagccaacccgcgcttgaacttgacctctctctgtgctgcctcgtgctcaacgctgtgccaggcgccagagcgcgcactggcgttcacccgcgcacgccccgagcacttgtcagagcctcgccctcg

SEQ ID NO: 57487 - DNA, 295 bp, Zea Mays
cctcgaccacactcccctctgctcatccgccgcattcctcgtcgtcttctcaggtacgcggttcatttcctccattccgttccgtatccgctcgtcgtcctcccccggctgcctcgtttcgaaaaggtgcctgaccgttgacgtcgccatggttttgcccgcgccgccgcaactccgtcggcaaggttggactcctccgtatcgcaactcgtcgtcaaggttccactcctctcgtatcccaactcctcgtcttcacaggtacattcgtaacttccatttctaccctatctcctcc

SEQ ID NO: 57488 - DNA, 442 bp, Zea Mays
gggggaagcttgggcgccgccgccctggggctgactggggacgagaagggttgaaccgtagatctttgcgttgacggttaggattagatgttgtgtaccggttcgacccagctcatctcaaccgtagatcgttggattggcgggtggtgctcgatcgcaatatattaaaatcctgaccagagaatttaaatccaacggcccgcagtgtgtaccgattcacagtagtataagttctaatcctgaccgtcggtgcgatcctgcggctctcaaccgctcaaaccccttcggccaggttatcttactaaagagacccttacttattcagtaactaacccgcgatccaatgttgatgtgcgctgggtctcgggattcttacgtggtggcccctgtcttctctggtatttggcgcccagtccagagggttggaaaaatcagaaaataa

SEQ ID NO: 57489 - DNA, 475 bp, Zea Mays
gtcggaggtgccagcttagagatgcgtcgggggcggaagaccgagtatctcgagataccccttaaagacagcattaaaggttggcgtctggagtggtttataatggataattatggaaattctctccctacccgctcgggaagacaggcagacgttcgtacttcgagttggactgaatctcccacggaccaggaagtagccgaagcgggcgtgttgcttactgaagttggattactgaaagagagaggtctgactgccgaagccgtggtcacagattttgtgttcaaaaacattcagccgctgaaagacagggcctatccggcatatctttaccaagggctggccgactcaacccgagttactaataggagaattccttctgtggatttggtgagccggcttgaaatgatcctcaggggtaaagtttcgaacgttggagctccagtggtatactcggcttggaacctaccttctt

SEQ ID NO: 57490 - DNA, 1015 bp, Zea Mays
gtccgttgagcagcaggacttcatccgaaaggaggtccggaagctgctagacaccggcttcatcgaagaggttcatcacccagtgtggctggccaacccagtcaccgtccccaaggcgaatgggaagcttcggatgtgcatcgactacaccaaccttaataaggcttgtcccaaggacctgtatccactcccacgtatagatcaaattgtggattctacctccgggtgcgacctcttgtccttcttagatgcttactctggtttccatcaaattcagatgtctagggaagataggaagcataccgcttttgtaacagtggatgggctttactgctatgtcgtaatgccttacggtctgaaaaatgccttgccaacattcgtgcgggcgatgagtaagactttcagggacctgatcagggacagagtagaggtgtacgtcaatgacatcatggtcaagactaagagagggtcgaccctagtggaagacctaaccctggtcttcgacaagctgcgggcaacgcgcacgaagctgaacccggacaagtgcatctttggtgtctccgcggaaaagttgctggggttcctggtttcacaccggggcattgaagcaaaccaggagaaaatcaaagcgattgaggtgatgaggcctccggcccgtatcaaggatgtccaaaagcttacgaggtcattagctgcccttagccgcttcatttcaaggctggctgagagggcgctacccttcttcaagctgttgcgaaagtccggcccattctcttggaccaaagaggcggaacaagcctttcaagaattgaagcagcacctggtgtccctaccaatactggtagctccagaacctggggagccgttgtatttatacatcgcggcggctgcagaagcggtgagcatggtgctggtcgtcgaaaggacggcacaagaaggccaggaacctgagggctcgggaccgactacaggggtccggaccgctcagaagcaagtctactacgtcagcgaggtc

SEQ ID NO: 57491 - DNA, 643 bp, Zea Mays
attttctacaatttcctaaagcttcactgaaaaagaaaaaggaaaagactaaacagtactgggccggtttcagcccaggcggcccagtaacacagggaaagcagggcgcgcccgcgccacggtggaaacttcgcagaaaggccctcgaggttttttgctaactgggaacgggttccttcactgttactcagagtcgctgacagtttgcgctaaggtccttcggtttctatttccttccacgtcgaagtccccgacgacggtaagcgcgaggaagctccggcgagcttgcagactggacgaacggggcaatgaccggcactcccaagcggcggacacgaaattggaccttccccgatcaattcccccaacttaattttacgattggtaagctatcaacctctgtccacatgaaccgcggacgatgaggacaatggcacgcattcccggtgatgggtggtggtccagttcaattgagcgggttggtgagcatcaccaatatacaaggatgctaaaacgagaacagagagggcatgatcagacctatggagggctggccacggcgagggtgctttcacggcggcggagaactgttttggggaaaacaagagattctcgagctctagggaacgattcaaggcacaaa

SEQ ID NO: 57492 - DNA, 581 bp, Zea Mays
gtgaaagaaaagggcaatactaacctgtgacatggtggtccgcctgcaccaagcaggcatggatacctgccagctcaccatcggcaacctcgagtgccgcgcggatagccaccaaacactcccggaggtccaaggaggtttgctacaagagagttaggattctgccctgacaaaaagacatcacatagtctatcctttgacccattgagatcatttggctacacaaagaagaagacgaggtaaaacacagtctcgaggatctagaagcagaaggaagaagggcacgtaccctaagtcggtcatcttttgtcggagaggacgtgacatcggaggcgctcttccactaggcgtttgcgtgagtccatagggagcagcgaagaaatcacccctcaataaagaaagttaggcaagacatgacaaagccgcctaagggagggaccatttatagaaggcaagacacgacaaatttttctgtaagagtcgagtgcttaaaaattcatatggctttcctccattccatagaacgcctgaataaatgcactatccaaacttgtttttgtagagaatttgatatgactgat

SEQ ID NO: 57493 - DNA, 478 bp, Zea Mays
gtttagagataagttgataaaattagtgtcatgatcctcagagaagggggtatgagaatgaccagaaatgagagatttaggcaagatcatcattcgatacttgagaacgggttatagcagataaccagataacggggcagaatcaatgaaagatccagagattcggatgataaggccacaacatgattcacaaaggaaatgattaccagattcggacaaaggagaggtaggcaaacaggatcagctaggatgatcaacagaaatgctatgaagttttaggggcaaagatttatggaaggaaacatggcttggtcatggtttgcgcaactagacaacaaacgatgttttttttgacataaccacgtgcacgaggaagttccggtttggctagtggttaagctatgggggtctacaagttgtgtaggtgtaatgtcaaggataaaacacacaagggctagaaaataccaacacaagcagg

SEQ ID NO: 57494 - DNA, 477 bp, Zea Mays
ggattattggtaatttgagcgtaatgttcgaggaacttttgggatgttgtaataatcattctctatctgaccaggatgacataattgtttggtgtcttggtaaaaaaggtttttctgtgaactctttgtataaaaagaagattagtgatcaagtggcagtgtcgtataagttcttgtggaaatcaaagttaccacaaaaaatcaaaattttcatctggctagttgtgagaaacaaaattctcacaaaagataatttgaaaaaaagaaattggaaaggttctcaagattgttgtttctgtgggtgcgatgaaacaattgatcatttattcttttattgtcccatttcaagatacgtgtggagagtgattcaagtggccttgaatttggaggtcattccaaaaaatatcatagagttgtgtgatggttggttgagcaaacctaaagataaaataaccaatcttttcctgtttggttgtg

SEQ ID NO: 57495 - DNA, 595 bp, Zea Mays
ttttatcatttgttctaattcatctcttaattataggtatgctcttttcatgatgcaaataaggcacataaaattgaggagacctctctatattctttgtatacaaattttgagtattacaaatcctaccccccttaaaaataatcttgtcctcgagatttaggaagatctagggaaaaggtggggaaaatctatgtgaagctcttcttctcttttccaagttgcttcatcttcgctatggtgactccattgcactttgcacatctttataaccttattcctcggaacacgagtcagtgtatccagaatcttgatggggtactcagcataagtcagatcatcttgaacactaaggtcctccattggtaactgctcttcaggtaccctgagacatttctttagctgagatacatggaatatatcatgaacatccgcaagatgatccggtaactccaattgatatgcaacctctcccactcgctttaagatcaataagggtccaataaagcgaggggacaactttcctttgactttgaatcttctcatacccctgagtggtgacaccttcaaatagacataatcactctctttaaac

SEQ ID NO: 57496 - DNA, 286 bp, Zea Mays
attttctttggcttcggcaagttgtttccgaaggttttcaacctcgactttttgggcttcggcctgagcattgtatttagcttcgtcttctttaattttactcaccaatgaaattaaaatcttgtctttctccaaaccttcgtttctcagctcaattacctctgagtgaaggttgctgagagctattgtgcagctttcgtcttcggctctcttttgtgccctcaaggcattgctaagaattaagccctgcaagaaaaagaaagaattaagcatgacaatgaaatac

SEQ ID NO: 57497 - DNA, 516 bp, Zea Mays
ctaagtgcagtggacacgccaaaacatcgtgctcgtggcgtcatcgccattgttagagtttggagcatgttctggccctaccagagcattgtagccctcaccactgagcttaatcctaaaacaattaacacacttctctatgggaactctacctgccttgaacgcctcgtccatggtgacaaacctctcattgtgttgcctcaccattggtaacccgactctggccatgctcagtcgaccaaatcaatactataaggtgtgctagaaggtactaattctatctcaccttttttctttcactctattatgccctaagtcatgcccgattactcacgggagttgatccttaccatgataagcacatgcgtcttcatttgagtacatccagccgctttgtcgttccccttttgtgcctagtgagtctgccttgatctctcgtagcctagcagcaaatcgtagcgctattctatctctgagtcttccggactaatcatgtcggcaatccttcgacacaaa

SEQ ID NO: 57498 - DNA, 650 bp, Zea Mays
tgggtgcagtaaattcaaagaagttgtttgtgagcagaaacttgcttgaaaaatgttgtctcaccctagttatatcctaatggacttaatagtgaccttagagtgtatgtgactctgtagttctgggatccttaaaatacctaaaacgagtgagctatatttcacgaaaagtagtgaaacaaaaaaattggtatgagagcacaagacgtcaaagatgtacactagaaagtgggtccaagaaaatcaacatgtggttgggtgcctagattgttatatctgagtatctgacatgccgaaacaaaaaggtctaggaattgcaaacccaaaataatgaaaaaactcatgaccccaactatttgagctcctcacgggtgttgtaaacctaaagaacttattgtttgtgagtagaaactagctagaaaatgttgtctcaaccaaagtatatccttttggccttaatggccacctaagaatgctcgatactcgatagttcaagattcatgaaaacatttgaaaccattgagccataactcacgaaaaatagtgaaaacatgaaaatcagtctgaaagcatcagatgtcaagaatctgcactagaaagtgagcctaagaaaaatgatatttggttgagtgcctagatttctatatttg

SEQ ID NO: 57499 - DNA, 405 bp, Zea Mays
atcaggaaggcttgtgacggtcatggccgtgccgtgtcaatgagcgaggaggaaagtcagccgtcgatctgttctatgaacggtgtagatgctgtctccatgtcgttagcatttggatgcgggacctcgcggccgtatccgcataactaactggaccccacgtacggagaagcttgtgcggtgcttttctcgggtatatgtctgatctgtgggacccaggtaagcggggccctattgatagggactatggtggcagataagtgttagcggtggaggtcacgtggtgaaggcgtgcattgagttgtgggggcgtggccaaaccatgtcgacatagtgacgaagtgtcgtggggcccacgcggaggcgctacgaggtcccccgggtcgccagattcctggttgctca

SEQ ID NO: 57500 - DNA, 655 bp, Zea Mays
tgctactgtaggtggttcgtctggtggatgaaactcgtcgacgacgacgaatgcagaccaggcaccgtcatcatcatcggcaggtgggcctagcaccaccgttgctggctacaatgatgctgatcatcgtgattacgtcatagtggatgatttgttcggtgacgatgctggcgacaggggcggcgatgaggatgttggtgctacattgctagaacctgaggatgtggagctttttgagaacatagctaaccgccttgacgaagatgatgttctgtttgggaacccaaggtggctagaaaatttcaaagagatgaagctgtcggcaattgatccgctctatgagaagggtgattgtccgaagcatatgacggcgctgcgttttaatcttatgttgctgatggtgaaggcccgtcatgctttctcggacactagcttcaatgagcaataaggtgtacttgctgaagcttttcctgagggtaacaaagtgcccgtgaatacctatcgggcgaagaagatgatccccccagtggcaatgaaacttaagaagttcgacgcctgccctaaccactgcatactgtatcatggcgagtacgagaaattagagaggtgtccacactgtagcgctagtcgatggaagacgaatgctggctgtcgc

SEQ ID NO: 57501 - DNA, 480 bp, Zea Mays
caaattgtggttatcctctaatgaatgaacaacattggtatgtagatgaaaagattttggagttccttgagttgttttatgaatcaaacgttgtcatgtctggtgtttattaccccaccggtcctttggtaatccatcacatacttgaatttgctagccatctgcacgaacatgaacatgatactaatctaagtgttatcgttgttcaaatgaaagctaagtttatgaaatactagaagtctataccattgttatattcttttgcatttgttctagaccccgtagctaagttgaggggtttgtataatgttctcaaactgccttctcatcctaacaattataattacggtacttattttgcaaaggttaagactgagttgtattagctatatgccaagtatgaaactaagtttagtgatgctaggccatccaggaccacacatcaaccatgtatgataggtaagagaaaacaggcatggc

SEQ ID NO: 57502 - DNA, 704 bp, Zea Mays
ctgctccggtattggctcaaccggacattgaaaagcctttttgatgtgtattgtgacgcatcaggcagtggtttaggatgtgtcttaatgcaagagggctgagttatagcatatgcttcaagacagttgcgccggcatgaggaacattatccaactcatgacttagaattagctgttgtggttcatgcccttaagatatggcatcattatctgctgggaaatatctgtcatatatatacagatcataaaagcttgaagtacatttttacccagtcagaactaaatatgaggcagaggagatggcttgagctaattaaggattatgaattagaaattcactatcaccgaggcaagaccaacgtggtggcagatgcactaagtcgtaaagcttcctgccattgtcttatagtaaagattctgacatcacattatgccaagaaatggagaaattaaacctgggaataattctgcatggaaccttgagccaattgaagcttcagtcaattcttctgcaaaggattattgatgcccaaagaagtgataagggtatgagacatattcacgagaaaataaaagctggtaacgcaaactgtttcagaaaagatgatcaaggtatagtatggtttaataaccgcatagttgtgcccaagaatgatgaggtccaccagcaaattttggatgaagctcatcttagtcgctattcc

SEQ ID NO: 57503 - DNA, 506 bp, Zea Mays
gaagttttgtgagggtatcattcattgttatggggaggagttctgtcgtcaaccaaatgtcgctgatactcagcgtctacaagcaaaagcagaagactgtggctttccaggcatgctagggagtattgattgcatgcaatggcaatggaggaattgtccggtcgcctatgtcggtcaattcacaaggacagatatcaaacatcccactatcatcttagaagtcgttgcatcgtatgatcgatggatcttgcatgcatttttgggcggtcgggtccaacaatgacattaacgtactcaattagtcgccattattcaaggatgtccttcaaggtcaagcacccatagtgaacttcattgttaatggacacaaatacaatatgggatactatcttaccgatggcatatacccttcctggccagtgttcatcaagggtattcctcttccataaagtgagaaacatcagttattcacaaatgctcaagcaacatgccgcaaagatgtcgag

SEQ ID NO: 57504 - DNA, 659 bp, Zea Mays
gtgacccataccccaacgctgttacaaccactacgtcatgggtagcctctcccttgggggctcaggcgtacgaacaacccctcggtctcggcctaggctctctacgggaagtcggcatgcacaaatctaccgcgcagtacgccgtcacgtcagacgccagacatctcttctttgaatataagacccgacttccctaaggatgcttcctttggtgtataaataggactgtggtccctccacggggagggggacatcgacgacatcgacacacacacatcgacacacgtagacgaacgctcattctttcagtctgatattggcacttgactcaatcatctctagggacttggggatttcccctctcccactgtgcttgtaaacccctactacaggcaccacggtgcgagtaatataagccccatcctctctgctggaagtagggccttgagtagcctgaaccaggataatcgtgtgtgtctcctcgcacaccatctagagtctaccacgcggcacatttactagttggttaaggacacgcggtccaaacactgacactaaacatgagaacaaactacataataatgatcaactcgttgctacgagatcctaggttcgagaatcactaaaattggagtcatggttataatgatatgattttc

SEQ ID NO: 57505 - DNA, 327 bp, Zea Mays
agcgaacgacgctagggggcggtggttcaccgtggggaaagaactggccgctggtgggttcgacggcggttttcccattggtggtccagttcccagtgatttggtaggtgggctagcacgagcaggggtgggtggtcatagtggtggggtcgatttggccgatggcagcttaggacgaccgatctacggtgatgtggcgggcttccacggtggcgaggtcgccggcgaggccactgggcgcgataggggaaaaagaatggtgcgctgtgtttgtggtgaagtggtgaagtttgtgaaccacttcaatttgactctaagatactggag

SEQ ID NO: 57506 - DNA, 451 bp, Zea Mays
gattgtgtgtgtgtgggtccgttaggacactgtaggggctagtttagaaggaaggggagacaacccaagggataagaaattttatatagataactaaatatcttatttgaatgtcatctctggaagattgctacctagaaaataacatacaccctaaaactacctcaagcagactcattatccactcactatctccctctctattttaaatttcactctacaaacagtataacctatagagcaaaacaataatttctatggtcgtttacatagcctgctagagataacctaacagaatttgagttttcaaactagcccgtagaattaaatatctacccttgcaaagttagggaggttaaatgtacgtgtacccatccagggagtaagtatgtgccacgaagtcactctttgagactactattctgtgccaccgcaattatacaggcttcaa

SEQ ID NO: 57507 - DNA, 610 bp, Zea Mays
aaaaagttccggggctggactgcaaacttcccaagactcaggctatcccaagttggatggcgggttgatactctaaaatcccaggggttcatacgtaaaagagctcggccaaaggggtatcgtcgcatgtgggccaccagatcgaacgcggacggttcagattagattagtgcgattaaaggaccagtatgctatatgagccctcggatcggggattgacggtccgaggcccacgcgacctccaaacccttggattcgatctcaacagtccgagtataatacaaccaaaggggtatcttgagctctaatctcggccacccaaggagatctaacggcgcacgttcttttccccaattctaaaatttgtgcacggcggctatcgccccttatcacggcgaatctcgccggagaggccctaaaccattatgcaagtgccctagctcccaatcctcccgcttctatgtgttatggggacaacaacgaacttgaacgagcaatcgtaccagagaaatttgtcgcgcaaagcgctggtcgcggaagagttgaatctgaggcgagggggtgatcttcgtcgggaaattgatccctccacgggactcgctatgagcca

SEQ ID NO: 57508 - DNA, 631 bp, Zea Mays
gcttaatatgaacacacagtaaccaaacagtccaactgatcgtgcgctgactagtggaccccacagtcccgcgtcgctcccccacgggccgaccgagccaatatggtcaacgagcgagacccacccgcacaatcaattaactccgctcgggtccacccaaaccctaaaaaatcagctcctccccgtcgccgtcactcgctcctacgatcaccatcaacgaccgcccccaccgcttccacccgccgtaatctccgcgcttcatcgattgaccgtcgtcgttctcctcccctggttcatttcccctctccttctttcgagttccccacattcttttgcatagttcagtcgccaatggccatcaggtttgccacgccccttctacatccctcccattgattcgaaatttattgaatcgcctcattatatgtagtatccgataatgccttccaattttttcaattgcatatttgtttcatattgttcatttttatataggtactgaatgttgtttataaacaaattatatatatttttacaatagcaatcaatagattagtgatgttatgttactgtgttcttattgttgtttctgagagttatactacatataattttatgaattatattgcat

SEQ ID NO: 57509 - DNA, 777 bp, Zea Mays
caaccataaacattgaaggcgaggcttcctccgccttctacttgatggcggtggcaagccggttaaggtggcacttgagggtggcgacgcgcctctcgaggcgttgcttcttcgcctagctccaactggtgacaaagcgtatgcatcctgcgcttgtaatgataagcgtatcgggtcggcaaggtagagcttgccagtggcgatggagaggaaatcgagggtgacgaacatgatgtggcttcctagtgcgaaggtcttgccgctggtgagagttaaaatctaagccattagagtggaagatgtcacttggcacgctaacggtcccctacctagtgcgccaactgtcgtggtttcagggacaaggaatttgtgttcgggaggggctactagcacagactcactccgaatggtgaatcactgggattcgagcacaaggttgagacagagagttatactagttcatgcttgcgcccttgtccagtgtagtgttgatcgtaatattgcttgaggactgtgttacaactggtgcgtgtgtttgaagaaggaaggagtcataccctttttataactcaagggtaggaccttacagcggagacttatttcctactaataagagtggtaaaggcgtgatccatcacccccggtggacgtagtgcctctgacgtcgtctgtaggtcatgtgtaggcgtactcccagcatggcgtactgccatgtccgtctggcatacaggtccctgtaacgagtactagatcggcgccttcgcctcgctgagttgc

SEQ ID NO: 57510 - DNA, 706 bp, Zea Mays
aaaagtttgtggctctaagccatcaccacatgcatcacaagtcagacgaataataattattacagaccaggtgttcattacataaattaaaggtgctgccaagatgagaatccttctctccctttttggcaactagcaccaaagaaggagagagccaccaagccataaatcaccactgaggaggatgacgcggaccaaagaattgatgcgccaggtgagttgcaaagtgttcttccccagactgagctgggggaggatagcttcctgaaggatcctggggcggaggatgagaagaggattgacttggatccccctggtggggaggcggagcaaactgctcacggtcatcaaagtattcttcatcttcttcttcatcttctggagacatgaaaggcaccccatatgcctgctggtgccactcattgatttccggaggaggaggatgaagaggcacatcaggcgaacggggagcaaatggcatacccatagaggaagcttgacgacgaagattgtcgtcagtctcccgctgccgtcgagccagctcatgtacatctgaagatatatttctgcacatggaaaagaatgatgcaatgccatgggccagacgagcacccatcccacgaccacgacctcgaccacgaccacgaccacgtggtgtgggagatccgcgaccaggagatggacgcgagggtccggcagcagcagg

SEQ ID NO: 57511 - DNA, 618 bp, Zea Mays
ggcgaccctaatccctccatcaattgcacgaatccggcctaggattcttctgcccacaacgactaaggcgttcccggtaattaagtgcggtctagctcaaacggttgggtcgatgagcaatgttaatagctaaggatgcttaaacacaacataggagggaatgaacggacctgagatcgaccggccacggcgtgagatcacgcagtggtgttctaagctgatttggagaaattccaaatttaggggttgtagaggctaatcggaggcgagaagtagtgctctggcttcgtaacgagctaatagagcaagtcggggcatcaatttatagtgatcaacagcggtggcgctcaatttggggaagacacgctagcagccggagcaaggtgagtcaccggagttatctgtcgtggcacttattgaggcataggctcaggataatagtttgtcgttcatcatgacttactgcgacgtggtacaacggcacatagcattgcagactccggtaaactatggtcacaccggcggtggtcgagcggccacgttgccgtgcaagttggaacggtgggggttggctcaatcccgacccccgctgatcttttcactcccgcggtgatatcc

SEQ ID NO: 57512 - DNA, 577 bp, Zea Mays
gaatacaacacatcagagttatcaacgttagctcgatatttacagtgataactaaggatttttatactcaaaaccaaaggtttttacgttcaaacatgtagtgcatccactagtgtaccgcataccatatttttatgcctaccataatttttagacctgaaactaatcaacaaattgtacctaccataaaaattgtccctgccataaaattagatcttgcatgcacgactagtcaactcccctaatctccgccataaaattgtatatgtcataaaaccacccctaatttccgtaggggatatggcggggctgttggttgggcgggtgcaaaggggcgagtgcatgtgggcaatgcaacatgcactagggatgtgactcgttaagcctcatcgggtcggtttgtgtctgggtaaagcttcacctatgatgacatatatcattatatactatatgtcatctacggtgacacttcacccagacccaaccgaccagtcaaatgccctaccaagcgaaccagccaactcaccaaattattttgggtctgtaattcactaatgagtcatgagccacgcacgcc

SEQ ID NO: 57513 - DNA, 556 bp, Zea Mays
gttttatacaggagtgctggtggtggtggaggttcaaagccgactcggactttttccagatcagtagacagacgtgacttgtgtctttgggcatagtgacactgacctgtctacgtgcaaattcatcatgggtctccgtgtgcgttttagctagaatatactctgttactccgtacgtactatgttgttgttcccgtcaacatcattaaattaatcaaactcggtaataaaaggctcctatattgtatgcctctgtcatctatcagtggaggtttcatccgttaatcatccctccgtcccacacacagagtgccactcccacttttctatatctatagcactcactatatataatccactaatagtttcaactttacggaactgacctaaccaaatcgctcttacactcataacatccactaaatctaccaaacaaataacactcagacttaacacaccatcaaaactaatggttcggattactggataaccccatcaacctctcgcaaatccaatgaacaatattatttggatcatccattactcctcatcccgc

SEQ ID NO: 57514 - DNA, 1676 bp, Zea Mays
cgtcacttgagggtcaaaccaatgacatttgaatatcaattgagtaagaggtttagaaccatgaaaattgagttcatatatttcttcgattcatccaaaataatcgacctcgtcaaggccggacgtaaagactccagaacatgttgttttttgattgggccaactttggtcctagcttgttgtgcgaaaatgatatccattaacgtcatacccagattatttattgacactataagcaaagccattggctacttgtctcaactcggcactcatagacggatctctttggccctgcaagtattcgcaagttaaaagatgctaaattgagttcatagacggatctctttgacaaactaagcacgtaccttatgtttgaaccgggaaatgaaattgggcaatccatttctcgcaccctttctaagaaggctatcatattcctgtggagttgggccccttgatcgatgccagaactcatgaagaaattgttccatgtatggcgtcacctcttcaaggttggtcaatacatatagcatgatatgacgacactcttcatatgttagggtcttggtggtcgaaccacttgcgcttccgagttggcctctaaatatgctgaggttcgattcattgccgccatcattgtaacgagagggtggattatgcacgctcgacagtttgtcaccatagtaagttgttgtgaagtttgacacctcctctagaatgtatgcctctgcaatggatgccttgatcttgcatttatttcaacatttctttcgaatagtctttagacagctctcgattggataacaccaacgtccctgcatggccccccattcgtgcctcataggggagatgaagaatcaaatgctgcattggattgaagacgctgggtggaaatatcttctcaagcttacatagtaacacgagtgtcaatctttcgaagtgtgcaatcacggtccgagataattcttttgcacaaagctggtggaagaaatagctcaactctgaaagcgctagcgagacatgctcagggacatagcctcgaaccatcgcaggaagaattcattcaatccatatgtggaagtcatgactcttcatccctaagactcgcagagtagataagttcaccccctactcaggttagctgcatacccatcagggaacatcaacatcttgatccactgaagtacttccttcctctaggccctgcttaggacaaaatcagccttagaccttctccatgtctttccaccactaggcgacttcatctcttggtttggtctatcacataacgctgctagatccactcttacctttacgttatcctttcacttatcaggaatgtctataattattgcccaaagtgcttcagcaacattcttttcagtgggcatcacgtcaatgttgtgtgaaaggagcaggtcgtcataataggggagccgagtcaagcccgacttatgtgtccacatatgttgctcaccatatcccacaaaaccaccttttgcattagccacgagcccatctatctattgacaaaacagttggtctggacgaataacctagcctctcagcaaaagcactcgtctcagcgatttgttcgacggtcatttgtttgccggctgaatgatagatcacgaactgccatgttctagtatttccttatatatatggaccttctg

SEQ ID NO: 57515 - DNA, 298 bp, Zea Mays
gttctttgcgttggttttgaataggaaaaaattagagaccatagatagagaagaaattagattgcctaatcgaccaaccctcttagtcatcactattaccatcatcatgagcatctccacgggcatattatacttctcattgtgatggccttagggttggtccataggggatgccccattgatagggaatagcatgcaccctatcgactcccttagtttaatagtgttgcagcacaacatattccttattgtatgttggcacatgtatttgtccttgaacaacatgaagattcccaac

SEQ ID NO: 57516 - DNA, 321 bp, Zea Mays
ccagagaccgggtgaatgagaaactaatcaatttttcgctgctaaaactgaaattgagcacttcactttaattgacatgaagaaagcgctcaaaccaaaacaaatcagcaaactaatgatctcgtgattataaaatgttcttaagaatcacacgggaccggcaaaacgaacggattgcaaatcagacaacgaaaagtccgaatcggttcaaaaccgtgtctctatctagtgccgatttcagtggctcgaaattcagttcttgaatgcaaaactgaaccaaatggacttcgatcgacatgaaattttacttgtaccttgaca

SEQ ID NO: 57517 - DNA, 487 bp, Zea Mays
gtccggtcttggcatgaagtataagaagtttgatgtgtgtgaagataattgcatgttgttctagaaggaatatgaagcggccacccattgtcagaaatgcggtaaatcaagatatgcggaggtactaaaagaggatggagctatttttgctacaaaagtggcagttaaacaacttcgatatatgcccatcactccaaggcttaaacgtctatttttaaccccagaaactacgaagctaatgttgtggcataaggaaggagactgtgatagccaagacccagacattatgatgcatccatcagatggcgatgcttggaaggctctggatcattttgacccagaatttgcaagagacgctaggagtgttcgtctaggcttgtttactgatggtttcactccttacggcaacagttccacttcatactcttgttggccggttttcatcatgccctacaacccccctcccaacaaatgcatgaaagaaggg

SEQ ID NO: 57518 - DNA, 710 bp, Zea Mays
ggccgacggatgggtagggtcggcgtatgcgagcaagcgcagcgcgacgtatgcgaacggtggacgagcgggtgcaagaactggagatttccttactattaaagtcggatggaaacaacaccgatcggcctatcaacgtcgctccaaaaaatcatggccgttcgatcgagcatcaaacgttgcggtgaacagtcgtcttcctcctactgcaacaagcatcccacgtggtcgtcatcctagaaacatcacgaactcgcttcagacagaaagaagacccgtcggattttatgtgtggcctgcctcggcgcctcgctgctcgccgcagtcccgcatccattccagtccccctcctcttcgcctcgcccctcgcctcctacggcctcactgctcgtcgcggccctagacattagctcgcctccatcccggcctccctcccctttgcacctcgcctcctcctcgacgcttgtacctctgccaagaatctctcaggctgtgccagtttcacatgcctatctcatgcttcctctcctctagctacaacctcgccttgtggcctcgctgctcgcccaaaacgttatgactagagacagagagagggaggtcgggcctagaagagcacggcggtaatggtgtgcgaggaacaagagcaatgtgtcgcccacgtccaccatgagccaccgctggtgccggccggggctttggactctccc

SEQ ID NO: 57519 - DNA, 586 bp, Zea Mays
caagctcatagaaagtagcccagcaacaaacccaactactcctacgacgacatgtataccgaacccccatgagcaaccctactctccccggccctttcatgttaggtgactgaccaaccggatgggaagatcgacatctatttgctagctagcttgtcctcccatgattgctcctccagtactcctgtcctggataagcaccccacccacaagcaccggaagaatgttcatctcacttgacttcagatcacggttcagttggtcttattgcactgcacgtcagttacctgcaaacttttatgtcacatctagcattactacaaagcctgcgaggtctcaagtacacacccctgttcctactactgagatcgatgcgcctccaagactttgttacctgttgacgactaaattttgctaaaagcatggaaaggctctagagagttcagacaataaaacaatcacaaataatatcttggaacatcacaatggaaatccaacagaaaaagaaggaaaaaaaggtggcgccaatcttatcaaactggccaaaccggttctctcgtgtagttgtgctgcgcgtagccaccca

SEQ ID NO: 57520 - DNA, 688 bp, Zea Mays
aaatatttctcctctagagaagcttcaagatcctttattttattctctaagccatcaattataatctcgtttttcttaacttcattatcctgctgcattttcaaagctttgctcagcagcatgctctgcaacaacaagtcatggtcagaacatttaattcaccgcgaaaatgataataataacaacctagtcaagggtctcaccttgaaactggaataaaataagctatcgacaatatgttgccgtcggtagcagctgatatcagcctctagcttcagaaagccaacactcttggatagtgtctgctatcttcgctctggcgcgatcgcggatgcatcctaggatctcctcattaaccccccgaagagcaaagcccctggttgatatccgtaggatacaacaaattcctgcaactctgacttgtcctcttcagacaattcttggccgcccaggtgccgaagatcgaaattttttcgcctgaagggctagcatcaacatccctttctttgcttggcgctgcggccatttctttctttatagccacatctttaaccacatctgatatgagcctatcaatatctgacattgttgttacagtttcatcagtgtttttgacttcggcagcagcatcagcttcgacacccgcagcagtcactatttcagccgttgaggctgaaggcggtgtttg

SEQ ID NO: 57521 - DNA, 992 bp, Zea Mays
gaataaaagactctattacagaatccataaacttcaaaattcacaacttttgtaccttcagactgttgtatgcaaggctatccgcaagatcgtccttcgacatggcacaaaggccagctttgagctttggaaaacccatacttctggccatctccctgcagacggataattctttgttgtctgggagacaatacaagaaatcatcttcatccgtaccattaaacactaaagcccctttcgggtacttcagttctcgggcatagtgtttagcttcaaaatttcttcctcagatatcttttcccgaagcatgtcgaataacataatcaaggtcttcggaaggtgcttcgggagcaggagtggcaacttttttaggcaaagtccgttctatagcctcttcctccgctaccttctcttcaatttccgagggtttttacttagcaagctctgaaggcccagcttcggcactagcctggctcattgcagcttcggcttcggtcagttttgttttagcttcgatttgcattttcgaagccttggcaattttccctggagtagagcttgaagcctttaccgtttctagcacatctagtacacttgccatccttcttcttttaggagtgaccgctatacctttttgtatcttcggcactgttacttccgccgaagggcttaaaacttctaacatttttgttccttcagtctttggctcttcggccttatctttaccagtcattgcctcagcttgctcggctgagggcgcctttggcatggtggtcggttcttcagccttctgcgtaggaggaattggttcctttggagcagcagctgaagaagttttcccgccaaaatcgggcaccacggccggctcactataacggggccgaagcagcaacctttccagaggttgcaacctttcttttctgcccccgtggcgggtagcgatagtcagggtacacaaatccaataacatcaaaaaccctatttaatctttt

SEQ ID NO: 57522 - DNA, 679 bp, Zea Mays
ttcgctttgagaatatataagaatgtcatcaataaatactaccacaaacttgtcaagataatccatgaatacaatgttcatcagattcataaagaaggctggtgcatttgttagaccaaaagacatcacagtgaactcgtacaacccatacttggtaatgaatgtcgtcttcggaatgtctgaaggttgaatcctgagatgatgataacctgacctcagatctatctttgaaaacacactggctcctctcagctggtcaaacaaatcttctattctggccaaggggtacttgttcttgatcgtgacctcattcagagctcgataatcgatgcacatccttctggtgccatctttcttctccatgaacaggacaggggcagcccaaggtgaggtgcttggtctgatgtaacctttctctgacagctcatcgatctgcttcttaagctcaaccaactctggcccagatactctgtaagctctcttaaagatgggggcggttccaggaagaagctctatggcaaactcaacttttcgcttaggtggcatgcctggtaagtcctttggaaacacatctgggaactcagacacaactttgataatctcaagtggatctgcttcactgctatcaatagccatctgataacaacttcctttccgtggctcaggcgggactaactcg

SEQ ID NO: 57523 - DNA, 314 bp, Zea Mays
ggtaaactcatccacaaatccactcaggcttcgagttggttggctagggaaagcgggggctgttgtccatgtagccacacacccacaatataaagctaggttccttggcttaccaacgatcgctgagagccaaggcacgaggtggggaaaaggtcatgggcggatgacaagtggtaagatccccatgtggctgtgacccaaggtcacaagtgtcgatgtgtcgaactagcactagcgagtaaatttgtgtatgcacgtcttaggcccagatggtgctcaatgggcataagaattatactagttcgaggggagtg

SEQ ID NO: 57524 - DNA, 867 bp, Zea Mays
cctaattgatgggccgcctgaaagtcactcgatgggcctcggtcggacgggagccgttggagtctgaggaaggtgcaggtgctcatacgtgagaaaccagtcgtatcatgtacatgtagcgcgtcaaaatcggcggacgactcgtttgaccgtagctcagtgcgagaggcagaacaagcggaatgtggagatcatggactcgtggtactttctctcaccctatgaaaacgagatagacacccacagaatttatcttcttcctctagacactccctgtactctagagacaactcaatcacacatggacaaaaccacaggacgtggggtattacgccaccgagcgagccaaacctaaacaatcgcttgtgtctccgacgtgctctgcatgtaccatcaagttgcgatcgttgttgccttcgtcagaaaagcgctacgcggccacccccgtagagtgttgctggtacttaacatcgacagctggtgcaccaggtaggaggtgtgacgtcgatttccgacaactccatggccgttgtcttcaacatcgtctgatgtttcgccgcgggagaggttttcctttttgggtccctcttctgcatcgctgaccagaagggagtcctccaccgtgtagtatgcgcggaggagaaggccccaaagcttcgcctcaccagagcgacggagcagaagccggtgtcacggaagagggcgattccaccgcctccaacggcctgacctcaaatggtcgtggctaagactacaccaactcgccacttaactccatgacgtatgtgcgcccatctgacgcaccgggccacttaaacgccgggcagaagcacatcgtccccgcctcggccaatgccacgacatccc

SEQ ID NO: 57525 - DNA, 461 bp, Zea Mays
gtgaagtacgaactcaccagtgattggtggtgcgaagtcgcttgccacgacgtggtatggtgtgcccaccaatccagagctccgatgagcaatcgacgatggtttgggaacacctgcgcccccgaatcactccgtacgccttccttgtgtccactgcttcctcttgaatggatcgtcggacgaattctggcagtgtgggcgagcgacgatggttgcggtcgggtgcttctcctatggcagcaacgtgccctctctctgctatggtgatggtgttttctagatgttttggtgtgaccggacgagagggagctctgagatatttatatagtcacaagaaatcgtattctaacaaccccaaggcgaatcctatctagctcccgaagcacacgcgcgacatgagattgccagcccattttgtttgagtccgcgtggggatggggatgatcccgatgtaccggccc

SEQ ID NO: 57526 - DNA, 1038 bp, Zea Mays
caatcccatttgatccgtgtgcaactgaacaaagccctatatggtttattcgataaccgaaatatgaaccataattttttggaccaataatgtagaatggtgttctcgaaatagtcaactagcacatgattaatgatttgtccttcaagtaatatgagcacatgattagtgatcccttcatcttagtgctccactagtccttcgacctccgctcctccaagatccttgcgatgctcacccaacataagaaggtagatgcccattgcctgtgcagaatgatgatccatctgatatcccacatgagtgaggatcatgtcttgaccatggtttcgtatgatgttccatatggttcccattcctgatcaggaacaaattttgacgaaacgtggaaccccatatggttccactttcttggattcttagcaccgaccctcatggagactatgcgccttagcacaacccccaacacacacacacaccaccaccactacactaatcatagaacaaaaagagaatgacatagatgtccaacaagcatgtggcccataaagcctagcacgaagcctgatttttaggcatgacactagcctatcctggcacgatactttgtgggcgcgtgcccagcctgacacagtcgacatgtcatgcctgttacgagtttcagactgttgggctagccccgacacgtcccgttaataaacgtgcttcatacttggcctggtccaagaagtggacgacccaaggcccaaccggaggaagaggagagcgctgttattcctaactggttaaccctaacgctcgtcgccactctctttttttcttctcgctcttaggctcttggcgtctcacgaagctttcatctctgaccaaccgataccatgtcgaccgccactatggctcctacgtagatctgtggtcctctacagctcttctctactcctcatgtcctccctctctacctccatctcgaaggcgatgacgctgacgcactggcgctctatctcctccatagactcatggtcctctactctctactca

SEQ ID NO: 57527 - DNA, 331 bp, Zea Mays
ggaacacttaaagctcttcgggataaatgtttcggttttgcaacccaatgtactgctcggttaaaaatatcttcaattctgtcggagctacgtttgaagaaggcaacctttctgccgaagatatcccaggagcactttgatgaattgagaaggaaattgatgtccttgacaaagttataactgttcatggtgatttttgcacgttagtggcttcccgtgggacagctgcttcttttgccaaggctgggtgtaatcatgtaaaaactattaacaaaccaaccttcagcctctcaccgtcagacttggttaatatcccagccgaagccagaag

SEQ ID NO: 57528 - DNA, 1149 bp, Zea Mays
gagggtgtgggttaagcttggccttcaccatgagtcgtagtcctccggttgttggtataagtcatcctgagtcctcctaataaacagaagggataggattttgattgcacattatacggattttcttatttaacatatatatatagggacgaggtaattgaaacccagggcttccattattaccaggaagccccagccaggtatagccacgtcccgcaccagcgtgcgtcccatcgtgcacgattcttactcggacagattttagcgtaaaacgtgaaccaaaacagcgtaaatgataacgattttttgcgtaaatcgtagatctgttttataacgacgaatgtgtcccaaaaattacggcataaaaatcgcgcgtgttcgatcatgcacaggttctggcttgggcggattttagcgtaaaacatgaaacaaaacagcataaatgaatacaaaatttagcgtaaatcgtagatctgtttcgaaacggcgtatgcggaccgaaaattacggcgtaaaaatctcgtgtgtcccatcgtaatcgggttctgactcggacagattttagcgtaaatgattacgaattttagcgtaaatcatatatctattttgtaacggcgaatgtggcccgaaaattatggcgtgaaaatcgtgtgcgtcagatcgtgggcgggttctggctcgggtggatatttgcgtaaaatgtgaaccaaaacagggtaaatgtgtacgaattttagcataaattgtagatctgtttcataatgacgaatgtggcccaaaaattacggtgtaaaaatcgtgcgtgtccgatcgtgcgcgggttctggctcgagcagatttttgcgtaaaacgtaaaccaaaacagcgtaaataaatgtgaattttagcataaatcgtcgcgcagacctttaatagttctcaatgtattagctaggcaagagaagccaaacaacatacaaatatgtatcctaaagtaatgaaccaaggatctattatgcatcctttagtcaaggcacaacatactgccaactctaactataaaagattaattcacgaattcagataaattattgaatgcaacacttgagggctacatttacacgccacatgttacctacaataagacaaaactataggaaaagagaaaaa

SEQ ID NO: 57529 - DNA, 942 bp, Zea Mays
attttcagtatgagtcgtcgttagcaaattttgtatttttgctccctgctgtattgagttttcgctttgtctttcctccagaagtatcttgccaggaacaccttgaaactacttatgcttggtgttgctgcatatatgtcattttgcaccctgctgtattgtgtttctgcttgtctttcctacaacagttatcttgccaagaattgtatgttaggctacttatggttggagttgctgcatgctgtcatctcacagtgtgcagttaccacttctatcttttgctgtgcgcttctttactgaaagtaaaaataacattcaagatgaaacctgctcaggatattgattctatgactggtttagttcttgccagcctgtcatgcaacttctattccgagtaggttaaacatactcacagtgggtatatagaaagaatacatgccatctatgattactgcatgtgagcttgtactcaaatgattttttttccttgaacagtgttgttgatgcaattcttctaaatgaacctgatttatgtaccgagcttgaaaaagaaataatcgacagaatagtcaaagatgaagtgatgatctacaaaaagactaaagcagaggtaatattggtttcaaggtgatccactgaagtttgtatagttaaaattcattattaaagcgtttttaataattaattatgaagttcagtgtgaagaagtcgttgtgcatactttaaggaaacacatgaaacaagaacccatctaggacaaaatttcactcttgggctataagatcatatcgatgtacctgtgtttcaagtttgtctttgagctgtattcccttatttgaaactaaaatacgatatggcatttattataggcatgaagtattgtcatctttcatatttgtctgtgttctttgacaaggaaattagcataattttttgtgcctc

SEQ ID NO: 57530 - DNA, 848 bp, Zea Mays
gactgttctgaataggcccttaaactaacacaggctaactgaacacaactagcaaaagtgatagtttcaaaacgaatgaacaagcttgcttggttattaacatgaaccaaggatggatgaaacgcatgcaaacacaaacttgcctgtgtgaacaagaacaacagacttggttaaattctagaagcttgtctggaaacatgtcgttgaccaagtcaccttcaccaatatggatgcaaactcaacctttatctgttgacaggtccatccatggttggtcgttttgaagctacaccaatgttccggattgtcgctgctgtaagaatgccctgagcctaccttcaacttcacatccatccaagtatctattactgcagcaacaacatgtctccttaaggcactcggctcaataatgacgcccttaaagagctggatttcttcacataacccactggtaaaacagcccacacacaaactgaaactgccttctacttcagatatgtgtacttctatcgtcgcctcaactgcaaagtcaagacgtgatacagttatgtcaaccgctccactatccccgtagatgcgtcttgtgaatgcataagcgctattaggcatgcatctgtcgtctagtaccactgatgcaccatcaatcagttgtggatcgtctttctcttctccgcccatcttgatcctcatgtcaaattcaattataatactgccacacaactcaatgcctcgcttagggccagtcatttctataagggaaccctacaaaagtattatatactatattcaggtaaaatatgtaagaaatgttaagtacttcatttatgaggttcacatatcaaaccaag

SEQ ID NO: 57531 - DNA, 418 bp, Zea Mays
gtcgtgtgtagctttgagaatggataacgccgatttgtgaaggggtaccgtcattgtatagagcgtgtgacgaccatcacataaatggtccgcccctaaaactgcacacaagttgcgtaaaccccaagcaatccgcgtggattactcaggggctcgggagatgtaggtaacagatgcgcttgcgcacacccgagatttcgatcatcagcaagaagtgaggcaacaataaatggacgcatgtccagtacgtgacgaccatcgcagaaagggtctatcctaaaattgcacataaattgtgtaaactcccaagcagtccgcatggattactcgggggttatatttagcaaatgcacttgcgcgcacctagaaaggtaaattctcaacgaaagactctgcgcaactccaagaagtcccacaa

SEQ ID NO: 57532 - DNA, 387 bp, Zea Mays
gatatcccctaggtttgctggctactaacgtcatggtcgacactcacatccactaacacttgatcccacatgtcagcccctaatggcccaatctatcttcctcttctagaaagaaaccgctgccaccactttcctttcttccttgtccgaataagctcatgaatcccctttaggctatgttcagttccttgggatctaatccccaagatgaaaatttctactcagggaacgagtgacccctcctactctcactgaatctcgttggtaaggtataatccctgttagggaataattcctatgcctaaaccttgttcgattaagcccatagctaaaaatgctaaaacaatgctagaatggcaacacaattcatagatgtctccaaatggc

SEQ ID NO: 57533 - DNA, 556 bp, Zea Mays
tatctgtttttaccttatacaaattttagggctttacaaatcctaccccccttaacagaaatctcgtcctcgagatttgtaagaaaagggataaagaaggattaggttgtaattccactttaatctatatttggttaaaaaaatcagagtctcatcattttttatagttaatagtgggtgattaggagagcataggtgtccagctatttattatgtaggatataagctggacaggttgagataagaaagattatagcaaggaaaagacttcgtccgaattgtttaagtcttgattcatctcgagattcgctttgactgttacatccttccttgttggtgttgaccttgtcttctccggtcttggtctccttgattcggggttagtgtgtatcctcggggttggagaatatagttaagatagatatggatgagatagactacatgatataggtcaaaggtttgtttgatgttaggtggggatagacagattatgcaatccatcatgactctattggtcgagttagctcttctgctcatggttgagttggtttaatgt

SEQ ID NO: 57534 - DNA, 532 bp, Zea Mays
cgagaagaaggtggcgccggcgccagcggccgccgccggcgaggtcaaggaggtggtggtcgtggaagtgcacaaggctgcggcggcagacgcgaagaacgtggcgcgaggaccagatgaggagttggacgacgacgacgacgaccacgacgacggcgcggagggtgaattgttggacgaggagcaggagacagacgaggaggaagaaaaagagatgctggatctgcaggatcacatggccattgacgacgacgagcaaactgctccgcaccaaggcaaggatccgtagtccccagtccccaccaccactgtcgtagtagcgtcttcgcaagattcacttgtcggttgaactaataatgacactgtgctcttcaattgctgccgtattgcagtggacgacgacgacgagcaagatcttgagccaccgacaaaaggtgcacgaacacctctgccaatttcgtccctattttccccctctgtattctcttccatttcttcactgttgtgttcttgcctccggactgcatcaccg

SEQ ID NO: 57535 - DNA, 474 bp, Zea Mays
gttagagatagtatgtagtggatatcccatctccccttgactggtaaccaatgtatgtccatcaacattccaatatgtcaagaaggcagctaccaacgatgggtcagcttgaaaacagtaaagtgaagctagtacactgcgatagatatcagatttttgtagcatacttcggtcttcgtggttcaccagcatcatacgggcccatatcaacatcttctgacatacaggcatgtccaatcgaagctgtggttggcagtcgttgaaccaccttgatgagggatgcttgaccattttttgggctagtgtggaggtggagctaggaatgtcgagtgaccttttggatgagtccagtaccgggtaaagaatgtgtgcacgaccagcgtaatctgacataggcggttcttgtgggttcttttgaaggccaatgggaatattatccggggttgtggtcgagagggtcctcgatgaagttgg

SEQ ID NO: 57536 - DNA, 549 bp, Zea Mays
agcttccaagggttcctctgccttgacgaagagcggtggtcgagtttcagagaattccagataggtagtatctcggggtcccagagggggaactcttccactgtgttgttgaaattggttgcccgccatttcacgtagaaagcacgtgttgtcggcggtggagctgaccaaggcagcgatagcctcggccaaggtaggaggtaccagtggcggattgggagtgtcctccccatcgcgggatgtacctatcccatcatgtgcacgggtccgggatgacatctgaggcaaagaaacatttggataatataacatgccaaacgtacaccatatttatttcattgcggaacagtaataattatacatactccattatacaacttgacttcatacttattttacataagtacattggactatactactctagtcttcttcatccttagcagttccgctgcctgctccaggagaccgttcatctgccagattcatggaaggaggggctccaaaaaggtcaatcccccccatcagatcctccatttgctattctag

SEQ ID NO: 57537 - DNA, 558 bp, Zea Mays
gtccaacaggatgtcagacggttcgacagggtgtcggatggtccgtggtgggtcaacagatggtccggtctaggttcgaacggtccaagattatacttagattatttggctatggctaggggcgctggcatatcgtataagggttgtgggggcaacggttgccttgagtatgagtttatcgacataccatataatggttgggactgtggaggcccatttattgctgatgcatctagcggggtcacctctactgtggccttatgggatggaaaactggggataatagttgtttcaaatgcaagtgtagtttcttgagtgtttgttctattccaccatgtgatgttctaactaatccctttgtaaatccacataatgcttaatagattgattatcattggaattacttacattgctttcgtggagcgaagacacaggagaataaagcttgatcttctcttgcttgataatcttctactgtcgatccatcgtgaagtgtgacaagaacttcttcttcgcttcttcacgcacccgacaacccgggcacgtttgcgcagcgcg

SEQ ID NO: 57538 - DNA, 538 bp, Zea Mays
agcagcaaacaggggcttctaagtctccgtgcatcagatcagtccaaatttttgttccatcatgcggatccattcatccaccaccagaggttcttctcctttaatgaagatagggggacgagtttctgagaattccatataggttgtgtctcttggagcttgattttggccttggcctctttgtggatgcatctgatttcctgccatctctcggagaaaccgggtattgtcagcagtagcgttcagcagggtagcaatgacctccgctagagttggaggtacagatggtgggagggactagggtctcgtccccactacctcgagaagttcctgccccatcatgaccatgggtccttgtcagcatctggagaagaaaacatgctttatgactatacaattcagttacacaacctttgttacattattccgagctcttacttattacacatactcagtccatacaaacccactttcgtaattaagtctaatcaaggaaacaacccactaccatactactttagtcctccacgtccttagt

SEQ ID NO: 57539 - DNA, 390 bp, Zea Mays
agtccatgaaacatgccaaagaaagtagccaaaaattaggctaacaacaaccacttcttgtcctcctttagaacatctccccttagaacatctccaccaatcaattttgctgacaaatgctagctcgttcaagctcgtgaggtagctcttgagcttagctcgagcagcttgttaacagaccgagctaagatgcaagcttagctcatgaaagaatcgaaacaatctcagatgagccaagctgactacgagtcgagcaagccaatgagccatgagtattttctatacccctaattgttagctaagggagagtagagaggatttcctggtttgataggaagtatagagggcatgtattagaagtggggggaactgtctcattggatggagagg

SEQ ID NO: 57540 - DNA, 452 bp, Zea Mays
tgggtatatatatagctactttattatgtagaataaaagatgtatccaaagcatggataggtttgggtagggtaaggaaggactccatcctagattgtggatcttgactcatcttggtgatcccgcttgatccttgaagacttgagttggtgcttatcctttcttgatgaggttgatcatcttcagtctccaatcttggtgtctccatctgagctagggagatatagttaagatagttggagtctatgggggatacattgtttttaatcaataggttcacatagatggattatgtaacttattgggagtgtatggctaagttgatctacggcactaacttaggcttaagtgacttaggtgtatggttttatccttcgtactagcattaagtaactcacacttagattagatcatattggattagatcagatctcaattagattggatatgat

SEQ ID NO: 57541 - DNA, 434 bp, Zea Mays
gtgaacacactatcatgaaaggggtccttatatggcacaaaggtaatggataactgtcataagtgatgtacctttgcgttttaccttttcaaggggtttccagacttgtgttggatttagaattcatttgcaagctcttgttggcataattgtgacataggtcaaagatatcaaatgaagattgtcatactaactgaaagatgtcacctagcattttcttatcacaacaagaggcaacatgaaaattgcacaagtatggattatgcaactagtgatcatgtatgaaaaatatcaattgaaaaacaccaattgatacaatttgatagataaatagatcactaatagcatattacactaagttctcctcaagttttagtgcacacctatatgaattcaattgatatctgttgagagtacttatttgcaacttaaag

SEQ ID NO: 57542 - DNA, 571 bp, Zea Mays
ggaagttccggtggatccccctcacattcgagtggagcatggagtcatcctggaagacagctcggaggaacttctgccgacgcccaccccattggcagagtcactggccttcgcagctaggtcatcaacatcggcaccgcctgcaccaaccgttcaagctcctgcacccagaggcgacgacccagacgactctgggacgacgatgatgaggatgacgacgacaacaaggacgaagaggaacaagtcaatgaggaagccaactatgcccagcaggactacttcatggggtttggtcctgtcatcgaacattacacatcaatgttcgagacgggcacttcccgaacctgctacaaaacgtgctgcacgcgttgggaacctacgtccgacccttgtacgagacaaggcgagtgagcaagcctccccagacttgctactacatcactcacattcacgtcagggtgatggatgctggggatagagggttcaaaactctatcagctcatgagtccctgacaccgctatccacctacgctgcttcggtcagcgatgctgccagacagactctatggtc

SEQ ID NO: 57543 - DNA, 530 bp, Zea Mays
cttaactataataggaggttataattctcaaaaaggtatgatagaagtttgtggtggttagcatttgaaatgagtcttattttagcattagtggcataaagcccagttaggtccaaataccatataacaactcaatgttgtttcatttaaccattcatctattcactaaggagtttagaccgcttgtaattgtgagcacgcctattataataatttatacactctatatagattgtacatctttgtccacatatgtgattctgattgccatttatagatagcctcaaactacactttcaaggtgcatgatagggtttcactataaagtctttcaaaagtttgtcaaacaagttagtagcgactaggtttcagtgtcgtacacatataggatcccccttccaatatggcacattccatcccgtctatacacttaaagctagaggtagtcatatatccaactcagtcaaaccccttgtacactttttaggttttcatagttaactaaagacggagcacaatatcacttctag

SEQ ID NO: 57544 - DNA, 363 bp, Zea Mays
tcgttatagtttgtcattctggcacaatggggatattttgccagtaacacctaaaccttataggtttatgccatcgtggctttagaggataccgtaattccacatctagtggaaaataccatgagtaaagatcgtggaatgcacatgtgcttattcggtgaacttcaagttctttggtacctcgtcttataccttttcgggtctgtatgggtctttatccctttatagggattatcaaactttggtgttcaacacaaactttatttcttctggaaaagttccatcaaggaactataatctcatctaggagatattctctctacacaggagagtgttcattcatcaggaatgtattattcagta

SEQ ID NO: 57545 - DNA, 448 bp, Zea Mays
cgcttatgttgggtaactagctagtctgactgtgtattggttatagctgcttagaatgattgatttcgtgtgttggtgtctcctgcagaacgaaatatgtgcataattaagaattttctaggatgataaagcagtgatgggtttgattgattcactttagggcatgtttgatacatagctagttactagttggggctaaatattagtccaaattagctatgttggcttgctagttggttaacaactagttgaagacttgtctaaaaaattagccctcgtgtttagatgcacgatagctaatttgattgccaagctattgattagcccttgtatccaaacaggcccatagtttctagtattagtgttgtgtgcttcgctttgatcattatgttaatttatgggatttcaggaagatactaaactcccaccgattgacatgtattccata

SEQ ID NO: 57546 - DNA, 362 bp, Zea Mays
ctgggctccccgtgggcctaattcccagagagatcaaccgagtccaaaatccatatgacaacctttaagcttcagcccttgccttgagcccttgacccatatgacaattaacaaggccagatccaaggccgcgctgcggtgctccacagtccacacccgatctcacgaactccgctcttcagcatccgcatgtagcccctcattatttgaccccaccatttcgcgttgttcgcttcagattaaagtcagttattggaattgttgtagctgtaatttatattgacaaaaatattgttatagaagcagtagaagacgatatggattaaatccaaacgaatatgcacaatatgacagttgttgcg

SEQ ID NO: 57547 - DNA, 353 bp, Zea Mays
ggatggcagataccagacgatgggtcctatgggtgtgctactaaaacttcaaagcctaagctctgtgcaggtccaggtcccagtcctggaccgaaccaccagttttctctttggtatactggtatccagtctcgacacgtcgagcctacctaccaggggccaagtaccagagagaagttgatagtgctacacatcataaaggcaaataacatacagataagttccagtttcaactccattaatggttcttaaagtatattacacaagaacaaaagttgttacaaccgctacccagcggagccctagatttgtttctacaggtcgtcagcaggatcgcgctggaagcgctcggc

SEQ ID NO: 57548 - DNA, 1966 bp, Zea Mays
ctccagtgcctgccaagcgtgtgaatcgccatcacgtggatctgcttccgcatgaactttctccagaaaacgccatgatgtcaccacggcacgaccactgtaagttatgtccttctaacttcatttatagcgctgtcaatcagccatgacccatgaatccatgaactgaaactccttccggaaagctcggttgggttgctgaagaagcaaacatcatgttttgactctttgcttcctaacaaaacaaacgaacaccgatccaatcttcctagtttcttgtgtaaggtctcttgggtcaactgcactgaagtttgccaaagactttgcctgacttcctagctcttgacaaacaaaactaccatgctctagcatcagcacgtgcaccacacacattttttttgttgaaaaggaaatcttcctcgtatttcacatcattaaggaagtttattacttcgagtccaagttaattgacctcgctaagagaagattcaagcctttgctgggggttaaagacccactaatggagttcctaaagctgagcctggcaagagccaggaagcaagcagccatgtgacaagaggagaaaaaaaagaggagagattctaccattactttccatgacacgcaagcttgtagtaactgaatgacacattgacactgatgatggtgcatgacagtgtgagattggtgtggtacagaactacagacagtgacatgtccagtcctacggcaaaaaaaaaaaaaaaaacagacccggctggagtgttggactcgaactcctttgattaggtggagactggagacattatgactagatttgggcgttggttatctcactactaatttcatgcatgagtgcaagtgtcagcttgtcccataattaagacctggaagcttgttcaatttattatgctaaacaagttggctttttgtgaggtccatgctttcttcatctgattatgggaccctctgggcgtacagttttgcagtactgcctcttcactggccatcttaatcaaataatcaaaaggccaatatcaactgctataaaatccaatgctcaatgatcttacgagcaatctgagacgcatacatacgcggttcgagttttcacacattctgaaatacgatcgagtactgctctagttggcaaacagacaaaaaccctgattgattcaacaagtctgcagcgaagccaagaagcgtgttgctagaggcatgactgcgatatggaacagcagatttgaaaccagtgaacactgacgctttggagagccagccatgtcaaaatctgttgcccccccttttttgatctgtacatctcttcaaccacccaaagatgagggataacgtgcagctttcgagcactgtagctcgacagtggggcttggttctctaggcattgcatgttgatgtgaaagagatacggacagacagacaggcagacatggagcatgtaatcaaacgaaccatctggagaggcggcgttcgtactctataagaaaatcagtatttgcaagcagtgaatcagttaaaatcatattggttttttccttgattcgagagaaagggatcgccacaggaggtctgaaacagaaccggcgacccaaggatggagcaacgcattgacagtctgacagtgccgcttcggtcctttcagggcaatggtggtcacagtcacgtccgatatatggatttgtacccagagaagcttcaagcactccaagaaaaaaaaagcttggattgttgagcaaacacagccaagtttacacgcacgcaacgtaacctccgtttccaggtcgcgaagagcgacccgatgtcgggaatgcgctagctttattgctgcaaatgccacgaacagcctctttattttattattgttctcaagaaggtttaaagcgttcttgtgagcaaggttattacgtaacttttgttgtgcatccagtcacaggccatgatcttcacc

SEQ ID NO: 57549 - DNA, 523 bp, Zea Mays
tagcctaaaaattattctataagctcatgaattattgactaactagcatatagcttgtgctaacgctataatctcatgaaggagagaggaggggttggcaatgatggtggcgcaagtgaggaggaggaggtagagggggacacgggggcgacaggggagggagaggagaatgagggaggatccaaataatattgtccatttaattttaaatgagtgaaaggggttatccagcgatctaaatcgttgtttttgatggtgtgttaaatcggggtgtgatttgtttggtgcatttagtggaggttatgggtatgatgatgatttggttgggttggttttgcaaagtttaaattagtagattatatagtggtatagatatagcaaagaggattaacaaaaaatccatatgatttgagatgcatattttcctaagttgtatggtaggttgactaaagtcttaatatgatccaaatggcttagttaagcaggaatgttggcttacagaatattttaaaaggaacacaac

SEQ ID NO: 57550 - DNA, 480 bp, Zea Mays
tcatcttcatcatttcctccatataccaaggaccctcgggggtattttaggtcctttgcataatgttgtacttcagcaatttgctcttccgatagttgtttccctgaagcatgtcaaacaatatattctaaatcaccttgagaagatgcttcgggtataggtgatgttggcttttccgaaagactttcctttgccatctctactggcttagttcccgaaggtcctgcttcaacgtgaataggagaagcgcttgcagcagtcacttctcttagatcctcaattttgtccttggaagcttcaatagtaacatgagttggcctcttcgtagatttcaaaacaacatccaaaacactggccaccctccttttcctaggagtcgttgttgtagcagttgttagcttcggcaaccccatcgtggttgggggacttagtagtttcggatgctcttctacctttgagctctttgcttctatctcctct

SEQ ID NO: 57551 - DNA, 351 bp, Zea Mays
agatgggttcaatccctatagacatatggctgatccatacacatgttggcccatgttcattatcccgtcaatctgccccccgacatatgctttcaaagacagaacatattcttttcattgataattcctaggcacccagggaataaaatggacatgtatgtggagcctgtgattgatgaattggtccattcttgggaggaaggggtatggacatacgaacgagcttcgaagacaaacttcaaaatgcatgtttggtacgagtactccatgcatgattacccgatgtatgggctattttgcacctggtgtgttcacggtaagttcccatgcgcagtttgcaaggaagctctt

SEQ ID NO: 57552 - DNA, 549 bp, Zea Mays
taagtaaacaaacgttccatgcgggctcgcagttacagttaagagagaaagagaacaagacagtcgagaaacggtcacgttacatgattataaattaaccactcgcttaatagaaggaaattaatgaagacactatgtttagcgtaaagtaaagtcatgtttcatgtctaatcattataagcagatgaagataaataaaaaggattgtcgcgcggcgagacgcgcgacatagcactctaaaacgaattaagaaattaacgactcgtcgcgcgaccgagcacgcagcgagacacttcgcattaattataaagagacgttaagcgtcgcgcgacgaaacgcacgacagcatacgtcaactagactgagtctaaagtggaacgtcgcgtgaatacacgcgcgacgttgcaccttaaacaacctgaaattaaaaaggatcgtcacgcgacgaagcgcacgacacaacacataaatagaatctgaaattagacaaatccgtcgcgcgacgaagcgcgcgacgcagcacgctaactaacggagtttgacattgac

SEQ ID NO: 57553 - DNA, 474 bp, Zea Mays
ctcgaaacgccgacaaataaattccagagaagtagttgtcggtcggccactgacgcatgaggtcggatgttgcctggcccggcacgtcagtgtccagaagttaatgtagaggatcggcttcccgtccttaagctcatatgtgtgtttatggaatcgtcaaggcagatcaagggtgtggtatcttagccgatgtcgacgaggcatctaggacaacaggggtggcgacggcacggcgcaggcaagtgcctcgcccacatagacgtggcatgagtgatttcatattatattgatctcatatgaaaagcttgttatgtcaaaaataatgatacgaaagcaatgagttggatacttaactagtaaggtgcccatgtcgtcgctccctctccaagcaaagcgaagcaaaggcattatggtacatcacgtgtggtctagcccaccggcggttgcgacagcggtggcatggagcccgagctc

SEQ ID NO: 57554 - DNA, 985 bp, Zea Mays
tccagatccagcaccaccaagttgacgaacttgtccatagggatgccgctgacagcacctgacacagccagggaacgtgtctgagatagatcaatttgttgaagcagagatgggagatttgggtcaggatggtgaaggattagcctccgctgtgtcctgttgttgttagctcctgctcctgctagtaataagtacttcttgaggctactggcggtgaaatagaaacccatctctgcagatttggaggcaaggaactgctgcataaaatgattgacgtgccactgacagtggcagccctcttcttcatccggacagtgcctacagtcagcaccagcaacacgcgtgatgacattcctgtccgccagatgcggaatagtaaagcgcatcgccacttcattgtcttcgttccatctgaagaagaagaaacggtcattgtcgaacttgtaaccagaaggaaacatggtcatgcataaagattgtagcttggactcataaggaaggtcatcataagcaagggacaatgctcgttcgatacatttcggtagtcgttgggggccttgctccagctcgctgctgtaaactgcaagggtcctctgatcctcggcgtccttctgctgcaataattgttctttaaacaagtccgccataccgattatgaacaatggtacaccttcacatctgatcagtatttcatcacacaatggctgctggcaatcataatcatccacagacgaaggaccaaaggcgcttgccagaagcagcctttccgagtctgtccgattcaaaggcttcatctgatgcacaagcccatcatcagaatcaaagcagcatacccatgacaaacttataacgcgtgttgtgatcaatattctgctatcaagattattgttaggaaatgcatccttgatcttctcccaatctgatgtgtcccatatatcgtcaataatgatgaagtacctagcatatataacgtgcatgcagtgtg

SEQ ID NO: 57555 - DNA, 402 bp, Zea Mays
tgtggaattagaagggaagaagagaggaagttaacactgcagtagactgatcggattctaggtattgcaaaatatctgaagaatattctgacccactacttttctagcagattctgggtagctcgtagataaaactaacttgggattagaaaggagaatatttggagtacatttttactgccctgagaagagaaaggagacaagtttggagcctgttcctgggagatgactcagctgctggtctgctttgttgtcaacaactagagccctcattcttttaccccccgtgtccagcatgcaaaggcttacttcaacttgttcctgtgcttggggctggtgtgggttatggtgaaggtgtccacgtgcatatattcatgcactagctgggcctcaagtccaccc

SEQ ID NO: 57556 - DNA, 540 bp, Zea Mays
gtgagcgtccgcgactgcacctcgatggacttggactgtgcctctagcgcatcagtgatgcttggatccgacgcacccgccatcttcgctcgtcgagtgtagtagcacggcgccgctcagatcaggaactgaactgacctttgataccacttgtcacgcaccttcgtcgtgaatgtcaccggatatgaggaagagagtaggagaggtccgaggaagaagaacggaagaaatggacgaatattattctgttattcgacaactctattaccagcatcccatcaagtatttgtacaacaatatatttgacacggcccacggcccattagtcaagtcatccattcggctcctgtcacccgcgtattaggcctacgcacgcggcggcccatccttccaacagcagcttcattcgttcctgcgcttgccgattggtgttcagagtgtactgaagccgatggtatgctgacacttggcttctctataaatagctctgaccctagcttttctaaatgagtagctcctcggtagaagctagtgttttct

SEQ ID NO: 57557 - DNA, 626 bp, Zea Mays
tactggccgatcaacaacttgccatgtaaatttaggagaaaatcaatgacaaacttggtctgtcaggctaactgaagaacaatctgatggtacagtgcactaaatatccctgggttcagtccccctcgccgccggtgagccgcgcgtctagatttgcgtcggtcgacgtgattcgtgctcggtgtcattggataacgttgtgggggtgtgaaatatcacccagtggatgaactccggccattgtttactctggtcgtcgtgtccgctctaccccgatcgcctttgatcaatcctcaccggagttagacacttcatggtcttgtgccacgtgcctcagcactttaaccatgccaccgtgactcatactgacctatccagagatcgccggtgaggttgccatggttacagccactaatctcgtgcaccagtaactcctttcttctttgaccgccagcacgccaatacaaaattggagaccaccgctcaagcacactataaattgagcacaccgtcgagtccgtagggtaatcacgcaccaagccaccaagtcgtgcctccaattgttcaccagagctttccaatttctcatttcccccaaatcgctcaagaacaccgctcggtttgac

SEQ ID NO: 57558 - DNA, 841 bp, Zea Mays
ggtgagtcatgactgcctgtcccgcccaaggatggcctcgggcgagttgtgactgcctctcccatccgaggttggccttgggcgactcgtgactgcctattctgcccgaggttgaccttaggcgagtcgtgactgcgtctcctgcccaaggttggccttgggcgagtcatgactgtttctcgcccaaacatggcctcaggtgagtcgtgactgccaatctcatctgaggttggcctcgagcaagtcgtgattgcatgtcccactcgaggttggcctcggggcgagtggtgattgcatctcccacctgatgttggcctccagtgagtcgtgattgcgtctcctgcccggggttggcatcggacgagttgtgactgtgtctcccacctgaggttggcctcaggagagtggtgactgcatctcccgcccgaggatgcccttgggcgagtcgtgtctgtgcttgtagttggttttaccttttttttgcctcgtttgtcatgaggcatgtgtggtgcaaggagtaagtgcatgtgtcctgtcatactatgatccacttggaataacatgttccataaaatcttgggagtcatgtgaaaccgttaatagaagggtagtgtattgaaaggattgtgattgtaaataaacgacatgcgagaataattatatttaactaatttctttttatgtcatcacttggtgtagacgacctcatcctcactacttgatcttgacatggaggtgtcatcgttggagattatgatcttatttttgggcttccttgacccttattgtgggtcttatttgaacccgagtggacgaattctttttccttctccttgtcctc

SEQ ID NO: 57559 - DNA, 415 bp, Zea Mays
acgatatgattttttctacctcgtaaagttataatcagtgtgatagatccttttatatccctttatgatgtacaccggtaaggcaattaagtaaaacgtgtcaagtagtaaatatatataagttggcaactcacgagatgcatggcaggagtcctgacccatcacgggctatagctatagctcttgttacgtgaattcagcatgattgctcaacttgattctgtatttccacatggggaacaattggcatatctcccgctaataactggcgcgttcagatacaaccatgcaatgaccagatcgatcgaatcacacacacacatgcattggagcattcatgtgcgaatgccgccaagcacgaaagcatctccctccacaccatccatcagctataaaaaccaagccaaacaccctg

SEQ ID NO: 57560 - DNA, 693 bp, Zea Mays
ttgtgatcaaacaaagtgtatgcatatgatgggaaaaatctaagggagttttggaattagaggatgaaaagaggggaggggtagattagggtttcaaacctaggttaggattttgggatgttacaaacctaccccacttaaaggaatctcgccctcgagattcagacagggctcgagaaaaggtaaggatattccttcctcagagagtcctcactttcctaggtggcttcctcttctccatctctgctccactgcaccttacagagtctcacttccaagttgcgcgtccttctgactgctgagtcgagaatcttcactggcttttcccggtattggagatccttttgaatctgaattgcatctgcctcgatgtggttttctggtacttttaggcatttgcggagctgagacacatggaacacattgtgaatacctgacatggattctggtagctcaagacggtatgctgcgggtcctactcgggcaatgacggggtagggaccgacgaaacgtggtgctagctttcctttcatttggaaccttttgacaccacacatcggggagaccttgagataaacgaaatctccttcctcgaatctgagttctcttcgtctattgtctgcgtaactcttctgtcgactctgagcttcaagtaacctcctgcggatcaaggtaactttctcttcggcttct

SEQ ID NO: 57561 - DNA, 302 bp, Zea Mays
gagctgaagtcggtatgccactggtccacattgttcaatcaccaggaatggaccaatgtacctgggtgcaagcttccctttaaccccgaaacgcgatacacccttcattggtgagacctttaagtagacgtagtctcctttcaggaaatataggggcattcgccgtgtgtctacataactcttctgacgagcttgtgctttcttcagattatgaataattttctgaactttatcctcggcttctttcaccagatcaggtctaaagaagcacctttctccaggttcagaccaatttagcggag

SEQ ID NO: 57562 - DNA, 957 bp, Zea Mays
ttgcattgtcatgtgaaccggaccttcgggtttgaatattttcagcatgtcttgtcgatggggtttgatatcacactatcgaccgtgaaagaaatagaagaacacaaaatagtggagtcatgtgtgggggttgccatggcgacgaaaatatcgaattttatggtcaattgaaagaaataattgagttgcgttataactcagatatgtccaaatgtcgcacagtggttctatttcgttgtgattggtttgacacttatagcaagaaggttagaatgaaagatgatggatattttagaagcatcaaccatggtagttgttggtacaaggatgatccttttattctatcaacataggcaacaaaagtattttacttggatgacactaaacactgtgaaagctggagaattgttcaaaagtttacacataggcacttatggaatgtcactgaaaatgaaaatgaggaaacacccacgggcttgggactatcataccaagatgaaacatgtgcaggttttcatgtacatgtgaatgaaggaaatttgaatgatgaagtactagatagtgaagattgtcaccacgtagatacaagtttagttgacgagtttcgtaaaccaaggcaagacaatgtgcaaggagatgagacaagcgatgatgaagatgaaactatatggcaatatgttagtgatgatgaaagtccaacaattcttgtcgaggatgatgatgatgatagcgatgccgagtaaagactagagtaagttgtctctagttgaatatattttttcacctttcgcatgctatatttatcctatacataccttctaaaattatgctttttgattgtctttattgtagaagttgattgtggaagcattggtgacctatatggatcttggccatgaaaatggtgacccacatggatattgagtcactctgataggatggtggcaattagtttgt

SEQ ID NO: 57563 - DNA, 560 bp, Zea Mays
gttggtagtcgagcatacagaagaagggcatgcatatccagtacaacatctggtttactttatcagtgaagtcctcggtccctcgaagataaggtatcctcaagttcagaagctattatacgaagtacttctaactgctcgtaaactctgacactactttgacgaccacaaagtcatagtagtcatgggattcccaataggagatatactccacaagaaggaagctataggaagaacagccaaatgggtatgtgaactcatagctcatgatatagaattccgacctcgtactgcaataaagactcaagcactggtcgatttcatatcagaatggactgagcaccagtccccagaaaacccagaagctattgaagtctagaaaatgtactttgacgactcgttaaggttgcaaggggcaggagtagggatccctttcattacccttggaggtgaccaactcaagtacgcgcttcagctcctgtttccagcatccaacaatgtcgtggagtacgaggacatagttcacgggctaagcatcgccatttcactaggcatcaaaa

SEQ ID NO: 57564 - DNA, 283 bp, Zea Mays
cgaggagttaccaggtatgccacctgaaaggaaggttgaatttgccatagagcttattccaggcaccgcccctatttccaagagagcctatcgagtgtccggaccagagttggtggaactcaagaagcaaattgatgagttgtcagagaaaggttatatcagaccgagtacctcaccttgggcagccccagtgttgtttgtggagaagaaggatggcacgaagaggatgtgcatcgattatcgagctttgaatgaagttactatcaagaacaagtaccccttg

SEQ ID NO: 57565 - DNA, 626 bp, Zea Mays
tttaccttgctgaggaacttctgcatttcaagcttacaggtaggaggtctcaaattccgaatggttttaattcggtcagggtctatctcgataccatgttcatgaatgataaatcctaagaacttaccagcggacactccaaaagcacatttacgtgggttcacttttagaccataccgacgcattttatcaaaggctttgcacaaatcagctatatgagaactaaactcaaccgatttgactacaataccatcaatgtagacttccacattgtttcccaaaagctcgtgaaagatcaaattcatagccctctgataagtagcgccagcatttttcggaccaaatgtcatgacaacccacgcaaataaaccaatgaagcctgaacatataaatgttgttttagacgcatctccttcagccatgaaaatctgattatatccggcagtcgcattattaatcaacgtgtcggctatcggcataagatatttatccttaggagttgttctatttaaattgcggaaatcaatgcatactctaagcttacctgattcttttttccaccggcacaatatagaagacccactttgcgtacctgcaaggtctaataaaattggcttctagcaacc

SEQ ID NO: 57566 - DNA, 728 bp, Zea Mays
tatcttcatcagtccagcaggaatgtggtagtttctgaactgtgtagtgaactctgtgtaacaacccaggtgttactcaggattttccctccacacccacatttgtgaacattatcacatgtgaattaagttgagcaaaagacaccaaacttgaagagatagaaactaaatcaagtcttttcatcccaagaatcataccctaaccacatcatgcaccccaaagtgaggaaaattctcaaaccctaaaactaccctattaagcctttttaagtaccaccaagaaatttagtgaaaaggctatgaaaaacataaaatcatgatgtggacgaattaacaaagttgtagtacactaaataagctacaaaatatagtaaggaagtttaatcaaaagggttttgcaaaattctcaaaacagccacttaagtggagacttcaaatgaaaatcagaaattcaaaattatgaaatctgaccttctcatcaaaatcaaccgtgttcacctagttccaaggctcaaatatgcgaggtccaaataacaaattggacacaaattaccataggcacaccgtggcaaaatttggagacaaaccccagccgtttgacatgatcttagcatggatttgcctcgggacgtagcagccagacactcaaaacttggcgacgcgacaactctctgtacacggccgaaaacctctcggctcccacacaaaaacgacaaagcataccccgg

SEQ ID NO: 57567 - DNA, 693 bp, Zea Mays
ggagtttttacattaattaattatttcctgtcgcaaataattagtagaaaaatacatgcttaaatatgggaaattgccttttacacatgatgtgtttgttttctgctttttattgtgtttgttttctgctttttatttcctgtagtagatacttagcagaaaattaaaatacatatgaaggttgtattgcgcatacttaaatcgctctaaatatttatattatgttgatcttttggactcacgtcgagcgattaaattgtatagtgggtactcggacacgtcgatcaggttgcgttgttaatcggctgaattatgacattagctgaatattgactgcgccctggcaatacgatgcagtatttgtgtcgtacgaacttggctgcgtcatgtgattgctatggcgcgctctcgcttaatcggatcgctcccgttgagtcggaccgccatcactgagtcgtgtatttttcgcatgccctgtaggcactgtctgtctgcattgatcattgagccacaattgcgcctgttgcgcacgttgcgtggacttatcgtgtaccccgattaccgagccataattgtgcatgttgcacttattacgaaggcttgttgtgttgttgtggccctgatggccgcacacgcgttgacgccagatacgctagagcttgtactcgcgtggattgtggtgggttgttcaag

SEQ ID NO: 57568 - DNA, 704 bp, Zea Mays
ctcaatccaatgcaaatgtagaattgaactctgggtagcgggtagcactattagcttatgatgatgccttttacatggatggttttccttttgtggatcttcattctggactgaaatcagaaagataatgagttagcctttagcgcccagcatcaaattgggttacttccatgttagttctatgacagtcattttatttcctggagaggtagcttagcccaacgatgcattttatgaccatttattgttacgcagttcaggaaaatggtgcacttcattttggtgtcatagccgcaaactcacactgctgaattttgtgtgtaccatttgtggtcgattagctaagagaaagatagtcaagtcaaattgccataggaatggcctaatgcaagcaataacgaatgtgtatcatctttgttagaccttatggtcttcagctgatgttctgtgctgtggtgcattaaaagttgatgtaaccgatttgaggccaagttgcttccactctgaggttacatgtgctgctgtagtgctatatgcgtgggttgtatgagaaggtatagatgtcatgccttactttaagttacatggatgttaaatatcagtagttcagaacatgggagggcctaatgttgtgtctttgtcctaaaaatccactggatcgataaagtgtattgtatgttcaaatagtccacactcaataattt

SEQ ID NO: 57569 - DNA, 473 bp, Zea Mays
ctttttaggtatttatattatcagatatttttaggtattatattatactaaactataattttagacattaattttgttcaccctttgcaattatatgtttttgatgtgatcacattctcaaattgttggttttgatgagcaagttttcaacctgaaacaatagcatgagagagcctctatgcctctgggtttcgagatgacccatcatagaatgaagatagagcttcttctagattggtgtctggtactcaaatgccacccacggatacacatgagtcccatgcaaagaaagaatcccctgttgtgctgattgatgctccagaggtgcctaaggcagagaaacaagtggctgctcgacaggtaaatgttttaccagaataggtctagtgttaagtcattcatgttatcaaagtttttgcttatatctaatcctttttctagaatgttgtagagaacataaatgctatcccgcg

SEQ ID NO: 57570 - DNA, 850 bp, Zea Mays
aaattccacaaaaacacttttattttcagggggattttaagtttccaaatcatcttgttccgattgttattgggattatacatcaacaaatggtacatagattggacagaaaaaattccattcttatgaccatcccaaacaaatttgtctctagctgggctgaatctaaccgtcgttagcaagtgtaacaattttttccactccactaatttacttcccgtaattgttcggcgaaaagataaattaagattcgtgtctagacaaacttctgcaaccaaggccgatttaatgcgcactgtattaaaaaggttcgagaattgctcacaaaagggacgactggttagccatttatcctgccaaaatctggtgttttgaccatcccccacttgaaagtcacccaatctaagaaactgatccttgatgttcattagatctgaccagaagtgtgaatcacctgatcttctagatatttgagtaagggatttatctcctaggtatttatttttgagtaactgttgccacatcccatcctcattaagtaatttgtagggctatttgctgagtaagcaaatattttttatagctagattagagacgcctaaacctcccaatgcttttggttgacagacaatatgccacctagccaacctatatttccttttactgcttcctccctgccaaaagaatctggatcggatagcatccagcttcttcaagatgcccactggtatctcaaagaacgacatcatgaacgtaggtagactacttaacacagaattaagcaatatcaaccgtccacctgaagataaaaatttggccttccatgtactaagcctcttttcaaaccgat

SEQ ID NO: 57571 - DNA, 444 bp, Zea Mays
ggtggaagccataaaaaagtaaagctttatttattgtgcctgatagggtggccacagagaataagatatatataaatgcccgaggatgggcacgggcacgggaagcccacctgctcgccaccatcccatgttattgtcatcgtcgccgccaagcgccactagcgacatcgcatcctacgctacccccatcgccatgtgttgtcgccactatcgaccaagcccacgtgttgagccctcacgcctcttgctctcctcacctcctcacccaccgccctacatcaccctacactatcacggtaccccgttagtcctcgtagatgtgtagctgcatgccctcgtcgctcatccactagtgctgggtgcccatgccccccaccgccctatcccgcaccaccgcacccaccctcgatcgcgcccgcccaaggctgcaccactgcatccctg

SEQ ID NO: 57572 - DNA, 1004 bp, Zea Mays
ccgatctggaggtggaggaaggacatggaggagaataaagagaaaggacagggtttcctatgcaaatgtacaagaaagaaagaaagtataaaactggctggggtgatttggaaatagtttagggttcccaatgcaaaacggccttctagccttcaggctaactccaatgaagcacctaaattgacactcaaactcaaaataggtactcggtgagcactgtagcgacacctatacagctacctctccagcaggtgacccaaaggcgatacccattttggatgcaaggagagagggaacctaaatatgggttttctctttccagaacccattctgtgtggtttgaattagagaagagagagaaagcggccctaggttggtgggatggaaagaaagaaaaaagtattttattgatactggtgtccagatgggtattgttgttggagataatggtagacaaatagaagatgcatttatgagtgggtaggcaaaaatgaaatgggtctccaaaaatgggtggtattgttggagttagacttaggagctagatactggaaatgcttagagaaagccaacaaataatctcgctactttttagcgaattggaaaactcattgacctagcaattcagtttttgggaactatttgagatgatctaagaaagattaagatcatatgttctgtttatctctttttttaataattggagttcttagttcgattggtatgaaaccattgcagcacttaatttctggcccagaaattttgcctattcaacagcaacctgagcattcaactctaaatctctcttatctctgtccaaacctgtccccctgaaagcacaacacagtatgcaattacataataaactctatggtgcagaacattatacaatcactagttcactgcctggctgtggattcaaactcagtccctacatttgaacagtttgctaagaaaagtgtgaggcattcaattttcgtaatgctttaacatacacaagtcct

SEQ ID NO: 57573 - DNA, 1030 bp, Zea Mays
ctcccaaggttctcagttccgctctgaaaaccagagtggtaacaacaactaccaagcacaatgctctggacaccaaggtcagaggagcaaccaatatcagaaccaacagaggaacaacattcagaccggtcaaaggtctagtggtcaacaacagaatggtcaacgaagcgccgtgaacacaccggccaagaacaacagcatcactactccagtccaacctaatggctgcttcaagtgtggcaaacttggccactatgctaacaactgcccaaggcgcaacaaacagacaccccagaagaacagaaaccagaggactgaccagaacacaccttctcgtggatctgcacaaaacaagactccgcagaaccagagtaggggaagagtcaatcatgtgacagcagaatcagttcctgaggatgccgacgtggtgtatggtatgtttcttattaactccatacctgcatcagttttatttgattctggagcatctcactccttcgtaacaaagtcatttgtggaaaaacataatataccaaatatcccttgaagaagaaactactaattcgatcaccaggaggtgaacttagagccactcactcatgccctcaaactaagattgaaaatagaggcttaagctttctagtagagctgataattttgaaatcgagtggaattgatatgatacatggaatagactacttgaccaagtatgatggagtaatatcctatgccaaaaggatggttacattaaccaatccgcaaggagaaagaattgaagtcaatgtcagtatgccagcaacagtagaggcaatggtaaatcagttggaagagaaatctttggagcacatcagaatagtgtgtgaatacccagacgaatttccaaaagaattactaggtatgccacctgatcgtgatatagagttttctattgaactattacccggaaccacaccaatttcaaaaagagcttaccgaatggatgtcaaagatttaattgaactgaagaaacaaatagaagaattactagaaa

SEQ ID NO: 57574 - DNA, 710 bp, Zea Mays
gcgctagataatttatctgtgttccaaatatatcttcttcaataggatgtataggaagtctggtatgctcatctatttttccatcgagaggtgattcattatcaactgttgaatgcttgtccaattggctatcatcaacgggtacttcatttgtctcgtctaaagaatccatcaaggtgaaacagtcctacaaatattgcaaataaaatatatctaaatatactgatccaatggcacgatcaagatagaaggaaatatactccaatgagcatgtggtggaggacgcacaaaaattaaggtatgacagattttatatagaactatgtgtacaagtccatatacgtgtatgtatacacacacattttagttgacaacaaacaatttaatataaagcaataacttaagtattttacagcaaacaaatgtaaaataaggacaaagcttctcaaataaacgtattcaatcacaagatttagttgtattgaatgcatggaacccatcaaatacatgtttttaatgttttctgctcttgaacacaataatgttttgtacatgactgacttggtaatttcctttttaggcatctgtttttagatcaagcaccgatgcttgtgtggccttccttgagaacaaggataaagtatcttatgctagggtatcattcaatggaatgcattatgatctacctccctggtccataagtattctcc

SEQ ID NO: 57575 - DNA, 1119 bp, Zea Mays
cagtggcctccgacaccattctcgcgtatgcgtatcagtagcagagacagctaagtggacgatgcagagagagagctaatgccttctagaagacgcaaatgcgtgccggatctttattccatgttcctttttttttttttttttcagcagtagtacatgctaataaagtattgagtagacaaaagactcgtcatcacgtcgtcgtccacgtcggtagaattgcacatatagtatacctctgtatgtgtcttgagagaccagggagagagataccagcttgtacagatcgccagcgccaacactgctgatcctgtgctttcgttggtttgtgccggtgtacgtacgtgacttcacggatcatgatagattgatagctagctagggggagctagcttcgagtgtgtgccgcttaaatttgttcatatctttaagctgcagacgcgagctagcagggattcattcaatccagccgcagccgaatcgcacctgtatacgtccgccaatgcaatgcggtggctgctttgcaagcagggagcagtacttatcctttcgactgaagaaacagattgttaaagtgttgcgttccgagtttacagaaagacgagctccactgtgtccaaaaatggagtatctatctaacacccccggtagtaattacagtatcctgtagcaaatgggggaaaagggtacaagtcgagaaggcttgccttggtagtactagctatttatactgatagcggttcgtccagatatttgcagaaaatggattcacttgtgagctgtgacaggaaaaggggaaagcacaacatgaaccttatccgccgcatccagcatatctcgccgagatccagtttcggttcaggaaccaaacacgtctcccagtgactagcctatggtcagaaaaaagaatctcgaacgaagtgcctgctcttgaatcggaccagctttccatccgcgtgtgtgaagtgtgagaggatatgggcagcagccccaaaaacgttcggcctattaatcccttctacggctgaagaaggcccaataatacctttcgggtgaaagggagcccatcagcatgataagcatccttcccctcaagcaaagaaatttacattttttttc

SEQ ID NO: 57576 - DNA, 338 bp, Zea Mays
agggtgcagccggactaagcacaacaagtgcgcaaaaatccgaagtctatcgcgaagactatccgcgcagaagtcgcccaagggtgcagccggactaagcacaacaagtgcgcaaaaatccgaagtctatcgcgaagactatccgcgcagaagtcgcctaagggtgcagccagacttagcacaacaagtgcgcaaaaatccgaagtctatcgcgaagactatccgcgcagaagtcgcccaagggtgcaaccggactaagcacaacaagtgcgcaaaaatccgaagtctaccgcaaagactatccgcgcagaagtcgcctaagggtgcagccggactta

SEQ ID NO: 57577 - DNA, 728 bp, Zea Mays
ttgtgtgatgtattgcctgagggcttgtgttgtctagagtcacttgggtctaagtgagcctgtctgcatgtctccccttttatagttcaagggggcatgtacaaaggttctgagccccaacacgtgggcgcagagacaaatgcaaggatggaactactgcttgcccagcctgtgtaatctccgtgcgtcatgatatccgtagtacgttctgtattgatatcttgctgcagcgccctcggtaacgcacaagttatgatgggtgcgacgcatgccatggcgtaggtgtactgttggccaacgggaatagcctgacacgccgcctgcaggatgtcttgggcgccgcttgccagttgagtggacagggcgcattaaatgctgaaggggcacatcgcctgtcagtgaggtagtcagacggcgtgtcctttccacaataaatgcaggggcagcgtggcccagcggccttacgtcaggtccatcccgcatgcttacgtcatagtagtccgcttgactgtaccaggtatccgcctgaccagggaataggaacgttgcgtggataggttcgcaccaagctgggtctggacacatgtcatccccagacccctttcagggtagggtccgggtattccgggtcccaggatcccgggacccggcggtgattagtccggaccccactcagaagggtccgggactcatccggaggtccgcccgctacgtacgggggtccggtg

SEQ ID NO: 57578 - DNA, 621 bp, Zea Mays
cctgtgacagctagattatcgtggattctaaattctcgtaaaagtcttaataataaagtttacccaagtgtgctcatagactatgctaaactcatcggttaagttgttcccaacagaacatgtatatagtcgtgtaaaacactgttgtacactgttcacagtgcgaagtttaaaataggatatctctacctctactacatattaagtcaatagtgtagaccatcccatgcccccgcctcctacctcctcttgcgaaaccatctcggctctgcgcacgtcgctgagaaacccgcccctacgcccaccaaatccccgcgacgcactccgcaatgactcgctcgctcgcgatacccctctccccgcttacacacacaatcaacgcgtcgtctccctaaccaccgtctgacatgcgtcctgtttggtttagtttttttatgaggagtttttctaagaatctagttatagagagaatctggttatggatagaatttgagtatcgtaaagattacgtacggaggaaaataaaaaaaagtacataagatttatgatgtagaaagtgacgtttcctactattgcagcgactcgaccgattttatgttcatattgtttttatatggtttt

SEQ ID NO: 57579 - DNA, 538 bp, Zea Mays
ctcgtgcgccagtgacctctttcttctccgaccgccaccgcgccaacccaaattcacgcgccaccgcctccggagcctataaattgagcgtgccttcgggtccgtaaggtagtcaagcaccaagccaccaagccgtgcctccaattgctcactagagctcgccaatttcagatttccccaaatctgttttctgccaccgtgaaagaagcctcaccgtggctagctcatctcaggtccgctcatgccctctgctctttcgttttagtgtccttgtgtgtccctgatgcttcccgaccccgccaattaggctaggaccccttagatcgtcgggaacacgtcgtgttgtccattgtgcccgctgtcaccgtggacagagcgagatagagctctgctagtgagattaattgaggggaaactcttgttaggccttgaattaggtctcagccgaagtagagcaccggtcatcgagtgatccggacggtataagctcgccggagctcggttccccgccgtgcgatgtcgtggacttggcactacg

SEQ ID NO: 57580 - DNA, 688 bp, Zea Mays
gcgacgtggctgcgcggtcgtcgccgtggttgccgccgttcactcggttgtgccacgccttaggctgttttaccacgtcgtcttgagccgtggaagttaaccagtgatagtcgtacgcctttgtccagtgaatgccatggtagatcgccacggtgactcatcccctctcctcagccgccaacttctctcctcaaattcggagccaccattcatggataatataaattgagtgttcagcgtgctccattaggttgttacgtgcccagtgcatcgctcctcgcctccgatcatccaccgtagcgcctcaatttgggatttcccccaattcggttctccgcgccgccgtgagtcactgcgccatggaccgccgtctctaggtacgctctcatcctcaccctcgtttcagaacccatgcacgctaggaatgcttgtcggctcaaccaattgagctagaccgcgcttgatcaccgggaacgcctcggtttgtctttggtattcgtcgtcgtcgtgggcagacgaactccgggccggattcgtgcgattgatagagggattagggttgccaggggtaggattaggtgtcgaccgagttagggcatcggtcgttgcgcatcccgactggtacaagctcgccggagggcgcggtcatcgccgttcaccgtcggggacctgggtatgtgaagaaaga

SEQ ID NO: 57581 - DNA, 1248 bp, Zea Mays
ccctcgtgttgcgtccgcaccagatcgtcgatgccacgaatccgccaccaggggttgtgcggatttcgctagccgttccaacctccccttcgacaaactcggccgtagaactcggacccgttctggccgttgctcccaggcgaatcctgtaacaggaagcattgaaacaactgggttcttctccataacaaattcagctagcgtcgcaacaaagctaggtaccacgggtctccaacaccgcccaactgaaccctcaccagccgccgagaaccgcggtcttggccccgcgcaagctcggactctccctgccttatataatctgaccgctcccgcgacgtcatttatctcgattaacggtgccatcgcgactgcttttggccaacatcgccatttaagctcgtacaagtgtcctgggaggttcgccatggtgcatcggtgtcgtgcgtagtctctccgtactcggatttggtgcgggcgtaggacgattgctcgccggagtggaagctttgcagtcaagccgccattagccgtgaaaagccctccctccaccgattcactctatggtaagacctctaaatagctgtgacttgatcctaggattatgtagcacctgtccgggggaagatccgtgcactggaacgccaggatggcttgctgcgatgtgcggaccaccgtgggggcagagcgccgccgcgccctggtgtgtagtggggaggaactccggtgatctccataggtggagctcggtctcgccgccgctactgcctggagatgggctggtgagggtgttgtgggacgctggccgttggatctccagacggacgcgctagattcaattctgcattttaaagatccggagcgtcgatctcttgatggacggtcttgatgggatataacatatctcttcgactaaagtgatctggaccgtgtatccctaatccgacgtgtcaggttgcataccggttcacacgctgtgcgatctagtctgatccgtctgttttggatcggacggctcataatagatcttaccctttcggccatgccattatgcaaaagagacaccgaaaagcttgctattcaacccgccatccttttctattgaaactaaccacaagttggcccctggtttatacaaagtcacccctaggtttctaataaatagtagccgcggtccagttcactggtgaattgatttaattaaatacagaaatcatttttagtataaaaaatgtcttaatcttggaaaat

SEQ ID NO: 57582 - DNA, 372 bp, Zea Mays
gaaagggagaaatgaaaataaaaaaagagaataaattgctgcttgggccattccccctcccttctggcccattaaccatttaacccgcacgcaccagcccaactgcctactagcgtcgacatatcgggccctcacgccatcctcacaactgagtcgccagtgggagccttctgggaagctgacatgtggggccaactagtcagcctcatccatgtcgcgcatcgtgtgacgagtgggacctcattcctgttgttcttccccacgggcgtatctctgtccccctccgcaacaaccttccgtgaacgtcgccaacctctaccgacctcctcggtataagatcgagccggggcgccaggcttcccttgttcaccc

SEQ ID NO: 57583 - DNA, 941 bp, Zea Mays
atctgcccttgatgtcaagaatattccttcaaacgggttattatggtccaatccatgtgagaatataaatgacatttgcctatttgtagaggcttgggtcacctagtccttcgccaaggggctcccttcgtgtccttcatctagagtagtcgcattgctttgctttgttgtagcatgctctatcatcccttttcaactacataacacctctttattcttagccaagatgtctatccaacgaaaagagtgaatttcaacatgaagagttttggctgaggggtgacacctcacaggtagagagggccccaaagaaaggtctcatgtccaacaagtagagaaaccctagtttctttctcccctcatcatgaactcagccgcatccatcttctactttttttctcggttcactctatccacctcaatcgtctattcgtctctcttcgactcttccgataatggcagtgtgcatgtggtggtactccaagtgtgtcgctcatgacagcgcgcaggggtagctttcgacgacacatggaaaggggtatgtagggaacggagttggtgggcctccacaacaatctcatttggcatattagctcgttgggctattttattaattccttgaattttatagagacgagcatatgcccgtataggctaatccttatttataatgatacacgcatggaagcgaactctgtgtccctatccgcctccgcaaatgttatttgaccatctctgaagatgtttaatgtagcagtgtaaattcaaaacaaaaaaatgatggtcgaattggtcaacattatacgattcaaaacaaaaaacatgatgaatccaatctctacaaaatataatgggacaaaatatgtgttgtggatctcaactcgtcgattcctacattaaatatcgcaaacagtagatgcataggtttgtggaatcaatgt

SEQ ID NO: 57584 - DNA, 858 bp, Zea Mays
tgggccggggagagaggggggagaggtgcgggcgcgcgcgggttgggctggaattcggcccagccgagggagggggggaaatttttctttttctttttctaattctaatccctttcttctcctttttctatttttgtttcttttttattctttttctttggagaccaaaaatattttctaagtgatcttgagtgagaaacatagtctatgtgaggtgctctaattatttcaagtgtatgcacatgagaaggggttctaaggggagggttaagggggaaaggtaaaataagggggggattaggaggttagggcttcaaaccttaggtgggattttgggatgttacaaacctaccccacttaaaggaatctcgccctcgagatttaggctggatttgagaaaagataagggtattccctcctcaaggagtcctcactctcctaggtagcttcctcttctccttctctgctacactgaactttacagagcttcacttctgaggtgcgggtctttctgactgctgaatcaagaatcttcactggtttttcacggtactgaaggtctttctgaatttgtattgtctcttcttcgaggtgactttctggtgcttgcaggcatttgcggagctgggatacgtgaaacacattatggatgtcggacatggattccggtaattccagacggtatgctgcgggtcctacccgaccaatgatgggatagggacctacgaaacgcggggctagcttcccttttacttggaacctcctgacaccacgcattggagaaaccttgaggtagacaaagtctccttcctcaaatcggagttccctccgcctgttatctgcataactcttctgccg

SEQ ID NO: 57585 - DNA, 661 bp, Zea Mays
gaactgtccaaacataggttaaggttgtaaggcaattttttccaccatacagttgctaaaaagttggaaaataaagaattcaaaacaatagatcaccttttaaacctcaaatgacgtttctgtgatatttagggcattgtattcacacgagagggtattagagtacaactagcagatgaaggcgttattgggctagttaatgaccttttgtgataccaggtttcctataatccctttattcaaggcatatctagatggtgtttatgtccactcaagttcaacatcgcacatcattatgccacatcatttctcaaaataaaataaagaccatgagaaattttgccaaattgcacgagagaactttccaaacataggttagggttgtaagacagcttttttccaccaaaaagatgctaataagtaggaatataaagaattcaaaactatagatcaccttttaaactaaaaatgacgtttccctgatgtcaagggcattgtattcgcatcagagggtattagagtacaactagtggatgaagacgttattgggctagctaataactttttgtaatactaggtttcctataatcccttctattcaaggcgtacctagattgtgtttatgtccactcaaggaaaacaccacacatcaatttgccac

SEQ ID NO: 57586 - DNA, 507 bp, Zea Mays
aagtcttcttctctcctctaatagagaccgggtgaccttcaagaatctagggatcttcatctctgacagattgaactgggttggatgaagcgggctcttggatccgcagggctctacgttggttatgggtgaccaagtaggcctccatcaacttttggacgtgctcatccttagcttgcttcagggcttcaacagcaatggcttcacgactttctaaggcagttgcacgggcttgagttgaggtgagatcaacatggagctgacggttgcgcttctttgcatcttctactcgggcaatcatctgacggtggtgctgagccaagacatcatactgtgcatcaagggtgagcaggtatgcagtgaggtacacgactgtggggtcatcctcaagcagctacttcccttccaatgcacgcatcctgaccatccaaactggacagtctctctgaaagggcggaaagaatctgagcggtgtgtcggccacttcttcatagatctgacacaggg

SEQ ID NO: 57587 - DNA, 478 bp, Zea Mays
tatatgaaaggtgtgtatgagattacaagcctaggctagggggcagagaactactcatagatacgtaggaaatataagctaatctaactcctcttgttgcttccttggatgggttgattttaagtctattgtctcgagtttggtcttgtgaacctcaaattgaatgctactctaccaccctttttaatctaaaagagtgagtgtcatgagtatactcttcttgtagcctcgacctatcataataccaaccatccatgtcataacacatgattgcatagtgcatcatatggtaggcattccccgatatactcatgtcatttcactgttgggtattaatgctcctcatacaatttattttaatgtggtcctccatactgtcctatgctgcaagatggatcctcccaatctttggataggcattacctcctatctacatgccacaacatattctagttaatgtgtatgtagtagctctatg

SEQ ID NO: 57588 - DNA, 762 bp, Zea Mays
cttagtcttagatgcttaagacctatactcaatgacaatatatggaaatattttgcacaagagagagttctacaactagtgatccttctccaaggcattgttagcataaattaagtggatcacaaattgcgtaaatgtatcatgaattctccttttaacttagtgcatatcaagagagatattgattgagagtatatacggcactaagaaacatgattgttaattgaagtcattcaatgatcaaacaaataacagatgtgatcaaaagaacaacatacgcatcagattatcaatcaagcttagagtaggagaatccagcaaatatgctactttagagtgaaaaataagacttgaagaatagtagcatacatcatgagaaacttattcttatgcaagagactatatgaaataactaagataaagtgatagtctcatcgtaatcaagatatagacagaggctccccctaaagacatgcatcaagtatttgaatgagttgaatggatgcatttactttaaagacaaatagggagaagcattatacatcttgatcaaggctcataaaatttgcaataaacaacttacgccttgcatttctcatgaagaaggatttagaatacttacaaccacaccattgatccaagtaggtgttgttgctcttgatgtcttcctttttcacttgagtgtccttccttggtagttgtctctttttcttttcaaacttattggaattactcaagagagatgttagtagcacaagtgag

SEQ ID NO: 57589 - DNA, 289 bp, Zea Mays
gaagtacaagaaacataattaataacattcttagtttttattgttcttgattaagatcagatttaaattgatgtttagatatgtcctataataataggagcttagttgcatactcgaggggtgaggcagtatcgattaagaagtttgcgtggttcaaagttagaatttatggtctaagggggagaagtgtgaatcccacgtacacataatgttcaaacacatcgctcccacgctcgtgttagtcatctagatcttaatccaatgacgctaaatagatcatgatggcgcg

SEQ ID NO: 57590 - DNA, 963 bp, Zea Mays
ctcacttcgtcgtcatagagacatcccgacatggcgcacggttgagttggggcccatgtacctgagaacatgccactgcgggtcgagccgtgaccacccgaggtttgaccacagtcgtttccaaggttgtgctggatctcgacgagggcccttttttcatgaggtcggtgatgcgtgatcctagagtgcccttccctgcgcccaacacccgatgtagggcacccctttggttgatgatacatgagagggatccgaagtggaaaacctccccaatagtgaatttgaagacgatgttgaaggtgacaaccatggagctgtcgggaatcgacgtcgcacccccctacctagcgcgccaactgttggtgctaggtaccgatggtgcactacggagtgtgtccacgtagtgcttttgggaggacgatgacgttgatcgcagctccatggttcgtgcaaggcacgatggaacaaaatgaattatacaagttcgggctggagattgtattgatctaagttcaaatgtttacaagtgattgctgaaggtagaagatgaggatgatcttgtgatctagcggagtctaactttttgtaggggtaccctctcagctttatatacatgaccgaggagatatccctgtacatattggagtacttgtccatgtttatccgttactcacggtgatcgtgctgattcttcaagtcgcacattggcctctcttgcaaagctcgcacccactttgcatgcgcaggccaagtcacgcagtatttagttagccttaaactcccgcgcgtggggctttaagctagcttcagctacctcgtgtcgaggcccaaaattcagccatcgaggccatatcgggggcctttcaagtaccttaggaaacgagtccgtgttttgatgattcggggatatctatcccccacaaatactcctttcgttcaaaattataatttatttgacttttt

SEQ ID NO: 57591 - DNA, 721 bp, Zea Mays
ttttccctattttctcgaattacaggactgcgcgcagcatttcagagaaatgcagggtctaattcgaaagactcccaaggctcaggctacagctagggtggactgcgggttcaatatcataaacctgagggtctctcacgtaaaaagcctggccgaaggggtaccgcgcaacctgaaccgtctgatgtactacaacggccttgatttaaaacatctagttctaatctcactcgtccaacaccagatcagcgtctcaaattgcttcttccttctcccggcggtcagccatggtggctcgcgcagtacacagcagaggccattgccggcacacgcccatccggtatgctagcatccaaacttaagcgcgactcgatgaaaatgaaacaggaggggcaaactcggaaaggctatcataccggtagtagggacggaccccggtgctggtgccagcgtttgtccatagcttcgcgtggtcgcgaatacgaccgaggcttcgacaacgatcttcccagttatctagccgtcgtagctccatgcaatcctctggtgcatgcacgacttgatctgagggacctcctagctacactccgaggttaaccaatggcatagacaccacaacgcttcctcggtgacaaactctatttctttctctacctgctatatatctgttaattcgcgcagaccataagtatgatgtccaacgcgaggtcacggtggtgaa

SEQ ID NO: 57592 - DNA, 859 bp, Zea Mays
gtatggccgcttgtggaaagctgggaaataccgaaggagaccaccaccgattctagcgaaggtggtctggtccgactgaagtataccttcagattcagggagaagtttgatgagccaaatgatgactggctgaagtgcatcgaagctaccagtgatgaactacttggagcatattcgaaggcagaagataacgctctgtccgcagccttcggaggtcgggggaagaaaagactaaacagagtttttgacgcgatcggcttcgtataccccgattactgttacccgctgcgaggacaggagaaaaagaggaagattgttgcttcggtcaccccagctgagcctatgccgaagagcaaaaaggtgaaggttctaacccaccgacctcgttatattgaaccggccgtggtgcctgaattcggcgcagggtcctcctcaggaaccgaagcaacacaaactgctccgattgcacagagcactgaagaggcgacagtaatgccgaaggtacccatagtcgagccagtcgaggctaaggttaataaggctgaaaagtcaaagattgaagaaataataaaaatgccaaaaattttgagccctccgacagagacaaaactgtcgaaggagcaaaaggcttctgctgcaactcccaagagaaggagaatggccaacatgctggatgctgtgctagaatctacgaaggttttaagccctgctgctatgaagaaagttgctgaaattacaaaaacgcaggccgaaaccgaaactaggcaaacagaaactgaagctacgctaactcaaactgaagccgaagctgggccttcagtgcccaccgagatggagcctgctgatcctaaggaaaaac

SEQ ID NO: 57593 - DNA, 1036 bp, Zea Mays
aaacaattgagttactaataaggtgaaacggatttacgattcagattgtgtaaatatgcaaatgaaagagtttgcggttgaggacttacctgagtgtggaggtgcctgaaggctggccgatttcgggaccctctgcaggggagaagcccaaggcgacgcgcgactcggtcaatgcgtaggggacgctgaagttgacggtgggtcggactcagcgttggagacggtgctcgcaatgacgggtggattgcctagggtttagctgccatggtggatcaaatgcggctcggtctctgtggtggagaagaacgagggggcagcgccaccgtctccgcgattccgggtcccttcccggtgaagaagaacaaagcgacaacgtctccctctatgcggtggagaaggtgaatgcgacggcggtcggacgacggggggggggggggaatctctagggttcgacagccatggtggagaagaagcagacgacgacgattaagctagggttcagccgtcgcgagcattacaggtgaggagagctgaaaaaactgcatgctcggttgctggattcgtgggcccgatacacgtaaacagctgggcgaaatcaacgcgaaggcccatggaccgacacgtggattactgtttcgtaaacggaaacataagacatcgtaatatcaatatttatgtggggactagtacggctgcccagattgcgggaacacaatcttctcgtgggctcagatgcccgaaacatgcgcataccaaaaagtgtgtaaaccgttgcacgaatgagcataacacgtaataatatttgatgtaaccaggtggtacagtgagccaaaaagtctgcgcacctggtcggtgtggtccggtccgcgcacctggtcgggccttccaatagttatacagagcccagggctctaaatactatatctatatatatatcattttgagattatgacgagtataaaactattgcatgactcggtcaccaattaatcatttgcatcattatctactcttaatcaatccatgagggtgatac

SEQ ID NO: 57594 - DNA, 353 bp, Zea Mays
cagtagtggttttactcttctttttcttctcgaacggggacactaattttggtatagaaactttaaatttctttgatggtcgtggatcccttgatggctgtggagaaggtggatccctgaagggcgatgtatgtggcggagacggtgggccaccatgaggatgaggagaaggagggtcaaaaagaggatgaggagcagcgtgaagtttgaggaggtgatgatggatgtacaataggaacagcaatttgagaaggcggagacggtttggcctgcgacgacgactgtagtggtggatcaaccaattcgacatcccttcgaggccaaaggataaaattcttgatagcttgtccaag

SEQ ID NO: 57595 - DNA, 1108 bp, Zea Mays
gtttaaactgaatcttagaatgctatagcgatttaattttttattatttctttatttcaaatatgtctgaaacatacaatactgttatttttggaaaccagttggaggatcagtagtgttgtccagtccttccctttagattttacgtgatatatcaatatgaaattgatgggcctaagaaattctgagaattcagagagagtgttgaattgttgccggacacatcactcaaccattgaattgttgtcgtgctgctagctcaaattaatacatcataaacatgccaatagtacgcttgtttttgtatctaaataaggcatgaactttttgtttgacaaggcaacattgccatcaataaacgatcaacccagatgtgagagatgctagatttgttttacaatgtattctggtagactgcttcaattctcaataaaccatgtgagcatgttctttggttatagaccgcgccccagcgagcgggccgcctcaccggcgcgccacagcgtgcgggccgcacagccgccgcgccaccgcgccgtcagcccggctagcaacccccagcggctcgatgtgtttctattttgtaacatctcttttatccattcatttacttaattcatgtgtttctttcgtcttataatccttaagttgatactgcaatccgcctcatgtgaaattgatgtgtcaatctgacaagcacacttgtattctagatgctataatcaagcaagcgaactgggactgctctaaaatgctagagaaatttcggcgtgatatcgaagatcatgcactttcaattcgtgaaagcaagctatccgaaatgacaagacacgctaaggttatgtatggcaagctgaaagagattttaatcactagcttatcaatgcataattttcttctggatttatttgcatatctgatattatatggttaccatatggtaataattgcaggacaaactaagaaaagcacttgctgaacctgtggagtctctatttgatgctgcagaccaaacaacctggcaatcaataagaaacatttacaaacgtgagacagaggccatcctaccagagtttctgaataacctttgtcagtttgaaatggaata

SEQ ID NO: 57596 - DNA, 963 bp, Zea Mays
cactttgttttttctttccaaatttcaatactgtttttacctctaacaggcagagcccaattattttcaaccaaagtcctaaactcaggtctaagcctccaacataactcatatctaaaatctctcctagcagggggagtaaaatcagttttgagacataaaggcacatgatcagaaaaggatctactaagaccagaaacattcacattattataatgcagatcccactccgggctaacaagaaatctgtccaacttctcataagtggggggatttctattattagaccaggtaaaaagcctaccacttagatccaattcaatcagatcatgaacatcaataatagagttaaataaggaactccacttattggtaccaccaggtttgttcttatctgattcttttcttagaatgttcaagtcgccacccatcaacattgggtgagagcatttggaacaaaaagaggacaactcactcaggaatttatacttttgatcattttgagcagccccgtaaacattaataaaattccaaataaatcctgattctttttgaatcaacaaaatacgaatcataaattcacccaattctttctctctaacatcaaacatgtcagcatcaaaaccaaccagcaatcctccagacctaccattagggggagaccagacccaagcaaaattcctgtgaccactaatgaagttcaaccaagagtcatcaaagtttttcttgttggtttcttgtaaaccaataaaattaattttctctctcctgataatatcccgaaggaactcacttttcacttctttacccagaccctgacaattccaaattattccaatcattctgaacaattctgggtatgcccttcaatctgacctctccacttaatagggatgttcctattattgggagattttctatcatttttttctttctcacagttttttttctgtgacgaatttt

SEQ ID NO: 57597 - DNA, 386 bp, Zea Mays
agggttttccccatcagggtgccggtttgagaactcggggcctccttccctgcatccgctacactgtacaggtcatccttctggtccacgatgtaggagagggatccgaagtggaagatctccccggcggggaagctaatcatggtggtgaaggtgacaaccatggaactatcatagatcaacatcgtacccctacctgacgcgccaattgttggtgtttggtatcgacgatgcactacgaggtataccacacaatgcttttgggaggacgtcgatatcgatcgcaacacaatggttcgtgtgaagcatgtcggtacatagaggattatacaggttcgggccgctcgagcgcgtaataccctacgtcatgtgagtttgtggatatg

SEQ ID NO: 57598 - DNA, 977 bp, Zea Mays
ggctcttccaaaattttgaagtgaactgtgtccccctgtctgacactatcttccgagggataccatggagtctgactatctctttaagatatatccgggcaagggtggctcctccaaaggtggtttttactgggatgaagtgggctaccttgggaagacggtctattattacccagatagagtcattgcctttttgcgtccggggcagtccggttacaaaatccatgcctatttcctcccacttccattcgggcactgggaggggttgcaataggcctgcaggtttctggtgctcggcttttgttcgttggcaagtgtcacaccgggccacatactgtgctatctctttcttcatccctctccactagtatctggttttgaggtctaggtacatcttggtggttcctgggtggatggagtaggctaagttgtgagcttcattgagcaggacttcccgtgcctctccttttggtacacacagacggttcttgaaccaaaggactccttgttcatctgtcctgaggttcggaagttgttcattgagagcttttgccataagtcttgttgtctctgtgtccaggcgttgagctttgcatatgaggtcttctagcattggcttgacttctaggctaccgttgtttcccagacatgcattcagctgagctgattccttcttccaatcttccaagaagttggttcccttcatcttgaaaggtttttggctgagggcgtctgctaccacgttggcctttccagggtggtaatggatctcaaggtcataatctttgatcagttccagccatcatctctgacggaggttgagatctggctgagtgaagatatacttcggactcttgtgatcggtgaagatgtggcatttgttcccaattaggtagtgcctccatattttcagggcatgcactatggctgccaattccaaattgtgggtgggataattctgctcatgtggcttgagt

SEQ ID NO: 57599 - DNA, 591 bp, Zea Mays
gaactaatcaaggattatgatctagaagtacattatcatccgggaaaggcaaatatggtcgtgggatgcgctcagtcgcaaggaacacttgtgttatctgtcggctagttcgttcgaaaccacaatctatcaagaaatggaactgttgaatttgagtatgtttcaacccacactactagtcaatatgtagttggaatcaaccttagttactcaaattgtggaagacttatgccggaatagcccatattaaagcgtgtatggcaatggatcccactacgtgtttccaacttgataaccaaggtattctttggtttaagaatcggctagtagtcccaaaggtcccgacattgaggcaacagatacatgatgaatctcatacctctcgatattctattcatcctaggagtaataagatgtatcaagacttgaaatctcgattctagtggacaaagatgaaaatagagattgctcgttatgttgctaaatgtgatgtatgtcaatgagtaaaggttgtacatctgaagtctgctggaccattgcaatcgttgcctatttcagaagggaaatgggaggatatcagtatggatttta

SEQ ID NO: 57600 - DNA, 353 bp, Zea Mays
ccatcattagcagcctccttaattaaatagcctagcacatccataaccagtatgaacaacatgggggagagagggtccccctgccgaagacctcgtctatgaataattctcctacctggtttaccattaagcattacttgggaagaggcagaagcaagaagaatgctaacaatatcacaccaaatttgcccgaaacccaaatgctttaagacctccaggaggaagggccacgagacggagtcaaaagctttggtgatatccaacttaaggaggatccttgcacactttttctggtgaaacaactttgctgtctgttgcacaagcatgaaattatccagaatggatctgccttt

SEQ ID NO: 57601 - DNA, 423 bp, Zea Mays
ggaatctctctttatatctggaaatcgtgggactaatgtttttgtctaaataacctaagtagtctcacatgtagagaataagtttctctttggagatgtgcaatctaacatgaaaagaaaagtcaatccaatgatttatgttgttttgcctcttgcttaagttggatatgattcttctatatttatcgctctccatgttatgaattagatttattcccataatcttaaagaattatctatgcttgttttgtaagcaaaattaagcatacatcatggaataacctagttcatattataaagtttccatgctttagtaatctattttccattccttatcaaattgattacacaaagggcaaatagtgcttgtgttaccaatgacatatctcttgagcatacttatgaaaatctacaagagagtaa

SEQ ID NO: 57602 - DNA, 895 bp, Zea Mays
cttctgttgatgtcgttggtcgttgccatgctcgggcgagacgaagacttctctcgaggccaaggtagggtctgcgcatgggtacacaatcatgctgggagtggtcgaaacaatagagggactggtctcctatgggattcatgggagagttggtggcatttaatgtgccactgccagagctgttggccgagactgagttgaggcgaggcagagttttctcccgaggttgaggctatgtctagtcatcgtatgtcctgttcgaagttgttgaaaacaatgaccgagatgggggacactggccggtattcgctggcacgcgtcatcgtgggtggtgactgtggtcccatcgtcctttgttgacttctatgtcatcagtggagaaggtgttcgtaccggttgcatttagtgcgcctgtcttgcggttcctaagaacttttgggtgaggccaggctaggggctgggccttcgcgtaagatgccctcgagcgaggcggattttttgcttcccgttaaagggggctcccgaggtgagtcgaggatccatgcgggcgcagccttcgctcgaggatgggctcgggcgaggcgtagttatgtgtagctggcaagcggggtctctggtgattcgaccctgcgtgacatcgaggagtgcatttttttgcattttgattccctagtactgaggtattaggtatctttagagacataattcgggtatccctaattatgatactagatacattttttctggacctagtcatgagtagtgattttagagactacaaattatccatagtagaactaaggtctaaggacgtgtttggttgaagattggaggaaatggaacggctctattcatattttctagatgtttggtttccaacaaaagagaagcggag

SEQ ID NO: 57603 - DNA, 436 bp, Zea Mays
atttagtctagattggatccaatctaatgggttaatcaaaccgaaccaagtctaaccttaagctgagctaatctatggtcggtcacttaacagtgttaaggatggtgaaataaattggaccctactcctataaatatgttttgacctaaatcgatgctccagactaacttgaccatatatcactacctgaccatatgcaactaccttaaccacctgatagttgcataacccctctgttttaaccgaacaaagattttgacctaccgacctcatgtaccccggctatgataaccacatatccttagccatatgtccttaactcgaatgataactccaagaataaaggccaaagaagaccaaccatgtcaaaggaggataatcatcaactcaagtcttcaaagatcaagttgggtcgccagaggaatcaagatccaga

SEQ ID NO: 57604 - DNA, 628 bp, Zea Mays
ccctaacttaatttgaagaatggcgacctagtttgctctggccacggtgaccgtggacattgcggacagatgaacgcgttctcggcggtcagtgggcttctagtccaattgggcaggtctatgagcatcacaggtacatgagaacactcaaatgagggagcagagggtatgagctgacctgaatcgagctggccgcggtgagggtgttcttgcggtgtttttgagcagattgggggaagttcaaaattcgagctctcggttgtaagattggaggcaatactgggtggtgtggtgcgtgatcaacctacggagcccatggtggcttcaatttatagggatcgaccgcgagcacaacgaatttgagcggcggatcgtgatcggtaagaacaaggtgagtcactggtggccgctcaacgtggcctttaccgtggcggtgcctccggcaaccaccgtatatgcatagcgcatttagtcgcgacgtggtaaagtgcccggacacgaggcgcacgacggtgatcgactaacggtggcgagctcatccgattccacagtggcgtgtgcggtacagtggccggatttgtttactggacggagttatccacggcgatgatatttgtgtgaccccaag

SEQ ID NO: 57605 - DNA, 746 bp, Zea Mays
gctcggctgtgggtagaggctcttgactggcgccctgtggacagtaaccgcgaccaacagctccaacgcatgaacaatactgtaccacccccaccaacagctccaaccatccaattccccctcgaatccctcaccatctagcaaccataacataccatcagcagtgaacttgtgggaaagactgacttgccaatggtagtattggcctattggcctagggggtggggggcgtgggggcacaaaacaagattccaggtgtgtttatcaaagagagcatcacgtccttccttcatggcagacctccaatctggatcagtgagagcaccatgggattttggcgacagagtgcttgcatggtagagagcaggaaggtgaaatccatgcttcctatgtgtagtcaatggcatgctggttcactgcatgagccacagaaacagcaccacactgaagttaagcaggaagcagctgtgcaatcagggctgaccgctgatggcgagagtacgtaaactgtagtcacgctgtgcagccagcagagggcttaatacattctgcagccagcggtttagccatatcatgttttataaacagcttaatctactgtgtggtctcaaattctctatcctgaaacaaaaatttcaccattttttctatcttgatctctttaggtagattgattcagaagcaaattacttgcatatcactccgtctattcctgctaaaagtgtgtatcttgaacaggacactgc

SEQ ID NO: 57606 - DNA, 630 bp, Zea Mays
gccgtatgtggtttggagcctaagaactcaacctagccgagctttgcacggaaacactcctttctttatggtctatggttcagaggcagtgctacctgctgatctcaagtttggggcgccaagattgattttcgaaaacatatctgaagctgaagctaccagactagaggatgttgatatactagaagaagaacgattgaatacaataatttagtcagtcaggtaccaacagattctgaggcgctatcatgataaggccatacggcatcgatccttcgcagtgggagatcttgtccttcgccgaattctaacgggggagggacgacacaaattgtcaccactatgggaaggaccattcatagtaacagaagtcacccggcctggatcatatcgtcttactcaaatggatggcacggaaatagggaactcatggaatatagagcatctcaggaagttttacccctagctagatctcaaaagctattgggacgacattgtattctgtaattgggagatacaccatcaataaaatgacttcattctcaaaggcactcgaattgttttctgcatgtttacttaacccagggtgaccactatgccctattaacggagcaatcagcttaagtcgac

SEQ ID NO: 57607 - DNA, 572 bp, Zea Mays
gtgcgagcagagttgataatcacagtgtctccattcagttccataagcaggaagggggtacctggtggttaacctgtgtgtatggtccccaaggggatgaagagaagatctcttttctgcaggagctaagaaatgttagagagggctgcaatggaccttgggttgttgctggggatttcaacttaatttacaaagcctctaacaagaacaacaacaatttcagcagagctatgatggggaggtttaggcgctttatcaatgatctcgcacttaaagaagttcctctccatggtcggcgttttatttggtcaaatcaacaactagagcccgttctggtcaggttggacagggtcctatgctcagttgactgggagtttcttttccctaatgtgctgctgcagagttctgcttcccaagactctgatcattgcccattaattctgggtcttcgagataataaatcagggagtcgacgttttcattttgaggctttttggcctaaattggagggatttcatgatattgtgcgcgatgcctgtgactctgttggaacagcaaactgtccttttctc

SEQ ID NO: 57608 - DNA, 365 bp, Zea Mays
gccgattagagtgccatagcgtgcgcatcttggcaaggtcactatgtacggttgcttctctgctccaaatcctatcttttcgctatgagttccaagtcgagatatggtcggggtagggagatagagaggggagaagtttgctgtgtcagccaagcccgagccgagacaaaaggagtgtcaagtcatgtctagcgccctaggataggtgtcatctctttccagggtgttctagggttaatttggcgccattttgtcaattgggtcgaagggttttgaaaaggggattagggtgaacatgtggtgtctttgtgcaaaggttagtttttgtacttaggcaaaaactgaattctcccttgtgctgaaac

SEQ ID NO: 57609 - DNA, 437 bp, Zea Mays
acattaaaaacatagccctgctaagcaaatggctcttcaagctacttacaacagatggtacctggcaacaaattttacgaaacaagtacatgaacttcaaaacccttatggagattcatattttttggcaagcttaatgaagattaaaaacaatttccttcaatttggcactttcacagttaaaaatggggaacacattcgattttgggaggacatttggcttggcagtatgtctttaagaaggtagtaccctagtctaatcaatattgttcgtcataagcaaataacagtggcagaagtttttagctcatcaccaatcaatttatcatggcgaagggatcttgttggaaacaatctaacagcgtggaaccaattattaccacgtattcctagaattgcattgagccaagatcaggatgagtttagatggaatctcc

SEQ ID NO: 57610 - DNA, 796 bp, Zea Mays
tagatctttaattttcataaggccactccaaaagtgttaacctgtggcccttcgttgtgcctgggacaaggttcgattggccagatattttcgtctagaaaggattgccacattccttcttcattgagaagtttacacaaccatttgcttaagagacattgattttatacctctaaattcaaaatgcctaacccgtctaactctttaggttggcaaattacatcccatctagccagcctatattttttcttatgggccccaccttgccagaaaaatgcgatctaaaataatctatcttctctagcaccccttttggtacttaaaacaaagacatcataaacatcgctcgactagtcagaataggattaatgaacattaagcgccctcccatcgacatgaacattcctttccatctacttagcttttttcttgaattttgcttccactattttccaatcaccattcgtcaacctacgatgatgcataggaatcccaagatacctaaagggcatgcctccaattttacaaccaaacaaccttgtgtacatcccctcatcctcttttgccttcccataacagaggacttcactcttgtgaaagtttattttaagacccgacaactgctcaaaggcacgtattatgagttccatattcgttgccttttctaggtcttgatccataaacaagattgtatcatctgcatatcgcagaatggatagccctccatctaccaaatgcggcaccaaaccctccacttgcccattttcctttgctttattaatcaaggtagcaagca

SEQ ID NO: 57611 - DNA, 486 bp, Zea Mays
gtttaattttctgctatacacattaggtgccatctgatttgtaccgaactaaacatgtacttgtgaccggtagccactagccagcagcacggtggtcaagtcattatgacttcttcacctgcctctcgctacggctgggttacgctaatgagtggtcaagctggtgcagtgttcatgtctcctcgattataaattgaccactgcgattatagctgcttccgtgtccatcatcctctgccctacaagaaactctactatcacatcacactcgtactaccagcgatcactcttttgtagattatttaaattcgggatttcgtagtatatgctattaaaaaaatcgtttacattaatattttggtgtaatttgtagatagaatccatgaagcaaaaagctcgagtgtggtgtagaaatatttcacccaatttttactacacattaaatttgggtgtataagctcacataatttgagtgtaggagataag

SEQ ID NO: 57612 - DNA, 378 bp, Zea Mays
gtgggatcccactgacgatgagtagccaggcctgcatggagaaaatgagggttccgttggggagcgggttgtaatatatcttgattttgtaagatactctttaagcactacttatcaggcgatattacaacttatctgcatgctattttttctttgttgtgtgcgttgttaccaacttcttccctggtacttggcccccctgggatatggcctcgacgtgtcgaggctggatgccaggattcttaagaatgaattggtgacatggcccccaagggttaatctcaactaggacccgacctgcacacagtcttggctaggaatttttagtagcgcacccatagggtccgctagctagtatttcttatcctttgattcacg

SEQ ID NO: 57613 - DNA, 539 bp, Zea Mays
tattttctctggtggtttacttcataagtatttaggtaaaattgagttgctcattgtttcacatttttagtctttcttttgatttatttgaagtattggctaaatccaagttctatttatttaacccacttactatgatggtttggggagtgtttaccatttttgtagtggcatgttagtggtcaggggtctactgaatttttcttgccattattgtatttgcccttatatttttaatcatggatttcattgacttcttaatgcctaaaatagaattataaccttagattagcactagactagggttccatatatttttcctatgttccatatcacttaggcatactaggaaaaatatggtcattctctggtttctattttctatctcctttctcatttttctaaagtttgggcagaagtagtctttaatggacatttctggtttattcttgtatactggggtgttctttatttttaaacagtgtatatattaggtgagtatctccacaatttttctcaagtctagtataaaagtattt

SEQ ID NO: 57614 - DNA, 915 bp, Zea Mays
ggcttaggcctcaaacatggttagagttcgaacaagaacatgaggtgacagatgatgttattgcaaaccttatgttgaggcaaagcaaagtctggttcagccaaaatatatagggatacgttagggattgtgtagtagctctataaataacaggatgattgttcctaatcaactctcttctggtgtgtctacttccattaggtgtttcattaatctctatgttttctccggtccttgagtttatattgttagatgaaagagttatagaagaatctgttgtttgtatcttgccttgtgtaacaaactgtgtatacaaagaacaatctggacttttgggatgtaattgagaatagaatgtcatgtaattataggctaccaaatatagctctttgagttacagactgcgatctgagtacacctatttgtatgccacggttgggacttttccaatcatcaattaattcaacacgcatccgcctggtacccaagataggggccgacgttcctccacctgtcctctgattcatctcacataaatcactaagagagagagagaccgcaattcggtgtttgaagcaactatctatgtgtaagaccaaacatcgtggatcttggcagtaaagagatcatgtcctctaaatatcttgtccaaaatctcgtttgagtcttgtttgtcttgcttttgggggattttgctctttgcgaacccctctctttgctctgtgttgcgattttatttttacgaagatttgagactagttaggatagatggatacatgctaggaccttaatgatcttatctgccttaaccttcctgatgtacaaaggcatgtggcgcgatagtggaaaaccaccattttttgatggctctaattacccataataaaagatacatgtatcaacataccttcagag

SEQ ID NO: 57615 - DNA, 727 bp, Zea Mays
gaagttattcatgctgcctgcttccctcttaagggcgtctccacgcccccttcatcatgaaaatgattgaagtggtgactcaatttcgctatgagaaaggcacaagacatctatcttacacccccttctgaattgatccaaacaatccagcagggcgtctgaggaaagcgccctccagctctcgtggacctgctgctgccggaccctcgcgtccatctcctggtcgcggatctcccacactacgtggtcgtggtcgtggtcgaggtcgtggtcgtgggatgggtgctcgtctggcccatggcattgctgcattcttctccatgtgcagaaatatatcttcagatgttcatgagctggctcggcgacaacgggagactgacgacaatcttcgtcgtcaagcttcctctatgggtatgccatttgctccccgttcgcctgatgtgcctctccatccacctcctccagaaatcaatgagtggcaccagcaggcatatggggtgtctttcatgtctccagaagatgaagaatactttgatgatcgtgagcagtttgccccgcctccccaccagggggatccgggtcaatcctcttctcatcctccgccccaggatccttcaggaagctatcctcccccagatcagtttggggaagaacactttgcatctcacctggcgcatcaattcttgctccgcatcctcctcctcagtggtgatctatggcttggtgg

SEQ ID NO: 57616 - DNA, 968 bp, Zea Mays
acttgtctcaactcggcactcatagatggatatctttggtcctgcaagtattcacaagttaaaagatgctaaattgagttcattgacgaatcccctttgacaaactaagcatgtaccttatgtttgaaccaggaaatgaaatcaggcaatccattttccgcaccctttctaagaagggtatcatattcctgtggagttgggtcccctgatcgatgccagagttcatgaagaaattgttcaatgtatggcttcacctcttcaaggttggtcaatacatatagcatgatatggtgccactcttcatgtctcagggtcttggtggtcgaaccacttgcgcttccgagttggcctcgttgtcgtcatcattgtaacgagggggtggattattcacgctcgacagtttgtcaccatagtaagttgttgtgaagtttgacacctcctatagaatgtatgcctctataatggaagcctcaattttgcatttatttctacatttctttcaaatagtctttatacatctcttgatttgatagcaccaacgtccctgcatggcccccccattcgtgcctcatacgggagatgaagaatcaaatgctgcattagattgaagaagccgggtgtaaatatcttctcaagcttacacaataacacgagtgtcaatcttaccatgtctgcaatcatggttcgagataactcttttgcacaaagctagcggaagaaatagctcaactctgtaagcgctagccagacatgctcagggacatagcctcgaacaatcgcaggaagaatccatttaatccatatgtggaagtcatgactcttcatccctaagactctcagattagataagttcacccccctacttaggttagctgcatacccatcaggaaccatcaacatcttgatccactgaagtatttccttcctctaggccttgcttaggacgaaattggccttaggccttctcc

SEQ ID NO: 57617 - DNA, 563 bp, Zea Mays
actaaggttatgatgagataggcttttatgcaaacttttacttaaccttaaggtttgtttctttgctactaccatatgcatgatccttgacttatttgtaccgtataagtcttgtgagtacacttttgtactcatggtgttatgttgattaagctacaagtgagcaaaagaccgaatatggatacttccaccgtgtcgttccctgacaggcgagaagtgagtctatgcggtcatgacctatattgtggatgttttcatggagatgttgtgtagctccatcgccttttatatttatgttattgttgtgttcttcttaaaactatgtgacatgagttggcatcatcacgagccatgagaggaggttctaaacacctgaacactaaactttatttagttgttggacaacttgttgtaatctaaattctatgtgaatttgtgttgtaaaattttctctcttgattttatggtgatgcacaacttgtatggtacatgtgttgattctggtgtgacatgcattaggacaataagatttgctttcactttaaattaattcttgatcgaac

SEQ ID NO: 57618 - DNA, 558 bp, Zea Mays
tgatttgaatattattacagttcagatatagttagaacaaaattcgaacgcacaaccttggcttacggaaaatgccaaaagtatcattaactacaaactgcagtcactattccagtgaacttattaaaaggcagattaatggaaacaacacatagataaatggacatttggatagtctctagttattccatctactcgaagacaaggggtgcatgaagttgtaaaaaaacatttgtctgcaagcaaactaaggcataccttcatggttttgggaccagaaaacatcttggtctcatatgatcgaaagggctgcctcggttgctcagggactgttccaaaacattgaaaacaaatagtagaaagcaaatcagcgtaatgtaaatatggaaagaatacagtggcatcaatttagatttcagactctacaagacaatccacgtcgaaactttgcaacactataaaaaacatagtaaatagaaatcttagtctatgtcaactacatttaataataaatatttgaatgccagttgggtaagcctgataggtcaataggctagg

SEQ ID NO: 57619 - DNA, 664 bp, Zea Mays
accgccttgccctcctataaattgagcccgtgaccagctctgtagggtcatcagctaaccagccaccgccaattagccacaatcgttcgccggagctcgggaatttcgcgttcgccccaaatcgggtttccgccaccatagaatcaagctcaccgcggccagccctttctaggtcagttcatccctccctttccttcgtttaagctttctcatgcgcctgcgatgcttactgacccgtccaattgggctatgggtctactgaccgtcgggaacgcatgggtcttgagttcatccgtgcgctctccgtggccagaccaaattagttcaccattcgtgcaattgggttggggaaaatactcgaggtagatccaatttggtgtctgatgctcggagaatccagccgtggccccagtcggccggttcaggtgctcgctggagtgctccccgcgctgccgtcgtcgtggacttgggtgtgtaaagaattagaaatctggggggctcggtgtaaagcatcagagacccgttggaatagtggttgaacccgttcacagttagataaaaacgcgaggacccctgtgcaattctgccatcgcgcgcgggcgcgggcgcgcgtttcctgtgttgttgggctgtctggaccagatttggcccagcactgttacat

SEQ ID NO: 57620 - DNA, 272 bp, Zea Mays
ttctcaatctgaaacctccctgcagttgtatgcagtgcaataattttacttgaaaccccaataacgcatgagtccatgtatgaatcggaaattaagaaattgttccactcttatagaccagttaggacctatgcacaagcaacagctcgactccacagtcaaatgatcactctacgtgtttcaattgatcatcagtacaaaagggaatctagctacattaacatgctacttcctcatagttcccatgaattcgatgatgtggaagcaacaga

SEQ ID NO: 57621 - DNA, 877 bp, Zea Mays
gtgccgcactctggttcctacgcatcgcgcaggcctctgccggtgggatcccgatgtcagccatcccagtccgagcttaagtagaaagcggatgctgttgcgaatcgatcgtggtggttgggatttggtggacctcgatccgcttcttcgtgcctataatgtcggcggaggtgcccgtcgacctcggggtcctggaatccttcgagacggtgggtagtagagaagtatcgagcattcgcggggaaaagggtgaaagggcaggcaatccgtggtcgccccgtcaatcgagctaagaaaaagggatcaggggcgtcgagtggtggtgtgggacatgttcgggggcagcggtgtgggagatcaaggcgggctcggggcgaattgctcactggagcagggtggccgcggcagatcgcgtttccccgtgggttggtgccggcatcacgtaaccaccggtaagtcatcccctgttgtgttcgcatggatctcctcaatcttctgcacctaacgacgttgggataggtgcgtctgggccggggagtactgctcgccggcgttggcactgctgttgacagtcgcgcgccgccacgcggtatcgaccggtgtgtgggaagggagcctacggcgcgcgtgccgtcggctccatgatgaagggtctggattagaagatggaataccgcttcgtagggtgggttgtgaccgttgatccgatcgcgtatggtcacgaccacagtggaggtattttggcgcaataaatcgtggccccagatcaacaatccaagggctcagacttgatgtgtgtagatgactcgtgggctgatgatctgggaaccaatggccatgactccttaccggttcggtgagccaagatctaatccca

SEQ ID NO: 57622 - DNA, 1351 bp, Zea Mays
gcctcgtggtcgggaacgacagtggctgctgctactgttgcgggtccaaatatggacctgaggccgatgccggtgttgcggggtggcggcgaagaggaacatcagcttcagcttcatctaggcgtcatcgagcttgtggacgagcgtctggcgggatgacactcgaatgatcgaccgtgagttgttggccggttaggttagtgaggaaagctcccaccaattattggaaccaatcgccattcggcagtggcagctacaggagaagctggtgcaaccttatctaggcgggcgccctccttcttgcgggtggagaagcgggtgggagtctgttgtggagtgggcgagtgggacacgacgactgacatggcatggaggttgcagatggcgtgaagactggcgactggcgtggaggtcatggtttgctggcggaggaagttcgttgtgagagccaatcggcgcgaacgcgagaagcgagaggctggctggggcttgtcgtgcagagggtgcgggaggcgacacgggtgttggcgagcgtgcgcgggcctgggggtggagtcatggtctgcttgtgtacgatagaggtgagttggtgtgcattttggtgcgggtggagaagcgggctggagtatgttgtggagtgggcaggtgggacgtgacaactaacatgtcatggatgttgcagatggcgtgaagacatgcgactgacgtggaggtcatggtttgcaggcggaggcagttcgttgcgagagccaatcgacgtgaatgcgagaagcgagaggttggctggggcgtctcgtgcggagggtgcgggaggcgacacgggtgttggcgagcgtgcacaggcctgggggagagtggagtcatggtctgcttgtgtacggtaggggagagttggtgtgcgttttggtgtgagtgtgtgcgtacatgaacagatactacaactgtacttgtaagtgagaggcaataaaaaatccattgcactgctcgggagacttgccgccagctacacactactggggttgggttgtttttgcacttaaactcaactgccacttctacgtgtatgtcgttgttgctaattgttgtcgggctgtcgagctaccaagtgtaccgaactgaagctagttgtgttgggcttgggcctccgatgaaaggccgccatgcttgggcctcgagaccggaatggccaatagaggccgcgacgggccgcatatctgccggtggggtctgggaagggtgaagtcatgttagtgtcgtggtctacactattgacttaatagatagtagagatagagattagaaaccaaacggctctgtcccacagtacgcttgaacggaacactacctaaac

SEQ ID NO: 57623 - DNA, 328 bp, Zea Mays
tgaaaagtcaaaggataacgtaatggcaagagtggatctggcagcgttatgtgatagaccaaaccaagagatgaagccgccaagtggtggaaagacatggagaaggcctaaggccgatttcgttctaagcaaggcccagaggaaggaagtacttcagtggatcaatatgttgatgttccctgatgggtatgcagctaacctgagtaggggggtgaacttatctactatgcaagtcttagggatgaagagtcatgacttccacatatggattgaacggattcttcctacgatggttcgaggctatgtccctgagcatgtctggctagcg

SEQ ID NO: 57624 - DNA, 460 bp, Zea Mays
attaaaatgtgacgctttgatgcaggcagctgacactgcacctgcagctactggtttctccactacgcttagctagcaccccccaaaaagtcgtgccactgcttctatcgtggaattacttctcctgtcctagtcgaattatcagaggacggatccaagatctgggtgcctgcttctgtttacaaaagcaaaggttacaacgagatagagagggagatgcatgcgcacttcctgagctgagggtagagtgttggaggatagctttaggtcggaatatcctcgcaaaaatccatcgtgttgcagtgtatagcttgaacctgacgacgatcctgttggcttcattctgatggcacgtcagcacacgcaactcgagtaagaaaatatcttgcccacccaacccaaggcaccaaaacaaaaggaccctggtgctctatctcactattctctatgtggtccttcc

SEQ ID NO: 57625 - DNA, 332 bp, Zea Mays
ctgagatgaataccaagtttgcaaagaaaggcctggacccgacaaaaaatataaaatctcagcaggccagtgggcattatttctatagtggaggagtaacccatatttcatatcttcaagcaaggaaaattcagaactatctaaaaagaacaagtaccaccaccacctaggcacaagaagaaggccacagggttgccaacgatgtatgagcaacttggtgaaaggacggtagatttgatcagtgttcaaaaaccaagggaaaccgagttcggtgtaacttttgataatcccactctcgaagaagcggcaaagaacatatatgcaatggcaac

SEQ ID NO: 57626 - DNA, 479 bp, Zea Mays
cagaaattatggacatgtgattaccagcgaatggaagctggctgttgggatcgatgggtggaatgatcggaacggtggcgctctgtctcttccgcttgggagccatcacaatctctcgggcggaacgagcgggctcgagaattcagaaaacggagaagcggtagatgaaaaagtaagatctagggttggaaactcaagaaggtacatcggcatgagtataagttggctccttaggtcggacattacctctaaagtgccagatcacaactcggaaaagtgaggactacaatcatcacttgggcattacctctaaaatgccggcaaactttcaagcacacaaataaaaagcaagcaatagtggttaagtggagtaacttcatccttcatccgtaatgggggaattaacacaaactcgaagccaactcattatgagtcggcctcttctacccctatcactacattacattacactacattac

SEQ ID NO: 57627 - DNA, 448 bp, Zea Mays
cgatgatgctggtgctgcttgcccagactctgctgttacacagtccttgatggagatgcttgacgcgcataacgagcttgtaaaggcctttcgttgtgctcgtgaacgcatagaacaaacacacaatagcgatataacattacgtttattgggctacaatactagacacgatgtccagtataatttgccttcgagcggtgagatagctgccataattgttggttattactcatctgctcagtacacttacgatgtccttgttcatgctaagaaccatggtctcaaacgtgtttcgcatgtgcatccgtgttatatggctctgcaatacccactcctttttccctatggtgaacatggattccatcttggcattaggtatgcggatgatgacgtgaacgaacgaacaaaacgtagatacacgacgatgcttgagtttgttagataccac

SEQ ID NO: 57628 - DNA, 649 bp, Zea Mays
ccactgtagcgcttcaattcgaattttcccccaaattggatctctgcgtcgccatggatagctcttccgtggccagaccactttggtatggctctgcacttctcgtatgatgtttttgcagctctgtgtactcgtgatgctcgtcatggcagccatttgaccaattcgggcatgattgaatgggaacgcgggctcgacgtcacggtttccgccgtgcgcgtgggtaggaccttctctaagtatgccagccaaaattgaagattgttcttgggtcgccttaggtcgggaatgttcaccccgtagctattttagacagtcaccgccggtcatgtccagtatgtgccgcgtcggtgatcgacggcaagcgcgtcgtggccaggggtttatttggagaagaaacagaagtcgggggacctctgtgtaattgtcagagagagaatgaatagtggttaagggttcttaatggattattcaagtagcgagggcctctgtgcaaatctgccagtgctcgcgtgcgcgcgggggcgcttctgcctgtgttgggctgacttgggccgctttcggtccaatactgttcataccttttctttttctttttctgtcagagctaaagaaattctataaaattgtagaaaaatcctaaaaatac

SEQ ID NO: 57629 - DNA, 464 bp, Zea Mays
gtctggtccctggactaccgactgattcgcggttgtcatttgactgacgcgacggagtctgcactgctgcatacagtaaagaatagctggaaatagaagagagagagagagtactcgtagctcggcggtcgttgtttcgaattgagttgtgtcggagactcggaggtcggcatcatcgttcgatcaaggcaagggtctcacaggaccggagaactgcggccgtgtcgccttcacagctcagccagctgtatgcgagggcaggaaaagagagctctgttcattagacacgcaaagttacatatataagcacttctatgctcgatacaaaatgacacattaaaaaaatgtgcacttactgcttcttccacctatttgttgctctcatgcatctatatatgtgcaatttcattcaattgcaaaacgtcaggcggtgaggccagagatttacgacatgcttgttaagg

SEQ ID NO: 57630 - DNA, 843 bp, Zea Mays
gggaaggaagttcagccacaaatcatcagtgcagagacgacggaacaagcatggtcgaccgtggagaaaatgttctccgcacagacccgtgccaaaacaatgaatgtaaggcttgccctcactactacgaagaaaggtaatatgtcaatcagagattatgttgccaagatgaaaggtttagcagacgagatggctgctgtcggtaaagcactagatgatgaagaactggctgcacatatctgtaatgggcttgatgccgattacaattctgtggtgacatcagtcaccgctaggactgatcccatattgattcctgagctttatgctcaactgctcagttttgagaccaggttggaactgcaagatggcggctcgtatgctcacgtggcaaatcgtgggcgcggcaatggcggcaacaacaaccgtggcttgggcactgcccgtggccgtggtcagcgtgggcgtggccaggtgcgtggccgaggaagcaatgcgctgaagcaacgcaatggagggcggcaaccgcgaccagatgcagcaagtatgtctgaagatgtgccactttgtcaaatctgtttcaaaacaggtcacagggcagcccggtgttggcatcgttttgatgagaactacgtcccagaagaacgccatgtcaacgctgccatcaccatgaacgcgtataatgtcgacaccaactggtacaccgacacaggagcaacagatcatatcacaagtgatctgaacaagttgacgatgagggagaagtatcatggaaatgaccagattcacactgcatctggttcaggtatggaaatcaaatatgttggtcatactattgttccaact

SEQ ID NO: 57631 - DNA, 303 bp, Zea Mays
agaaccgacgacagtaggcgcaacatgtcaggcaactgcctcgggaagaatatctctaagttgcaccacagccagaggcatgcacctcagtacagctctaggaacaagataagaatgggtagttgaatcttatctggtggaatccaaggttcatgtaaactatctccccccttgcactagaaataggggtgacatgcatataagggggtcacgacttaggatattcaattcaatacttcttcggtagttctagctagaggtaagcttaccacaaacattcttcatctacaaggcaagcataaa

SEQ ID NO: 57632 - DNA, 523 bp, Zea Mays
ggcatgaaaagtttgataatactcttacagctgctggctttgctgtaaatgaatctgacacgtgtgtgtattatcggtatggtgggggtgagtctgttatgttgtgcctttgtgttgatgacatcttgatctttggatcaaatctcaatgtgattgaggaagttaaaaatcttctatcgagcaatttcgaaatgaaagatttgggagaagctaatgtcattcttaacatcaagcttgttagagaaggtgatggtggggtaaatttgttacaatctcactatgtggaaaaggtattgagtctctttggttttagtgactgtgatcctgctccaacaccttatgaccctagtatgctattgagaaagaataggagaatagcaagggatcaattgacatactcccagatcattggctcgctcatgtaccttgcaagtgcaacaaggccagacatctcttatgttgtgagtaagctgagtcggtttgtgtcgaaaccaggagatgatcactggcgtgcccttgagag

SEQ ID NO: 57633 - DNA, 519 bp, Zea Mays
cttgaggttcaatcttgagattaatgcgcttgaccttcgttatgctgcgccaaacaccttcatcgctcttctacccaacatggagctggctgatcgtgttttcaatggtggccagccattatttgtgcctccactctgactgcacattaagcgttggtctcgtcattttatggcctctggtggaggtgagttatttcggctattggaagttgagcttcaaggtattatagttcatctatgggggattcaaacgacaaaacaactccttgttggatattgtttggtccatgatatgcatcttgagtctgaagaaggtattgatctatctatgttcaagttgagggcttggagtgctgtcctaggttgtgtatctacacgtggaagaacctccagtcctgttggggggacgatcccttgatcccacacacaatggtttatcatgtctcgatatgggtgtcttgcttggagaattcgagggaggtgctccccccgccacctccaccaccgccaccgccaccg

SEQ ID NO: 57634 - DNA, 536 bp, Zea Mays
ttggaatgcgccaagaacctaaagaacagttttgcaaaggtgggagtgtactctttcaagcagaagttcatccgcggtgacccggatggggttatccagtggatcagtggggaggtcgaagcttttgacgagatactcaacgaccgaggggatttctgtgcttttgctggtgcccgcggggctgtatcaattttagaaaaggtcggctatgaccatgtgaaggctgttgttcagccagaatttgttatctcagcctacgacattaagaatccttcagccgaagcgtcttcgttaagcggtaaattttactccgaagtatggacaaaaggcggacgggagatagctgacgaagctattaggaaaatgaaaaggaatctcacgacgctcaagaagaggccaaaaatgctgaagaagctgcagagcgcgccagacttataggtaccttaactaaagttgggcttcagggtttgtttttagcttcggaattaacaaacattttttatgatgcagcggaactttcacctccaccggaaccc

SEQ ID NO: 57635 - DNA, 706 bp, Zea Mays
ggagaagcctagctagagctgtgatggagaaatttggtacataagaataaccaagggctatgtggaagctgatgactatgaggcagaaaggtgttgtagaggagtatgtgcaggagtttgaagaggctaggtatgctactcgatgagactttctttgtgacatagtttatcatggggctgaagagtgagattcaagggcttgtcttgtcacaagtcccttctactatggacagagctatgttattgacccaagtccagtaggatattgtggataaggggaagttcaaactcagtaaataagtaggttctagcaagttgactataggaagtaaaactgaggcaagaggtgtggtagaaacgggagaataaagtaaggagacaatattgaagtagtttaggagaataaatggtctatgctatacttatggggagaaatttgagcctagacaccaggttaaatgtttgaaggggaatgtgcctcagttacatgccttgaccactgaggatatggggatggtgttacaacctaaaatgctagaacaagtggaacaggaagagaagctagaagaggaagttcagcaactatctatggatgccattagtggagctcatgaccctcattgtgtcagaattagggcattgattcaaaaccaactcatgttgatgttagtgcactcaggaagttctattagttttattggccaac

SEQ ID NO: 57636 - DNA, 441 bp, Zea Mays
ttgaggtagcccgcggggcgttgactaatgggacggcttgtctccattagcccaccgttatgtgaagcctgaggctgagaggaggagacagggcatgaaggctatcgactccatggtgaatgtagcagaggaagaagatactgtccgtctttagcagctggccaccatgcatcaccaactcacatgtacaaggagctttctgcctgcactgcactgcactgcgccttaggttctacttctactacctgcagcactaggctagctaattaagcgagcatgcactatctgtggttgctggtggaaccaaggcattccgttcttgcatggagacagtcaggatccagaagtattcttgcattggtaaaaggggagtttgtaatgacatgatgtgcttgtttgttctcttcagatcatgctgcggcatgactcatgctcattaat

SEQ ID NO: 57637 - DNA, 581 bp, Zea Mays
gtggttggaggaagagggtcgatgccttccttgggggagtgcttcctgaagacctacgaggtagccattacacaggaggacttcagacaacacgatgttgtccttaccctcaatgagtataaacttttagtagcgaattcattcatttgtatgttctaaactttgtgcctcactaacctttcaattatagagggtgtcacgtcaccttcattgtggtgcggctcattgtggatgcaggtccctcgtaggacttgacgtgcagcttcctatgcagtctcctttgcagcctcccgtggtgcctactccgcaccgccatgattctcccgcgcccgtagttggaccttctacaactgcatagagctcctcgcgttcaacgcgggatatgtttgcagacgtggacgatgacgacgacgacgctgaggacgaaggagaagaggacgtcgtggcctcacatcacgacatcattggaccgtcccagctgcaggacactcccacgattcagccgtcacaactcacccacatagacggagcccacgtgacccctatactctaggcaccgacactctttgggccaagggaaa

SEQ ID NO: 57638 - DNA, 902 bp, Zea Mays
caaaagttcagatttgggtcggtttggaatcagcccaaaacagttttgtttagctgtttttggattcctataacttttaatccatgagtattttgaaaacagttgctataacaaacctgtagagtaactataagagaacaatgtttatgagatgtggtagccctaaaaccgtataaaattaggtgtaaaactggtccaaagtgggaatttcagaatctgaatttcagactgcaatatctgaaactgaagattttatattctgaagcaactttgaaagcttgttggtggctgatccatacagctatgggttaaggtttatgtaccaaagtctgaatttgggtatttgatgcaacctttggaatttggtagtttggaatccatgagtgttttgagaaaggttgtcggggcaaacttgtagagtaggtattggagaacaaactctattatgtgggatgcccctaaaaccatatgcaattaggagaaaaggtggtcaaaagtggagctgacagatttggatttcagacttagtgcagcttactaaatctgaattttagtgtttttggtgcaacttcggagctccttggtggtcaatccctttgtttttaggctgtagtttctatagcaaacctggataccaatgttgggggagtaatccctagtgagggacatacccttgaaactgcttataaatgagagaaaacactgcacaaagttgtgctgtcagataaaagagtattgactgttgtgcagtagcctaagtctgaaatatgtgtgtctggttaaactttggagctttgtggtgcttgatctatatggttttggactgaagttattgtggaaagtttgaagaccatatgttagtgaataagttccttcaagtgtgttgggcgtgaccctacaca

SEQ ID NO: 57639 - DNA, 579 bp, Zea Mays
gttcagaaaaatgttgaggagctccattgagcaaaagaggaatgctacaatgttgccatggaatgttgtaataaattgaaggataactttgctaaagtcatcgcattctctatagagcaaaattttatctgtggaaatccagatggggtcattcgttggatcagcgacgaagcttttgatgaaattcttagtgacagaggagacttctgcgtcttcgccggcgcccgtggggctgtgtcacttcttgagaaggttggctgggggcatgcaaaggctgtagtttagccagaattctcgatctcagccaacgacattaaaaacccttcagccgaagccgctgcgctgagtggaaagttttactccgaagtctggttgaggggtggttgagagatagctgacgaagctatccgaaaaaatgagaaagagtctcatgctgccttagaagaggccaggaaagccgaagaagctgcagaacgtgcaagacttataggtatatctatcgtgacctagcttcataaattattttagcttcggaactaacaaacacttatactatggtgcagccaaactctctctccc

SEQ ID NO: 57640 - DNA, 314 bp, Zea Mays
tatgcgaatatgcattttgagcggtcacggtacatatgcgagcacgcaaatgagaggacgcttcgaatagaccgggcatgtagacgctcaaataaacccacggaggagagagaaaccatagatttggtgtatgtggagggtgagcgcacattttccgcgtcctcatctgcgctctgctggaaggggctattgtggctcgcgagcacacaaaatgcacatacgcacccgtttaggggctctactggagatagctatgtaattgtagaattagcaccttcagttactcatgaataagtcgataattgaaactggat

SEQ ID NO: 57641 - DNA, 1137 bp, Zea Mays
caggcagcaagacattactcgtcggtcacgagccccatggcgtgcggggtagcagtagcagactccatctagttctgcccttagctatcttcaagacagaacgagccactgcttgcccttaaaatcggacttgcagcagtactcggacagttaggttagccttgtaccttctacttacaaagcaacatgagaatggactcttcctttgcgataagataaattgtgatccagcccggtaaggcttgcctattcccagactctagcgccatttatggtccaatctggtaggggccacccttgtaaacctagtctctggtgttcattacacaaatcacatgtacctagttgtaaaggaaggatttattctcatccaattatttcttttcttgaatcgacgtgacgctttcctccgcttttcctgcgggtccaagcttctattgtaatcatgaatttgagtcatgtatctaaccttgcacctagttggggccttgcttgatgatggaaaaggaacggacaactaggaacccaacctacgggaaagagtccacattcttaggggtggtccagagctaggtagctgcttagcttactgtaatcctacaccttccaccaccccagagcagctaaccaagtaccaacgactcactacctaagggtccagaccttttccagattctagggcagatcctagagctaggctcagtaaggttcggttgcatgattcaaaggattgactgcgacaaagcagaagttccataggtatgctgctaagcttcggtcccaagccgtattcaggactggactctagttttgcaggccccttagacaatcgaagctacctcacaggggatcaaggtacctagggccagtctacataaacctgatttctggcaccatctgtcgtccaaccgggtaggggccacccttgtaaaccctgtgtctagtggttttcgtgcaagaccttacacatccagaaatgaagaaaggtttttcccttggtacgatccttacgtatcggctctatcatttttaacctacgcatgtttctctttctaccccagctcgagattatcatttttgttgttatcacgaaatctgagttatgcaactagcaatgccgcttattttgtgatcccc

SEQ ID NO: 57642 - DNA, 499 bp, Zea Mays
tcgtctcggcttcaattagcgcttagcgtacttagggatcatgcaccgagggctaggcatgccctacgccggtgacgccgccgtcagagtgccctgttcacgatgcctggatggctggaggagagagatgagccggtaaccgtcgatccccgattcaatggctaagattaacacaaccctacctctttgttcgtgtgcaccgtagccgttgatctagatatccaccatcagaaatgggtcgttagtattttaagttgctaccgttgatctctaatccacggtccgacatcacatagcccttgacttataatcatggccagtgctccttgatgtcacaaccagggttcctggataccccttcgaccatgacataattgtataagagaccctcaactttcatggaatcaacccgcaatccactgtagtacgaggaacattgcaacaaggtcctgaaatttgcaaagtagaccctggacttcaagcaaattgtggccacagt

SEQ ID NO: 57643 - DNA, 658 bp, Zea Mays
ggcgggagaggttggatcggttggccattgctgatgagttcttgaagtccctacaattacgcagggtgtggcgcatctccttgtgatacgaacactgggcgtcgaggatgtcatacattgtccgggtgttgctgcctcgtggcgtgctgcggggccgggtcaccaagggtcctgcaacatgcacttcatctattggcctcttgtcctagcgcttgtcttaggcccgctcgtcagcggtggtgtagatgtctacttcttggaagagttgcttcgaggtggctagagctttctagaggatggctcagacgaaagctgagtcattggatccatggtagacatcctcgatcacgtcggcctccgtgacaatggagatacgattcctcatagtttggaaatgccttaggaatgaacgagggactcatcactttggcgattgatggatttggggtcccaggttgcgctagcttgtcggaaagggattgaaaattcaagacaaactagtggcagaaatcggcctcgtcgtctatgcaatggcggggaaggtgtcaaagccactgcagcgcgtccagcccgagaacgatgggcaggtacgctgccatgacgtcctctgttgccccggtggcccggacgacggtcatatagacggccaacctgtcac

SEQ ID NO: 57644 - DNA, 1144 bp, Zea Mays
gaaaacggaacggatcaaacgacactacggcagcaacaggaaggtaaaaaaaacgtacatatattgtggtgaagtctggaacatacaaaaagattgtggtggacggatccggagggaggtggcggctaccaaaccaacctggttggaggcgacggcggcgtgggaaaacgggatcgctagcgcagttcggtcgctaccaggaaaaaggagccgtcgctacaaggaaaaaggagggtggtgacgaactgacgatgagagtcaggcagcgagccagcgacgacgccaatgagagagaagtcgcaagccggtttgtatgcctccgccgtttttacttactgggctctgctaaaaccctggagatatgcttttctgcaaccaaacaaaatttggaatcgcaaaaaaaaaaaacattttagcggcaactttaaaataaaacagtacgatgcccgtaattcaataaaatatagatgcacaataactatgtaaaaacgagtaatatatattatcattgaccttaatatctcataaattatttgccaacaactttacaaaactaaactcaggattcgaagtgtcttctcctcctctcactcggctgttcgctggccccgctgtctataaaggtgcacgacggtgaagagtcgcgatagcggttcgaaactcttaccgaggaggaaggtcgatatcctctattgtggtgtggaatgagtgagaggagcgaagatgacaaagagatgagaagttgagttaatatacgacagcaacaacgaagagggaaagaaagcgctcggattttgtttatcatatctaattaggcgagatgtgacagagaaaaacaaatctacacgattcgcgcgtgacgcactacgtacgaaactcgtgctttaaaagagtagagatataatatcataaatttgaagttgttaaaattcacgtgcttgaattttgttgcatgtattttatataagattacattttagtttgttgtaatttatattggtataatctgtaattttcatatcagcatatatcgacacaaagacaaataaaatttatgtttttctatagttagacaatggcaaaaaaaatattataacacaaagacaattaacgtataacacagacaattaacaaatttaaaaac

SEQ ID NO: 57645 - DNA, 946 bp, Zea Mays
ggcccaggtggaggctgcggctgtccgtcgagtgggccagccctggcggccggttgggcagcctgctggagcggtccaggtggtatggcgctggtgcgctgcccagcagtggacgagggcaatgcgccaatgggtggaaccgggacctgttcagaaaagaaatccaaaaaatcaaggttagtgggaagagccgagctgggaggggtctcggcgaacggaaaggaggattcgtcgaacacaacatggcgggagatgatgatacgattggtggagatatcaagacaacggtagcctttgtgttcagacgagtaaccaagaaagacacacatggtggagcgtggagcgagtttatgggtggcagtggcagagatgttgggatagcacttacagccaaagacacggagatggtcgtaagatgggggcgaccaaagagggcaagatggggagtggaggaattgagggtgctggtggggtggagattgagaagatatgtggtggtgtgaagagcctcaacccaataaggagcaggaaggtgagcttgaaagagtaaggaacggacgatgttgttaacagcgcggaggacatgttctgctctaccattctgctgggaggtatagggacacaacatacgaaggtggacaccgtgggagaggaagaaagctcgtgcgtgggagttgtcaaactcacgaccattatcgcattgcaagctttttatggtggtgccaaattgagtggcaacaaaagagaaaaaattagcaatagtgggaaatgtgtcggatttgaggcggagagggaatgtccacaggaagtgggagcagtcgtcaaggatggtgagatagtacttgtaaccagaaatactgggtattggagaagtccatagatcacagtgaacgagatcaaagtgacgtggagcacgagactgggaaatggaaaaaggaaggcgaac

SEQ ID NO: 57646 - DNA, 792 bp, Zea Mays
cttgtggctcactctattggagcgaaggctggactcgacctcgatcgagtttctcccgactacagttaaccatatttggacgcagggcccgcaacacccgaagacctcgtctagaatcgatgacgagacttcgcctggaatcgacaacaaagcctccgaccacaacgccctacgagaagatggggaatcattggccactggtgcgaagtcggctacgggtgatgactcagcacccccacggcgtacggggcccaaggccctggcgaagacaccctcgacggtcgccgaggggtgaagggtccgatatgcgagcgaaggcttcaaacactcgagggacccatttcctcttagctagggcctagacccacttgtaaaccccttggaggggtggacttttagatgtgtttgggtgtgcgtactttgttgtgtgtaatgaccccgctgctggggaatattccaggaatgcagtaggtaaccgggggcataatggtacttgggaccacctactcgcccggttacctataaatatccccgttctgtacacgcataacaagatgctatagtttgctacctatcgtttgtagtgcacctgagccctatcaacttccgagtttttgggtccgcccgtccacgtgttggcaaatccaaaatttggcgcccaccgtttgtgctccgaaaaccaacacccacgatggctccaaaaaagtgactactagagctagctcctccatggacgaggccacgaaggcggccctcgtcgacaagaaaggcaaagcagtactcgcagatgac

SEQ ID NO: 57647 - DNA, 572 bp, Zea Mays
ggttaagatagatatgggtgagatagactacatgatgttggtcaaaagtttgtttgatgttaggtggggatagataaattatgcaatccatcatgactctattggttgggttagctctttttgctcacggttgagttgcactaatttaggtttaagtgcatgaggggagaacaaggtttataggagtaggatccagtttatttcactagtgttaacttgttaagggactcacattagattgaataagatctagattagtataagtcgagtgtgttatgtcaaattctatttcggtgactttgtgttatgtcagactcggtacaacgatgtaaatcattggaaacatgtaggtcaagctggtagattagaatctctctctctctctctttatagatagattaggctatttatcaagaatgtgtaggtcgatggtatatggctgagttggtcgagttgatccaagtcaccaatttaggcttgagtgaattaggaatatggccttatcctttgtatgagcattaagtaactcacactaggtgagatcatattaatttagataggtctacttcctt

SEQ ID NO: 57648 - DNA, 546 bp, Zea Mays
tgcctcccaagacctgcagacgatgaaaatgtaacatcttcgtcatcattctatatatatacgtacagagactgagagataaaaatgaagatcaagtatcatcatcaccataagctctggtagccaggaggaagaggaggaggagagagccaaacgccatggagctccagctccacattgcagttgcaggtgctaacaacagtgtgtgatacctgatacgaagctggctaaaggctgctcaagaactgattttgggtgcatatatatgaacgaagacacgaagtgaacacatatttctgaaggcatatacgttattatgcatgtcttctagctagcgaggacgtgatgagtctctgatcgcagattcctgtccagaattaagttgggttacaagcctacaaagaatgggatcttgatgtgagtctcaagataaggcgcatgcatgcatgtcaccgcctttaagggaggatgttttcccggccgcgaaatatggcccttgttttgctccgtcgtcaccttgtccatgtcctcacgaccaggctcagg

SEQ ID NO: 57649 - DNA, 372 bp, Zea Mays
tgaaaatgcatcgccacccccacccgtaccatatgcaatggttgaataattcagggacagtgaaggttacatccatggtacgcttgccattctcaattggtgactataatgatgaggtggattgtgacattgttccaatgcaagcatgccacttactgttgggtcgtccatggcaatttgatgtcgattctgtgcattttggtcgctcaaacaaatactcatttgttcacaaagagaagaaagtgatccttgtcccactaactcctgaagatatacatgcttctgatgttgctcgcatgaaaagagaagagagtgagaaaagaaaaatgagtgagacacacaacaatagtaagggagagaatcctaaaccac

SEQ ID NO: 57650 - DNA, 405 bp, Zea Mays
taggaatctccgttgccaaattcatattgtctctgctttctttgttgccaaattcatactccgggtgtcctgtctttttatatttattttgacgattgttgggctaggtcacgttcaattgatctctgcatgagattttatacccttggagaacttgaaatacttattgtctctgcctctgtcctggtggcatgtgttttgttgagctcgctagccaggccatgtatggtttcacttgaacattttcacttccatggttgatatgaactggtgacatccttactgatgcactagatttcgatcctaggatactctttaattgatgtatgctttgcttcggtcctacaatattagagcaacttatcatctcccacattttataatccatcctagcatgctacaatt

SEQ ID NO: 57651 - DNA, 674 bp, Zea Mays
acaaagtatgatgaaatcatttcttctatcttatgaattataagtttggataagtaccttcaggttcgtaaaaattacaatgggagggagataagaattacatcttcgtatggaaagaagaatgagtttaaccttacactccaaaaagaaaaggtgaacaatgcacgacgctattctgctatttatagacccgagatatggctcaggtaaatttacaattatatccttgatcccaatacattcagactaatatacatgttaggggtaatgtcgtccttctccttctttcagcctagttcgtcagccttcaaaggtcctccaaaattagctttgtttgaagcatgtacacgatggtcatcagaagccttcattcttgttctgcttggaacctaccttcggcgttatcccttcgtcattagtacttcgacattaaccctgcagtatacacataacaaaacagaatgaatggtcacttagtgaatgttttcaggacctttgggagaaaaaagaccaccaacaaggcacatgggtctagacacgtctggcagagccattggtctcaggactcgttccccattcggggacaggtctggtgccgccacatgtcctaggggtggaaatgctcatggaccggtaccatgagtctagaccctgtaggagggacccgaaccccc

SEQ ID NO: 57652 - DNA, 422 bp, Zea Mays
ttggttcgcttcgctggagaggagaagattccagagccaaaagaagatgaagttgtagtcttcaagagcttcttcagggtggcacttcggttccccctttatgaaatgataggtgaagttttgaaaaagtttgaaatctacctacatcagctaacctcgaacgccattgttaggctcagcgtgtatatctgggctcttcgaagccaaggaaagagtgccaatgccgaagggttctgtcgggtacatgagcttcattattagacaaaggcaagagctgacggtctgcacaagaactttagatgctacaacttcgcatactagaaggacacaaaggcccccatgataggctaccacaccaaatggtcgatggggtggacaaacgagtggttttacatgaaagctgactgtaatacccaatttgt

SEQ ID NO: 57653 - DNA, 361 bp, Zea Mays
ctatgggttcgagtatttcgggtttagagctttgggctcgggttttaactgagcgcagaaacggactggcttcgacgtggagacgcgagccatctttcttgcaggtcgcgtgtttccgtagtgggccacataaatgaatactttcaaaggaggccaaatgctgctggcgtgcctgagttcagcactatacagaaggtaatcattgctctacacatgcttgcctatggtgggactgtcgataggttggacgagtatttcacatgagccagagcacaatacttgagacattaagtgagatcacccgaatagtggttagtgtgtacgagtctgcttacctctgagcaccaaatgcagacgatat

SEQ ID NO: 57654 - DNA, 346 bp, Zea Mays
cacagtaacacgggtgccaatctttccaagtctgcaaccatggtccgagataactcttttgcacaaagctgacggaagaaatagctcaactctgaaagcgctagccagacatgctcagggacatagcctcaaaccatcgcaggaagaatccgttcaatccatatgtgaaagtcatgactcttcatccctaggactcacatagtagataagttcaccccctactcaagttagctgcatacccatcagggaacatcaacatcttgatccactgaagtacttccttcctctgggccctgcttaggacgaaatcggccttaggccttctccatgtctttccaccacttgg

SEQ ID NO: 57655 - DNA, 597 bp, Zea Mays
ccagcctctccccacctgcgccgccaccgacttcctcccctcacccttccggtggtacacaggtgggagtgggagaggcgagcgaccaagcacacgtaggagagggagaggcggacatcagagcaacagtgggggaggcagcaccgtaccagacttcacatggcaacttgtagatgaagctgtaggtgcaagtgaagctctttgaggtcgtaattttccaaggaaagctcgtgggaacagtagcaatcgttccaggaactgcacaccagatgttgatgatgatattttagatttcattgaggaacaagatgaagaacagctggatgatgaggaagaagatccacatgatgatgcagatgtgatagatcgtggggatgcaactgatgagcccactgacgagggagaaaatgcagcagctgctgatatctttgatagcttagatgattatgagtgactcggtgatgggcatggccattgagagagaggaactgggtgatgtactgctgtttaggggttgttatttgactagtgtgtgctgtagttttatgtggattatgtgtgctggtatggactgggtgatgaacagcagcaattgtt

SEQ ID NO: 57656 - DNA, 834 bp, Zea Mays
tgctcaccggccgcgtcaaccgcgccaactgctgctgaatcctgcgaactcgtcgtcgagcgctgcgggaagccatcccacgttacccctcgcccacctctataaaaccagtcgcggttgcatagaaaagccccttgcgtccaccacgtttgcctagcatccccagaacaccgaggaagaaagccgacctcgggtactgctgcgctagcaactccgcgggagtaggaaagtgaggcagggaattcgccaccgaatagatcacgatgccgggacctcgggtgagtagccacctcggactcacctcctttcctccatcctatggcttttgtgcggtccgtggaggagcagtagcccaaagcgaagtttaggtgcggaccgtgattggtgcgccgccagataacggcggtgtcgtgtactggtccgggctgtgtgcacgccggtggatcaacgggagagagagagaaccctggcgagggcacgacgtctgtgcatgggcgtccggaggttgaagaagaacggcggatcgttgatctcatctccaacggtcacgattagatggatggttgagagtgtgggaaccgtagatcttagatggatggcctagatcaaaccttggcgtaccccttcgagtcattaaaccagggtcgtgaattccggatccaacggtagcgttgagcgcagatgaataactagcgtgaagtctaatctggcgcgcagatgttgaatttgacggtccatgatccacgataccccttcgctggcccttgttgcgcataagcccccagagatactggatatcaaccttctgtctggggctgcaacgctttgagtctc

SEQ ID NO: 57657 - DNA, 882 bp, Zea Mays
gatgaacaatattattatgggtctaatgcaactcgaatggatcaaaaaggaattaaattcatagagttatgaatttcctaagattgggactttacttttagactaaaaatgatttctgtatttattttaatcaattactcggctatctggactgggaccatgaataccgaagagcccggggtcaaaaccgcaaattctaggattcatgtgctctaatctttgtttctgtgtggactacgggtggattcgtatctccttcggggttttataagaaaaattaccacgacccaaggtatcatctaatcaccatccgaccacccaccgatgggacagattagacccgactccaatcgaaccagtatgcgtttgtagtcaccggattgaagatctatggctacgaatttaaatacaacgccatcgcgcacgagccaccggatcccgatccgaccacccgcgccctatacaacgaaaggctatactcgatctaatctgaaccgtccctcgccgaatcgacgacttaggtttcaaatgcacgagatctaatctcggtcgtcaatactgagatcaatggccaccgagcccatcatcaacccagactagccgacggcggcgcaaagcacaccgcgacggagatcccaccggcatcggccaatccgacaccccagagtgttatttcttacacggacaagcgcaacatgatctacggggcaatttgatttgattaagctagggcataccagtggtgaagcaacgcggtaagctggccacagcaggaggtgggtacacgacttcggtgagtaattcggccagctaccaagaacctgggtatggtcgctctgcgtgtcggctttggtggttctccgggaaggaccccgaacacaa

SEQ ID NO: 57658 - DNA, 588 bp, Zea Mays
ctattttgtaagtttcaggaccttgatgtaatggtctttgaccagaaccggactacggattgaatcctatattctctaagggctctttttatgaagtttgccacgcgaaggagtactgatccatcacaggcgatggatcatggtctacggtgtaaataacaggacctagctttaacactctttagacgtgtttggactgcaggttgaatatttcaaaggacaggggttcttctgtaagatggcgtgaccgaagaggtatgatctaatatggctgtccgattagaagcccgcggtccagattatattgaatcctaatatccgaatcggtatgtgctgcgagccgcaagatcagaaatcaatgaccctcattcatccgcgtcactgatctaacacggccctcggttccaagatcaacgatcagatctaaatgagctgaaccggtatccaccttctaatcaaactcatacatgcccgatccaacgaattagaggctgtcttcatcccccattcccccatcactcaccggtgctagcccgacgacacaaagttgaggcacgacggtgccattgccgcagacctgaatcccat

SEQ ID NO: 57659 - DNA, 476 bp, Zea Mays
ctccactcttgctgaagccaagggagaatgggccaaagcgccgaaaccgatggtaatagcggaacaggagaaaaccgagacgaccgaagtgccgaagcgtcctaccaaagctaaggagaaaacaaccgaagaaccataattaaggaagtcagcagagcaatcgaaaaccctgagcccgccacaagagccggagctgccgaaggtgtccaaaattcctgcaataactccaaaaaggaggagaatggccagcgtactagacgctgttatggaatcttcaaaagtacaaacccctgcttcagcacctgatagaaagggtgaaatcccaaagaaatctagcgaagctggtatgacactagatactgccgaagctgggccatcagctcctatcgaggcatacgcttcggaaactaatcctttgaccttggaagaataaaatgtgcccaagaaagttcctgctcccgaagtacctgttgaag

SEQ ID NO: 57660 - DNA, 1514 bp, Zea Mays
cggctgcggcaagctgctcccgcaacattaaggtgaactgagccctttcctctaacagctgtgccacatcaacgatagcatcagatgggatatgaggtgctgctgcaaacggagggtcataaccgtacaacactttgaaaggagaacaagccagtgaagtgtggtatgtggtattgtaccaaaattctgccagaggcaaccaattcttccatttagaaggttgagcatggactgcacacctcaggtacatctccacacattggttaacccgctcactctggccgtcagtctgtgggtgatatgttgtgctcaggttcagcttagtgcccaacagcttgaataattgactccagaatatgttcgtaaagatcttatccctgtcactaacaatagatctcggaagactatgcaagcggaccacctgatccaaaacaacctgagccacttgtgctgcagtgaaagggtgtttcagagcaataaaatgggcgtacttcgagaaacagtccaccacatccaagattgtatcatagccactggacttgggcagtttttcgatgaaatccattgcaatatcctgccaggcgccttgaggaaccggaagcggttgcaataaactagttgggtgaactctctctcctttggccttttgacaaatttgacactgtttgacaaaatcttccacatcagtattcatgcccttccaaaaaaccaatttcttcaatcgatgataagtggcgtgcacccccgagtgaccacccgtggcactgtcatgcaatgttgccaccaacttcgtccggagagctgaattttggccaacccaaatcaaactgcccttcctgatgactccctgagaaagagagtagccatactcatccgagctgtggacacacaaccgagccaacagtgactgcgcatcagaatcagtcacataagaattggtaacttcttgaatccagcgaggttgaacttcactgactgctgtcaacgccatcacacagcccacccgagaaagagcatcagcgactttgttctctttgccctgcttgtagattactttaaactgcatccccataagcttttccatggccttacgttgcaactccgaatgaagctcctgactgcccaagaaactgagagccttgtgatccgtccggatttcaaactttcttcgttggagataatgacgccaacgatccacagccatatcagggcgatgaactccttctcatagatcgaaagcttctgattggtaactcccaacgccttactcaagaaagcgataggtctaccctgctgcatcaacaccactcctaccccgtcatcacaggcgtgtcagtttcaatagcaaagggtatgttaaaatcaggtaatgccaatactggcgtggaaaccatggcctgctttagacgctgaaaagaaacttcagcttctggtgtccacttgaaggcccctttctgcagtaacttcgttagtggccgagcaattatcccgtacccttgcacaaagcgcctgta

SEQ ID NO: 57661 - DNA, 493 bp, Zea Mays
gggccatgatgattgactgacagaataatgccctaaattagtgcatgatttgtttgatatatagggattacgtaccaaagaaatatatagacagcacacgtttgaaatttcaggtttagataatgtgtacatatatatgatggtaaatctgttaaattattgtgtaaagatctgtttattgggcatgcatgatgctgtgctcagcttattattataaaggggtcggtatgttaattaatcaattcaactgtggttaactgaatgtaatttagtaccaaattcacctgatgattttcgtcgcacagctgggaacggcctgctgcatgaggccccctcatcagctgggaaaggcaaaaatgcatagaatatagctaaatgaaaagaaaaggcgcacgcaccagtcaccagtctcaccacccaccagccaacgtaaaattgatcattgaccagttcgccgagtacttcttacggttttgcccctacacttgcgccg

SEQ ID NO: 57662 - DNA, 402 bp, Zea Mays
ctctgaacaaattctcatggtacagtaactgaaaaagatcctgggttcagatcccctcgccgtaggtgatcccgcgccgtgatcctcgtcgtcgttgcgattcgtgctctatggggtgcagataactcttaagggtaagaaatatcgcgtcgtgggtgaactcaggccactgttctgctccggctaccgtactcgcctgagtcacggccgcttcgaatagactcaccagagttagccacctcgcgaccttgcgccacgtgctttggtgctttaaccacgtcgcagtgagttacattagcccaccctttgatcgctggtgagcttgccacggtgaacgccatgaattgcttgcgccagtaacctcttccctctccggctgccacggcgccaactccaaatcac

SEQ ID NO: 57663 - DNA, 607 bp, Zea Mays
ggcgaattgaataggattgcgatggtacagtgtctgaaaatattagtgatgcagtgcacctcgccaccagtgatcttcgcgttcgcgccggccgtcgcgattcgtgctctgtgagaagtggataacaccgggaaggggtgaaaagatccggggaggggtgaaccagtcgctggctggttcagctgtcgtgcctcccccttaccccgctgcggttggtcgtgttggcatcaccagagttcaccgtttccacggccgtgacatgcagcgattcaacctccatgtcgtaaaggtcgtgacaagcaacaggttaccatccctgaaccatttccctctagcgagccacggtgagcaggccaccgtaaaaatatccaggccacggtgaactcgatcccaatccaaaatttgtggtaagctcagccggggtctttaaattgaaggcaccccctgctccgcctccctgttatgcatccaacccacccacagttagcctctctcgtgcatcgtagcccctagtcaccggatttcccccaaattggtcatctgcgccaccgtgagacgccgcaccgtggctagccacccacaggtctgtcttcgtccttcttgtccg

SEQ ID NO: 57664 - DNA, 576 bp, Zea Mays
ttggccacggaagagctatccacggcggcgcggagaactgaattgggggaagaaaggaattggggcgctacggtggctaatcggaggcgagggctggtgctctggcttcgtaacaacctagtggagctcaccggggcatcaaattatagagtgcgatcacgaatacgacgaatttaggcggggaagggtgggtagtgaggaaaggggaggagtcaccggagttatctatcgtggcattcatcggggctctgtcacaggcgatggatagactacctacggcggtccactgcgacgtggtaacaccactaactacgtggcgcatgggtggcaagcggccaacgctggcgaggatcatcacggccagttgtagagcaagtgggtatggtgaaccatccagtgaccacgtccgagcttatcctggcgcctagatcttttactcccctcggttatccacctacgccgagcacgaatcgcggcgacagatgcgaatccaagcgtggggatcaccggcggcaaggttcagtgaactcaagatcttcttcagaccactgtaccattgaaaccctcatcagagcg

SEQ ID NO: 57665 - DNA, 423 bp, Zea Mays
gtttgaagatgtcaccgtttgaggctttgtatgacagaaagtgcagtactccactgtattgggatcaaactggtgaaaggcagttctttggaccagagattatacaagaggcagaagaacaggtccgacaaataagggagaatttgagaactgcacagtcaaggcagaaaagctatgcagatacccagagaagactgctagagtttaaggaaggtgatcacgtatatttgaagatgtcaacaattcggggcttgagaagatttaaagataaagggaagttgtcccctcgctttattggacccttcttaatcctaaagcgagtgggagaggttgcctatcaactggaactacccgatcatcttgcggatgtacatgatgtcttccatgtatcacaattgaagaagtgcctcagggtacccgaag

SEQ ID NO: 57666 - DNA, 318 bp, Zea Mays
cacttgacacccttcccgacatctctattgttcccatccaagagctccttagccacccaaaaagatccactcccacaatagagatgggaacgggtgtgtacctgtcgggtagtatcatcccatacccgtactcatcagaaaatcctacccatcgggttacccgtataaggtcgtgggtatagaatcttaccagtacccgtgctagtagttgtacccatcgagttcccagtatccgctagaaaagtctaaaatactaatttgtcaatcactcaaaatatcaaacaaacacaaaaaaataaatttcaacttaaaatacac

SEQ ID NO: 57667 - DNA, 394 bp, Zea Mays
atgcaaggaggcgcaacgtgcagatcggggaaagggctcaccttctgatggtggcttggcttggggacgatttgttggaagtcgacggtcggcagcagatccggtggtccgagcgtcaagggagttgcggcggttgtggtggaggtcctagggcagcactggcgaagctggagcaggggtggacgaagaggaggacgagctgtcctcggggcaggcgagcacgacgggcggggcaggacgacggtgtctccggggtgggggacgctcgacggctgtctcggggcttgggggcggacggcctcgcccggttgtggtggaggtcctagggcagcactggcgaggctggagcaggggtggacgaagaggaggacgagctgtcctcggggcaggcgag

SEQ ID NO: 57668 - DNA, 385 bp, Zea Mays
gggacattgagcaataaaatgaagcatgagcgctttccccttgatttgttcttgttgggtagtccttgcgtcccttcaaagtggtcttgaagcgcttgatcacaagcgtcatctcgtcctcattaaggatggccgcctcaacttgcaccaccttgtcagggagtagctccttgttggtcgtcgctttgagagcaacaggttgtggctcgttgtgaggaagaagtctgttggtgatgtcgtcgacataccttgctttctttaccatcatgcgcccgcacacaaacttaccaataatttcatcagacaatattttggtgtacctaatgttctcacgaataagatttacaagatgaggaccaataacaataaatgaccttagcatgag

SEQ ID NO: 57669 - DNA, 584 bp, Zea Mays
caagtttctaccattatttttgtattaaaaatgaatttagaatgaatttctatgattttatttgttatctggactgcgcgcaataatacaaagaactgcagggtgctatctaaaaattccagggcctcagtgtaaggttctttcaactgcttgggactgtgggttaattcgtggagatcctaggggttcttttgcaaagtcatcggccaaagggtacgggcgatctcgagccgttggatcaagcacacacgctccagattaaattgcgactcaagtgaaccggtaccatgttatagccgtcggatgatcgatccacggctcacgttgaaccgaaccctgcttcctaatctgggtcacctatttctcattcaacggccgataaccaacttctattatcagccgctcatctagatctaacggcgcaacgcgtttcttcaacctctcggttctctctcgctcctatttctttcctcagccattccgccgcggccgagcgccatagacgcggcagcgagcgattccgagctcgccattcgagccctaacttctgcccggacgaacctgctcgaaccctacgtgacctt

SEQ ID NO: 57670 - DNA, 718 bp, Zea Mays
tcccaatagcttttgagatatagctaggggtaaaacttcctgagatgttctatgttccatgagttcccaatttccgtgccatccatttgagtgagacgatatgatctaggccgagtgacttctgctactatgaacggtccttcccatagtggcaacagtttgtgtcgtccctcccccattagaattcggtggaggacgaggtctcccacagcaaaggatcgatgtcgtatggccttgtcatgataacgcctcagagtttgctgatatcgggctgactgaatcaccgtattcaatcgttcttcttctagtatattgacatcctccagtctagtagcttcagcttctgctatgttttcaaagattaaccttggtgccccaaacttgagaccagcaggtagcactgcttccgaaccatagaccataaagaaaggtgtgtttccatgcaaagctcgactaggttgagttctcaggctccaaacaacatacggcagctctctaatccactttcctgtgaacttttcattcttgtcgaagactttctttctgagtgcctccaatatcatcccgttggctctttctacctgcccgttggctcttgggtgtgccaccgaggcatatttgatctgaatgctcttttgctggcagaaatcgaagaactctgagcttgtgaaattggatcccaggtcggttatgatgctattcggtattccaaaactga

SEQ ID NO: 57671 - DNA, 355 bp, Zea Mays
aaatatgacaataggctcaaggagccgattaggacaacgaacataggtcgatctaattgatctgactagaatttaatgtttaactgtttcttgtgcatttgcatagtgatacaccaatgccaacgcacccttcctggttgtagttcaagccaggtgacatgctcgaaaccccttgtttgcggagtcgcgttccggaggaacgatcatagcagcaacgtcctcctgactccttatgtggttggtaccaggtgacctctggccaattcacacaacgacactctttgacttgtcaagtatgtatagaaactacttccatcgtgatatacatgatatctaaatagttttagaactaaat

SEQ ID NO: 57672 - DNA, 617 bp, Zea Mays
cggcaacggtagacgtaagggcatctacaacccaggaggtttttgagaggtttctaggagattatggattaagtgtaaaaaatcaagatacgactttctatacatattatatcttaactatattaatgatctaggggcttaaagttgtatcatatgatttcttagctgtctcttgtacctaaaaccgtttaagggctctaggttgtacatgtcctaacagccataatgtttttctctcagctgacaatgaagtattgtaattgatagtcattaacttgtcacactcttcctttgttttatttagcgtgtacttcatgctaatgtcggaagcggacccataatttttgtatcaactcgaggaaagaaatgtgaattaacaaaatcattcatccattgaaaccaaataccaataattaccaaatatcgcagtcaacgtgacctaaaatgtccaattctccatatataccaaccgctgtaacaaagttcaaaatataatgcggtaaatgtgaggcgcttgccggttgctgagtaaggaaggagagaaatggatatgtgtgtacatagcacataagtcattgacgcgacgaggatgaacctgcaatttggtggcacttgga

SEQ ID NO: 57673 - DNA, 929 bp, Zea Mays
cttttgaaacgcgcctttgatttctactagtgctgaaaaatctgccctatttacagaactgccattcccactagatacttgtacctcctttcttgtgctttggtccaactgttctattacattttctaggccagcaactaggacgagtacttggaacacttattcagcattgctatctgttactgacttgtgtgccacatatatatatttagttagccttcctatagctccaattttctctcgagcagaacatgtactcctttgcaatcacacccacgctcgttggacagtcacatcggtcaccgtttgccaccttcagtgctggtaagaacgttgtaagagcggggtaagacgcttcataatttgtattccaccacctccaccaccaccctgagagatagttgtagggttcacattgtttgttgcctttttgtctctgttttgtgctaacaatgacaggaccaaagaatcaaatggacaaggacaaggggcctaaacttaacgacgatgagtgtgtctctcagatggaattgaaggagatgatgcgcgcgatgactgaagcttttaaaaaatatcaggactctgcctcgacatcctatgagcagcttgatcgacgagttgatgaacttgttacacacatggacgtactggaggcttgtcccccaccaccaactccagccccatctcactctcctatggacgacgacgatgatgtttatgcatcgctgccacaacgcttcgcacgtaatcaacaaggtatgggaggtaatggtagacgtcatcatactcctcaaccagaccatgatccatttgctaagattaaattctctattccaccgttcatgggttcttatgatgctgaagcttacttagactgggagatgatggtagaacaaaaatttaattcccatcttgttcctgagcagcat

SEQ ID NO: 57674 - DNA, 703 bp, Zea Mays
gtttagtttatgtttagatactgaagctaaccgctagctagctaaaagttctctctagacctctagtacatcgaaacagaagggttaatagatagtctaattttttagtcaagtctttaaaactagttaactagtcagataaccatggctaatttaagctatttttttagctccaaaacaggcccttagtatagctagagtcaactgacaggagcggtggtgtgttatgagatcatcatccagtggattttgtgtcgatgatccattcattctatcaacatgtgcttatatgatcgatcgatatgagagatcaactcatcatgtttctgacgcacgaaagaaataaggacgaaaattaggaacgagatgatctgtctcaaccagttcactagtgaaagaaaccaacagcatgaacatatatataccccatgcaccacatctcgaacgaaattccaacttaactcatcactgcatgcatgcgttgctaagctgacaatgatggctgccagtgcccagcagatgacttacagcatccataatatatataccaatgtttcgcactgacagagaagtcaaagaacgatgaaggaggagtgcccggcattctgcgagcaactggagaagatcgtcaggaagaaagcaggggcgtagccagctgcagcctgcaggaggagtgtgctggcgcatgcgttcaccattcctc

SEQ ID NO: 57675 - DNA, 951 bp, Zea Mays
ggccatcgattgcttataccgttaggtaccctagggtgtgaggggctctaggggcttatactattaagtgttatagggtgctagtggccttacgggcttatattgttaagtgccctaggtgcgagggggtagtggcttgctcctataccccacattatgtggtccagtaggcttagctaggagcacctttgtataaactgaagttagtattggggatcttcactggttaaggccatgagaggcaccctagttgtggggcctcaagagtactgactgccatactataggcctaaaagtcaatctctaatacaaggatccttaagtgtgtcatggcaacaaccgagggtatgctcctctccaggtgctaatagggggccctaggttcgtctcaaaggcccactcttctcgacgcctcataaatcaacatatgggaaccttggatccactcttctcacgtcctagtttgaccctttcattgtgctattgagccagctaccacatatcactttgaccctcatccttttttgtccttgccctagtcccttaagcaccatagggggtcaatttctatgtttttggcccccgggcgctagggccagtgaaccatgagggtgacctaaatctagggttcctagttgtaggaaactatgcactagccttagggcccttggtagtcctttaccttgtgtattgtgctactaggggcacttaaggtaattgggcgcgtaaacctagggtccttagcaatacaagagcctcgaaaggttgtttcttattctaaaccttagaatagagtgctaggaccatggtggaattgttaggccccagagagtaagaatgccctagagaggtgtcaccgcacacccaaacaacaaatttcatgacgcatctgaggccctcagcatcacaagggccatgaaggaatgtccctttgaccctaggtgtcacacc

SEQ ID NO: 57676 - DNA, 676 bp, Zea Mays
cataagagccttcgtatccttcctgtaggcaaaattgtagcacccgaagttcttatggagaccatttgctctggccttcgtctgataatgcagctcatgaactctgcagaaaccttcggaatttgcgctcatgccctggcttcgaagggcccaaatgtagacactaactattgcattcggtgttagctagtgaagatatatcacaatctttttcagcacttcaacaatggtttaatgaattgggaatcgaagccctgcccgaaagaaactcttgaataccatgacttcatcatccttcggttctggaacaacttcatcaccagcaaacctaaccaagtcatcatcatcctttacaatatacccaagtttcttcattaagcccaaatcgtcagattttatagtagatctaccaaattcgatatggctaggttttcttggacatagaacactgacatcaccctcagcatcttcactgtcggtctcaccttcggcatcataattacttttctctagaacatgcttttcttcccttgggacgacgatgctagaatctttcattacttttgaaataggtgctgtttcagtcgcatctacttccctacctccatttgttaaccaagcagtagacctaattctggccatcgcaaagttaagtcgaagctaaactaaaaatttg

SEQ ID NO: 57677 - DNA, 437 bp, Zea Mays
cccttgcttcgcgttgctgctggacttggtgctgccctttaggctgctgaatgtgggatgaagttggagcaagtgcaggtggttgcggtaaggcccatgcagctggagagtgacttgccgaagccactgaaattgttggttgtgagaatggctgttgattgcccacatactctagaatgtatggggaatatcatgaagcagtatgcaagacttgcttcagctggttctgccgtgcttcggcttcaactatatccttttgcttatgtattgtaacttggtaggttcttgttgtgtgccccttatcctctccacaaaataagcaaaataaccttcttggttgagagttgaatcttcctccgaagtttcgtccccctctacctcttggggctggtggtgtgaaggagctctgttatgcccctgttgactgggaactgtgc

SEQ ID NO: 57678 - DNA, 2091 bp, Zea Mays
cagtccatcgcacagaccgagatgccctcgtgaacgacatgcacatctccttgaaattccatagtatgggtcccaggatgtggaggaactcaacgccaaggataacaccgaactcgccaaggttgatgccatagcagttgacgtggaattcttcggcttctatcatgatgtccacgtctcgtgccacgccaacacgcattccccattagccaccatcacccaaagagtggggcagggagtagtggctaatttgaggcgatgcatgatgtcgacgttgatgaagttggtcgtcgagccagagtcgagaaaggccaccacacggtggccatgaatgatcatgataggagcatgtcatgcttggtgcggacccccacgatggcgtgaagagacaccattggtggagggtcggtgtcctgctcggcgtccgccccggtactctcgtggggtctgttctcaccgtgattgaacgtcccggcagcgtcctctagtgtggcctcgtcatcgacgtagtccacggactccaggtagaagaggcattggcagacgtggccacggacgttgggctcgtcacaattgtagcacagcccttgtcgtcgacgttccatctgttccaccggtcttaggcggcagaactgtcgtgtcggtgtagaggataccattatcggtgctaggcccgatgaaagcagtccctgcggttgtcgggaatggcctgacagcgggggtcgtgacgagctcctcccaccatgcgctggaggaaatgcccctaaactggtcgcacgacgttcgaacaccctggccaagtgcatggctatttgcaggttctgggttcgcacaacttaatgtcgatccgtatgtggttggggagtccccacacaaagagcttcgtcttatgggacgtcgacatgttgtgtgcatggcatagcaccgtgttgaagtgctcgacgtattcgtgcaccgccggcctgaagcgcagggtgcatagctcgcagaagccccatgccagcatgccttcgtcctgctcgagggcataataccatgtccgggcagccctagtgaggtggtacgacgccaacaaggttccgtctgagggcagggtatgttggccccagaagaactgctggttgatctatttgagcgggtcgacgatgtcgtcgtacgtcggaaagtcgagtttatataaacggggagtctgggggcggtccctgtcctggcggaggtggcgcagtgtcttgcaacatggtcccctcatatggaacccgaccaccctcggacgagccgtagagtctcaggccatcgatgcctctgaagttggcgcctgtgtcgtatgactggtgaatcgtcgccaggaacgacatgtctgctgctcccataggtgtcgaagacgtcgctaactcgccatcgtatattgcgacgcacccatcgacactatcgcatatgatggtattagggatggtgatgccgacatggacatcaggtgtatgggcactccctgtatcgtcggtgcccctgtaggtggtagaccatagagggggcgactgtggtgggggtagggtgggtatcggtgctggctaggaatacatggaacccagcagaatggcatgcgtagctgccatcaaccaagacagttcgtggaccactatgaccacagattccaacataggggttagcgtagggggtggtggaagatgatggggaaacggtggtggtcggccttgagatggtggaaactgatgatggcagtgggtgggtgggtgaagaatggaggatcgctggacatagctgatactaggttaataggattcctactcctacctgggatctccctcaatctatactggtgcactcgtggtggttggccatgaactgggcgagaggaacgacgaacgtcgtgttcccggcatggagaacaaggcgactagggttccgacctccacagggaagccagctaaggtaatacttctttcttattccttcctcacgtcttcttcctgaataaaaggaagcttatttctaaataaaaggaaactactttcaaaacgaaatagatcctaaattagtgttggattgttaaggaccctaactgccttcccc

SEQ ID NO: 57679 - DNA, 465 bp, Zea Mays
gagatgttctaactaaacaaaaaactaggcctaaacctaaagcaagagctataagaaacgatctaactaacctaagcacctcacaaagaacatacactaatcgttgagtgattatttgagcacttgggtccctagaactactagagatgagccttatttctttccatattttactgagctctcacactactcaaatggttgattgggatcctatttatagccccatggagagattttgttgttgcactctcaatccagcaagtgcatcgtctagggatggcaacgagtttgaaacccacgggtacatggtttgcaaactcataccctcgaggtaaatactaaaatcgcacatgttacctacgatgtgtacaatggcactcgtacccactacccgcgagtacaccagtggacacataattatacatatatttcgcctatacatacttatacgtatatacaaataca

SEQ ID NO: 57680 - DNA, 565 bp, Zea Mays
ctcataatagtgacgacagttatacactaaaacatgaacaacaacatagttcggagcaccagactctctgttgtcggacgaccaccaactaactggacttaacattcatctcgaaagcacgacgcagccaaacgttccttccttctttggtcttaagtgttgcaaatacatctctatactttttctccatcaacaaatgagtggcaaagaaatgtaagtcgctgccttccggtgcgccatcttcgatcacttgttgcaactgagcagcaacctcaacacgaacagggtctttctcagctgaggtgatggacttgttagtggtcatggaacgagactcaaaagcctccactaggcgtttcatgtattcttcccccgtatcttttttcttcctaggtttaggagaatcatgctgcaccttacgcttcccagtcgcatttgagcaagggtcaggtgtgctgttttcacccccacctaaagtggcttcgacatgatcatcagatgatgaatttgcatcctcgacgccaggaacaagggttgtttcatttgtgcatacaatgggtccaaa

SEQ ID NO: 57681 - DNA, 570 bp, Zea Mays
ggggagggggaggggggtggagtaaagaactgtgtgtctcctctcttgcgccatctctccttgacgaacagtgcgccactattgcatgtaaagattgccagtactctctctctccccccgaccccagctacctagctggattgtttctctctctatgacatgtgtaaatgagattgtaaaattcagtttgtgttttttgaattaaattgagtgtctcggtgacaggtttttgtgtgtgcgcgctctcaagataccacatcgatcacctaggactctagtgcaagtggtgcaacgctagctttccttgagacatgcatggcccaatagtgtctgggctcacgctgccacgaaactgtggtctgtggggtttgcacaactgtggacaaacggatcccttgtcttgcatgttgctgcgtgagtgcaaccaacggggctcgtttggtgaccatggaactaagagaaattaaaggagattcagagagaaattagtttattttctctccttaactccttttaattttttttgtcatcaaaccagttctaaccatgactacccacgggtattgttgg

SEQ ID NO: 57682 - DNA, 1170 bp, Zea Mays
cggattttagagacactagagggtctcttccactccaccacatcagcgacattcttgggatcaaccgcaatgcactactgattaatcacatgacccaggaaagccccttcagacagccaaaacgcacacttcttcaatttgccataaaactgattcttcctaagagcacctagaacgagacgaagatgccgctcgtgctcttcctccgtttttgaataaatcagaatatcatctaggaacacgaccacaaagttgtccaagaacttatgtaacatcctattcattgcttccataaaagcagcagggacattagttaagccaaaagacatgactatgaactcgtaatgcccatacctggtgcaaaaagctgtcttctcaatatcctcctcacgaatcctcaactaatgataaccatagttcaaatcaattttagagaacacctaggcacccctcaactgtttaaagagaacctcaatacgaggtagcggatatttattcttgattgtcacttgattcaaagcacgataatccacacataacctcttgcttttatccttcttctcaacaaacaatactagggaagcccatggcgacctactaggcctaatgaaacccttagccagcagatcatccaattgccgcttcaattcaacctgctcctttggtgccatccgatacagggccttatgaataggctatgtacccggaatcagtttgatttcaaaggccgcatcgcgctccggtggaatgcctggaagctctgctggaaacacatcggcatagtcacacaccacacggatgtcttgcacccgcaaggcagcctcactctccaccaccatggagaaaaagattcccgacttccttgaccgacgatccggaagcaattgtcactacaatgataacgtgaactttggagaacttcgcaagaataccacctccctacccgacagcgcctgcaataacactgttttccaaaaataggatataactgcatgatactgagttaaccaatccatacccaagataacatcaaatgcccccaaggaaatctccacaagattagctgaaaagacctcatcagcaagaatgaccgaacaaccctgacatactgaacaactactaatggagccattagtagaactaaccacaattgggtgacctatcctctac

SEQ ID NO: 57683 - DNA, 380 bp, Zea Mays
aaagtccgacacaaccttgatagcctcgagcgggttggcccccttactatcaactgaaatctggtgacaaactccctccgctgatttaggcatctttagcttagccactacctcctctccggacggggacttcaatgttacggtcctcttgtcacagctaatattcgcttcatatttcattaaccaattcatccctaggatgacatctaacccaggggtgtctattactattagatcgctggggaaccctaccccccttatttccacccttatatttgagcataatttatctgcttgcactttgccaccaaccgaattaatcctcatgggcggcatcattgcctctactgagatgttatgcatttctacccatgttgcag

SEQ ID NO: 57684 - DNA, 611 bp, Zea Mays
ttgaaattcctctcaaatacagtatcaagggatggcgcttggaatggtttattgttgagaaccatggaaattctctccccccacggtcgggaagacagccggatgttcgcactccgagttggaccgagtcccccactgatcaggaggtgactgaggcaggggctctgctagctgaagttggactgctgaaggagaggggtatgactgcagaggctgtggttgctgattttgtttttaagaacattcagccgttgaaggatagggctcacccggcttatctgtaccgaggcctagctgactcaactcgggttaccaacagaagaattccctccgtagacttggtgaaccaacttgagatgattcttagaggcaaggtatcaaacgttggtgccccaatggcatactcggcctggaacctgcctccttccaaagccttcactcattttgtttcaaatccacctgttgcttatggcagtttgggccttagagtgcgaccctctgctgaagaagttaacgccttggttgcctcgctcggggaaattcctgatgatgggcggcaagtccactttgaggtacctttggatcctagtgacgcagaaataagtgttatg

SEQ ID NO: 57685 - DNA, 757 bp, Zea Mays
tacacatcctcatacttccatcctttttggtgacaaatagaactggtgctccccaaggagatgagctgggacgaatatataccctttctgttgaagttctgcgatctggagttttagttctaccaattcggtgggagccatgcggtatggtctttttgcgattggtgcggtgccgggaattagatcaatgtagaaccccacttctctttctggcggcattcctggcaattcttctaggaatacatccatgaattcttctactacagatatgttttatgctgctaggttaaacaccattggatcttgggcgggtggctgagcccgacatgaaactgactttccttggtggtcagtgagaagaatggtcttatctgcgcaacttatgatgccattatgcttggttaaccaatccattcctaagatcacatcaattccatgggatggcaatacgactaagtctaccaagaacactaccccacttaaaagaatcctgatttgggagcattttagatggcatagaagtctgaccctggggttcgggtgaccaagggaatttctaggtgtgcagtgggaatgccatgattttccacaaaactggtggctatgaaagaatgagatgctcctgaatcaaaaagtacagtagcaggcgtaaattcaactaggaactcaccgagtactactcctcgggcttgctgagcctcttgcgcgtcgacgtggttcactcgagccctgccatgatactgggtcttgctctact

SEQ ID NO: 57686 - DNA, 893 bp, Zea Mays
gctgggaacatgtcggcataatcacacaccacacggatgtcctacactcggaaggtagcctcactctccaccatcatagaaaaaagaatttctgacttccttgtccgacgatttggaagtaattgggacaacaaggaaagagtgtactttggagtgcttcccaagaataccacctccctacccgacatcgcctgcaaagacactgtcttccaaaaacaagatatgactacgcgatattgagtcaaccaatccatacccaaaataacatcaaatgactcaagggaaatcaccacgagattagccgaaaagatctcatcagcaaggacgacggagcaacccgggcagactgaacaactacttatggagcccttagcagaactaaccacaattgggtgacccatcctttgcaccgaaagaccagcccatgacacacaattctccgaaacaaacgaaaaactagcgccagagtcaaaaagaacatgtgcatcaaatgaatcaattgagaccatacatgtcaccacatcccatgatctctgccatccgcagagggtagcacatatgctccaggaacaccggcagaagaggaagcacccagagtgaaattaacagaagaagatcccaaggagtcgcaggctgaggcagacgagaaactccaaactgaggtggtaaaggatcggtcggtccaggagtaggcgctgccaagtactgaggaaaacctgacataggcaagtactgaggagtcccgggcatataaactgttgctgaggggcggtacaaacaattttgctcagtggttgccatcatgttgacagtgccctgcgaagaggaagaagtcactggctcccatttaagtttaccatttggattcctcctacacaccacatccttgtgat

SEQ ID NO: 57687 - DNA, 902 bp, Zea Mays
aatacaccaaatgacccctcaattacatttctaagagaagaatgtgcgtaattgaaattctcctttttacctcctggcattggaccatttcgaaattcttgaagatggtattttgtacctttgcaaggagcaagataacctttacggtttgggtaactcaagtccacaaggtagaatttcccttcaggaggatgtggaaacttatctccatatttctcaattgcatctttaaacactctcatgtcatgaactgatctcggccatccagccacaacaaaagtaaatctcatatcgaaatcacaaatggccaaaacattttgtgtagtgtattcatgcctgccagtgtgttgcactactttgctaattggaaccacaactgggataagtgtgccatcaatggctccaatgcaattgtcaaagaaaggtgcaaatctaggtggctgtagcctttgatgaatagttttaaactctaagtctactggtcttattatgtcagctaccaaattttttcaaactagtatggactttgtcaaattttttactacaggtttctatagacctacaaaatcgattttctgcctgcctaagtgactgaggagctccacaaatccatagaaacatccccaaagcctctgctgatgacatttttctagtgcttttcaacccacatgtctcaacaaaaatagtatgcaatttttcaaacatggttctgctcatcctaaacatgttgtagcaacttgttctatttcctagtgttctcataacccatacatacccagtttcagttggttctctatatgatgatttgttcatgtaagtctcaaagtggtacataccaatcatagtggttatatctgctatgtatcttctcctcttgctacgcaaccttagtagcattgctg

SEQ ID NO: 57688 - DNA, 332 bp, Zea Mays
gaaaacatcaaactgtaactgagtatggaagtactggatgtttgtgtcattgggaagagaaaattgatcaacagacctcctagaggaatattcagccatggagaatctcatcatgggatatgtccaccctgtgacgtcactaggatagtcttgatgagagtgtggagaatctttagtacccaatgagacactgccctcatggcagggttatagtcagaatcatctgcacgacgtcgtttggacacaaatcgtcctgcaagcttcttcttcataccaccgaatccactgaaacagaatataaagaattccaacaataagatgataacctgaaa

SEQ ID NO: 57689 - DNA, 332 bp, Zea Mays
ctggagaagacaccaaacctgtacccaaggcacgcttgagctgggatacatgaaatacaggatgaatccgtgacgaagatggtaactgtaattcgtatgccacggctcccacacgtcgcagcacctgaaatggcccaaaaaacttaaatgccaatttctgatgagcacgaacagcaacagacgactaaacatatggttggagcttaagaaacacccaatcaccactagcaaattcccgttcagaacggcctttgtcagcctgtcgtttcatgcgcaatttagccctttccaagtgttgttttactaaatcagacatgacctgccggtcctgc

SEQ ID NO: 57690 - DNA, 478 bp, Zea Mays
caagtttctgtatttatttatgcattaaaaactaatttctgatattaatttctgatttttaatgctctctggatcgggcctcaaataccagaaagcgcagggactaaacaataaaaattcccgagacacagagggtaactcgagtgactgcgggttgattcttaaaactacggggtctctttagacaaatgcacggtcgaaggggtatgattgattttcggccgtccagatcagatccagaggccatgaatggatcacgcgtgaaccaacctcacacccgcgtgaccgcccgatcaacatcccacggtcacgatttaaagaacctaaatctaatctgatgcatacaatggaggatcgacggctcggatctaaaaccgaagcggtattctctcttttaatcccaaccatccgttcgccatccagcggctgacggcctccggtcgactccgatcagcagtgacggcgccgcggcttcccc

SEQ ID NO: 57691 - DNA, 399 bp, Zea Mays
caagcatgcaacatatcttccaaggtttggatcgttcgctctgactgaccatcagtctgaggatgaaaagcgacactaagggaaagcttggtacccaatgcactgtgaagactctcccagaatttggatacaaatttggagtctccatcagaaacaatggacttaggtaccccgtgaagcctgattacttccttcatatacaaggggaccaattctgaagctgaattggtggtctcatgggaataaagtgcgcagacttagtcaagcgatccactaccacccaaatagcatccctgcctcaagaagaacgaggtaagcccaccataaaatccatggtgatatgctcccacttccactccggaatttccagtggcttcagcaaacctgcaggactcttat

SEQ ID NO: 57692 - DNA, 287 bp, Zea Mays
tggagccattagcagaactaaccaaaattgggtaacctctgcaccgaaagaccagcccacgacacaaaatcctccgaaacaaacaaatagctagcgctagagtcaaaaagagcatgggccgcaaacgaatcaactaaaatcgtacctgtcagcacgtctccttgctcactgccatccgcagcgggtagcacataagctccagaaatacccgcagaagaggaagctcccagagtgaaattaacagaagaaccccactgagccgccgggtgaggcagacgtggagctcc

SEQ ID NO: 57693 - DNA, 453 bp, Zea Mays
gtttcacgcccgacaagagagaagctattcgtgccgagctaactcgcttagtcgcagcagggttcattagagaagtactacatcctgagtggttagcaaatcctgttcttgtactcaaaaagaataaattggattggcgtatgtgcgtcgactatacagatctcaacaaacactgtccgaaggatccctttggacttcctagaatagaccaggtggtagacttgaccgctgggtgttctatgttatccttcttggattgctactctgggtaccatcagatcagcctagcaaaagaagacgaggaaaaaactacattcatcacccctgtttggagctttctgctatagctccatgtcgtttggcctcaaaaacactggagcgacttactagagagccattcagacaagcttagccgatcactggggcaagcgtgtagaagcttatgtggatgac

SEQ ID NO: 57694 - DNA, 621 bp, Zea Mays
gcaagggcaagtactccttcggcaagtacaagtccaagggaggattcgacaaggaggcgctcaagaagaagtaccttcagaaggcaaagatcaaggagcgtgccttccttgcctccctcatcgacctagaccacgactccgacgatgttgtatcttcctcgagcgacgaggagacggagaggcgggtcgaggacaagctgaacgggctgtgcttcatcgccgacaccgcaagaggcttctgcaccatggcacttggtgaggacgcggtcggcaccagcgatgacaaagacatcggcgacgacactacttctgaggtactacctttcgccgatgatctcaccattgagatagaagagttgaacgctgctttggctagtcaggataagttgcttaggcaggctactcgtgagacgagagagtttagatctaaatacaagaggacgcttagggaacctgagtctgctagagcttcagttgaggtgtccgatgagactgaatgtgatgagtgaatctacacatgtcgaacatcaccactttgcagaccaagtgctccaccttgctagatgagcgcgacgagttgagatctaggtctatcctattgggtgcgtgtaccgtttgtcc

SEQ ID NO: 57695 - DNA, 1029 bp, Zea Mays
gatcttgctagctatcttctatcaaaatattttcatgcctgattgattccatcaaattttagaggttgcaaagaaggttgagacaagaacatattttctttgttgacttaattactcccaaaaatctgttatctgcaaggtaattctgaattttttatctttcttcaaggaaaaagtccaaactcccccttcatgtttgacctatgtccagatgcccccaacaatttagttcagcagtcccagtttacccatatgagatttgttttttgtttcttcatgtatagtgagtttggatttaaaattttgtagaggacatcatgtaggagtttagaaacacacatgttggttaacattggcttactcatacaaagtaatgttataaaaagattgtaccataaacaacattaaaacacagagttgccatgcttcaaactgcagtagtaactcagaacagatgcaaaatagtttcagtaatagtgttcttcattagttttcttgcctctgcatcttaatttcacttcatcttgccatacaaattatatagtagtttctcttctatttaaacatgggcccgatggcgcgacaacaccttagtaatgttttatgcatcttgcaaaaaatggatattggtcgttctagagttttacttactaataatttatcattttattatgatgtatactaattaatagtctatcattttattatgttgcatatcgactaatattgtatcattttattatgatgtataccgagtaatagttgtatgtgctagaatttttgctcttggtagcatttaaatctgattactatttatgaccattgctaatttagtaattcataaaatggcatttgatgtcaaaactttgctcattttcagtagtcatgcttccattttttgactaagaataacattgatcaatgatactgccaattactaattgattgtactattagtaacactgttgttctattcacataagcagctgaaactctagaacgccgtaatgttttatgcatcttgcaaaa

SEQ ID NO: 57696 - DNA, 399 bp, Zea Mays
tcaagattggagagtatgttgacacagtggagtgcgatgttgcacccatgtctgtgtgtcacttgctgctgggaagaccttggcaatatgaccggtattctcagcattgtggaagaacaaatcagtgcacactagacctgaaagggagaaagtttgtactcaagcctatgacccctcaacaaatcatggctgaacacttacaaaagaaaactgaaattagtgcagcaagtagaggaggagaagagcaaaagaaattgagtgcattccacaattcggtgagtgagtgctacaagccaaattcaagagataaaagaaaagaagagggagaacatctagttatgctagccacaaaatctaagctgggagaagtcaggaacaacccttatcaagtgctctttg

SEQ ID NO: 57697 - DNA, 523 bp, Zea Mays
aaaactgtggaactaggaaaaatggtgttttgatatagtagagaaaagaaatttccaaaaccaaagagcatgcccaattcggtagtatagcaagaaacgagaaggcaatgcccaaacggcaaaccatcaatatgggaaacaaatagctgacgtgtatagacagatcagatcctaagtccaaaagcatatggcacaattgtggctggcagcctggcacgaaagtgacatggtaattacgaaagataatagtgacatcataaagttgccctttaaaaaaatttatcttcagaaatgtagatttgaattggaaaaccaggctgtaattcaagttgatcggttgccatccgatctaaaatcatggctcaacaaacagcacagacactgaacaacacttgaatatggcaccggccttactactgagaaatctcaccttcctaatctgaaggcaagtccataattgacacaaacaaatcatccgtttgcaatttcgaattgacaagggggacagcaagtttcaccggat

SEQ ID NO: 57698 - DNA, 629 bp, Zea Mays
gtggagagtggcacctgctcaaccactctggtaagtcaataaaggacacgagtaaaccattgcaggatgtgacaaagtgtaatggcttgcttcagggtggcattgacgtggctacactaccttgatggcaagagggttcatccacggtgtccatcggccagtgggaaccctagaggacaacatgctatacgacagtacccgacctctactcgcttcgcttgacccttcgactcatgtaacatgatcctcctctcacctagcctataaaaggaaggaaaggaccacggttcaagacacgagcatacataggcataaaccgccagcacaaatcctatacaaagcacttttacccccatgagcactcattcacaagagacttgggagcttgatcgctctcttgcctgtttgtaacctcctactacaaactagtgcagggtaaagcaaatcgctcaattggacgtagggacattccgcccgaaccagtataaacctttttgtccactgtacacaccattgctccgagacgggcaaagcacgatagttactaaccggtggttacaacacatcaacaatcctcacacctctatccttgtgtcttggttgcaccaatatgtacggttgcactttat

SEQ ID NO: 57699 - DNA, 857 bp, Zea Mays
gttgcattcctttgctgattctggggaatacgaggcccaccctgattgttttgatggtgagcaatctcatgcaaaaccctagcattatcaacagtggcatttactagggcaacaatggactctgccattgtaggtggaagtggtggcggtggagggttgatatcagcttctgcaccaccacgcgatgtgccagccccatccgacccacgagtactcataggcatctggagtaaaacaaactcataaataaacatccataaccatgaaatatattacataaggcaggtacatggagttttattcattacaataccaaaattgacatagcttaatatcttatgcctacactagagatcacgacaccatacacatgtcacattaaccctctgtctcactagctatctcagaagcatcactacctcctggagactcaccacctggtataagcataggagcggctccttctactaagcatgcgtcaggctcacctccatcagctagcaccacaccacgttctgcttctgtggctcctggcgcatcattggggtgtagctgataataaagttggtgaacttcttcatgcaactcattagagtaatcctcgagatcattataggctagaaccaaatcctgaaaacggcccctcaagtggtcctcaaaggcaaaagctgcctcctaagatcgcatggttgctgccaggcgttccttctgctcaactaactccttttgaagctgcttcttttctgccagaagctcaagaatatgggctgcgtcgagacaccactcattgaaagacacatctagactctattgcagctgctccacctgcgtcggaggtgtgcgactgctattgtctg

SEQ ID NO: 57700 - DNA, 348 bp, Zea Mays
atttaacgaaaggagtgtgattgtgttatgttaagttaaaccttctttgcatcacatacatgttacagagatggagatcttgttactaatcgctgttttctagcacatacatggcattacaagtccgatgatgagcaagtgtctggcaataaaaaacatgaaatttaggatgctcaatcatcttgccctcgtatgttatctccatcaactctcctatttcatcccctatcacgttgctatttacagtgcaaatagtgtttatacgaccatatgcacgacctgctgacttagaaaggttatcaactatcttatgctggttccagtgaaccagtgtcttgtcgatcgcca

SEQ ID NO: 57701 - DNA, 466 bp, Zea Mays
atttttgcaggaccacctattcaccctctctaggtgctctcaattggtattggagccaatctcttctgttgggtctaacaacccaaagagatggctagtgacgagacaaaattgaacgtgaaggtgatcgaggagaaggagaagatccccaccgacgacacaaccaagggaggagaaactgttgactcagtatccggcaaaaggaaggcaagaagaagaggaacaagaagatcatctactacgacagtgactcttcctcttcttcgcacaaggacgttgacgactcctcttcaatgaaaaagatgatcaaacacgattactttaaaacgtcttttaattattcttgcattccttacaattcaaatgcatattttctctctatccctctaggaaagccccctcactttgatggtgaggattattcttggtggagccataaaatgcagagccatttattatctcttca

SEQ ID NO: 57702 - DNA, 544 bp, Zea Mays
cttctggtatgaggtagaggggttagttaggcacatttttgtcaatggggtcattaggatttgagctagggatcaagctgaacacgctcggtctttggctcaagggctgaaattcagaaatccctattgaacctccacttgaaaagcttgtttggagtttttattaaactattttggccaagcttccatattctttattgtagcttatttagtatatttcaatgtttataattggcctaagccatgattttataattttcatggtcttttaccccttttctttatctctacttagatagcttgattagggttggtgtcacggtttcaatatttttccctttttgaaaatcttatttgtttggaacatgactctttagatatacacttagtagatcttttatccttaagttaatttgatgcttcatgctcaatttggctcacatgaaatgttgattcttgggttagcactgagagaaaccctaggtgacactggggtgtcacagccattcaccttagtagtgaagatcgggtctgtacaacccag

SEQ ID NO: 57703 - DNA, 290 bp, Zea Mays
tgccttgcattttatggattagctccggttgtggttctgcggtcgttcggagatagagtcaaagtctacacagtttcggtgtctctctccccgtcgcttggtcacctccaaccttgatcaggtataaaattagttatccactgtttttcaacaaatttaccttgttatcccatcacttttatatccaacaatcctatttatcaacctactgtcatgaagatcaggccaccctagtaccgaatataactcggtacttatcacaagcaatgtgtgtgagtgagaaatgttgg

SEQ ID NO: 57704 - DNA, 437 bp, Zea Mays
cggaagcaaccgctcatctcctaccacggtcaccgaacaatcgtaagtattcaataagcaattcaaatcgtctggaagcaagttaggcagcaggcgccgtttcacataacacgacaccatttggactgaagtcaactgcttggacgatatgattacaccccacggtcacgtcatgttactactcaaggacagtttgctaaacgctcagcgtaccaagccatccctcggttacacccattggggaggggacgtccaagaattttcaatagattttcccaagcagtcacatccatacagtatacgcaatgaatgtatcaagacagaagaaagatatcgatggagatcagaggaaagccaaatatagctactgaagtacaagtctaatcaacagaagcattgaagcacaaagcaaaatgaagaccagccaagagtcatct

SEQ ID NO: 57705 - DNA, 632 bp, Zea Mays
ccagactttactgaacaaggcaattggccttgaaaccaaaaggaaagagttgtccgatcacaagaggaagtaccaagggtagaccagcagaaatacccggcaaaacaactcccaaggttctcagttccgctctggaaactagagtgggaacaacaactaccaagcacacgctctggacaacaaagtcagaggaacaatcaatatcagaaccagcagagaagcaacactcaaaccggtcaaaggtctagtgggcaacatcagaatcgtcaaggaagcgtcgtgaacataccggccaagaacaacaatgcaactaccccaattcaacccaatggttgtttcaagtgtggcgaacttagccactatgccaacaactgcccaaggcgtaatcaacagacacctcagaagaacaacaacgagaggactgaccagaacacacctgctcgtggatctgcacagaacaagtctcagcagaaccagagtagaagaagagtcaaccatgtgacagcggaatcagttcctgaggatgccgacgtggtgtatggtatgtttcttattaactccatacctgcatcagttttatttgattctggagcatctcactccttcgtaacaaagtcatttgtggaaaaaca

SEQ ID NO: 57706 - DNA, 466 bp, Zea Mays
cgggctctctagctgggtctgcaatagttccaaaaggcacaataggaacaatctctatggccagggggttgtttccaccctttcacttaactttggcacatcggccgtctcgatgcgcctgggtcagcgtgtcaaacctttgattttctttgacctcgatgcacaagtagatgccgaggtaacaactttccttttactcccttgcttccgggcgggatagcagtagtctaggtaaacaaacccgataacatcaaacactctgttcaacctctttttgtcgtgagcgccgaaggaagttgtcatagcttcgtcttctgccttcgaatacactccaagtatctcatcacttgtcgcttctatggcatccaaccaatcatcatttggctcatcaaactggttcctgaaccgaaaagtgtactttagataaaccaggccaccctggctggagccggcggcggcctccttc

SEQ ID NO: 57707 - DNA, 662 bp, Zea Mays
ctaatatgaagatcattaacacatgacataaaactccataagactacattttgctgctgaaggacctaaggcgcttatgtgcatatcctatcggattgttcttcaattttaacaaggaccgacttatgaacgctacgtgcttccaataatttttgggttgcgatgacactcatactagacctctaatcgatcaacaagacaattatttatccaataggcatcgaatgtaatgattgataaagcgaagcatagatccgccatatgacaaaaatcatgacaacaccgatagatactatcaactaaccgtttaaaatactaaacttacttctcgcttcaccactacatcacccctcaatcacacgaccatcatgagcatccttcacacgatatacaacaacctaaacgtcatgttacacaatacacacatctttcctcatcgcgggtataaccatattacggcatatacccacacaccttagtcacatatcttacgcaaccactactacaatacaccacgacacacacacatacgtgtccccacattttgcacatgacatcaacaacacaagtgactccaacaggactaatcatactcctcattctcatcgactatcacaatcatcgaacacatgcataaaatcaatacgctttttacataaaca

SEQ ID NO: 57708 - DNA, 429 bp, Zea Mays
ttagaccctaagtcagtgatgatgctgttaggtattccgaacctgaacattatctcctgaatgaattccactgcttttgctgaggtcaaaggcgattggcttgtattctatccactttgtaaatttgtcgatggccaccagtatgtgagtatatcctccttgatctttcttgaaggacccgatcatgtccagcccctagcatgtaaacggccaggttacaggaatagtctgcaattgttgtgccagtagatgttgttgctttgacaggaattagcacgccttgcacttctagactaactcggcggcatcattctttgtagttggccagtaaaaccggacctaaatgcctttcccaccagagttcttgatgctgctgtatggcacactgcttggcatgaatctcatctaatagctgcctcccagtggccg

SEQ ID NO: 57709 - DNA, 576 bp, Zea Mays
ttccacatggttgacttgtccccgattgactgataaggcctgacttttttctccaaagacttgaccttgcttcattggagctagagttgtgtaggcgaccctgctggggcagtagttgacataatgttcagcctgtccacatttaaaacatgatctatttgtggatgcattaggagcaactggtcccactggggtgcttgcttgtggagtagtttggacctgttgagactgttgttcagaactgccacgagctggtgtgccttggggtgtagtataatggggacgagtactaattctagcctgtccctggttagtagccttccttttcatctcgtctagctcaactcgtttgtgctccagagctatagccttgtccagtagtttctggaaggattggaatgagtgggacatcgattggtattggagtggcccgatgaatccttccagaaaaagttcatgttttttctcgtcatcaacttctccatgagcataccgggagagttggatgaatttatctctgtattcgcgtactgacatgcctccctgtttgagggatagaaattcctttttattaat

SEQ ID NO: 57710 - DNA, 835 bp, Zea Mays
ctttcttgtgccttggtccaactgttttattacattttctaggccagtaactaggacgagtacatggaacacttattcaacattgctatccgttactgactctctctatatatatatatatatatatagtcagccttcctagaactccagctttctcttgagcagaacatgtactcctttgcaatcacacctacgctcgttggacagtcacaccggtcaccgtttgccacttgcagtgctggtaagaacgttgtaagagcggggtaagacgcttcataatttgtattccaccaccaccaccaccctgagagatagttgtagggttcacattgtttgttgcctttttgtctctgttttgtgctaacaatgacaggaccaaagaattaaatggacaaggacaaggggcttaagcttaacgacgatgagtgtgtctctcagctggaattgaaggagatgatgcgcacgatgattgaagattttaaaaaatacctagactctgcggcgacatcctatgagcagcttgatcgacgagttgctgaacttgttacacgcatggacgtactggaggctcgtcccccaccaccaactccagccctagctcactctcctatggacgacgacgacgatgacgatgatgacgacgatgtttatgcaccactgcgacaaacgcctcgcacataatcgacaaggtatgggaggtaatggtagacgtcgtcatcataatcctgaaccagaccatgatctatttgctaagattaagttctctattccaccgttcatgggttcttatgatgctgaagcttacttagactggagatgacggtagaacaaaaat

SEQ ID NO: 57711 - DNA, 668 bp, Zea Mays
ctggcttcggcaaagaggtactaagcatccagagccgttcagatcgaatccaatggtcacaatacaacgcacgaagggggtatgtaaggatcaaatctcatccactggtggttgatctgacgactcaagcatcatcactcccacggccgaaccagtatgccaggagcgatcccagccgtctgctatggatccagcggccgcgacatcatcttccccattcaggcacgtggctacgacagcgccgccccaaaaccacaaccgagccagtgccaggataccccgccctgttctagcctctagcacctaaatcgaccggctcaacataaatcggaggtaaaagcgaaccatcagagagagtccttatattggtcaatggcgcagacatttctgcccgcgatgaggggcagcaccgttgtgaaccagcaactccggtgagaaatcgaagagctttggcgcacaatcccaactaggatggcaaggatcaccatcccccggatgacctgaagcacacggactagcgcacaagccccaaatgtcaccatgggcgagtgtccacgatagcgtgcggatccaggacgagcaccacaccggtgaggaatcgccaagcgtcggagaccccatctcaccctctgattccatggacggctcaaccctgcactggaaaaccc

SEQ ID NO: 57712 - DNA, 619 bp, Zea Mays
gtggacttctgaacatgccaccactttcagtactattaaacacgcccttagcactactctagttttagtacttcccaatatctccctcactttttcttagagacagaagcctccaagaatggggtgggtgttgtgttactcttgctattaggtagtggagacattatctgttgcatgctgaattcattatatttactgaccagaaaaatctcattcacctgaatgggcaaaggctccacactccttggtagcaaaaggtttttactaaacttctgggaatgcagtacaagattgtttacaagcaaggaactaataaaagagtggctgatgcactcttgctctatccatgtattcacctcagtggtatcatcttgtcattgatgggtgcttgttggatgatgaagctaagtagttattggctaaattgatggtgaatggattagctgtaccggggttttccgtgcatgatggtctgatcaagtttcacattaggatctagatcggtaaaaaagtgccactacaacaaaccattcatagttctgctgtgggaagccaatctagtttccctgttacctaccataagttaaagcagctatttgcttggcctggtatgaaaaaa

SEQ ID NO: 57713 - DNA, 560 bp, Zea Mays
tatcaagctctatagtgcttcgaaatctgggaaaataaattgaaatacaataaaacacagataagttaatttttttgctctccctcctcatgcataaaagttttatccgaagcaaaccgaagatatataatgcatgaaagctttttggtacaaaagacatcacaaattgggattttattagtaagcaataagaccttaccaaatgatttaaggctataaatctcagttatacattgctcaaccagatgttgacacgttgctctctttgttgttgaacgacatgaagcgaactttgatataaatggctagtaccctagcaacacgaagttgcgagtacatcgaaaggttactctaagaaaaatttcactatgttggtgtgcaaaaaaaaatattgtgtgttcccgtcgaaccactttactcgtcctgtctgggacctctatgcttgtgttgcatacatctcagaattgtaaatacttatattcgctgaattgactaggtatagtcctttgattggtatgatatacttttaagccaaatggtaaaggtcagtcctgaatgga

SEQ ID NO: 57714 - DNA, 521 bp, Zea Mays
ggggtaggtcaaggaacatctctagttgagagatagggcttgttggttcgacaagctcgctgacctccaaggacgggtcacatcatcgcgacgaacgagatcggacatgccgagctagctagcgtcatgaggatgacgagcgaggagggggcaccgggaaggggtggggttgtgcagtgttgcgacataaggaatgagacatcaaagcggattggattaggcggtgtcgacaagaatgggactgggccatagtcaaaatgtttctggatcgattggattgaggagcggggtcatgggtcgttggtcgacactttaaaaagggaagtatacatctatgggacgggaatattatgaatttgatatgttgagtctaatgggctgatgatctcaggttgattctatgggtcaagggccgtgttctaaaatttcaataacaacctaacaccagtctaatatcatctcattctaccattgaaactttaggctatctctatcagattccatatcttatcctctatttt

SEQ ID NO: 57715 - DNA, 553 bp, Zea Mays
ggtagtctttacgggaatgaagtgagctaccttggtaagatggtcaattataacccagatagaatcgttccccttttgggtttggggccgtctgattacgaagtccatgcctatttcttcccacttccatttgggcattggaaggggttgcagtaggcctgcgggcctctgatgttatgccttagttcaatgacaagtatcacaccgggccacatactgagctatatcctttttcattcctctccaccagtatctggctttaaggtctaggtacatcttggtagatcctgggtggatagaataggttgagttgtgggcttcgtctagcaagatttctcatgcctctcttttcggtacacatagacggtttctgaaccaaagggctcccttttcatctgtcctgagatccggaagttgtccttgctagccttttctgcaagtcctgccatctcggcgtccaaccgctgagccttgtgaatgaggtcttccagcattgatttaacttctatactgtcattttctcccaaacaagcattcagttgtgccgattctt

SEQ ID NO: 57716 - DNA, 476 bp, Zea Mays
gcaattcatcgctagttgcctcaatactgctcaaccattcatcatttggctcatcaaactcgcctctatatctgaaggtaaactttagataaaccaggccaccctgactagacccgacagcagttttcttcggcatctcccactcattcatgagcggccatactctgtaggcgatgtgttcttgaaccaggtctctggtgccaataaaagtgcacacagtgttgaagcttctctggcatgcctctatatcattcccaagagcggtggctagcctcctgatgtcgaagcgagaccagatgggacgttgaacaattcctcttatatcttccctctcagttaaattattctctgctgcccactttcctattatagatgtagcttctgggttgttgaacagatcgttgaggcttcggtctgtggccactcttatcttgtgtgcttcgaagtagtgacacagctttcatgacgccatgagc

SEQ ID NO: 57717 - DNA, 542 bp, Zea Mays
cggaagcgccgcatgggccgaaacccgtgtccggcccaacaatcccagcccaagtcactgcgggcacagactttggattccttgcgccaataggtgggccattgtggtcagtcgggctgtgtcgggcgcgctcgcatggtctcctggctcaccgcgggctcgtactgacaatcgagccccactggactgatgactccccatggcgccgctgacagatagaccgaaatcttgtagatcttctcctgcacgccgacttcgtcgctcctcgtcagtaacaactcctcgccaagcttttcgccaaccgtatccttgcaggtgcctcaaccgacctccctggcggccataaaatgtgcaccaaaccctagcaccctctctccttgttcgccgcacgcactttcctcgccaccagtgaaagcaaagccgggtagagcgccgtcgtggccaatcctcgacctcgtcgctgttgaagcctggaagtcatgccgagaagctccgccatagtacttggggtgtcacacgtgggagctttgggcaggttcgac

SEQ ID NO: 57718 - DNA, 413 bp, Zea Mays
ccaagacagtcaacgcttcctgtccatacctagcattcctaactgcatctctaggtttttgagtgtgcgcgctacccgaacctctctgtgtctgctaaacataagcttgccatgcggtctactatatgtgtctttttaggatactcttttgatcacaagggcttgttggtgtcttgatctctccactagtcgcatcattgattctcaacatgttgcatttgatgatgtagagtttcctttctctatcttgcttggtcttacaaatgatttagttatcttttagataggtgcactttcaaagatgggggcatcagtgatgccctctcgattggtgcctcttcaggatacgccttccctgaagtgtcactaggctttgcgttgttactagctcgggtaattgctccccaagtcca

SEQ ID NO: 57719 - DNA, 1027 bp, Zea Mays
gaagaatcttatcaagcatgtatggcctaagcagatctagctcagagtaaccgaggttgggtttggcctagtctaggagaccaggctgggatcactttggttgactaaggttggttccatctttgttagggtgactatgtcaaaatttcttgaggtaactaaggtcgggtccgacctggtcagggttgccatgtcgggatcgctatgttttgatgcctgttattcaacgagttcatccatcaactatccacaaggatgagagagatttaatgaacaaagtaactaatcttcctacaaattgagttccataagttgtgttttgtatatttgagtgcgggttatgaaaataagtaagaaggagtgtaaatggccaagtgatagaggagtagtggccggacaacatcggctgacttcccccttagactgtccagtcataccattgccactcaagcatccccgggccacccaacctcttgaccaagccaaacacactctactttggtcttgcatgcatgacacgatgaatccaacccaacttgatggtgtaaaccatattaatgacatgtcaaggaccggaagaccaccacatcatcgatctagctcacgaaaatggtgaagacaatgacccaagggacttctatccaatggataaagaataaacacacatccaatccaatggttgcagaagaaacatgccaaataactattaaaatgacttgaaggaggcttctagaccattggttggactagagagggcatcaagtgactgattgaccacattacttggccatctaacccctatgtgcttgcctagcttgccacctatccccttgcaatcgacgtacctttctcaaccaatgagtgctatatatagccccatgcttgaggagtgtataaatagccccttggagctcacttgagaggaggagaaaaaagttgacagtaggtagaccctagagagcttcttctttttatcttagtagcttatgttagttcctaggagttagagtcgagtttgagcttttcc

SEQ ID NO: 57720 - DNA, 535 bp, Zea Mays
agattggatacaacttgaaatcggcgcagcatacttacccgactcagggtgatcactataccctactaacggagcaatcggcttaagtcggaaacaccttaagtcgggctcacgcttacacgacttagggtaatcactataccctactaacggagcaatcggcttaagacagaaatgccttaagtcggtgcgacatgctcacgcttacacgactcagggtgatcactatagcctactaatggagcaatcggcttaagttggaaacgccttaagtcagtgcgacatgctcacgcttacacgacttagggtgatcactataccctactaacgaagcaatctgcttaagtcgaaaacgccttaagtcggtgtgacatcctcacgcgtacacgactcagggtgatcactataccctactaacggagcaattgacttaagtcagaaacgccttaagtcagtgcgacatgctcacgcttacacgatttaaggtgatcactatactgtactaacggagcaatcgacttaagtcaaaaacgca

SEQ ID NO: 57721 - DNA, 359 bp, Zea Mays
cttgagggtactcgcctgaaacgtcttcgccaagtcagtcatcccactgctcctgctgaggggaagaaaaagaaaaagagacggcttcggcgagtgtcgtgcttggatcaggatgctggcccttctactcctgctgctaaaagaataccagtagaactctttactggagatgatcccaatgggtgtgatcctgctgatgctgatcccaatgggtgtgaccctgccagagctgaacccaatgggtgtgaccctgctgatgctgaaccaaatgggtgcgaccctgccagagctgatcccaatgggtgtgaccctgccagagctgatcccaatgggtgtgaccctgtgccgtttattgtctg

SEQ ID NO: 57722 - DNA, 675 bp, Zea Mays
tggtccgagaaggatctattcaaaccaagaacactgatattattataagcaagatcccagtcaggactggccaagaatctatctagcttttcaaacgtaggatcactacgattgttagaccacgtatacaatctgtttttcaattcaaattccactagaccatgatggtctattatactgttaaacaaggagctccacttgttgagaccgcccggtttatttttttcctcagcttttctgaggatgttaaagtcaccaccaataagcaaggggacctgacttctcgagcaaactgcagacagttcactgaggaatcggcttttatgttccttttgagcagccccatacacattgacaaaattccaaataagattttttctctgtgaagaactagagtgcgaatcaagaactcaccagcttcaaattctctgacatcaaacacatcagagttgaagcccactaaaaggccaccagatctcccattaggcggagaagagaactaggcaaagagtttattaccagcaagcgaggacaaaagagaatcattgaattgatttttttagtttcctgtaaaccaataaaatcaactttttcatccctaatgatttctctcaagaaatcaaacttagcactccgacccaacccctgacaattctagataaggcctatcattaa

SEQ ID NO: 57723 - DNA, 419 bp, Zea Mays
gggaaaagagttagcagtcccaaaggcacccgtcgcaagtgagcatgttaggcagactctcaggttgagtctgtcgaggtaaagaagaagaggagaaggcttcatcattggtcaggcttggagccagtgaatgcccatgttgcacagaaccccggtgacagtacagtgaatactaatatagaggatgctgtggagggctgcggtgtgtgagggctagcagatatgtgttggaggaagaggatgatgatgaagaagaagaggcgctccccctggtttgtcaggaacgacatagtaaggctagtggcaacatttggagccttgctccatcagggctagtgaatatccaaggtctgactatgtccgccattgacagcatgctggaaaaagctattcctaaggatcttctgcttgaagttcct

SEQ ID NO: 57724 - DNA, 630 bp, Zea Mays
tctccttcggatggtggtcggtgtgatgctgcgcggatatctgctgctgggccgctttccccgcgtcatctccaggcccagggatacagtatcccgacccgcgcggtggaacgacccctggatgcgcgttcttcttggattgggtggagcccgggggtgtcgccgctctctacgcatttgctcttccccacgcgtgagtcgtctcctccgctgtcctctccgccagaaaacccttcttccaggttagggtttcccctggatttcgttggttcgtactcttttcctcattgcgccaccttcctctcgcacctctggtcgctcccggtttcggtgaggtctagttttggcgggggctggtgcgtctcgtcctttcgtccgccggtggttgaagagtagtggcctcgtctgggttctggcgattttcgaagcccctcgaaaatctctgctatggatctgaaaggcaagaaccctcagaactcccagtgggatcgttggggtccgatggagaagccgcagggtcctcattcttggaacaggacaagaaaccttagttggaagttgaagcctactctcggaaaatctgagcaacatgagggtctgttgtcccctcatcctggcgagggaactaaa

SEQ ID NO: 57725 - DNA, 433 bp, Zea Mays
tctagcaggtgtcacattcagatatatactttgcaatttccctcttcattctggtccaccagtataaggatctgagatcatgatacatcttgttactgctggggtgcatggagaattttgaaaggtgagcttcatccaatatcttctttctgagctcacggttcttgggaacaaccaatcggtctccaaaccataggattcctttgctgttctgacggaagcatttgtatttgtccaccttttgtttgatcatttccttgataacttgaacacccttgtcaccaatctgtgccatgactatttgctcatgtaaggtgggctccactgaaatataacttaaaacgccggaggaaacgacttctatttttagcttgcacaactcatcacatagggtggtgatccttgcatccatattcatacaattgcactgggc

SEQ ID NO: 57726 - DNA, 816 bp, Zea Mays
cgctgggtaaaagaaacaaacgcacctatatttcctttttcctagcgtttgctcatacgcggaaggcggtctgaactctaggagcatctggaaggacggtctggactctcgactctaggggcatctggagaaggacgatgtgtgttgttcttttgccgttgcaatgaaatccaacggttgagagctggcaaaatgacgtggacaccctagtttctcgtctttgcgtcacactctattatatagaatagcacaggagctcccttacaaagtgttcagttgacgcacgcggatgcaaccagagttgcccgatcagccactaacgacccagattggatcttattcatactgagtcggtacacgaccgaggccgtaggacccaagatcgatgactcacattaacctatacgaatcataagctccaccagatcctggccgctcatcccatgctccacggcacacactccttcccgaatcggtatgctacgacgttcgccagatcagaaatcaacggctaccgagcgtcttctctaatcagcgcgagtacacggcggcgatggactttcctcgtggtggcgccatcaccggcgcgatacgcccagcgttctggtgtgccaccccatgaacgaacccgtgttatgtgtagtacggagcagggcatagcgattaaggtggatcttaccggtgattaagcagcccggttccgagccacggcagcccgcaggtccgcgacggaggtaagactctaacgagaagttggccattaacaagacctcccccgcacatgccctcaacgcgcacgcgtcctgtgcaccaaag

SEQ ID NO: 57727 - DNA, 311 bp, Zea Mays
ggtccggaagctgctagacgctggcttcatcgaagaggttcatcacccagtgtggctggccaacccagtcatcgttccaaaggcaaacaggaagcttcggatgtgcatcgactacaccagccttaataaggcttgtcccaaggacccgtatccacttccacgcatagatcaaatcatggattctacctccgagtgcgacctcttgtccttcttagatgcttactctggtttccatcaaatctagatgtctagggaagataggaagcatatcgcttttgtaacagtggatgggctttactgttatgttgtaa

SEQ ID NO: 57728 - DNA, 645 bp, Zea Mays
ccaacactgattctcgaagcaatagcatcacatgacctttggatatggcacgcttttttttgtttgtctggttcttgcaacgacataaatgttcttcacagatcaccagtcttcgatagcatagccacaggtgatgttcctcctgttagctatgttgttaacggcacgcaatatgatatgccttactacttctgtgatggaatttaccctccttgggcaactttaattagtggagtactatcaatgaatgtacctaaattgtttgttgtggatgccttcgaacatttgtagtgcatctttgacctgcaaggtacacaagtagtgggttaaaaaatttaaggacacgcttcgaacacatggtacaaagcaaaattagtagaacaatttaaggacatgcttccaacctggtcgtcttcacttttaccactttgcttcagccttaaaactttccgtaagcagcacaaaactttgtggtatctcgttggatgtcaccccacctgtgttccaatgagtgttgtgttcttgacttatgtgttttcttgtgttcattgtagtactcacttatgcgacgccaataggacttccctgattgatttgttccaatagtcggatctttggagacgtttaggtaagccgacacaagga

SEQ ID NO: 57729 - DNA, 1138 bp, Zea Mays
gttaatcattcatactgtcgagtttctaactcagagaatcgtattgctttattcaagaagaaggaattcacaaccagagaaacatgacatcttcaactattgagtcaagaactaaccaatcaactgaacaaccaaatctcatccaacacacatattatcaccaccaatcagttcaaggaagatcaagagattcgtagtttcgtaccattttgccgggtggttgaaggacgaatggtcctcactgcatccaaagaaggacgttgcaactacatctgattcgactctcgcaggtgctaccattggaggtctgtcacggcccctagtaaatctgctgctactactacttgtatggtttagtaagtcggttgaagaggaagatttactgttgggctggcccattagggttccaagccgtgtaatagatccaggcgattaggcccagattagcatctataaatacctgtaactgcttctggaagaggacgcgatttgaataaagaacacattccaccaaaatctggaacttatctgagcgtgactgggaagtcgtcttctccagttggtcgacttctcacgctgcgggagctcgccgtcagccacgggacgtcgatccttacacctggtatcaaagctctccttcctcggtgtgggttggtgatcacaagggggctaggttggctgtaggaagaagaggaggtgatcaccacggcgccctctgtcaaaccttcggcgcagtccaggctggtgttggaagccatggcgacagaagctaaacaaggggaagcaaggtgggacaagatgatggtgatgatggagaggttgacagggaaagttgatgctatggagaaggtgcatcaccaactattgggacagtcagaattgactgccgacttggtgaaacaggctgcagatgagaggacaattttatccaggcgcgtggaggagaatgggaaggcgttggccaggatgaggttggaagctatggcgagagagatggaggatgttggcacgggaccagagtcatcggatacaggaggtagaagaggggccataccgaaccaggatcagggaggaagggagttgcaacaacatgtacctaagatgcttttccccaagtttggaggcaaggaaccggcga

SEQ ID NO: 57730 - DNA, 1119 bp, Zea Mays
ggatctagatctcacggtgtggatttttaaatacctgacatccattttataccgttgatgcatgatccaacggcaactacgcccttagccgaaccggcatggctcaagctaatctgagtcgtccattcccatatcgaccgcccagacatcacttcctttcacgccggacatcgcgtagaaccaggtggggcacgacggcgcaactcgccgttggtagccaacccagcgaccgggtgtactagacggactacggcgaggtgacacacacgatgtgcggacggacgcgaaacagctagtggaaatcttatcggcagtggcgacagaaacaggctctgcctacggctccataggtctgcggcacggggatgtcttccggtgagcaatcgaccctgccccgaccctgctcgagttcaattgatggtcggcatggcttctacatcacgcagcgactccccagagatactttattgtgtcacagcgacaccccgtcgcgagtacgacggcggcagtacaagctcccctcccttcttctgaaattccgatctgctatggccgcgatggtattcaggttgatggaggctggttcgggctcggtttatatagccacgaggtgaattggtagccggggtcctagggagattacaccggttgttggaatttttttccaagatttgctgcgcctgctcctttggggaagaaacggctaatgaggcgggaccacatgacagagagagcaatagcgcggcagggggagcggggtcagcctatatatgtattcggaaccaaagtctgcccagattaatctagctgagatccggcaaaatcgcctaagtttcctacgggttggttatgtcgcgcgaggaagcaggagaaagttttgccccacacggcgacaaaacggatgaggccaggcgataatgacgcgtgggattagtttagtggatcaagtggccggagaaataataaacaaatgacttgtgggctagccgtttgggatatctagacaaggagttggtcggctggtgcttttagtcccaaggtagttagcgttctttttttgtgtgtctccatttttcacaatccaaattcaaatcagatttagacaaagttcaaatttct

SEQ ID NO: 57731 - DNA, 980 bp, Zea Mays
gttacttgctaatttacatctgcttaaacatatcatgcataagagcaagtttcggtgctaatgcagctaaaatgaacatatcataagagcaaatttcgatgctaatgcagcttaaataaacacaccataagagcaagtttaagtttgcttctatctaagccaacgggatggagatacacaattttatttagctgttccatgaacattgtgacatctggccatcatgagcaggtgaatttgcagtggcaaacgcccatgggcttttggaaacttcacatgttgaataaagtcaaaaggacagccattggtaactatggaagcatgtgaaacctgttaatactacagcctaacaaacagtagcacagttctgtacagaacagtttgtgtttattttcttgccatttaattccaatgtatttaggcaatgccaagtacagtcatgcatgcaggttactgcaaaggggtatgaaacattgtcatactgatgaccacagtaaacgtatcccctgttttactcagaggggttgtgattttatacggaaactctgacaattcgatcaggccaataggagtatgctcgcatgtttatgcaaaatgattgtaaggagagcctagcaatgagcagcatgcatataattaatatttggcagtgacaagctaccgagataaattgttataaatgatcttgaaattatgttatcacggttttgtgcagcaatatattatatgactactaatcccgaaacgacaagttcattcaacatcgcattagtttgtgagtaaaactataaactcttataatctttggtcaatgcctcaattcagctatatgcacatctgtaatggatttttttttttttttgctaaatgcaggcacagagtagcatgcatgcatgtattcagtcatttactttgctatacgagttcaacaatttgttatggtcttaagcaaacaagattaattgtcttaatagaatgca

SEQ ID NO: 57732 - DNA, 451 bp, Zea Mays
gctggcagtagggtgtcatgccaaggccatcggagtagttccaatatgacatggggctcgttttgggcaactttaggtacactctaccctatgaatccacaggctcacggaggtgtctcttcatgtggagttagtgtttgacaatagtgcactttgcactctcatcggtcaacatgcaaattggtaggagcccaagaaaataaggatgacaattaaaagcacaacttatggaaccgccagaagacaaactacgccttgtagtcgaggcagcgttgccggtctctccctgtcagtctcctaggcgtcctgatggattaaaagctattcgaactggaagccaaatcatatcaaaggcaccgtctctagagcagactgcagacatcactagtgtgtatgtgcattgggtcacctgtatgcatatggggaccaacaattgcaaatacttatctaa

SEQ ID NO: 57733 - DNA, 436 bp, Zea Mays
cgagggatgcactaagcaatgccacacgagctagagctttcgcttcacagtcccaagcaaatgaacgcgaggtgacggcccaatcaatggtcatatcccgttccgagattttgtactgcaagcggctgacttcggttgacaattccgctatacggtgactgtcctgctcccgtgccctattcttgtggcgtaactctgaccggagttgttctaccctggcttccagatctccaattgggtcattactgccaccactactttcttcgtgcctggaagctagctgatgtcgtggcacaccaaaaggtctagtagatttgctcgctgtttttcctagtacgcgccatatctccataagaggggaagatttattagtatattcttaaacatgatgcatgcataacctaataattatggaatcaaccttcgttgatccctc

SEQ ID NO: 57734 - DNA, 788 bp, Zea Mays
aaaatatttgcttagtacaacaatcctgttttatgggatgagatagaagaaacctgttctgtggttacaactatagtcttcatatactctagttgaaccattaaagaaccacacaagttgaaaaaaataaacaaacacgaccaaatgcacttctactatgagcttacacggagtcaaacacgaaaggttgcggtgtaacagcaaggatagactagtaattacctataaagatgtatatcggcgtgctagtacaagtgtacaactgtgaccgggataggctcatttgtaatcttgcacccgtagcatatcttctcctcaagagagcctccaaagatattatgatgtcaaagcttatttgaacatctctcctcaagagagctatcttgttcatgatcctagttattataattacaagaccgattcactagtatcaagtgccttaggtgatgttttgttggagcatttaatgccatccctaatgcatgatttacatgttcttcggacatgctagacataatagccatccactcagtcccttccaaggggagaatgaacgaacaacattgcttaagcagtcatgcatttctgtgagttaaaagttgtgtccttcataactaaccatcaatctaatggccttggaatctcgagcatcagttccatcgaacatactagccatggaatttgaaaccaatgttcgccccttcacccctcatttggagagaagaatgatccttaatctgatgatgttgttctgtcatcgttccttttagaatttcgacggccaccca

SEQ ID NO: 57735 - DNA, 429 bp, Zea Mays
attaagctccacatcaagcatccattagtcgttgcttaacagtaaatgaatctttgttttcggaaggagcacgagcaacgaatcatggcaggtccggtccacgtatcctactacacgcacgacatggaagtacgtacctctatcgggtacacacgtatcactcctacacctagacgtatcacttgcaccctcgcgcgggagtgagtgacagactgacagtgaaggctcatctctccgttggggacgcggccagcggctccggtcgagagcttgctttgcttccacggggcagtccctctcggcgctaaccacctcgatcgcggcacccgtcttaggaaaatcagagtaacaaacccggtcacaccaccacaccgcgcactgacgcgcatcatcatgttgcttcctgcttacagctttaacaaactcgcc

SEQ ID NO: 57736 - DNA, 366 bp, Zea Mays
gcccaaagttatcaataagtcattattatctatctacatttacttttgcagacttttcctatgttatgcaaattaatataataatttggcaccttcgactacaatgttgaaaatgttgcaattgaatcttcgggtaagtaatggtgaaaaagctccgaagtcgttcctaagggaatgcaaagctacgtctcatttcacccaggtacgatgaaaaagctctgaagttgttcctaaggggatgcagagctacgtctcatttcacctaggtacgatgaaaaagctccgaagtcgttccttaaggggatgcagagctacgtctcatttcacccaagtaatggtgaaaaagctctgaagtcgttcctaagg

SEQ ID NO: 57737 - DNA, 614 bp, Zea Mays
cttttccatcactgccgacacaacagaaccaatgtttcttctgtaaggaaagattttaaagttgcgagccaaacggggcgtaaagtaatcttcgccagcgacccggggaacagggtcttttgtatgccactcaccctcggtcacctcagcattcgtgaagctgattcccgaaggtcaggcgaagtcataacctccctaggcacagcgcatgtctctgccaactcctcaggaaaacacctagaggccttcagaccccacattgccctcatcttacctttcacctccattttcctttttcgggttgccgcaattacagccttccccttcgaggagccttcgtctgcccgagtcttcaccttcttccctcggtcatcctcggcatcggcagaatccccctcatggtacgaaccataccgcagaccattcaactcaaaaactcggtttaacctgacattcgagcctcgtatctcccaactccttgttagttccgtcttttctaaatatttaccgagaattttcaccgcctccgcttccacctccctgacgaaggcgaccacatcccgccctcacagctcaatggcaaaggcgaggctttgtaccattcgattatttaa

SEQ ID NO: 57738 - DNA, 741 bp, Zea Mays
caatgatgcacaataatggagtttagtttatcatgaactaccatggttagggacacacttcccaaatctcaacatacaaagattacaagactcaacaatagtatcatgacactcaatttgcacagtaacatgcactacttcaagtaagtctcattgaccatcacttaacatgtgtatcgttcaacaatttgtaatattggcacacatctacctccatatcaaatagcacactagttgggaatacaagtaccgacagcaccagcacctcctctatagtttgtatagccctatccttagatatgatacttgatcaatcccgtcgttacttgaatacttcttaaattctatcattagttggttaaggtcgtaaagcatatcatatctaagtaaaacttagtcaatttgttcttaaattgacataggtttttcactcttgagagccaccttctgacgacgcgacaaattcctttgtcaatgcgcttttcaccggtggtggaggtagcgaccaaagctcgaataatccgagtggtggagaatcctaggtcgcttgcttgtgtttgggtcggagttgtttgtttgttatgtttgagtcatcgtttgaaccatttaaagctattgaccgtgtattgtttggacttttgaaccattagctagcgagtgttgaactggaatatttgagctatcacggagtgagtttggtatcatgtggacttttgaagctgttagcagattatattatgc

SEQ ID NO: 57739 - DNA, 282 bp, Zea Mays
aaaatggttaaaggaaaatgactttgcatcggggtccctgggcttattcctatctgagtcgtttaaaccgtgcccctgaagcactattcacctgagtcactgacttcgcacttaaccccctaggtttttatcccctctaacccgtgctcctccttcgcctgaacagtgactgaagaacaaaaagcggtggcacggcttacctgtggcggtagaggtccggtgaagggtcgggtgaggtccgggggtctctggcgatcacgtcgaggtgcggatccccgatgg

SEQ ID NO: 57740 - DNA, 356 bp, Zea Mays
actcaagccatgtataactctgccagctgagaacctttataagtagtattgaccggaatgaagtgagccactttggtcaatctgtccatgatcacccatatagaatcataaccctttgaggtgtgaggcaaccaggtaatgaaatccataccaatttcttccgagttccattcgggtacctttaacgggtgcagtagtccagctggtctttggtgttcagcttttactctttgacatacatcacacacaaccacgtgtgcagctacatctcttttcagcccataccaccagtacttttgcttcagatcctgatacatcttagtgctaccaggatggatagagtaatcagagtcatg

SEQ ID NO: 57741 - DNA, 575 bp, Zea Mays
gtaagaggctcctatcctttagccttgtagccctgttgaccattggtgtatccaaagctagggagttcccttgggagcacccaatgaccgacgctgctggtcagggagggggaggaggggaaggtggaggttccatgaatggctatggttcaggatctggctccggctacggatccgctggagctaccaacactcctggtgggccatatgggaccggtagctccatggctagtgtagacggtggcgggagcggcggcggcgataatggtgggtctggagctggttccgggtcttcggcaagtcgtagctacactgttggcttctatggtggagggtactcagatgcacaaggcagtggtggtggtggtggccgtggaggaggtccacaaaacgggagtggttccggctctggttctggaagagggatctcttctagctacgttgctggtccaaacggtggaagttctgccaatggcgggggaagcggtggcggtgaaggcggtgggcatgacggtgggtatgccggtggatacggaggtgcatcaggctctagctctggccaaggtggacaaggc

SEQ ID NO: 57742 - DNA, 401 bp, Zea Mays
gttagcgtgtggcccacaactccgttagcatgcgccgttctcatatgtacgtagttttccctgctccgttgtgatctgagtttccctgctccagttcgatcgacgtttcgtccaggtgcaggcgtgcagcatcggtcccccatggaagccagtgtagaacatgcccgcaaagggtaattatttatatcataattattttccttttttagttactgactacttgttctaatctccagttgacgaatgtaaagacaaagacaatgtagattttgatgatgattctgaatatgtcggtctgtcgactaaaatgattgttgtattctgaagcaagttataaagatgctcatgtatttttttatcttatcttgtggccccttataagtacacatcttgtagtattg

SEQ ID NO: 57743 - DNA, 377 bp, Zea Mays
ctgctatgtgttggtctggtggatttggcacctaaccatgacgccactggtttttcagtgtggtggagcagagctgtaagaagggtgcctaaagagaaaaggaaagggatcaattccctaactattttggtagtatggtctttatggaaacataggaatgcttgtgtgttcgatggtcgggatcccagtgtgtcggtaatctgtcaggaggtagaagctgagagtaggctttcggttatggctggagacaaggtgctccaggagctgctcggcagggcttcttagctgcatgcctgagcagctggtagggtcgtgttttgtgttgtttagggagtgagttgtaaccacttgcttttgggttgagggcttgaggcgag

SEQ ID NO: 57744 - DNA, 623 bp, Zea Mays
gtcaggatcaccatggataaagttctgcttagtagagaatgcgccaactttagcaaaactatttttagcttattgcaacattctatagtgacgttatagcactcctattttccctaacgaagctcctcaacgtttttctgaactctcaaccgttcagtattagatatctcgccatttgcttgctcgacgttaaagttttcagtaatttcatcaagcttcttctccagtccttgcacttcggatctatgcaattccacttgaatagatagagcatattctaaatcagcgatatgcttcgcatctgcttctttcttcttctcaaacttctccattttctgttctacttcagaaaggctagctagtctagcttcgctagactttaacctctcaactaaagaaaacaggattttgtccttctcaagggcttcattccaaagcgttatgacttctgagcatatgttcctgaaggcgatccgagtgctttcatctttagcatctttctgggccttcaaagccttgctacggataagatcctgacaaacaaaaaaacacaaataataataataagcattaccataaaccgatcaatgaaatttgcttaacaaaaatcaataaatacaaaa

SEQ ID NO: 57745 - DNA, 271 bp, Zea Mays
cccgtcacaatgggtgggagcgactctagctcatcctgcagcaaccccaagaagcgggtccccacctcctccctgatttgtcgaaggggcagtctacgtgccgaggtcacggtacgcatccatgaaaagtgtgtgcgcccgatccacccaagcacgggtgacagattctgtcctctcacggtggccacgcatattcttcaattccagctccaagtcggcaacacgcttgcgggcagcctgggcctccacgcgagcgttctccgcatcctct

SEQ ID NO: 57746 - DNA, 496 bp, Zea Mays
gtggacatcactcacattgtcgtagtaggctagggtgctctcggttaacatactatggagtccctagatgagttggcatagccaacaaacttctgcaaccccattggaaattactctgtactcagccttagcactagaccatgagatggtgggttggcgctttgatgagcaagagataagcctgacatggacctacgagtataaggttgacgagcccaattagcgtcagagtagactagtgccaaaggagaaggccatagtcaatattgccccaaatatagcttaggatgcatctgatagaaatcatgtgaggctctcgaggatcaatcatgtggagacacacctactggatagtatatgaatgtcagtctagtactgaagcacaccatggaggttgtggtactacttagcgtcgtgcacaaggtcaccagaagctactgagagcttcatctaagtgtccactagagttgatcatggtctacaatcagtaatctcg

SEQ ID NO: 57747 - DNA, 908 bp, Zea Mays
atcgagggaggatgccaagaattatccatctgttcctcttgaataaagaaattctttgctaatgagctagacaagacaaaggaaaagaagaggcaaaggattcgacaaaagcaatagactcattatgatgaagaataaggtgatgattatcctgttgaacttcaggtagcactacatcagtctccagaggagcatgaagtttttcaaagagttggtgcacagtatgataggggtggtggatctaggtcgagtcagcgagctccacaaggatctagcccactacctaagatgtttgcaagaaccaggtcacaagtcctagagcaggttagagactacaatcttggtgtaggagctgaagagagattcttgatagggcttgggctaaggcttgacatgccatccattggcattcctggtaaaaatgtggacaacccttactttagggcggccattattgagagtaaaaaacgtggcaaataaaaaatttgttccatgcatttattctattactatactttatatgattaaaggtaaataatatagttgtattaaatgtaggaccaatgttacattacctaaaggtagagagatatatagcaaatatttggatgaaaatatgaaggagtttcaggatgaaattaataaatggaagagtgagtagaaagactttggtgtaagtctcatgtgagattcttggaccggtactacacaaaaagcatcattaacttcttagtatattgcaatggcatgatgtttttgagagtacatagagggggtgaataggtgatcctacaaaaatgacttagaacaacacaaacatggtccaaaaaaaaagttagtgcaatctaaaaccaagtttgagtggagaagtggagagaaaagtttccttcacttgatagctcttccaa

SEQ ID NO: 57748 - DNA, 296 bp, Zea Mays
attttataattggcccaagtcctgatcatgtggttttcatagccttttggtcacactcacttctagggctccaattgtccaaaagggtttgaattagggtttgggcaaatctccccactatatgtgcatgataaagccaaagcatgacttctaagatgggttgcacttacttaggatcttgatttccaagtttggtgtactttcctcaacttaagtcacatatgatgatggctttacttgtgtagtcttgagtgaaaaccctaagtaacacctggggtgttacaaccctcccccct

SEQ ID NO: 57749 - DNA, 430 bp, Zea Mays
atctaacgatcctagccatccgatcccagttcaggggcccagattaaattgtatcaattgggtgaatcggtatctaatgatggttgcaggatcagagatccacggttgtagtacgttcacgccatcagccatactcatccctcggattcgccccaacggccaagatttaatttcatcaaagaggtatgcacgttctgatcttggccgcacattccagatcaacgacaaccaaccgttcaccctcctcagctatcctaccacggctccgaggcagcgccacacaggtacacacggcggagcccaccggtggccaccgtcccggcacgccaacgccctattcctgaaacccgagagacctacgcgttcctgagctaacgcatgcaagatgggagggcataccgggagcaggaacgacgccagggaggctgcc

SEQ ID NO: 57750 - DNA, 297 bp, Zea Mays
tgcttttttatggggagctggtgaggcatgctagtagccatgccaaggggatgtaggcatatcgcaaacctagtgaggtgtgcctgttgtcatgccccagggatgtaggcatatcacaaacctcaataaaaaacattatgcctcggtgtcgttctcattcacatatttttctttggtggttatgcttcggtgctctttggtggttaatagatcctttcgggtttcgatctaaccgtgctctcaaacaggacatgttatgcatggttgctgtggagtaaaacagaagcatggggtgaa

SEQ ID NO: 57751 - DNA, 394 bp, Zea Mays
cgaaaacagtgcgtgcagcccaaaacaacaactaataaatttcaactcgtatttacttcaagaattaccatgttctagagactagaattactctaacactttaccatttattagagttaaaataatcaaattagtaccaacaagtcgactaaccagagcaacgacttagcccgctatacaacatacacgtcggcttgcctattacaacatacactacaacatttttataaccatacatattcacacgtatattcgcacatcgatcatatcatacgaatcgtaaaccactaatctccaactcgcaaccaccctgcacttactttccaaatcgtgaacacatacatgtttatcatatgaacagagcatttcactaattatcctaaaacaaactaac

SEQ ID NO: 57752 - DNA, 477 bp, Zea Mays
tagaactcgatctgtcttgagccaaaggatctcgatccaacggttcacccgccaacactccaagtgatcaaatcttgaacaatcacataataatcaagggtccacattatttcttctacctccggcattccaaacacggcagcagccacaggactgcggtggcgcattgctggccatcctgactcggctcgcaggtgcccagctaacaacccaaaaggtcctatgctatgttggaggacaaaaaagacaacatgaggcataccgaggatagcgacgacggttggaaagctgcccacggctataacaccttaggtgttactcagggtttctcctcagtacccacattgtgacctattatcacatgtgctttagttggagcaaaaggcaccaatcttgaggagctaaaacttaatcaagtctttttcaccttaagaatcataccctgaccatatgaagcttaaggaagaaaggaaatgc

SEQ ID NO: 57753 - DNA, 488 bp, Zea Mays
atttctctcacatatgtccgacccaaagtttcattgtacgtgtgtgcgcattcaaaattaaccctacaataaaataccaaagaactgtgtaataaaataacttattttgttgggtcatgattgatgcctagcgacaggagtctggtaatctcctcctctagacttgtacgatgttgctctgctcatgcttgctacagttctcatctttggaaattggggttgtagcttcagaaaatttggttacacttcctacactatattttcagtacgtctaaataatagctttgatcttatttacccactcaaccttatcagccacacaatgtgcactctgtttgttttcagaatgtacaagcttttttcccaaactcaatcgaataggatgacaaaaccagtatatgatgacaaaaccatcataccatgtttagaaatcaacacgaactttgtgactaaagtagttagctcacttatcaaaagaaacatgcatc

SEQ ID NO: 57754 - DNA, 357 bp, Zea Mays
ctccttcccagttgccttcgtctggtaagataattcatgaatattacagaagcacctggtatctggctctagccctttgctcctcatagcccaaataaaaactcccactttaattaaagctttgggagtaagctgatgaaggtatatttcaaatgtctttaacacttcgaccaacatcttgtgcaaaggaaaacgcagcccagccttcataaaacatttaaaaaccactatttcatctacttcgggaagaggaacgatactctctcctccagtccacacaatggatatatcgtgaaaatattttcccttcatcccttcaatctgtctttgtttaacactggactttccaaaaataac

SEQ ID NO: 57755 - DNA, 876 bp, Zea Mays
caaatcctacccccttacaaagaatctcgtccttgttattaggatggactaggaaagaggtggggaaaatctacgcgtagctcttcttccctttcccaagtagcctcatcttcaatgtgatgactccattgcactttgcacatattgatcactttactcctcgtgacatgtgtcaaggtatcgaggatcttgataggatactccgtataagtcagatcatcttgaaaactaagatcctccataggtagttactcttcgagtaccctgaggcacttcttcagttgagacacatggaagacatcatgtacatccgcaagatgatcgggtaattccagttgataggcaacttctcccactcgctttaggatcaagaagggtcaaataaagcgaggggacaacttccctttgactttaaatctcctcattccccggatcggcgacaccttcaaatacacgtgatcaccctccttaaactctagtagtctcctctgggtatccgcatagcttttctgccttgactgtgcatttctcaagttctcccgtatcaaacggacttgctcttctacctcttgtataatctctggtccaaagaattgcctttcaccagtttcatcacagtacagtgaagtcctgcattttctgccatataaagcctcgaacgaggacatcttcaaactggcctggtagatattattgagaactccacatatggtaaactcttatcccaactgctaccatgtttaagaatgcaagctcttaacatatcctctagtacttggttgatcctctcggtctgcccatcagtttgaggatggtaggccgaactaaaattcaatcttgtatctaagcactcgtgcaacttctgccaataccgag

SEQ ID NO: 57756 - DNA, 1180 bp, Zea Mays
aattgctctactggatgaaacttggtaagtaaactgtgagtattcttgcttgtggttctgagcctttctaacattttcctgttttgtgcttcagcatgctgcgaaattcaacccatgaaatatttgctgaaaagctgtatcaaaaatttaaggggaacttgcacttcagtaggccaaagttctcacggtctgatttcactattcatcactacgctggaaatgtaaggaacacttgttctgtctgccctactattgtttgaaagaataattcttacatttttcacgaaatgtaagatgcattcgttgtggacttcgtgacaatgtctgataggattgcagatcctaccgggggtgctacgaaggttgtatggatgagaggtgggaggacgggaacgactacgacacagagatccgtggctgatcgtgcgcagtgaagtgagggagaggagagagagagccgatggctaggggtgtgcccaacttcctgtggcctcccttccccactcgctgataatgggctagagtttgatagctccacatctcgtaccttctttctctcccacgacgtacaactgtggatgtcgtgtcttcacacctcccctcagattagccaggccgagcgcatgattcgcaccaccaccaatatgttgtgttgcctcctcttctaggcttctctttcccatccgctactgggctagggcactgaacactaccacctacctcctcaaccgtcttccctccaaggcggtcagccatcccactccgttcttcaccctcttcagcaccacccccacctatgagcaccttcgcgtcttcgggtgcgcttgcgaccccaacacctctaccaccgctccccacaaacatgcaccctgatccactcgtcttttccttgggttctcctctgatcacaaggggtatcgatgcatcgatcttctcacccggcatcatcacctcttgtcatgttgtcttcaatgaggatgttttcccccttgctaactcctccctacctcctgacctcgattccctccttgaacttgattatgtcgacgtacctcctcttcccctaccctcttccatgccacgcgcgaccccgttgcctccgcctgcgccacacagccgggtcgcctgcgccaggcatggccttgttgcctctgcccgtgccacgcgcggccctgttgcc

SEQ ID NO: 57757 - DNA, 571 bp, Zea Mays
ctggaccggccaaacggggcaaatactagtgccctacttcggcagagatcaaatgcaagacctaatgagggtttcccctcaattaattttacgattgatgatctatctagctctgcccgcgaggacagtgaacggcgtagacctttgcttgtgttcccagtgatcaatgggttcctagttcaattgggtgggtcgacgagcatcacggacgcgtgaacatgcttaaacgagggagcagacggtatcaactaaccggaattgtgctggccacggtgagatgttctttgcggtgtgtttaaaccgatttgggggaagttagaaattggagctcctcagtgaacgattgagggtgatactgggtggctgggtgtgtgatgaccttgtggagcttacggagggctcaatttatattgatcaaaagcggtggccgggaattgcaacgatgacgcgcggctgtcggaggaggggaagtttactggcgcagcaaattcgtgtcctataccgtggcattcactccggtgatcaacggagagctaaaacagatcacggcgatgcggtggagatgcttaga

SEQ ID NO: 57758 - DNA, 348 bp, Zea Mays
caaaatttgctagagacaattcttgcagaccaacaagagcagacaaagctggagaaggaacaccactactctccccactggctatatagcgccgactgttcttccgaattaaggggatttcctcctcctcttcctcatcctcatcaataatacggacagtacacccattgggatcagctctgaccggattacacccattggggtcagcatcatcaaggccacacccattggggtcagcatcagtcgggtcacacccattgggttcagtttcaataaaaattggcactagcacttccccggtagcaggagcagaagggccggcatcctgattcaagcatgacactcgcc

SEQ ID NO: 57759 - DNA, 297 bp, Zea Mays
cgcaaagtggcgaagtggagaaaataatcaagggtaagatatgtatggttccaacggaagggttgaagtaaaaatcatttactgaggaaagtgacaagaaattaacaagatcaccaaggatgtgcaaaataaaaatgaccgctcatgaaccgttaaggaacaggggtggtcaaggtcatgtaagctgaaatgttttgaacagtcattgaggtatgaagataagcataaaaaatatgagtatgcaagatttcaagaagatgagcatacaaataccaagagccaagaaattgctgaaag

SEQ ID NO: 57760 - DNA, 547 bp, Zea Mays
gtgattctgtgtgtaagttttttgagtctgatgattctgggagttcggtggtgtggacggaagagtcttcggatgatgatttggattattttgcggcattggatgtggctgcggcagaggcttctccgcgtgtggtgggtgctgaagttcccggtccaagtgttgggtgtaggcgtcgaagggcagtggcgaagcgtagagtgagtgaggtggagggtggtcgtcttcgtgtggacagggttggtaggcgggaattgttgtcctcgctagctggggcgagtgtaggtgagggggagttgtgaagtctgtttgagggtgaggagctgaggataatgctgttaactatagggagatgggaatcatcccgaaggttgaaccaatgtaaggtgtgatgccctcgctgttcgtatgcaactataattttgtatgatcaggctgtgtgcctttgctgatccggtcgtgcccctaggggacttgtgcactaggtctagcgcgtttattatgtcggtccggctgcaccctcaggcgacttttgcacggatagtct

SEQ ID NO: 57761 - DNA, 354 bp, Zea Mays
caagggaacacttctcgggtgaggggtcaaaccccaacagagtggcgagcatgggaaagtgggggctgccttccctaatgagatcggttgtctgttgatcttaggagggtcagattactatgcgccgagaaggcatcagaagtcgggatgacatgagatactacaggcacaacaagcatccctgaccttctttgattggtccgatcatgcgattacctatgatcgtaccgatgacctggagcatatccactgacccaggcgataccctctcattgttagttacattgtcgggtcggtgcgaccgatggaagtgttaatagacggaggaagcacactcaatatcctttactctgc

SEQ ID NO: 57762 - DNA, 603 bp, Zea Mays
gtgtgttattctgtgtttatgaagcttgcactgtgccggatggatatacatacaaatagctatgactcagcaaggccagagggcagatctgtagatgcaggcttgcagctcttcagcacaatccagccagacttacacacgagttcttctatttttttggatctgcgccccgggccatggcccaggcggccatagtcctaggtccgcctctgtgcatgcgggctgtatgccctcaagactacacgactacggcatgcgggtgtgttgctaaataactatttggcacaatagcgctagggtatcaactagggtgaagcttcgtccaaacccaaccaaccagtcaaacgacgcaccaagcgaaccagctagctcactaacgggtcacaagccgcgcacgactctcatgcgcgcccgctcacgcgccacgtcatcttttagtaatttagcaatgaagaaacgttcgatgattgctgacgaaaatatttattaataactgatgaaatgttcagttattacttacgttgtgcttttttagtcattcatcgctcaatttcataaattatgagtaagcacagtaattgttagtgcaaaaaacaaatacta

SEQ ID NO: 57763 - DNA, 875 bp, Zea Mays
cctcgtccgaccgaccacttgggtgacttctgggggagctcttctgcctcgggcttctcggaggtcccgactgacacaactctgggtacgctcgtgctcgctatgacatcccagttttcactctaaaggttagtatagaaaacctagttacctaacccgttaaaaccctggcatcatgacatttttcttttgaaactcgctcatatgcatggttgatgattgttagaagcacctcacataactactttcacctagtaacaaataaaaagaatttatttttgcacatagaaaatcacacacacacaaatagagagagaagaagaaaagaaaatggagaaaaaagaaaaggaaaccccctcgccctagaccgattttggcctagagtcccgcgctcgcgtccgcctccctagcccatcttcggcccacgtttacacgctcccgcgcccctccctcttgcttccaacccggccccacatgtcatcactcccccctctcgagcttacatttggccgcaccatcaccgccgactccatcctcctcctcgatgattaccacagaaaattaggcgttgcccgttgtacatgtgaacatgcatgctagcaccgtacttcatctctgtggcatcatgtgaccattgtatcttccatccccaccccctgttcaccgccactctcccccactcaccagagtccagctagccaccgtttcctctccccacgcggatcaccaataaaagggacacccagagctcctctccagctcccctcccctcccctctcttcccttgagctcgattcgagctataaccaccgctgcctcatctccggtgagaacctcactaccctccctccttcccttggcacttagagtcaaat

SEQ ID NO: 57764 - DNA, 383 bp, Zea Mays
ccacctgaaaggaaggttgaatttgccatagagcttattccaggcaccgccccctatttccaagagagcctatccggtgtccgaaccagagttggtggaactcaagaagcagattgatgagttgttagagaaaggctacatcagaccgagtacctcgccttgggcagccccaatgttatttgtggaaaagaaggatggaacgaagaggatgtgcatcgattaccgatccttgaatcaagttactatcaagaacaagtaccccctgcccagaattgaagatttattcgatcaattgggaggagccagtgtgttctcgaagatagatctgaggtcaggttaccatcagctcagaatccgacccttagatataccgaagacaacat

SEQ ID NO: 57765 - DNA, 775 bp, Zea Mays
aacataataaggcaccgccgatgcatgtgtagggatcggatgtaaactccaacatgcatgttgttagccatgtaggggaagaaatgacgaactggactagctgacccacataacacttcaggaacccactacattcctagatgcatgtagcgccatcttaatttgatcataaataatggaataaaattacaaggacccagatccaattctctcacatggattcctgcttttgagatgagctatgggccatgacaacattcagtaagataacatcgcttctgtttagatgatataagttgtctaaatgcttatgtggaggaaagagaagagtagagacaggagaagcggatattagaacaaaaaaatttgtgaggtagaatcatgcattaatagtgaagagttaactattatataggttggctaaatagcaggctgcaatgatctttaccgtcagaagtcagctgtattattaaacttgctgttatattcggaaactggttacagtgtggcagcactcagtaagataacactactcaatccttttcagaaaaaaaaagagatgacagtactactcaacagaaatgatgagaagttgggatcaatattgtacgtagaacagaaccacatgaaatgagaattgagtagctgcctgttggccagggttatcttcacggcccgtcgtgagcacaatgatagacaaatagcggtagcaagggagaaaagaacgaaaattgtatttgccagtttttgtaattatcagcatgttgtcagaaag

SEQ ID NO: 57766 - DNA, 601 bp, Zea Mays
gttggcttggcgttagcccccaggccatgtcagacgacacctttgttcagacacacttttacttgttccatcgttcaatcaatcgcttgtacctaggtatgacccatgtgtacctactcctgaatggtcttccagtacgtctttggtcgatcagaggctagggactcaggtgtgacccttcgtgacccttgtggtcgggcgaagtgaacctttctagacggcgattttacattttgactccctaggatacttggggtcgggcgaaacgaagaatgggtctattctcaagttgccttggtatgcaccatatctttgatatctgttcctgacacttctaatgttcataactttttccattttaactctgttttgacccatttagcttgtagtagattcaatttggagtaatttatcagtggtaacaccaacacatgttttcaattatcaaaattaatggattatagatctacttgtgtcaaggaaaagatttccggccccaaaggcccaccggtcagagagagtgcacgggataaagacctctggactaccggggaccatcgatcagtgggggaataagggaaccgtctaccctagaagcgcc

SEQ ID NO: 57767 - DNA, 717 bp, Zea Mays
tcatcaggaactgttgtgccctgtgacttgaactgatggaatgtggcatcctctgcctgaatgtctgtcactggattaggtaccaacacttggtcctcaggggttggaccgtaggagccaaagtggaggcgtgaggcctcaagagtgccctggaactacggtggctggatcagctgtgcgaaaatgtagcagagataatgtgcatacggcagctgtcgccgagcacgaagaccatccaataccgtgtcctcgatctctcacatataagataatcaaccacatcaaactctgaatgagagatcagtgcaccaagtagccagagctggatgtgagtggtggcctctatataacccatccgaggcagtagcgtccgtctcatgagctgatataagtacttggccgctggagtgaaatctgtcggagagcgtcgcgacccatctgtgaaaggcggtcggaacagggccgcgacgtgggctgtagctagagcaacaccaccgtgagggcaacgaggaggatcagaggtaccgtagcacaagctatgaaggcgagtcgacgactcggtaaatccaaacagctggcgaatctggctggcatgaatagtaacatcctctcgctcaaagcggaacctcatccactggtgattggggtcgatccatactgaagcatagaacactcggacccactcctcaacatatctgccgctggtagtcagtagag

SEQ ID NO: 57768 - DNA, 496 bp, Zea Mays
attcgaagcattgtatggacagaaatgccagacctctctcatgtggtccaacgtaggggaaaaagcactagaaggacctgcctttgtcaaagaggcggaagagaaagttgcttggatccgcagaaagttacttgaagctcagagtcggcagaagagttatgcggacaacaggcggagggaactcatatttgaagaaggagacttcgtctacctcaaggtttctccaatgcgtggtgtcaggaggttccaagtaaaaggaaaactagcaccgcgattcgtcggtccctatcccatcattagcagggtaggacccgcagcataccgtctggaattaccggaatccatgtccgacatccacaatgtgtttcacatatcccagctccgcaaatgcctgcaagcaccagaaagccacgtcaaagaagaggcagtgcagattcagaaagacctccagtaccgtgagaagccagtgaagattcttgattcagcagtcagaaag

SEQ ID NO: 57769 - DNA, 2031 bp, Zea Mays
gggaattcaaagttcctggcctttgtctcaaagagactatagccgaattattacagactcagatagaaacaacactatctgaaaactcaaagaaaggcaaaacatagtgtggcgaaacgagattaaagacaaagtctaaatgcagatccccatccatgatgtctaaaaatctgcattaccaactcctccaatctacgtcatgccttgattattagttcttgatcatcctgtctaagttgtagttgagctcagaactggagccaatgcgtagcccgaaaaaccacctgcaaagaagattttattggagcattatcaaacactgcatcattcctgctcatccagattgcccaacatataaccgaagctgctagaataaagtgacttctctttctattgtccagaccagttaaccaagaaccaaagatatgtctaatattgtttggtggacggacaccacatctgattcgaactaaacgccaaataaatttagcaagttggcagtggaaaaaagatgatcaattgtctcattctgtgtacaaaaagaacattttgcatttcccttccaattacgcttgagtaaattatctttggtaagtacaacaccactatgtaaataccacatgaagattttaatcttcaaaggcatcttagccttccaaatgtctttgtgccatgccacattgacattagttattagccccttgtacatcgaatgaacactaaaggatccatccgctgacaagtcccaacgaaacatgtcactcgttgtgtttaatcgaacatgaacaaggtgagccactaaatccaaccattgttcacgtagctgccccactagacctcgatgaaaagaaatattcagcggaatggtttggaagatattagcaaccaccacattttttcgtcgaacaaaagcatatagttgcgggtatatttcttttaggatgcatatcctcaaccatttgtcctcccaaaacctaatatgcgtgccattgttaagttgaatggatccaaagtttaggaagttgtctctaactttcagaagccccttccagaaatgcgaatcagagggtctaagttgagcttgtgataatgtatgttgttgcaagtatttcctccgcaacatggtttgccataaaccctcctcatttaggagtttaaacaaccatttgcttaagatgcatttgttttgtgcatcaatgtttttcacccctaaacccccacctcccttggttgacagatgatactccacttggtgagtctatactttttcttattatcctccccttgccaaaaaaccacgatctgtaatagtctattttttccaaaacacctcttggaatctcaaaaaaagacatcataaacatcgcaaggcttgtaagggtagagttaataagaactagccctccacccacagacatgtatttccctttctagctggataatttcttttcgaatttgttctcgattatcttccaatctgacatacttagttttctatagtgcattggtaaacctaaatatctaaacgggtagtccccttttctgcaaccaaatagctgtgcatattgctgttcgtgagttttttgcttctccaaagcaataaacctcacttttgtggaaattgattttgagccctgataactgtcaaaagcacataaaagcattttcatattcactgctttctcaaaatcgtgaaccataaacagaatggtgtcatccgcatattggagaatcgacaagccaccatccaccaaatgtggcaccaagccagataattgacccacttgttttgctctattggttaatatagccaacatgtcaactacaatattaaacaagagaggagataagggatcaccttgtcgcagcccctttttcgtttgaaaaactgtcccacctcatcatttgttttgatttccatgaccacccctaatgaaagcattaatccaagagcaccatttatctgagaaacctttcatccgcaacgtttgatgaacaaaactccacctcactttatcataagccttctca

SEQ ID NO: 57770 - DNA, 624 bp, Zea Mays
attttttaccgatacccttctaaaacatgattgtcattcctcaccgagcatgtaaacacttggatgactttcgtttcgttggcctactttcctagaactcatgcacactagtcgaagacgcatcgtcagttgcacaagcctgcgcgggaacgcccagcgacgacgcttctgtctctctgtaacaatacaacgacgtcgtctatatactttgggcggtgattacgtaataagtagctggtgactctaaattcatctttttacgcttgctccgaacgagacagtgctgatctgtgagagcacggccgctagatagggacccgtcgtcgtttatgtgtgcgtataaatatgtgtcatggatgacgcgtaaccgcatccatgctttttctagattatcaggcggatcatcaacgtctaggatcattggatgcatatggtgatcagtttcttgcttatattactataatacgtattattcttagatacaatacacatatagtttctttgctcttgcaataaggctattcgcagcggttatctctaaatttcttctcccatatcattttttgtgacacatcgtcaacatttcaccccctacttttcatctcccgcagcgattccctctaa

SEQ ID NO: 57771 - DNA, 376 bp, Zea Mays
ccggcgggctgtccaccgtgaggcttgggcgccgccgtctaacagtgacagaattggggagagtcgcgtgcgccgtcagaaccttgatggacggtgtggattagaagtagtgtatcggttcggcttgggcttgtcccggccgttggatcgtcaatgtggggacgagatcggatcacgcgcataacaaaccgtagcccttgatcattgatccaaccgcccacatcacataccgattaattttatgtaagtctaatcggtgtcgttcgcgttggatcagacggcccacagttgccgataccccttcggccagcgagttattaaaagagccctcagattttaatggattcaacctgcagtcctagcaatgaagtctgag

SEQ ID NO: 57772 - DNA, 395 bp, Zea Mays
ctggtttctattggccaacaacgaagagtgatgctgctgagttagtccagagatgtgaagcttgccaattcttatcaaagcaacaacatttacccgcgcagcagctgcagaccattcctgtaacatggccatttgcatgctaggggctggacatgatcggacctttcaagaaagctcagggaggctatactcacatactggttgccattgacaaattcacaaaatgaatagagtacaagcccattgcctctttgacctcatccaaggcagtggaattcatacaagacataatattcaggtttgggataccaaatagcatcatcaccaacctgggatccaacttcaccagctctgaattcttcgatttctgcgagcagtggagcatccagattaag

SEQ ID NO: 57773 - DNA, 389 bp, Zea Mays
tgcaaatagaacacctgctactccactggcactctgcacggcgatgcgcatcaccacagcggaaacacaccagccccagcccaggcttaggaacaacccgaaaactctgagtacttcctcctgaagtacccgtgtcggaagatttgccacagtaaggatggtggcgctgatgctgagacttgcccctcttgtgggctggacctctcgtgttgcccctcctcgcgtcctggccatgaggctgatcaacacccgaagacttctgcgactccatggtatactggtgttgcatctccacacccagtgcctgctccactgtggtacagaagtccaccaacggaaaggctcccagagcatgcctgatagaaggcttcagaccctgacagaactgg

SEQ ID NO: 57774 - DNA, 418 bp, Zea Mays
tacgggtttaacattaatctcgcgagtacgagtttgtaatctctatacccgcgggttttaaacatgtagccatccataggacttacagtgtaactaatggacagaagggaaagttcaacggtctgctgacgtggcattgcactttggtgtgcacatgatgagtctgttgccgctggcagctaacaactttatagaacattcactgacgagatagctacagtgctaggttcggtgcaccattggaccggtttggcgtgaccactatttgaacagttttgggagtggatttccaacgactctatgggctttgggggcctataaagacgaccccaaccagcgtagagctgagatacaagccatatacactagaagagcacctcaagtagagatggattcagatgtctggagatccgaatta

SEQ ID NO: 57775 - DNA, 715 bp, Zea Mays
tgatactatcttccgtggaatgccatgtagcctgactatctctttaaggtataatcgggcgagagctgctcctccaaaagtggtctttactggaatgaaatgggccaccttggtgagacgatcgattattacccatatggaatcatttcctctttgtgatctgggcagtccgatgacgaaatccatgcctatttcttcccacttccattcgggtattgggaggggttgaagcaggcctgcaggcttctgatgttcgacctttgttcgttggcaggtgtcacatcgggccacatactgtgctatttcccttttcatccctttccaccaatatctggtcttaaggtctaagtacatcttggtggtccctgggtggatagagtaagctgagttgtgggcttcatcgagcagggtttctcgtgtttctcccactggcacgcacaggcgatccttgaaccagagggctccttgattatctgtcctgaggtccggaagttgctcctttcgtgttctttccataagtttggttgtttctgcgtccaggcgttgggccttgcatatgagatcttctagatttggcttgacttccaggccaccgttgtctcccagacatgcatttagctgagctgattctttcttccaatcttccagaaagtttgctcccttaaccccgaagggttttctgctgagggcgtctgctaccacgttggcctttccg

SEQ ID NO: 57776 - DNA, 1436 bp, Zea Mays
cacatgctcatgatgcttttagcaacattatgctcctgatgcatcaaatctatgttatggggtaagatcaatgccttcacgtcagttagctaccagagaaaggagatgtgcgtccagttgtgttctttaccgtacccttcaaacccacctccttctgttggttttaggtaacgatgttgtctcatgatatcttcacatgtttgtcgctttggaggcccatctctaaccctatttcctttctgaaatgactttgtatctttcctaaaaggatgattagcgggaaggaaacgtccgtgcatatcaaaaaatgtttcctttttgccatgctttaacccatatgtttgcaactcatacatatcaaaaaacacatcctactgtggacacaccactcgcaccaaatgccatatttcaacagatcatgaattgaccatagatatgccgctcgtagattaaatttacaaattagatggctatcataagcctccaccccttgccacaacaatttcagctcttcgatcaacggttgcataaatacattgattttcatacacagatccttagggcccacaataactagagcaagaaacgtgacctcttctttcatgcatttggtaggagggagattgtaggctataatgaacaccggctaacatgagtatggagtagaacttctactgaaaggaatgaatttgtctgccgacaaaccaagacgaacacttctagggtcccatgcaaattctggatcaaaaccgtccagtgactgaaatgcctcgccatctgatggatgcaccatgatatttgaatcttgtcttgacgatccccttcgttatgccatctcatttgcttcgttgtctcctgatttagaaacaagcgtttaagccgcggagtaataggcatgtactagagctgcatgacccggacttttgtagtgaccacagtgccttcctcatccaccaccactgcataacttcacttcttacagtgcatgcaatgcgtgtcattttcgtgatccctccaaaacaacatgcaattattttcgcacgcgtcaaacttctcatagttcatgccgagatggtagacaatctttttagactgatacaagttctctggcatcttatggttcggcaggaagacatcaataataagcttcacgatatcattgtagcagttatttgagacgttgtacttggacttcatcgccataagtcatgatacgacctgaagtacgatcacgttggtgccctcgtgcacctttgcatccgcggcttctagcaacttgtaaaattgctacacttccgtcgggggtcggtcggtctccagtgctggaaactcatagtagagccaagcatccggatgctggcctaaccaatccacctcactttccctgtactacggtgatgtaaagtgtatcttcttagcctcctatctactcatgt

SEQ ID NO: 57777 - DNA, 575 bp, Zea Mays
aaagatttctttagaaactcatcttcattagaatgactaggattgatattggcccgtcaagtctattataaccatctcccatttttgataacaagtgacgggggaatgaaaggtccccaccagatttttattgaggaacatagagtttgacaatcataggtgattacatgttgggggaatacaagtttccttcgagattacatggagtcaaagtaggtgcaccagtcccgaatagggtcgtcgtgctccctaatctgatagctttattgccgagctccgtctcagcatcatcggcatatgctttgtaaggacgatgtcgcagccaagaagatgacttcattcctgtcagacgtagtatcttatgttatgtccaatggctttaggaaatcatcggacataatcgtacgtccgacggccaccaaggaagccgtcggacattatttggccatcagatctttgtcattttaatgttgtgtgttgaaccgtgattgaggaggggggtaatcttccataggagagtcacgaagagggtatcggtgttgctaatccctatgctttgccagagggaggaggcg

SEQ ID NO: 57778 - DNA, 725 bp, Zea Mays
ggcatatattggtccatcgtacgtaaatgagttggtccacggatcgacctttctcgttggtatgcagtactggccagaagataaaggggattaaattgcaaaagaagccgggcgaatacatggaggatcggaggaccaaacagggaagcagcccagcagcaccctcatctctttctgccttttttcccccagggctagaccaatcgtctatcccggctgtacccctgtgtgactctgggaaataaaaggtgttcatggttgggaagaaactgatgtctactaccaacttcaaacctctcacttgctatttgatcaacagttaagagatatatagcttagtatataatgaagaatcatctagctagctaaaaaagaaacaatcttgttagtgtttcaagaagtcgccgatcgtgtggcgaaaagggcatgaatttatatatcttggtgacacttggctgtcatgggttcgatcatgtctgggctctgtagagaggcgggattcatccgtggcaagggaaaaggaaagaaagctgatgggagagagagagagaggaagctaggtcacgaggataaggaccagacgacggcagccatggatggagctctggccaccggctgctggtggctagaaaggtacgtacgggagctgggagatgcgtagtagacgaggtcgggcctaatgatttgagcgatttcggtgcgccaatggaaagcggcgaaggtgg

SEQ ID NO: 57779 - DNA, 641 bp, Zea Mays
accccgagttaagtaagcgtgagcatgttgcaccgccttaagtcgttgccgacttaagccgattgctccattagcagggcatagtggtcaccccaagttaagtaagcgtgagcatgttgcgccgccttaagtcgttgccgacttaagccgattgctccgttagcagggcatagtggtcaccccgagttaagtaagaatgcaagtcaatcgtgaacaaactgagtatctttgaagcccttttttattgatgacatatttccattttacagagtacatcgtcaccccgatagcttttgaaatgcagctagggataaaacttcctgaggtgttctatgttccaggagttcccgacttctgtgccgtccatctgagtgagacgatatgatcctggccgagtgacttctgctactatgaagggtccttcccataagggcgaaaatttgtgccgttcctcccccgttagaattcggcggaggacgagatctcctactgagaaggatcgctatcgcacggccttgtcgtgatagcgccttagagtctgctggtaccgtgctgattggattactgcattcagccattcttcctcgagtatataaatgtcctccagcctggtggcttcgacttctgctatgttttcgaag

SEQ ID NO: 57780 - DNA, 430 bp, Zea Mays
ggagcaggttggggttttggtgaggtgacacccaaagaaagcgtcagggactgaaggggtgtcgattcagatttttttaatacctcccgggcgaactcctcgaagcaactgaatttgcgcggtccaccgatcagagacaccacaggggtgcgaaaccaggtattgtgatcaggagaattttggtttcccaccaagatggcccgactcccaaaggcagggaacgaagccagaggagaaccgaaggaagttttcttattgggacaaaataaatccaagtgtccccggcctttacagaaatgacagcttaaggtcggcgggcccagcagcccaacgggcccgcgagcacgcacgaggcgccattgaaggttgcgggggcgagaccagttggaattcgaattttgaaatttagaacggtcgggaattccgcctc

SEQ ID NO: 57781 - DNA, 729 bp, Zea Mays
gctataccctgctaacggagcaatcggcttaagtcggaaacaccttaagacgatgaggcatgctcacacatacatgactctatcatgtgccatctcaacaaaaaataccaactcaatgaaaagtgctttctgttcgaatgaatcaaaatttgttttcactaaacaattactgtgcaggagcatccccgcaagggaccttgtcggcaagatcatcagaaggagaaggtttactcataccaacagatgcagcgagcacgtcagcaacaatgtcatcatgcaccacgatgctaggcctcttcatcaacattcggtcggcgcgaacaactttgtccatcgctttgtcgcatagtgctttcataataccacggtcatcctctaagaccttgatgtcgcgatgagcaatttccaactcctgcgagacaagtttcttcaaagcacacagttctctgatgacagaatcacttgaagacagtaacctattaagtcgtgacacttcattctgagaaaccttcaactcgtccccatggcggtcaagctccgacatagtaaaatgatgactcctctccaaagtagtaagggagccgctggcttcgcggtacagtttttccggactgtcatgggaattaagaagtcttcgcatctcctcctgcagacaagaagaatactaagcatccaagcaaaagcgcagcacaaacgtattgtgagcaatcaaaagaatctacctcatgg

SEQ ID NO: 57782 - DNA, 502 bp, Zea Mays
aaattagtttctctggtttttctgatctcgggactgggcctcaaataaaaagaagtgcaggggctggcgcgtaagaattcctaagactcagtggactggtcctaaggaccgagttggtttctatgtttcccgagggctctttaacaattatgacacgaagatggggtacggggtttgaatcggccgttggatccaaaactcgtggccaagattagattccgccgcggctaactcgaggtacaaccagaaccgacggatcaagaatcaacgacgaggatcctagatctaattccattcgtcagatcagtgatcaatgaccccgatttaatgtcgcgaaggggtatcccctgcctctaatcagagccgttaaccccaggatcaatggctcacatggccattacgctgccccgagccaacagtcgccggacttgggcggcggatccccttccaacgacggcgagtccaccggagttcggccatttggcgctacggggtcccattc

SEQ ID NO: 57783 - DNA, 465 bp, Zea Mays
ttgcaaagtcaggataaataaattgtacaagtgaaactatcatgtcatttttctcactcacttccactgagacgatcagcatgattccccaacatctgtttctcggctctagccgcctcccattcccttgcatcatgtgctctcttctcatttgccgccttcaatctcctctgctctgcacgcatcgggctgtcaaaactcattgatttcgcgaaccttcgcatgtcctgtatgcgatcgttaatgtatgaatcgacgagctaagatccacaatgcatcttatgccccattagtctcttggactttattgtatgcatcacctcttatttgtcatcgtatctctcccaactgcatttcatcgtctcctacacaaaaggcaataagtacgggtgcaacagtgcagctgatgcaaacaaaaaaataaataccaacctcatcgtaatctaccatatgtccacaaaaata

SEQ ID NO: 57784 - DNA, 424 bp, Zea Mays
cttcccgtcagtagggcggcgccctttcttgcccttcttccctccggccatggtccactcggaaggaggggaagcgaagaagaaggagaaagcgagtaaacaagaacgagtgaaaaaagcagccagtacaagtgggctatttaaagaggccgggaggcgactgtccacttcctacccgcacaccgaacagtcacaagaattcaatagcaattcaaaccacctggaaatgagtcaggcgtctggcaccgcttcacgtaatacaacattggatgaaatcaagacaaccactcatgcaaagtattacacctccctgttgtatcaagttactatttcacgataacacgatagacgtcttttactgggcagacacccattgggtgtaccgcccgaattctccgagattttctaaagcagtgatacctgc

SEQ ID NO: 57785 - DNA, 405 bp, Zea Mays
agcaaatccatctgtcagtaatataatggccctttgggtcggaaacagtcgagcgagagggagatcgcttgaaaggatctccatcccactacgtacctgctcatcatatgcaatgcagtcgatgatctcgcgccacactaatcatatcgatcgatcgtctcctcccatagtatatattcatgtgcgatcaaatgagtccatcatatatagcgcatgcatgcaagattgtggagctcaacaactaatgcacaacggaacggagcgacgacatgtatatatatgtagttattagtgccggggtgatgaattcggaattttatacttgtgcacgagcaagcatgcatgcatagataggaataggatcgtcgtcgtacgtggctgcggcattcatcaattagttaggtg

SEQ ID NO: 57786 - DNA, 314 bp, Zea Mays
aaagaaaacctcgatgtatgtcatcaatagctttaagagcacaagttggtagatccactgccatggataaatatattaccatccctgtgagaattgattggatatgaattttccttctagctttggtcatcagatcagccttccaccctggcaattgatttgcaattttgtcaacagtcggttatacttgatctctagtaagtttcttaatagctatcggtaagcctaggtagcggcacgggaaatcaaccatttcacaaggcatcatatcttgcaacaaagctaattctttctctccacaccatatgggatag

SEQ ID NO: 57787 - DNA, 464 bp, Zea Mays
cgctgccattgtgcactagcaccttcttgactcaacttacttggatgatgggatcgaggagtagaggatatttgcccgggtggtcgaagttgagccactgatcagcccgactgaaggtgatcggatgccccgaccatcggtacggcgtcggggcgctttgtgtggtcgtcaggacttggccgacggttagcttatggtgcctcttgttctcttcagatctgtggcccccaaagatgacgttgacctccatgtcgacgcgagagaaggccctgcctctgtcgccctgctgttgaggttactgctcgagaggagcttgatcccctcacggtgggagtggctgaaatggttggtcgtggccgatcgagttgttgaagtctcgacggttgcgcaaggagtgttgtggtatagacactagccatcgaggatttcttggagtgcccacatctgctagataatgcatgata

SEQ ID NO: 57788 - DNA, 408 bp, Zea Mays
cgacgaactcatctagtgaaatatcccaccgccgccgtgatcgtcttcgtctcaaattggcaaagcacgtagccggttcctttaaattgagcactaccctcactcgcagttagcctctgttgtgcaccatagcccacagtcaccggatttcccccaaatcaccactcgcgccgccatgaggcatccagacgtcatcagccatttccaagtctgttcatccccctatgttccatgttttagcatccttgaatgttaacgttgcttgtcggcccaaccgattgagcgctaccgcgatagggcatcgagaacattatctcgccgccgcggaacacctacgggcgtgcactcacgtcgacccactcttccacccccgttctgtccaaattcatgcatgtacccgacctttga

SEQ ID NO: 57789 - DNA, 1099 bp, Zea Mays
tttagtttttgatactctaccactttgatatagacactttggtccaaaagtgtatagaaattgaaatcaccttatagggcacaaattagggtttcgagggctcttattagggttttgagtattctagggttttttgtgccactcaaatccatcaagtttagtctcttatgaatatttctactaaattttgagataatactcaatttggtatcacacacacccatatacctcaatcccatggttgagataatactcttgggttaagaagcacttcaagtcatcacatcgcaacttgtttttgaagttttagcaaagtggatgcattctaggtgtaacaaacataatgacatgtcaatgcatatgataccaggggtgttacatccttccccccataaaagaatctcatcccgagatttaaggtcctagggtaagtaatggaaaaggaaacacgtcacaacttcatttccttatttatcttacagagcagggggtgggtgaggtttgttccaactttataataaagtacataaatcttacaggttacatgaagctaaaaacctaggaaagttcttctctaaaaagtcttgagtttcctaggtagcttcgtcttcagtgtgttggttccattgtaccttataaaacttgagagtcctctttcgagtgattctgtccttctgatctagaactcgaatgggatgctctgaatacatcaaatctggttccaaagtaacatccaccacatctatggtttgatcaggaatccggaggcatttctttaactgagatacatggaacacattatgcaccacagataatgatgcgggcagttgaagtctatacgccattggcccacatcgctcaagaatggggaacaggccaatatatcggggtgtcaattttccttttaccccgaactggttacacacccttcatcggtgatactttcaggtatacatgatcatcggcttgaaagaccaatggtcgatgtcgtttatccgcataatttttctgccaagcttgagcttctttcaagttgtgtcttatacgctggactttttcttccgtttccttaaccaaatcaggcctgaaaaccatcgtt

SEQ ID NO: 57790 - DNA, 842 bp, Zea Mays
gtgcggattgttcgctccattgcatcctttgccatggcccaaagtcagcggcacattgagcccagttagaactagcgagcttaggtcaatggctcgatcaatgggccaggcccgaagcacaacgagcctattttgcacgttctctacgtgacagcggaaataggcccgaagctggactggcccgtcggcccgaagaaaaaatagcgttccattaaaaattctttcaatgcagaaatgacagcggtgcagtgtgatattacgaacccctgcagattaaaataaaaaaaactgcagcgaatacagctttagattgaactaaaaaaacgtagcggttgcggtgctttaacacgaagcgaacactccctagagtgcacgtcacgtagattatttactatatattatttgtttactttgagctccttgtatctcagtgcgtggatggcgatggcacgccattttgtttcagcttccagcgcgccatctttctttcagcatgccaattgccagccatgttgatgcagtcggtaggggcgctgggcagattccgccgaagactgccagccatgctgatgcagtgggtacgaagacaagtagacaactcatctgtggaccagtttgaaagagcgagccgcacatatacggacataccacatggcgcatggctgtcaacaccaatcatttcgatctttggatctctcaacagccctcaaaaccaaccaacggcctaatatcggactcggtgccacagcatccgtttgcagactataaaaattaacgctctgttgattctgaacattttctttgacggctttctgccagtgttcaatccagatgattcttcg

SEQ ID NO: 57791 - DNA, 685 bp, Zea Mays
gtggaccaatggcgtaccgactccaactacccgaaacattgtctgcagtgcacaatgtgttccatgtatcccaattaaagaaatgtcttcgggtcccagatcgaaccatagaagtgacggatgttgccttggaaccagacttaacatattcagaacatcctatttgagtcctggatgagaaggattggattagctgaagaagagttctcaaattgtataagatacaatggaaccaacacactgaagatgaagctacatgggaaacccaagactttttagaaaagaatttccctgactttttagcttcatgtaatttgtgagatatgtacaattgtttgtaagaatggaatagacccataccaccccctgccttgtacaagaaataaggaaataaaaatatgacgcatttccttttccactacttgattgccctaggactttaaatctcggaacgagattcttttatgggggaaaggatgtaacacccctagtgttactttcactaaaacttaagcataacatcatgatcattagcatatcatgtgtttgtcacacatagagtgcattcactaggtaaaattttcaaatatgttgtactgatatgacttgatgtgtggttaaccctagtgtaaggtacttaaccctaaatctgggcttatggatataagggaagcccaagcatgag

SEQ ID NO: 57792 - DNA, 521 bp, Zea Mays
gtttcccctcaactaatttcactaagggcgctctaacacgcactgtccatggtgaccatgtgatcaacgaccaaactaatgtgttcccgacgatctaagaggtcctagtccaattggcagggtcggggagcatcaggagtacctaaggatgctgaaacaagaaagcagggagcatgaactgacctgggcttcgctgaccacggtaaggactctaccacggcggcggaaacagaattgggggaaatgggaaattggagagttgtggtggctaatcggcggcaggagcgggtgctcgggcttggtgatgacccaacgcagcagaccatgccgtcaatttatagtggcgctaagcggtggccggtgaatttgggaaagacgcgcggcggccggagaagaagaaggttactggcgcgcgtgattggtggcaattaccgtggcaagctccccggcaaccaccagacgagctaatgtgagtcacgacgatgaggttaatgtgccaaggcacatggcgcaaggccacg

SEQ ID NO: 57793 - DNA, 1277 bp, Zea Mays
ttggtttggtatttttagcatttttctacaattttctagaaattcttaaacctaggcagaaaaagaaaaggaaaaagcatgaacagtgtgggccgaactagcccaagtcggcccacgtgctggtgaaagcgcgcccgcgcgactggttttgcagaaaccccccccccatcggtttgaacaactagaaaatgggtcacagtactatttctatgtgtcactgacatgtttcataaacatccctgcgcttctattcctttacggaccgaagtccccgacagtgaacggcgcagggccgcgctccggcgagtctgtacccaccgattcacttgatgactggcgttctacttcagttgaaaccaaattcagggcctaacaaacgtttcccctaaactaatttcgtgaatagcgctctaacctactctgcccacgatgaccgtatgatcaacggactttctaatgcgttcctagtgatctacggtcgctcagctcaattgaacgggttagtgagtatcaggagcaagcaagggtacagaaacaagaaagcagagggcaggatcggacctaaattgggctggccacggcgaagtctcaaggcatggtgttcttggttgatttgggggaaatcccaaattggagctctctggtggaggatctgaggtacgggtgggtgcactagatgcctgaatacatagcgaagccaatggcacactcaatttatagactccgggggcggttgctctcaatttggtcacggcgtgctggcgaccagagatagagaagaacacgggtggctgtgaccgtggcgttcaccggtgcaacggctcaaggattatactcctaagggtgccacgattactatcgcatagtaacaagctacggcgtagcgcaaccaaggtcactggagcttccatggcgactctggcggtccggccacgtcgcaacgactacaggcacggtgataaacatcaatccgcgatcaaatccattccccgtcagatcttttaccttcctgtggatatcctctgcatgccaagcacgaatcacggtgaccagcgcaaatccggacgcgcagatcgccggtggcgagcttactgagctggcaatccgatccagtcactgtaccattagaacctctattcagtcagcctgacagatcaagtgtggtctggattttctcctgattctacatggcaacaaggccatcattctatagcaaagttgtagcctaatgatccagctaaaatcttactatacagcaaccatagccaattactgac

SEQ ID NO: 57794 - DNA, 569 bp, Zea Mays
ggtaagatacattagagcgtgttcctgtgttccacctgagaggagcgtgtagtgaaattattagggataaccgtcacggtttgtttcctgtttttgtgtttcgatggcaggcgacgacaaagaagcaaggatccctactcacttcgatgaatgtgttagccgccaagatcttgaggcaaacaacaagctcctgaaggagcaaatgcaggagatggtccacaagtcagtgcatgatgccttcattgacatgaaccttggcaagacttacgagaggctggatcgacgattgtcccagatcgtcgacagacttgctgtgttggagacgcaacaacaagcaccgccaccaccacctcctcgtccacatcttcccggtgatgcggtgtttgatgaagaaggtaattatgatgaagcggccaccagagatttgtgcctacgtcgccgtcttcatcaaaacatagaaggtatgcaacaccgccaacaaggtaataacaatcgtgctcctgacgacccttatgctaagattaaattttctataccatctttttcgggtcattattgtggcagaaccg

SEQ ID NO: 57795 - DNA, 288 bp, Zea Mays
ccgacactatggtttttggaataccatgcaaactgagaatacggctgatatataatgttgcataagtggctactgtatatttggccctgacgggtaagaagtgggcaatctttgtgagtcgatcaacgataacccaaatagaatcataccctttggccgtcctgggcagtcccacaataaagtccatactgatgtcttcccatttccatgttgggattggcaaagattgtaatggaccagcagttttcatgtgtatggccttgacacgtctgcaagtgtcacatctag

SEQ ID NO: 57796 - DNA, 987 bp, Zea Mays
agtgccaatagtattcccaccttttttcataactatttgacaaataaaaagaaagcaggcacacatctaatttcttctttagaagctcttccgttgcaatttgtttgtgtgcatcttttccatttgaaaccctatagtaggtaagctcttcctttttacgggtatggatgacctccaactgctttagccttgcacttagctctttattctgtgcgaacacaaggttgatatgtgcctttgtggttcgaatttgtgatgagtgattgctaacagggtagtgtcttaataggttgactcaggtgtattaatcggtgtgtgaatatgtgcaacatgtttcttagcgtgtggtgcacatgtgtggagtctagagatggtggtcaacaacaaaggtgaaagtcatgtgggttcgtgcagatggaccagaaaaataatgaaggatgagagttgggacttgaccaagagattagagaaattggatgactaactatggtggctaacacccgagggcaccaacagatgctaggacattgcagatcatgtcatcggtgtgtttgaggattgatgagacacatgttcaggatgtggctaacacaaacaccggtttggtggttgagcctaaaaaccacctagtgatggtttcgcaggtttggcctcaaaatccagggcgcgattatggtaggaatcatagatgacatatggagccattattgaggttgtatcgaagcaaagaaaatatgtgaatggatcatgaccgtcaggtctatggtttaggagttggaccataattcccctaggtaagtggtctagtcctaaaatatccatgggtatattgggaatgtgtaataacatctataaataataggagggttgccccccaccagccgtctctctaacatccatctaattgtttagttttcaagctctctcttgtagtccctccctcaagactgctagtgagatcctaggtattatagcagacaaattttt

SEQ ID NO: 57797 - DNA, 1096 bp, Zea Mays
aggggaactggcagaccggggttaggctttgctactaaggatgggagtgtcgctctctttgggaaggttggtgagtgcagtggtttgacaccttcagagacaccttcacccactcccaagcttatcaaaaccacctctgctaagcctgtcacccctatgagagattgtgtgattaatgaacctatgagagctcctcctcggaaacaagtgtggcttccaaaacctaaccatattaggaacacactttacacctttcccgacatctctagcgatccccttcctagagccccccagccatccaaaaagaaaaccccctcccacaaacaaaatccacccaagagagatagaagtcgatgaatgggtgagagtaatggaacagaagtttgggttaattcgatgcacggagacgcaaaagcacctgttcgcaactcaatagctaagagggcctgccagtacctggtgggcgaatttttctgcaattcggcctgttggacatcagattacctgggaggagttcaagttggcattacgagagcattatgttctagagggagtgctccagatgaaactagaagagtttatccggttgaagcaaggaggatatacggtgatgcagtatcacaacaaattcaatcacctttctcagtatgccattgaccaagtggatatcgacttgaagaagaagaactgttttatgagggggcttaatgacaagcttcagcaaaaaatggcaacatgtttggaccttacctacagcagggctgtcaatacatcgttggcagttgaagccaaaaatgcaggacacagaaaatcaaagggatatgcgggtgagagatcaaatcaaggacctgagaagagaacaaggttggtaatcggacctttcaatcaaaatcgttcttcgccttgcccaccttcatatccgttcaagcagcctgtctttattcgtcccactactacccctgctcttaccaatcagccgagtgcccctggtactcgtttccctgcccttcccagttcttccaatgggtgcttcaactgtggaaagtccggacatttcatcaaggactgcccatatccgaagcaaaataaatccaac

SEQ ID NO: 57798 - DNA, 556 bp, Zea Mays
cgagccaagccggtcatttaatgtgagtcgagccacctccttgaaatgacttaatgtttactagaatggcttaaagttgcctagatgcttgaataattttacctagactttagaatgacctaatgttatctagaatgacttaaatgttgtctagatgcttgaatgacttaatattgtcatggttaaaagcttcataccacttgtcttcgtgattggggccttcatgctgaagatctgtttggtgttgtcaatactcttggtgctcagtatcatgcgcaatgtgtcgcatctcttcagctgcttcgtcaatcttattttgcaactcagacaaccgaagcatgtttttctcctcttctctactcgttgatgtatggcttcaaggttgctgatctcctgatctagctccacattttgtggggttgggctaacaaccttcctttcttggcttcgggcctctcttaaaagaattcggtcttggttggtgtccagaggagcaagaacaacccctggcgtcgttgtcttcttcggtggcatgacgaagaaggtcattaatgag

SEQ ID NO: 57799 - DNA, 497 bp, Zea Mays
cctagccctagcgatgactagggaatccttggggaagaggacaagggaggacatgcaaggttctagcagctcaagccctatggtgaagaagaagcggtccatcctagagatgagtttggcctcactagtaggctagttgcattttgcaacaccaacctgtaagtaagccaacaagtatgccctcaccttccttaagagatgggaccaatacctctccctagaccccatgtattagagcccaaaggagagagataacatagagcaccaacatagctatcctcaaggtcgtgaagcacatgggcacctactaggttcgggaggcggccaccaaccctaacaacaacgacgatgatggagatgcatcggtgatagtggtgtcagactaggggcagggcggtgcttaggccccaacctttgtatctcacttctcttttgccatagtatggtaggatcctaacagtaggactaggacatgtaaaatattcatgcatgcttta

SEQ ID NO: 57800 - DNA, 824 bp, Zea Mays
cacggtgttcttgattaatttgggggaaatcccaaattggagctctctggtggatgatttgagacacgagtgggtgcgctggatgcttgaatacctaacggagctgatggcacgctcaatttatagtatccgagggcggtggctcatgaatttgggttggcgcgctggcggccggagaggaagaaggtcactggcgtaagtgattcgtggcctttgccgtggctaagcctccggtgatgaacgaattcactgcaatgattcaccgcgacgtgttaaggctactaaatacgtggcgcacggtcaataggcggccaacgccggcgagggccatttcagccgaccgcagcccaagtgggtacgacgaactcaccgttgatcgggtccgagcctatctggtgccaagatctttactccgccgtgattatctccttaccagagggcacaaatcgtggcgacgacgcggatcacggcgcaacggtcgccgacgatgaggggtgatgtacctgaagatcttcttcagtttattgtaccatggcgatcaccatcagagagtctaacagagcaagtttcagggcccagatcttaaatttttatgtgataacttgtgtatcctcctgtgacaaagttattggcctataatccagctttaatttttctatagcaatcatactaaaatacttactagattaagcacaaatctactccaaagttcttcagtttccactgtcagtcccattcagtctcagggtggtctaacagccagactttaaacctatttatctcccatttatgtacaacaccaaggcttaatcacttaagcaaag

SEQ ID NO: 57801 - DNA, 453 bp, Zea Mays
tacgcgtctctactcaaacgtgtttgttaaaatccttgaacatcgatctcctcgctcaccataggttcttctttttatattaaggatggtgcgtcagaggaacccatcagttgttgaatccgactccgatgatgatcaagagattcatgaagatactccctcgcgttccagatccaagcgtgggtgaggatccagaaacgtaatgcaaggtggtgaggcctcagggtctcatggagctcgcggtcgaacaacccagaatccttccggtcgctcttgacctgcggcaaatccacaggcttgggagccaacaagtgatgatgatggtggcaaggatgatgagattgacctcccctctgccaacgctcccattatccgagggttggtactccaccgggcggaggctcgtcgatctgcgaatgagcctatcacatattttactgccagcggagggtc

SEQ ID NO: 57802 - DNA, 518 bp, Zea Mays
ggactcttgatggagggagactgaaagttactatcactacctccaacgccgggggcacacgtaggtaggtagccaggcgtgggtccctgttctacgcattgcggatggtccgacgcatacacgcggatggtctaggacttcatcttacaacccggatcattcaagcggatggtccggcaacgcctaggagcggcgatgaccatgtaccttcaagccttgacgaccaaaaatagatacgtggaaaactaacacattcaaggcagctagttgactggtcaaatcgggcctgacctttgatcaattgttatctaaatatgtgtacaaggccaacccaagtgactggccaccaaagcgacctcactcacctactcaggagccatagcaggtaagatagattggaccacctcaccaatcggaaaggtctataggtcataatgttcaattaagacctaacgtgtctgcatggacacctccacccccatacccacctgtgccatgttaatatgtgtacataccac

SEQ ID NO: 57803 - DNA, 579 bp, Zea Mays
ctgacgcgtctcttgcggtgggacacgtttgcctgggacgacgaagtgcaagcagccttcaacgccctcaagcatgccttgacgacagggctggtgctccagatgccggatttctccaagctcttcatcgtcgattgtgacgcgtcaggtgcggggttcgatgtcgtccttcattagggcacgacacccctcacctactttagcaagccgtttgcaacctgccatcttaagctggcagcctacgagagggagctcatcggcctcgtgcaggttgtctgtcactggcgctcgtacttgtgggggcgtcatttttctattcgcactgaccattacagcctaaaattcctgcttgatcaacgcctatctacagttcctaagcactagtgaattagcaagcttttcggcttcgacttctcggtggagtataggccggggcgcctgaacatcgtagcggatgccctgtctcgccgcgacaccgaggccaccatggaggatgcggccattgcgacccgggccatctccggtcctacgttcaccctgttggacgacattaggagggcgatggcagctgcgcccgac

SEQ ID NO: 57804 - DNA, 652 bp, Zea Mays
tcttgttgcacaacgtgttcttagtacacatgttgcccaacctgagaacaatcagcgacacactctattccatactaaaggcattgtacaagaacggtcgattcacatcatcatcgacagtggcagctgcaacaatttggcgagtacaactttggtagagaagttatccttgcccactcgtaagcacccgaacccatatcacattcaatggcttaatgatggtggcaaaatcaaagttacacgttcggtacgtgttcccttttccttgggctcttattctgattatgctgattgcgatgttattcctatggaagcatgctctttgttacttggtagaccgtggaaatatgatactgatagtttacatcatggtcgttcgaatcattattctttcatgtttaagggtcagaaaataattatccatcccatgacccctgaccaaattataaaagatgatcttgctcgggctacaaaaactgcaaagcaacatgcacctaagccatccacccctgttaatgctgaaatcaagttgcatgctcctgttttacttgctacacgtgctgattttgatgacctacatgatactcacttgccctgcattgcacttgtatgttctagtatgctcgtttcatttgatgatgccccgcctttg

SEQ ID NO: 57805 - DNA, 584 bp, Zea Mays
ttgattcatgacggtgcctctgtgaatgattctaaaaatatcaataagattgcgtcttcctattataaagatctttttggcccttctgttcattctagtattaatgtttctaatctcaatatgaatcagttgtctgacactgatagatcacttttaacggctccttttaccattaatgaaattaaaaattggtgtttgagatgaagcataacagtgctcctggtctggatggttttcctgcggatttttttcaaaatttttgggagctgattcatatggatgtttggaacttattcaaagacttttatgatggaaatattgatattgaaagattgaattatgggatggttactcttttaccaaaaatggataatgcagttgacatgaagaactttagacctatctgtcttttgaatgtttgttataaattatcaccaaagttctaaataacaggctggctagttgcatcacaaatgtgattagtgactctcagtatggttttattaaaaatagatacataatggatggggtcgtctctctcaatgaaattcttcatgaggttaagaggaaaaaacaaagtggtg

SEQ ID NO: 57806 - DNA, 394 bp, Zea Mays
tctcgatcttcttggatctagacacaactaaataagtcttagaccttgttcagtttcagccggattaaagggtatcgagggacattaaattccttttattcaattctaattacaaatagatttaatctcctccaacccacctctaatcgaacaatcccctctaatcccaaagagaatttgagttcccaaactagccctaaccagggaggtcaaagccttaaaaaatctactcatgagactacccctatccatccgtgggtataaaaagtctcgagttctaatatttcgatcactcaaaatgtaaaacaagcatagatttaagcatgctgaccactatcttatactcactctgtttcgttttacaagtcattttcaacagcttcgtgcagaataa

SEQ ID NO: 57807 - DNA, 394 bp, Zea Mays
cagaaagaggatgattagggaaatgatgaacaaacatctgtgtggtaaatagcttgttcatagatttgtagctgaagagctagactgctagtggaaaatccacttcttacaacaaacatgcattctgtcatatcacatcatgctgtacgttgtacaattaatatgacctattagtggtcaaagtgaaaagagcaccgatacaagttatgatatctactgcagcatgcctgtatggcgtgacggtggacttgggagtttgtgcaacttgtgctcaccctagtgaaagcacccagaggccagagcattagatagaaagcacccactataccttttttaggatatgaaagcctggcgagctgcctgcagccctgcactcgcttgccagtgcacggtt

SEQ ID NO: 57808 - DNA, 798 bp, Zea Mays
ctagggttgcaccactgctgtgaggggcaaaagaaggattggaccaccgaaatggagtgtgggaatgtggggcgagtcttcgcaaggcatcgaagtgtaacaccccaggtgttactcagggtttctcctcagcacctacatccttgacctgatatcatatgtggtttatttcgagcaaaagacaccaaacttgaggagccaagtcttaactaagtctttttttaccttagaggtcataccttaaccttatcatgctcgtggaagagggagaagtgctaaaccctaaagttcccctctttagggcattagagcaccaaacaaaggtttagtgaaaaggctaagtaaatcaaattgtcatgacttgggctaattataaaagatgtagtccacttaataccctacaaaaaatagtaagggagttgccccaaaaagtttatgcaagacccccgaacaaatcactcaagagggaacacaaaaaaaccaggattttagatttctaaaaatcaccccctcacaaagatcaaacatgttcaccttgttccaaaactcaaaaccatttggcccaattgacaaagtggcgccaaaagacacctagaacactctagtgaagtttgaagacaaaccaaatccatttgacatgatttggcatgaattctttctcgggatggagtagtcggacaaaccaacctttgggacaagacaactcctcatccagaaacgcttaggcctccacacaagccaaatatagggaagtcaggggaagagatcttacaaaaggatcttgcccaaattcactaa

SEQ ID NO: 57809 - DNA, 608 bp, Zea Mays
ccactgcctaccatgctcgccgaatagtcacaagtattcattaagcaattcaagccgcctgaaaatgagtcaagcaacaggcgccgcttcgcgtaacacgacaccgtttggaccaaggtcaactgctcaggcaatatgattacaccccatggtcgcatcaagttactactccaggacggtgtggtaaacactatgtgtaccaagacaccccttgggcacacccattgggtgtgttgccaagaattttcaaaagattttctgaagaagtcgtatccacacaatatacgcaatgaatgtactacgacaaaaggaagagatcggctgagatgggaggaagtccaaatatagctactggactgcaagtccaatcagccgaggcattgaagcaaagagcagggtgatgtccacctgagagctatttgcctcaaccagccagacgtccaatctgtcaccgatcaaattaatttcagacctaacaaggcgtggacagatagcgtcgtttgaattcgctagaacataagatgatgaaaaaatgctgatttctaaagcataagatgaagacctttgaatggattattttcaaaaatccactcaaagctcgggggcta

SEQ ID NO: 57810 - DNA, 417 bp, Zea Mays
actaaatgaagcacacatcgtgatggctactggttaacctctgccactttgtagtttgtagtgctgaatatattcaaaggcaatctgtattggtagtctagtacatcaacggatgttgatgtgagggcacttggaaaatggttatcatggtccacatgcggctaggaccacagtagcacacatccctttcagataacttgtaataaaccattggtcaatgctagtgcttgttgctgaaacgtgtggcatttcaatcttttatacagcagtggtcatcgctgtggtgtgccagttcatactctcatccttacaatcagcaaaatctagagagtactgactcctgacgctataaattcttttggttttacgtctacaaaatagtgtttagtctacttgaaaatatgccagaaaaaaact

SEQ ID NO: 57811 - DNA, 628 bp, Zea Mays
ggagtcaaggggtagagccggatgctaggtgtttctgcaatattcacgagttatcctatcagacaaaggcaaccggaaaagaacaataccataacaacttcggctgctatagctttgtgacccgctctaaggcaaattatcatgtgcctacattttagaagaagtggccaggctcttggatgaagcaatgattttacgtaaagaatgatctagatcagagggaggatgtgaggggcatcgttcaacatcccatatggtcgcgtttcggcattagaaggccatcaatcgcaattgggaatgaagtacaagcttgcctaatggatttcaacacagtatgtacttacatcggtaccagggatttagttcaagaacacatcactttcaaagtatggcctcttgcgaatgaatgggaaaatgtcgaaggaaactaccgctggctccagtcagggtggcttggtttatcttaagtacaccttccggtacaaaagccaatttgacgagccaaatgatgattggctagacgctatagaggcaacgagtgatgagctacttggagcctactcgaggataaaggactaggccatgactgctgccttcggcgctcgagggaaaatgagactgaataggg

SEQ ID NO: 57812 - DNA, 456 bp, Zea Mays
caggcagggccgcagaccaagcggcaagcgccttgtgcccttcccgacgtactccgtcctagtctacggcactagtgctagtgtttctcttcgacagcccactcccatcccatatagagcactgttccagtacggcagaaacactgactaggacacggccagtcggtcattgttgcaggcagtgctattttccatgcacgacagcaccgaaaagaaataaaggctgcagggccggagattgtccacccatcgagaagatgagacacgcagacatccgatgacaagagtgttgccatgcttgcatccatgcacgcagcacatacatccatgcgtattagtaataacgcagtatacgcatcacccggttggattggattctaggcagctcaggacctgatgcaggccaggaacagctgaacagttactaagccaggattcagtggagccagctttttc

SEQ ID NO: 57813 - DNA, 922 bp, Zea Mays
tcccaacgacacagtgcagtaacatacaaattggggacgcgataagctttagcaacataacaggactgaagaacgacagttaggaagaagggtggagggacaggacagtgggtcagcggagggggtgctcacggtggcgcggagaatgaatttgggggaaactccaaattagggcgctacggtggacgatcggaggcgggagtgggtgctctgggttcgtgataaactaacggagctggctgtgcactcaatttatagcagctagccacggttgtcccgaatttggaggagatttggatcacggtggtaacaagatgttgcactggtgagctcgtcgtggcgttcaatggcactatgactcaagggtggtaactcttagcttgccacggcttcgggtacgtggtgaaaggactacggcatggcgcaatcgcggtgaacggtgatctccacgacgatgaccgtccggccacatcgctgcgcaagtgggtacgatgactgggcagtaatagtgccccgacttcatcccctgcgcgagatctttcaccctgcgtagttatccgcacgccatcaggcacaaatcgcaacaccggcgaggatcgcggcgctgagttcaccggcggcacgttcactgcatctaaagatcttttcgttcactctaccatggctatcttcgtcagtctgtctgaccgagcaacttgcagggctttgttctcgaatttttgtgtggcaacttactaaaccatctgtagcaaagttgatctcctacaaaccagctttgattttgttatagcaaccacaatcaaatacttactggatcctactcgaaattgttcccaaagtttgccccggttcactgccagtcaaaattcagattcaggggtgactgacagcctgactttaagaccatttatctccaattttc

SEQ ID NO: 57814 - DNA, 329 bp, Zea Mays
caatgaccagattgatgggtctccagtttaaggtggtgtatcgtaaagggaaagaaaacgtggtggccgatgcattatcaagagtgggacacttgatgcataatgtcactttaaccgcagttcgacctctatggatgcaggagttgttgaacacctatgtaaccgacccagaggctcaagagctactcaccaggttggcagtccattcaccggatgaacaaggattttcattatgtcagggaattattaagtaccataatagaatctgggtagctcataactcagccttacaaaccaagctgattacagccttccattctactgctgtt

SEQ ID NO: 57815 - DNA, 627 bp, Zea Mays
ggccagttttaggcacgcgccgaagcacggtggcttgttaagattcatgcctttttccaagatagagcagtaagtgcttgatccttcgattctcatccaacctctgttccccacatcgtgcctcattaatgatgcgattaaatggagtaatggactgtatgaattttattgaaaccctaatctggatttagttgaatcagctcccctcgggtgctccctaagggcccaggcgcccaactgcacaggctcgagcactattatctatccctctcggccttttgttgtcaccaatcttgggcactaaccaagccaccaaccaccatggggaggaagaggacagctgttaggaagtcttctgctagtaggaaagatggttgtagcagtcctccccaactctccccaatcgtaggaaatgctgccttggatagtaccgaatctactgatagggttcatgttgaagctgaatcctttgtggccagtgcctcctccccagcagatgttgctggaggttgacctgtttcaaacgatgatggggacgatggtgatcatgtgccaatgccactaccccgaaaatctaaagcctctgtttctagggaagagtgttggaatcatatggataagcaggaa

SEQ ID NO: 57816 - DNA, 410 bp, Zea Mays
cgtgaaaagagtggtggtggccacaaaaatacacaagtgatcaacatgacatcgtaagccagcaacaacaaatacatcgcttgcgaaagataagttgggtggcgaggagaagcaacctagcggggtgtacgactgcataaccaagcctggctcacgagaagtgacttctgcctgtgtttaaagagcctaggttagggatggtcgatagctttgagcattaaacatgcaaccaaataggttataactataccgttggagttgagcagagctaggttagggaattaaacacatctcatgtagccatacgagactgcaccaaaaactcatgttcaataagccccttcttttgtgacaatccttcgatcaactcataattttcactagttgaggactttacacatatgtacttc

SEQ ID NO: 57817 - DNA, 1398 bp, Zea Mays
gaaaaatttggactaaaatgagctcaaagttgggctgtcagactgccctaagtctaaattcagactgacagtgagattggatgaacttagggctcaattttaagtaaggttttgtgactttttgtgggtgcacaatgtagcaaagttggagctggtctattaggctacaattttgctgcagagcattggtctagttgccatggaaaatcgggaggaaattcgccctaaacatggtatgtcagattgactgaagaaggatatgatggtatagtaactaaaacagatcacaagttcagcccccctcaccaccggtgacctttgcaccgtgatttgcgccgtcgccgcgattcgtgctctctggttaggggataatcatggcggagtaaagatcttggcaccatatcgactcgggctcggtcatggctaagctcaccgtacccacttgctcgtcgattggtcgggatagacctcgccgccgttggccacgttgctgtgaatcgcgtcttgcatgcccggtgatcacgagaaagccgccacggtgaaagccactaagcttacgcgccagtaaccttcttcctctccggccgctagcgcatcttcgcgaaattggacgccaccactgtgggagcctataaattgccgaccccgcctgctccgctaagtaattgtgcacccagtaaagcaacccgtgcctcgaatcatccactagaactccccaatttgggatttcccccaaatcaaccaagaacaccgagcggtgtgacctcgccgtggccaacgagttttaggtccgttcatgtccgctgtcctcttgtttgagcacccttacttgcttctgatactcgctaacccatccgattaagctaggaggccctagatcgccgggaacgcattagaatgtctgttgatcatacggtcaccgtggacagagtgagttagaggtccaatagtgaaattagttgaggggaaacgcttgttagggcttgaatttggtttcagttgaagtagagcacccgtcatcaagtaattcggctggtacaagctcaccggagctcgtttccccgtcgttcgccaacgtggaccgaactctgtgaagaaatagaactagggggttgtttttgtaaagtgtcagtgactctaggaatagtactgcggtcccgcttcaagttattcaaaatgtcgggggcctattcgcaaagtcattaccgcgggtgcgggcgcgcgcgctttcgccagtacttgggccgactcgggccagtttcagcccagcactgtagagtctttttctttttccttttccgccagagctagagaatttccagaaaattatagaaaaatgctaaaattaccaaactaattttactaggctcctaattttctatagtatttaataaaaat

SEQ ID NO: 57818 - DNA, 715 bp, Zea Mays
ctctgctgctgcttgtggcctgtcacaccctcactatcaccatcctatccctgtagccatgaaattccgtggagaatatttaagaccgcctattaacagtcgtctcaaagtaatggtctctgctgcttttttttacgattggaagttaattactcaatcggttgccatccactcgttcatataaaggagcagtggagcatatcctgtacgcaaaggatgccggtgcttccatgcgcaaaatgcatccaacccatcggtccaatattcaacggtgttgtggtctttttacaaataaggtcttccactacccacgctccccacgctaagtgatgttcttttttttcaaaaaaaatccgacaccccttctttccaaacagcagcaacatttaactagtctcttggtgatgccctaaggcagcaacattcagaaaatatagtagctcagtttacattcaaaagcaaaatactgaggctttatttggataacattaacacatataaatagaacagcactagcgttgggatgcgtttgcctgctgtttggggagaaggggcgtaccggggtttttttaatgaacaacactaatgtgggaagcgtgggaagacttatttgcaaaaatgtcataacaccgttagatacagaacggatcggctggatgcattttgtgcctgggagcacatgacttctttgcgtacaggatatgctcccaccttt

SEQ ID NO: 57819 - DNA, 407 bp, Zea Mays
aattctaagcatccacactgggcgttagaggaattgcctctcaaaggatctagatttacttggagtaataatcaatcccccttcttgattgtttggactgggtgtttggttcaatttcttgggccctgaattatctagattcagaggttcacactctttcctgtgaaggttgagatcatgtgccatgtgtcattttaatttcctcgcacacccctaagtcaatgatgttctgttttgagaattactggttgaaacttgaacaatttgatatagttcttcaatatgggtggcgaacatatactcacaatcatggccctacaaagtgagtggtttcaaattcaagaatctaagaaccaagttcaaactatggcatgagagtttgacatcattggcaactctaattggaa

SEQ ID NO: 57820 - DNA, 605 bp, Zea Mays
ggaaggtcccaagtcccataagatgattgaggcaagtgccaatactgggtggaggagaagactgatcatctatccaccgtatgtcccttgggaggccatagactatcctatttataggctcaatacgacttcctggaggacgggagtaggcaacatacttgtgagccgacgtcttgcgtaccctgtaggtggcatggtcttgtactttgttgttgacttgtgcctgcttgtttttcgctgagagccgaggccgaagccgagggctgggccacgttcttgtgcccctctagggaggggttgcccataccgtagtggttgacacagggttaggtatggaaaaggcttcttaagaagtgtgttagtctcactgtgcccaatgacgttgggggtgtcctccttaatggatatcgagggcagagccgagctcgggtgaggtggaagtctacccgagatcctaaccgagccttccctaccgtgagccacagttgatggaatggcttcctacgagatttgtgggagagcaggtagctgaggtcaggctcgggtgaggcggatgtccgcacgaggtcgggctcatcgtcgggcgggacaaatttgtgtccgag

SEQ ID NO: 57821 - DNA, 810 bp, Zea Mays
atggaggcttctatggactgattctaaaatttgtcccgctcgctagataccctgccaaggtcctcctccagctgacgcaccctctcggtcagaggcgccacttctccccgagtcgaggcgcctcttccttcagctctgagcaaagtgtctggagattcgctgcttcggtgctcttctaagcaagttgctcgttcacctaggcgagcaagcccttctagcggcgcagcgagtcctaaatgccgctctcacggcagaggaacatggacttggtcacgctcttctctataactcctaaaaagaaacaaacatcaccaagacatcgcaatcactcaacaattcaaggcaaggaccagaagcccttaccttggtaaccacgaccatattctaggtgagggcgtgagtcgccgcccagagagatttatctgccacctagtcgatgtcttggaagtcctgccacagctgcatctcctcctggtcgtcaagggtggacacgagctcgtccctataggcgacacgatcccgccacgagagccacgggcctccccacatgttaggattgcccccaatggaaataattgcctcgcccgagctcagcgtcggccaactgccccagtagacacgcattaaatgccacctactctcccgtgaatctcgcagaagaccatgccaagcactatttcaactactccaactcgacacttttgtgcccatgtacacgctagggatcaagcacatgcccatgcttccgagcctagcgtcggctctctaccccatcaagagaaatggctatagggatcgagtgtccttctc

SEQ ID NO: 57822 - DNA, 789 bp, Zea Mays
gtggttgtcgaactcgcggccattatcacactgcaggacacgaaccgggtgacaaaactgggtggatacctaggcgaagaagtgggtgagggtggtgaacatgtcggacctcaaccggagaggaaaaatccgaagaaaatggggaaaatcatccaaggtattatttatatccagaaagtctgagtacaggggaggttcaaagaccacaatgaaccagatcaaaagcctgctcagcccgagaagtagtaaatgggagacaaatatgtcggcctagctgacaagcatgacagagaccctcaaaatgtcccctactacatgaaagatctaaactactggtgagcttggtcatgacgtcgggtcctggatggccgagacgacgatgccaagtggtggaggaggtggtagaccagaacaggaggtggagacgcgccggtagaggagggccagagcgtgtagagtggccccaagctgtcacagcgggcgagaggggttctggtggccagatccttcacagaaaaaccagaggggtcaaactcaatggagcaagagttgtcggtggtgaaccgacgaacaaaaagaagattattcccacttaaatatagtagagttatgtattgtgctgcttttttgatatcccttagcaacatcatttagtatttacaacatattgtgttttgcaaaaccatgaaaagcgccttgtttgtattctttgatgtttttaagatcgactaatgtatgtagtccagcgtttttggtaccaggaacctgtagtttaactcttccagggcg

SEQ ID NO: 57823 - DNA, 1035 bp, Zea Mays
ggaaagcctagtttgttcaaaacttgctaatttcattcttataaattattttatcagccttacctctttaaaatttcaactgagttgacatttctcttgtagatggttcgtactctcgaaactacccgtgtcaacaccagctacgcccctccgccctggcaaatccctgtctacccagtggtagtcgaggaagttctggtggatctccctcatatctgagtggagaatgtagtcattctagaggacagctcggaggaacagctgccgacgcccaccccgttggcatagtcactggccttcgcagctaggtcatcggcaccgcctgcaccagccgtccaagcaactgcaccttgaggcgacgaccccgacgactctggggacaatgatgacgaggatgacgacgacgacgaaggaggagacgaacacgtcaaccaggaagccgactacgcccagcaagactacttcatggggtttgatccagttgtcgaacattacacatcaatgttcgagatggggcacttccccaacctgctgcaagatgtgttgcacgcgctaggcacctacgtccgccccctgtacgaaacaaggcgagtgagcgagcctccccggggcttgctactacatcactcgcatccacgtcagggtgatggatgcagggtataggagattcaggactctgtctgctcacgagtccctgacaccactatccacttacgctgccagacggaccctgtggtcgctcagccacacctaccagcagcagctgtaggacacgaggttcaggcatcttcttctgcgtcttagtggaggaagtcagactagcatcgtcctaggtgaagctggtgaggatcgcctcaacaccctagctggtgtagtggctggtctcaacaccgacctagacagtgccaccctggatctctctagggtgcacttggatctggagaatgcccatgccaggattgcagccctggaagcccaacttcaaggactggatcttcccgaagcctaggtccccgccatggcgttgtctcctcc

SEQ ID NO: 57824 - DNA, 292 bp, Zea Mays
ggctagatcgtccgacaggcacttttagtgctcaacatatgccccctgccttttggtggaggttgacgaaccaaaagcatatgcactgccaacacccttcgggaaacattagatctcacaagtcattttgttaccaaagtaagaactaagcctgatgcaagtcactggctttccaaaccaatagggtgatcattcaatagagctctaatgcataaaggtcgtttcgaaatgcatctttctcggtcatgaccatctgatcaatggatcaacagatatagaatggaggtgccct

SEQ ID NO: 57825 - DNA, 491 bp, Zea Mays
gcagcattctagagacttgaatcattctagcactttaccatttcttagagttaaattaattaaatgaggactaacaagtagacttacaaattttatccaaatcatttagtgcactaaaattacaacaaccaattaacaacgtattcttcacgataattacccaacgatttgcgttttcaattagacctcacatgagcactactactttttacccgtgcccataaccatacccatttagaccacaacaagcaattcaccatggctacaagcttaactaaagtcatctaacgattcggctaactagagcaacaatataggccgctatacatcacacacgtcggctagtctgttattatcgaaatccgagacacaacatgtatagaaaaatcacttaatgcaatcgactcctgcttaacacgagttggctaatgacgtgactatttcccaattaccaacatacaccacctttcgccatttttggataacctgcg

SEQ ID NO: 57826 - DNA, 294 bp, Zea Mays
cagggccaaagagatctgtctatgaagtgccgagtggagacaagtagccaacgactttgcttatagggtcaagaaatattctgggtatgacgtcaatggataccgttttcgcacaacacactacgacaaaagtcggcccaatcggaaaacaacgtgttctggagtctttacgccgggccttgacaatgtcgattattttggacgatccgaagaaatatatgagctcaatttttatggttccaaacctcttactctagtgatattcaaatgtcattggtttgaccctcaagtgac

SEQ ID NO: 57827 - DNA, 759 bp, Zea Mays
cacatcggcttgaccagaaacagtgcaacgattagacagtaaataacatctacacttggtgcatgcataaaacaagcataagcataatttctcaatgaaagtgtacctcgtttcagcatccaccaacctccgacttagataggtcaccacatgctcctttcctccgatcgcttgtgtaaaaacagccccaataaccttgtcttcggctgcaatgtataatctgaatggtactcttacttgaggtgcttttaatacgggagccgaagacaaatattttctaatgagattaaatgcttcctgctgttctgccccccaagtgaattcggcatcattcttaagccgaaggataggggtgaaggcatcatttttcccgaccaggttagaaataaacctccgcaaataatttaccttgccgagaaacttctgcatttcgaccttataggtcggaggtcccacattctgaatagatttgattcggtcagggtctatctctataccatgttcatgtatgatgaatcctaaaaacttaccagccgacactccaaaagcacatttacgtgggttcattttcaaaccatattgacgcattttatcaaagactttgcgcaaatcagctacatgagaactaaactcagccgatttgactacaatatcatcaatgtagacttccacagtgtttcccaacagctcatgaaagatcaaattcatagccctttgataagtagcaccagcatttttcagaccaaatgtcatgacaac

SEQ ID NO: 57828 - DNA, 402 bp, Zea Mays
tcaccgtgcctactcaatttgagaggagggggcagaggctttgcgaatttgggcttggatcatcacactgggtggaggtgtgcataccccgccgtggatcatggtgctatttatagccatggcggctcggctagcgatctccggccacagatagctttgttagcacatgactaccacgtcggtaagagacacagtgagggagatcgaggcatgggtgacaccgcgacaaaagttaatcgagtcacggtggtcgccggtgacccactccgaccacgcgtggctcggcccgcagaacgatgccacgtaccgagttactccctggcgatcaaatcctcaccgattcatccaagttcatccaaatcaacagtgtcgtagatcttttggtgttcttcagattttcag

SEQ ID NO: 57829 - DNA, 518 bp, Zea Mays
cgattgaggtggtggtccattttatagcccatgcaaacagccgggcgctgctgcgtcggcgtgggccatccctctctcatttgatcggggacacagagcagagcagagcagagcaacgcagagcagagcagctagctagtgtcactctcatcactagtagtactttcgtacaaccagcccagcagcagcagactctcatcattatcgtaccactaccagcctagcagcagcattgtctgccggctatgctgctgctgcattcctacatgcttgagcaagttgtagctgtagggagggggaatcgcatcacaagagagctgaggtggagcgccgagacgagaggatatgtggcatctccatttcacatgttctgatttaattagtatgcgcgcggttgtaataataattaattaattcagaaattgaggggtggacctgctggatgctacctcgcgctttggccgatggactacaaaaccaggagtagtagacacaccatccgagaaagcctgcaatgg

SEQ ID NO: 57830 - DNA, 454 bp, Zea Mays
tcgagtcaatgtatcaaaaatcttaatctgtgtaagtcaaatctccctgaacactgagctcttccatgggtaactgttcctcagggacacggagacactccttaaattgagacacatggaatacattatgcacatcagatagattatcaggtagctcgagttgataggccatctctccaactcgcttacaaacacagaatggtccaataaagtgaggggacaatttgcccttgactttaaactcctcattccacgaagcggtgacaccttgaggtacacatgatcactttactcaaactccagtggtcttcttctattatccgcatagctcttttgtctggtttgagctaccctcaacttctcccggattatacagacttgttcttctgccccttgaataagttcaggtccaaagaactgtattcccctagtctgatccaatatagaggagtcc

SEQ ID NO: 57831 - DNA, 535 bp, Zea Mays
cgtcggcggactgagcggaagcgaaatcaaaggaaaacagaggaggttcgaaggcaaaaagtgaggctagggcttagaatgcagaggtgtgcgacgatgtgatacaaatggggttttctcgggtcagacgccatttctaaaaagtgtttagtcatcactcggtcgttatttctaaaacgccgacgtggcctaatacgactcggatgttacttctaaaacgctgacgtcgccattcatcactcggccgttatttctaaaaacgccgacgtggcccaatacgactcggctgttacttctaaaacgctaacgtcgccattcatcactcggtcgttatttctaaaacgctgaagtggctcagcagaactcggctgttacaatctaaaacaccgacgttcgcctagaaccattcgactgttacctctgaagatgccgacagtaactcagccatcctttctctatgtaaatgcaggcggaattaaaatacgacacaacaattacaagtcgttactcgagcgttatctttgagaacaacggc

SEQ ID NO: 57832 - DNA, 402 bp, Zea Mays
cggtggagtggccatacctgatgcagccatccagtgtgtgcagtgcggcaaagaggccccaaagaagttgcataacgtgaagaagttgcataatgttggctctgagccaggcgcctggaaagcgagctgcatttgtctgccactctgtgaatttggcatttttgagcgtccccagccttggccccagacccagagctgtgcctgcaatcaaagttgctgcttggatcgtcaggattaaaaagaaatcatgctttcaccgaccgttcaggcttttgtttgctcttgtaactggtataagactgaatccagatgtcctcatgatctccagtcgtgaaatgtgtgttccgtaaatgatcgatggacaactcgcgtttgctgtctgaatatttcggcgttcagcgc

SEQ ID NO: 57833 - DNA, 779 bp, Zea Mays
cacccattcacccctctgattgcctcatcagtccttcaattggtatcaaagacggttaaggaccaatccaccctaatcggttcttgatctgtagaaggcgacttggaacgaggtgttgacaaacctctgttctttgatgggataaactacatgtagtggaagattcacgtgtctatgtatcttcaaagtttcatgtatcaagtttggaagatttgtctcaatgctgcgtttgatgcctagggtgctcgaatcactcctcttcagatggagtaccatgattcggacaacaaatctcgaaatgctttgtcttattgtctctcgcttggtgagtttgagtgagttggacatttgggtacagctcacaagatctggtccacccttgagaaatcctatgagggaaatgatcatgtaaagacaagactttttgaggcgtatcagtgagagtaagtgaactttgtccagttggctatagagatgatcgacaccatgttctcttggttctagtcaattgtgaacatgatgcgcacaaacaaggcacaactaccctatgatgatcatgagagagcactcaagttactacatgctctagaacagagggttcaggaggtcaaggtctcggcgatcatcaagtcgcccaactatgagactctcattgtggaatagctattcaacaagctcaagtccactgagattgaccactagacctgggccaagattgagaaccctggtgcacccaccatagccctgttctcttgaggtggttcctcttctaaaacttc

SEQ ID NO: 57834 - DNA, 689 bp, Zea Mays
tgattgaggagcatgacattgggggtttagtggccgggaaaacgctcggggcggcggtggtggtgacgacatcagcagaacctaagatgaagatgcatggctcgctcggtcgctctcgccctctccctcactcccgcacccaccgatgtcgttcgctgctgctccgcctgccaccatgcgtctaccctggtcatggcgtcgtcgtgggtttagtctccctcatccctggatcttaggcttctcctgtctcccatccggtggaggcaggcggctactccgcgatggcatctccatttgtttgggatgatagggggaaattgcttgcgaattctttggactgctcatctggtaaagcttttcagctctcggttctttcgagatatgtctcctcggtccatcatgtctcttctttgcctttggactccttactgattgcggtttttcaccgttacaattttcatctctcggctaagtcagtcaacttggctttgcaatcggttcttggtggctcccggcgggttttcatgtcgtaagaatcagatcgtcattttcgtttttccgtggcctccaagaaagttggtttcatggtcctggctctgaagcgcaccatctctgcaaactttgatgtttatttctatctttggagaaacgggagcccaaattggagaaaagaatatgctctttggtgc

SEQ ID NO: 57835 - DNA, 690 bp, Zea Mays
attaagggggttatccaacgtcctatatggtctcgcttcggcattagaaggccgtccactacccttgggaatgatatacaagcatgccaggcggatttcaatacagtatgctcttacataggcacaatggacttagtctaggagcacattgcttatagagtgtggccgcttgcaaatgggtgggagatgctgaaggaggatgctgttggctctagtcagggtggtttaatctacctaaagtacactttcaaatacatgagccagtttgatgagccaaatgatgactggctagatgccattgatgcaaccagtgatgaattgattggagcttactcgaagactgaagatgatgccatgacaacggccttcggggctcgaggcaaaaagaggctgaacagggtatttgatgtcattggatttgtatatccatactactgttaccctttgcggaggctaggaaagaaaagaaagattgctacttcggcaacttctagcgcgccaaagtcaaagaaggttaaatttttgacacatcggcctaagcgcattgaaatgaccaaagggccgaagctaattgaagggtctgcttctatatctgagccaagtcgctttatgcctgttgaagctaagtcaagaccggctgaagagccaaaactgaagaaggtggcagagaagccgaaggccttgagtcca

SEQ ID NO: 57836 - DNA, 625 bp, Zea Mays
gggaccgaccggaaggattccgggttgtccgaccgcgagcactttgagacccggaggcctcagcacccggcatgacattgccgcttccgcgccctcgcttggatcgagagcgaggtggagtatctccgtggatttactggtcatccaaggagtcggattcaaccacagacgggttccttcgacgcaccattctaagaaataagaaatagaacctatgatgagcaaggatcaaacacgtttgagtagaaacgcataagatattgagcatgcacttcacccgtcatatgagcggttcaactacaacgaacaatatcaaattgctaatctctaacaatgtctgtgacaaatgaagataatctaagtgttgcaatcacttaaactaaaatgtacccaacgaatgatacattagataatcaagaacacgtaggatcgagtacaaggaaataaaatagggcaatacctcgatccggagattgggtcaagaactcccaacgagatggaggaagatgatggaaaacgccaggatgaacggatctccaatagctcttccaaaggtgagaaggcacgagtgaaatttttggagtggagtgtgaaggagagagaggaggaagaaaggacggcggcg

SEQ ID NO: 57837 - DNA, 463 bp, Zea Mays
aagaaccttcgttaagattttaaagcttacattcaacaagcagattggcctataattctgaatttttattgcatctgtttttggtaccaaagtgattatgccaaagttgagactatgcaattgtaaatttcctttatggaagtcctcaaacaacgctagaaggtccgattttatggtttcccaaaaatattgataaaactctgctgggaagccatccggtcctggcgctttgtttgactccatttggaaaactacatttttaacctcttcctctgagaaatgacaagttaaaacttcattttccatagcagatacttgcggtatatcatcccgtatatcttcttctatggaaaaatgattagtctcaggttccccgaatagatgcttataaaacttagtcacgtattctattaaatttcgttgacccactattatcccttcttcctgttctagttgtgcaatt

SEQ ID NO: 57838 - DNA, 374 bp, Zea Mays
cgcaagatcctcctttgtcatagcgcataatccagcttcaagcttcggaaaccccatactcctagccatctcccggcagacggataattctttgttgtcaggaaggcagtataggaagtcatcctcgtctgttccattaaacactagtgcccccttcgggtatttcaattccctggcatagtgactagcttcataaatctcttcttcagatagtattttccccgaagcatgacgcacaatgtaatcttgtattttggaagatgcttcgggggcagcggtatcaatttcttcaaccaaagtaggctctgacatttttattccttcggttgcctttgcaatttttgtttcttctgcttccaaaagtgttactttgg

SEQ ID NO: 57839 - DNA, 972 bp, Zea Mays
gtggtcaacccgtctctatcctgtgtccgtgctgcgttctgttccggggatctcgccgtggccacggaatccatgcagtggccgaatccccgcttctgtcgcgtttcccctccgcctataaaaccaaccgagcacctggaaactcccttcatccactcgtgagccgccactccataccaccactgtcaccataaggaagacaagagctgctcccccaccaactcagcgccaccgtcgattgcacccatacaccgccgttgggttccgtgtgccgtggcccagagcttctccaagccttcacgaaggcgctcgtggatttctaggggcgtgattggaagtcgtgcaatagcaatttctcgccggagcacctacgcaactgtggttccacacgtccccgtgggcaacatcatctacgactcggtcattggtgagaaactcttctgtcaagctcgccatgtccgcaggaggtaggggggtttcaaccaagttgttttggggcggggcactgtcgcgcgcagggttcatgccgccagcggatcgtgccctagtggggcttctctttccccccgccgtgtggcgccatcggttagggaagaaacacctaggagcgttggatcggtagccaatagccacgattagaggttgggtaccgtttcacccgtgtgatcgataacccttggatctggattgtatggatttgggcgtgtggtgttatgatggggtcgacttctgatccatgtcgttgacccactcatggacgattgggattagagcaatccttaccggttcgctcggttggatctgactcgctgattcagaatccaacgaactagattaaaacgttgcttaccgtttcggtgggaatggtccttggcgtcgaatcgtgatctaacggtctgaatcaggccccaagtcaaccagtcatgggttttgctaaagagccctgctctttatccatatcaacccgccgtc

SEQ ID NO: 57840 - DNA, 784 bp, Zea Mays
aaagtatatatcacaaacatcttacataggcaaataatattgtactatttctatttaatctaacaccccctagtcacggtgagagcatcgtagacggtgagactagagatggagttcacaagctaaagtccttcagagtcataattggttatgtgtctcgtatgttgtggccggagaaaaggctgactatcctcacgcaaggcagtagccctttgtccgatgtcaagatatccaagcgtgagggtggaggagtcgtggtcgagcatgccatgttggagatagccatggtcaatatagcagtcgagatattcgcacatgaagccacgtgcacaaagaagcaccattgtgattatgaagacatgttgaggcagttgtcatggaaggggcgatgctaaggtcaacataatcagggttgtcgatggcatagacagaaggcgacgatgcaattgagatagatggggtggggatgccaaagtttgcttgaaccaagatgtggactaagtttgctagacccaacaacatgtcaaggatgaaacgacatgttagtgttgctaatactaggtgtacaagatagagggacccaaccatcatgtgagatactagcaaagaacgaagttcttaatgatggttatggtacataaacgatagagtagaatgtgtcgacacggcccatggttattggagtagacgaagaaggtggagaagaaacaacagcgtttaagatgtggttgtgctggatgatgaagaagctatgtggaggtggaaatgtctaactcgaaggtga

SEQ ID NO: 57841 - DNA, 911 bp, Zea Mays
gcaggtgctttgctggctgaagttggattgctgaaagaggggtctgactgctgaagttgtggttgctgattttgtcttcaagaatattcaaccgttgaaagacagggcatacccggcttatctgtatcgaggcctagccgactcaactcgggttactaacagaagaattccctctatagacttggtgagctgacttgagatgatccttagaggcaaagtgtcaaatgttggtgccccagtggcattctcagcctagaacttgcctcctcccaaagccttcactctttttgtgtcgaatcctcctgtcactgatggcagtttgggccttagagtgcggccctctgctgaagaagttagtgccttggttgcccttgctcggggggattcctaatgatgaacggcaggtccattttgaggtgcccctgaaccctagtgatgtagagataagcgctatgcttgatttgctggctgaggactcttctgacgctgctcatgctagagcattggtagtggcgcccctcccagaggctgatacaactttggatactcagaagcctgtcagtactcatccgaggcacccttgccgagctaatcaacctgatccttctgctgatgagcagaaaaagaaaaagagacgcctccggcgagtatccagtttggatcgggacgttggtacctcggttcctgctgctgaagaagtgcatgtgactgaatttactgacgctgaccccaatgggtgtacccaatctgttgttgatcccaatgtgagtgctccatctgctgctgatcccaatgggggtgctgcctgtgttgctaatgtggacgacgaggaggaagaggatgaagttcctttgactcggaaaaacagtcggcagttcatcgctagcggtgaaagtagtggagttccctct

SEQ ID NO: 57842 - DNA, 459 bp, Zea Mays
gaactccacgccgtgatcctcgccggtgtcgcgattcgtgctcgttgcaaagtggataaccatgggggggtaaaagatctcgcgcgggggataagtttggggcgctgtattaccctgtcgccgtgcccacttgcccggcgacgtggccgcacggtcatcgtcatggctgccgccattttccccggttgcgccatgccttaggtagattaccatatcgctctgcgtcgtggaggttaaccagtgatagccatgcgcctatgtccaatgaatgccacggtagaacaccgcggtgactcagtccctctctccggtcgccagcacacttccttcaaattggatgccaccgccgatggagtctataaatttctgccccagtgagctccgctaggttattacgcatccaaagcactagctctcgcctccgatcgtccaccagagcctcccaatttcccatttccc

SEQ ID NO: 57843 - DNA, 568 bp, Zea Mays
gtttgaagatcgattggtggttcctaaaaatccagaactcaggaagaaaatattggatgaagctcatctttccaaattttccatgcaccctggcagtaacatgatttatcatgatctcagacctttgtattggtggaccagaatgaagagggaaattgctaagtatgtatctgaatgcgacacttgccaaagaatcaaggctagtcatttgaaggtagcaggtaccttacagtttcttcccataccatcttggaaatgggaggatatttgcatggattttattgtgggattgcccaacatttcccgacatcatgattctatctgggtcattgtggatagattaaccaacacaactcatttcttgccagtacataccacccacaagacagagaaatatgcagagatctatattgaccagatagtgcgtttgcatggaaatccaaagactatcgtgtctgatagaggggcactgtttgtggcacgtttttgggagcaactgcaagagtcactgggaactcaggtgataaggagcttagcaaaccatgctcaaacagatggtcagacagaa

SEQ ID NO: 57844 - DNA, 930 bp, Zea Mays
cagggggatcccttccttctagttgagcttccagggctgtaatccttgcgtgtgcatccttcagctccaaatgtaccctggagaggtccagagtagcactgtccaggtcggtgttaagacctgccaccacaccaacaagggtgttgaggcgatcttctccagccccatctggaacaatgctggtctggctttctcaacaaagacatagaggaagatgcatgtacttcatgtcatgcagctgttgccggtaagtgtggctgagagaccatagagctcgcctagcaacattgctgaccaaagcaacgtaggtggatagcagcgtcagagactcatgagctgatacagtcctgaaccctctatcccctacatccatcacccctgatatgaatgtgagtgatgtagtagcaagccgaagggggctcggaaactcaccttgtctcatacaagggtcagacgtaggttcccaacgcatgcagaacgtcctgcagcaggttagggaagtgccctgtctcgaacattgaggtataatgttcggtgaaagggcatatcacctcgaagttgtcctgttgttcatcgttggcttcctcgttgacgttctcctcttcttattcttcttcgtcgtcgtcttcatcatcgtcaccagagtcatctggatcatcgcctccaggagcaggtgctttgacttttggtgttggcggtgctgaatatgacgctccagctgcgaagaccagtgattctgccaacggggtgggcgtcggcagaaactccactgagctatcctccagaacaacttcgtcccccacacgaaggtgagggaggtccacagggatttccttgactaccactaggtagacgggagcctgccgtggcagagggatgtagttggtgttgactcgggtggtttggattgtacgcaccatctacaacaga

SEQ ID NO: 57845 - DNA, 856 bp, Zea Mays
ggtggtcccgagttctagggggtccgggaccgttcgggcatgctagcaccgttggggtgacctagtgaaccttgcggtggcgctccggccatgagaaagagaccggatgtgggtgaacgatagggaggtgctctgggcgggtcggggtgtgctccgccgagtaatctcagacacagtgagagttgatatggtgcatcaaggctgtgtgggcttcagtgaggggtcaggagtgtccgaggccgggatccgggcacgaggtgtggctgcagtagctaggcaacatggaggcacggtgatccagcgtgtaacggctccagcgagcccaaattcactacacttagacacaattaaggcaaaagaagtgtaaggtggggttccttaccgaggggtggtgctcagggatgcttggcacgacgtcgggggctctagtcggtagatgacgaggaaacacgacggagatcaccggtctgcacagggtgggggtcaaacgttgacgggactgaggggccgggaaaagggaaaaccgaggtgggttctcggtgggttggactcaagtggatctcaacatggcaaaggcgacagtaggggctcgacgacgatggcggaacggctttgcggcgacagcggcgctgctgcatgtttggtggggaaaatgggcaaggagagtgcgaatgagggatggggtgtgctgggggtctggggtcttcactttaaagctagggtgaggtgtgtgggacggggaccatgggttgcgagaggcggttatctgcatggatcgtgcagcgtgggagcgagcgaggcggagcgggcggttgcggggacgaggatggggctgacgagtgggaccatggcgtca

SEQ ID NO: 57846 - DNA, 388 bp, Zea Mays
attgtaagagtggagcatgggttaacttatctttcaaagtgttgaacgcctcttcttgtgggggtcccaagcaaaagacacacctttctttgtgagttcgtgcaaaggggcagcgatggagctaaaatcacgcacaaaacggcggtaaaatcctgcaagtccaagaaaactccgaatttgcgtgaccgtcattggtgtaggccagtcctgaatggcttcaaccttgctgctatccacctcaatgccctgcggagtaaaaacataaccaagaatcgagacacgttgcgtgcaaaatgtgcacttttccatgttaccaaacaagcgagcagcacacaaagcatcaaaaatagcacgcaaatgttctaaatgctcctctatagacttgctg

SEQ ID NO: 57847 - DNA, 479 bp, Zea Mays
caatatcattgttattggacatccctgcgagatcaattgcccctgacgaaacaacctaagaactggatgtgctactgaatgtgtatagactataataatattgtactcaactccaaaccactccctctccccaaaatcgatctgcactgaattgcatgtcttggtgcatccagaaaaccaaccaaattacaacactgatcggcacttatctgcactgaattgcactgatgttgaagtaccattacacattggacaagcttatttaacatgttgcgccgagccaaaccagaaatgtgcctcttctctaaccatccccacccaaactacatcaacctagaaacaaaaactgatccacgccatccggtttgacccaaaccaattccagcttcaactctactaggtccttgatttaattatgtgtcactatgataattacatattttaatgaagaagtttcagtagcttgaaatgaaatatag

SEQ ID NO: 57848 - DNA, 429 bp, Zea Mays
aaagtggtggtgtcctaaatgttgatgcttgtggtggagatagtggattagaaagaggatgaggagcagcatgtgaagattgtagaggtgatgatggagtaaaggtactaaagtttgaggaggcgacgatggttggggatgagacgatgacagtgttggtggatcaaccaattcgacatcccttcgaggccaaaggatgaaatttttgatggcttgtccaagtgtctcgattccttcggacccagggatgtctagcatgtcgtcgtcagatcattggacgattgtcgtcacttctaccctgcaataatcatctggtatgtcgctttcatgaaattgtgtcctgggattgcatgcctgttcctactttcttcgtgcgattattgttaataccatatcttataactagtgtgcacatcactggccttgtta

SEQ ID NO: 57849 - DNA, 341 bp, Zea Mays
taagatcggggtaagatgcttcataatttgtattccaccaccaccaccaccctgagagatagttgtagggttcacattatttgttgcctttttgtctctgttgtgtgctaacaatgacaggaccaaagaatcaaatggacaaggacaaggggcttaagcttaacgacgatgagtgtgtctctcagctggaattgaaggagatgatgcgcgcgatgactgaagcttttaaaaaataccaggactctgcggcgacatcctatgagcagcttgatcgacaagttgctaaacttgttacacgcatggacgtactggaggcttgtcccccaccaccaactccagcc

SEQ ID NO: 57850 - DNA, 915 bp, Zea Mays
tgaaaggagctctgtctctgctgactgaaacgtgacggagtggctccagctagcttattgaagcttggtcccttgggtggaaacccaaaggatcgagttctctggtgccggtcctgcagctgagctcggaggacttggaatttcctcttgaggtgacctttttcttcttcccttgccctttccacttgtatggctttgtttgagaggtgcgagaagctgaggaaatcctggctggcgaggatagtcttgagttctggtcttagccctttcaaaaagcgggccatcttcttggcttctgtactaacgtcgtcaggcgcgtagcgagccaattctgtgaatttgtgcacgtactcactcacagattttccaccttgagttagttcccaaaattcatcttccttgagctgaacgatcccttggggcacatgatgttctcgaaaagcagtttcaaattctgcctaggtagcatctctgacggcagcgctgaaggtatcccactaggatagggccatcccggaaagttgatgagcagccaaataaacacgctgattctcagggcatctgatggcttctaacttcctttttatcgtgcgcagccagtgatcagcatcgaggggattgctggatccagcgaatgtcggaggcttgagccttagaaaatctcccatcctgtcctgtggtcttccaccagtcgggcgctgattctccagacttctagcgaggacttcaatgagtcgggtttggttggctagaacttgggctaaatctaatggcagctctagaggtgcggggaggtgggtttcactcccttctccaccggcttcttcttcagctcctaggggaaaccttgctccaatcctaaaggcggtaggcgtggttttatccgaaaccatctgccagggggagagaattact

SEQ ID NO: 57851 - DNA, 278 bp, Zea Mays
agagcctgatcaaaatttgctagggataattcttgcagaccaacgagagcagacaaagctggagaaggaatatcactactctccccactgactatgtaacgccgactattcttccgaattaaggggatttcctcctcttcttcttcatcctcgtcaacaatacgaacaatacccccattggggtcagctctagcaggatcacgcccattgggatcagctctggcaggatcacacccattgagatcagcatcgtcaaggtcacacccattgggttcagc

SEQ ID NO: 57852 - DNA, 666 bp, Zea Mays
ctagaactcaaaatcactttatagggcacaaattagggtttccatggttctctttagggttttggagtgctctagggtttgtgtgccactcaaatccatcaaatttagtctcttgtgaacatttccaataactcttgagataatactcaatttggccttacacacacccatataccacaattccatggttaagtaccctactctagggttaagaagcacttcaagtcaccacatcacacttgttttgaagttttagcctagtggatgcattctaggtgtaacaaacataatgacatgtcaatgcatatgatgccatgctcaaattttagttctggtaacaccaggggtcttacatcctttcccccataaaagaatctcgtcccaagatttaaggtccttgggtaagtaatggaaaagaaaacatgtcacaactttatttccttatttatcttacagagcagggggtggtatgggtcttgttccaactttacaataaggtatacaaatcttacaggttacatgaagctaaaaacctaggaaattttttctccaagaaaccttgagtctcccaggtagcttcgtcttcagtgtgttggttccattgtgccttatagaacttgagagtcctttttcaagtgattttgtccttttgatccagaattcgaa

SEQ ID NO: 57853 - DNA, 625 bp, Zea Mays
atggaatgactttgtagttcccatggatgtatcataacctgatcgcagcatcaggattttgtggttttcaagtcatctacatagggtacaacatagccatattcaaggaaagtatctagcaaaatggttggtcttggtggagttaatagggcaggatgaatatggaggcataatggtggtgtctagacactatgccttgtccattagatccacctttgaagctaggataaatgatgtggttgggcaagctatgtcatctatctatgatctgtacaccataacaatctagctaatagcatctaccgatactacctacgttgcctgatagggagaaatacagttgtgatcacttctggagaagtgaaaaacaacattcgagtggatgtattgctagtgtattggaggcattgaacacaaaacacgatacaaccctaaccgagttggattcgctatgaagatagaatacggagctgagagcccgtctagatgatgctacaaacctcaagccaattgagttggtgtatgaccctgtggagtcaccacaacgaagaagactttagtacaatgaccctgcaacaagaacttatgttctaggccatgattgttagtaggatataccgtagga

SEQ ID NO: 57854 - DNA, 324 bp, Zea Mays
aatattatatatatttgtaactatttagttaggtaaattttattatttctatatggtgccaccaaattattgattcggcatacccagagataaattcctagatctaccactgatctgacatacattgagaagccaacgcagattgtggagacagcagatcgggtcactcagaggaacaccatcagaatgtgcaaagtcaaatggggccatcactcagaagaagaagcaacctgggaaagagaagatgatctgagagccaagtaccctgaactctttgctagccagccctgaatctcgagggcgagattcttttaagggggatag

SEQ ID NO: 57855 - DNA, 956 bp, Zea Mays
ccctacccttcctatctgtccatgcatctgtcatgattgtacatcctgtttgctcccatgattccttgtggttcttgaaaccatccaataccttttgtttccttttctgcaagaatggtccactcatctcataaggactaggccctctcaaacctttaccaaattgcccaatggcctcaagcataagtgcaaagctaggaagggtgactgtgttgtgtgcaatactagcttcatagaaaaactgacatatgtactcacaagccttatcccttctctcttctcttttctgagttgacaatgttgtttgaaccttgttgctaaggttaattcctttatgcatcatttgaacaaattcttcaatagtagaaggtttataaaatctgtcaatagtgccaccacgtaccactgttctacagctaaggctactagaaccttttgttggcttttgcttcaccacaaggacttcattcccaagatcaatatccacttgctcacaactttcatcttctcagatgtctaagttaatttcatctctctctttccttttcttttgctttatggtccttttcttctgtattctttgtaagcaaagcaatcatatcttctttcacatcacttggaaccttcaaacactttgtaacattattccctttaataccagcaaggtgccacttaattcttgtaatcccagctttgcatagcttgtcacagtacttgcacttcagccaatgcttcttgtttgcatctgggcaaaaacaatgagcccaagctacatcatctgagttgataatagcttgtggtgctgctgcatttgatacagaggcagaggcgacacttgatggaataactacacaatttgaagacacataatgcataatattaggaaaatgaaaagctttaaacagatgaacatctattgaagaatgtgttgcggcctaccgcctacatcaatggaa

SEQ ID NO: 57856 - DNA, 738 bp, Zea Mays
gcaattttcatgctatgtctgggttgtctagtcttcggaggacaatatggcctggtgatatgttattgagttttacttttctgtctcaccacctcagggtttctgtctgctatttccttatgtgctcgactgcctctagcctcagttcctctatgacatctttaaagactttctcattgtctgaatcttgtgccgaagctataattcttgctgcccatattggcctcttcaggggtaactgctttgtctccgaagaggatcttaaatggtgtgaagtttgtcgatattgatatagaggtgttgtggttccacactaatttactaagctattcggtcgattttaccttcgacaatccaaataaggattttgtgatccctaacaagattattccatttgccctttccactaatccattggagtctaggtgcatgacagaagcaaagtgtatgtttgtccccacctggctgcataatgctctgaacgcttcggagtaaaaccgagtgccattatcaacgatgatggacttcgtcactcctaagcgacatataatgttctgctagaagaacttttagatggtggccgaagttatgtttgctaaagcttttgcttcgttccactttgagaagtattatacttcaaccactgcgtactttagatttccctgatcagctggcattggaccagtcatatacattcctcatctttgtaagggccaagtaggttgtatcaactcagac

SEQ ID NO: 57857 - DNA, 333 bp, Zea Mays
gatttgattgcctatgtactaagtgttcgaggtagccgatgaattttacttcatttgaacattttagtcgcaggtttgtctagccatgggtgtgatgtcgagcatattttaggtgactctacattaatatgattgtaagcgacctattcaaccctatgacgcgaccataacaaactcaatgagccctttgtgacctagttagtgggagatgaactagcggaagaccattgtggaactattggaatccaactctagttggtaatctcaaggacacgcgtttgcctccccatgaccatacaaacaatgcgtggaccgacaacatgagcacgtgca

SEQ ID NO: 57858 - DNA, 508 bp, Zea Mays
tacttgagctagtcgaggagagtgtgcgtcctcttaggaggcaagggagtggagcactacttggaggagacctgtgttgagccggttgataagcttggcactgaatggagaacttggcatacaacaaactctgtgatagtggcatggttattggcatctatgtctcctactattagcaagagggtggaagctatgtgcactgcatcacagatatggcagaccttgagtagcatatactctcggagggggaatgtggtggtgatgatggagattcagaataaggcagatgtggtgaaacaagcagggagaccaatggagcaatatgctagtgagcttcagtacttatggggagaactagatcactatgcccctctccaaatggtttgtccacaggatgcacacattgttcataagtgggtagaggacaggagagtgacccacttcttaaagaatctggatcctgagtttgagagtaggagagctgccttttgtcatcaggagagtcttc

SEQ ID NO: 57859 - DNA, 780 bp, Zea Mays
caggttgctcagtcgtagtggtgtcgtcccaccgtcaaaatggcaggaaaggtagaatgggtggcttctttcccgcggatggacggaaatgaaaagaatagcagacgacgccgttggactgaaacccatttcaggtcacttgttggagattcagttttttgcttatccattttaacagactggggtacctatagaatgttttgggtctccatattttaggtccattgttggactcagtctaaggccccacgttcactctctcctacctcatgttagtctcttccaagtggtgggacccgcgtgtcatgatgttattctacctctctcgtgactttctctctcaaacgcctagccgctcgaccagacaagccgccgccgcctgagtgaatgagtgattggagccgaacgccagccgccgccatttcagcctctctggcccctctccttcaattagagtcgaaagtcgatcggcgaaatgaaaatggcaagaatgaacaagatagggtaagcaccttgatcatacatctatgtttcctctacaaataataagttatgcttgtgacctgatgacatgtttcgtatttcatcatagatcgatgatgctgtgaagatgtacgaggagaaggaagctttccaattcttgcactgttggaagatgctacgcaacgagcccaagtggaatgacaaagtgctagagctaaacaacactccgacaaggaaaacacaacaaccacaaggcccctgcaatccaattggtacacaacccagcaatgaaaatgc

SEQ ID NO: 57860 - DNA, 408 bp, Zea Mays
ggccgattgaaggggatattcaactcggtcagagccgcatccgaagaaatcaccccttctatcgaagatatccctggagccctctagcatattgagaatgaagttgaggcccttgacaaagttattactggacacaaagatttctgtgctctggtggcttctcgtggcacagctgcagtattcataaaggccggatgcaatcacgtgagggctgtaaacaggccaaactttggcttgtcaccgtctgatctggttgatatttcggccgaagcctagaatataggtaacagattcatcacacaaatttgggcgaagggcggtcgcgagctggctggagacaaagctcagagtctgcttagcaaagtataagaaatctctctaccattaggcctttattttatgttttcc

SEQ ID NO: 57861 - DNA, 775 bp, Zea Mays
gattgttttgtccacaagaactcgccttaaaactatttagtcccactaacaattctataactaagttttgtggctatttagtgtttaatttcataggatcacctattcacccccctctaggtgctttcagagagtatcgttcctcttcccgaagctgacgaagtggtgattttcagaagcttcatgaaagccggacttcaggtccccctggataagatgttggttgaagttctaaaaacttttgaaatttatcttcatcaacttacccctgaagcttttatcaaagttgggggttttatatgggccatgaggagccaagtgttagagccagacgccaggtgtttctgtaatatcagacgaaagcgactgggaaagaacaataccacaacttcggctgctacagcttcgtgccccgctctgaggccagttatcccgtgctaatgttttggaaaaggtggccatgctcttggatgcaggaatggttttatgtgaagattgacctgagtaagagggaggatgtgaaagggattaatcagtgccctatatggtcttgctttggcattaggaagccactcattgcacttgagaatgacgtgcaagcatgtcagatagctttcaacatagtgtgcacctatatcggcacgagagacttggtccaagagcatattgcttacagtgtgtggccccttgcaagtggatgggaaatgccgaaggaggctaccgctggctccagtcaaaatggcttggtctatctgaagtatacctttcaatacag

SEQ ID NO: 57862 - DNA, 794 bp, Zea Mays
gaagatggagatgttagtgactgtccctacaagaaagaagaactgagcatggtggtgaaggaaaaaagaaaagaagcaagcccaaatagtatgtgcgggtgagtaaatagtattagtggtgagtaatttcttgtaactttctcgacttgctatggattttgaatactccttacatgccttcaatctctatcgaagtttgttgatacttcgacatatttcacaatgtcttgtcactgttaccgagagtcattatctgctctagtatattcatccatcttatgaagcaacttctataaagtgtgggtggctttgcaatcaagtacttatagcatggtctcgatcaaatccccttgattataatctcaataacaatgtcgtctagtacagttggtgcttgtgctctgattcgaagaaatccttggacatagccttggagatattctttaggctcttagacatactgaaacaaagtttgggctataattggattgttttgaaaaccttgaatgtttatgatcaactgatttttgagtttttgccacatggtgattgatcatggacgaagggagaaatataaggtatgagctatgcccttatggccatgatgaatgacatggatagtactattgtgtttctgtcaaaggagatagtggttgcctcataactcattaggaaatgtttgggtcagatttaccttcatatgtgggaagttagggaggcttgtacgaagtgggccataaactacttgcagatcacttgaaagtggggatgtgctattgtacatgaagctagca

SEQ ID NO: 57863 - DNA, 387 bp, Zea Mays
agtaatcaacgtctggttgcaacccctagctcctcattgcccagatgaaaaccctgattttgatcaaagctttgggggtaagttgatgaagatatatctcgaatcttttaagtacttcaaccagcattttatgcataggaaaccggagacgagccttcataaaaccgtggtaaaacaaccacttcatcagcttcaggaaaaggaacaatattctctcctctggccctcactatagttgtatcacgaaaatatttacctttcagtgcttcaatatgtcctctcttaacagtggattttccaaattcaacatgacttggcctccatggccgatcttcggcgtcatcgttgccactctccacatcaaaatcctcactgtcactagaaccc

SEQ ID NO: 57864 - DNA, 854 bp, Zea Mays
ccatatacgccacagcagaacggcgttgtcgagagaagaaaccgcactgtggtggaaatggcgaggtgtttactgaaaagcaagaatgttccaggggagttttggggcaaagcagtcacaactgctgtgtatctgctgaatcgagctccaacgaaaagtctacaagggaggacaccttatgaagcatggcataacagaaaacccaaagtacatcatctacgtacatttgggtgtgtagctcatgtcaagaaaataggccctggtgtttcgaagctgtcagacagatcaacaccaatggtgtttattgggtatgaggcaggcacaaaggggtaccgagtttatgatcctgtggccaagaaacttcacatatcgcgtgatgtgatttttcaagagagtaaagcttgggactggaaacaagaaactcgagcaggatctgcaacaccagtgtttgatattgagttttactcggttgctggaagaggaacagtaccagccgagcctgcaactccagaaaattcagaaaatgcagcagcacagctagccgatcctgcaaccccagatcaacaatcgcctctccaagatgattgggctattgacgctggctcagatggagcatcaaaccatgcaacgccgcttgggagtccagctgtgcaaggaattgaatttgcaactccactcactggagaatctgtcaactcaaaaggagtgccacaaagattcagaacattggcaaatatcaatgacacaactgatgagattactgattttgagtacagtggggtgtgctaccttgcagcagaagaacccagaagcattgagactgctctgaatgagcaatgttggagaaaagccat

SEQ ID NO: 57865 - DNA, 642 bp, Zea Mays
cgtcagtcggactaatctggtcatacgcatagcgtttctaaatgcagatgagttacatcacacatgtaaccttctcttcactataaaatgatatatagattttaaagttactatgtaaaattttaaatctttaaatatctttatatttcatgacggacgaaggggggcagtatctaaatgccatcatcacaagttcacaactcacatggactacggtggtggtggtcaagcaagatgggaaggaacataacatagctggtatataatttgctattcgtattagcaaatgaatcatggcagttagcagtacaattgattcttccaaaagaaattaagaaagaaagaaaagcattgtgcactgtatatgttgtaccctgcctgcctgtcttgatcatagatagatacataacatacctaacaaagcattaagcctgcgtgtttccacgagcagcattgatcgagagtgtgtgtgcacccatttatggaccaagcatgcgctagggtgcgcgagaggtggcaacagtaaccatatgcaagagatcgaagcctttgggcttgtactgagggagggcacaaggctgtgcctgtgccccttgctttctgcgagaagcagcgtacaggggaggagtgcatctgccacac

SEQ ID NO: 57866 - DNA, 275 bp, Zea Mays
atactagtgcaagtaaattagcgctgttggtaggcaaactaaagctaaagacactgcttttatgacaggatttcacaaccgtccatctttattcttctaccaaaaaacagagaaggtaatcacatgaattcacaaccgacacaaagcacaaagtggcgaaacatccaggaaaataagtgtggttcacaatccatcagctacgaatgtgtacgtaaaaccctaaattacacgggcacaagaatacttaaatgaaatgcctaaccttgacgatgaag

SEQ ID NO: 57867 - DNA, 1357 bp, Zea Mays
gtattgtagaacatgaataattaaatgttgaagaaaatgcattgaatcatgacccctaacaacattagttatgaatgagtagcaggaaaatgagttgactaacctcctttgacttaagcatgcttatcttcttaccacgaccttagcacttacacttacccctctttcacagatgacttcaccacccccactgatggaggagacacccgcttcagctttgactacctttcttgagagggctttccctctatcttgtgggaggtgctctactccgctggataccccacaccccctatgtacatggtgaagttgtacgaggagcatcaggtgccacattgtagggtttggctaaccctggagtcttaccctctacagcctgggtggcgttgacttgattccgaaactatagggttcagggcggacgacaccactgaggtcgcaacactaaaagctttgacgaccttctacggataccatccactggagatgatgatgcacccacttggactcttccccgccgagaagagggatgacctgatatggtgtacaagagtgagccacgtaaaggatttgtgggccatgcatcccgaccaggttgggagaatcaccgtccagtgcatgagtgcactgtaccacctgcaggccttgcaaagcgacgccatgacacacctcactgggctcgctcaaactgcaaagatcaccctcgacgatagggagcacttcgtggttgacctttctttagaattggtggagaaggatctataggtggaacaaatgagcaaccgcatccaagcattggagcagtaggtggaaacccgggacaacaccattgagatcctagaaaactagctccatgatgtgcaagaggagcttgcggaggccaaggctcacctagaaatgcatcaccaagaaatgaacgctaatgaggcagacaatgaggaggagcaggatcccgaggaaatagagctagcttccagtccaaacacgacctactccggagtgtcccctacacctgcggccagtgttgcctctaccaataagggttagacaggttagaattaaacatgttaggagaaagggaagaccacgtaagcttagcttttggtaccaacttttggactaggctttagggtggatctcctaatatgatgtaacccagaaaacctgtatgaacaatgcaatgaatgaatggttatccttgtttggttcgatataattttgtgtcatttttcttctcacgatataaagtcactgcttggaaccctgaatcgaggtaacaacgacagaatttctgttttcatatggcagctagacctcgtcgcgaacaaaacgagcaggttcccccaccacctccccc

SEQ ID NO: 57868 - DNA, 1340 bp, Zea Mays
ccccattcttcatggtttatgggtcagaggcagtgctgcccgccgatctaatgttcgaggcgccgaggttgattttcaagaacatagctgaagcagaagctaccaggctagaggatattgatgtgctagaggaagaatgattgaacacagtaattcagtcagctagataccagtagaccttgaggcgctatcatgataaagtcgtgcgacaccggtcctttgtagtgggagacttggtcctttgccaattctaacgggggaaggacgacacaagttgtcaccactatgggaagggccattcattgtatcagaggtcactcggccaggatcataccggcttactcaaatggatggcagagaagtggggaacttctgaaacatagagcatcttagaaagttttatccctagcgaggcctcaaaaattcttgaagcaacattgtactctgtaatcgggggacttcatcgtcaataaagttttcgttttcaaaggcattcagactcttgactttcagctgacttcgattcgattggacttgaaattagtgcgcttactcgacctagggtgaccactatatcctgctaacaaagcaatcagcttaagtcggtgacaacttaagtcggtgcgacatgctcacgcttactcgacttggggtgaccactataccccgctaacggagcaatcgacttaagtcggcgatgacttaagtcggtgcgacatgctcacgcttactcgacctggggtgaccactataccctgctaacgaagcaatcggcttaagtcggcgatgacttaagttggtgcgacatgctcacgcttactcgacctggggtgaccactataccctgctaatggagcaatcggcttaagtcggtgatgacttaagtcggtgcgacatgctcacgcctactcgacctggggtgacaactataccctgctaacggagcaatcagcttcagtcagcaatgacttaatacgatgcaatatgctcatgactacttatctttggatgaccactatgccctaccaaccaggcgatcggcttaagtcggaaaacgccttaaaaccagcacgatacacttgctttcacaattggtcagggtgactgctataccctaacagcaaaacaattagcactccgggagaaaagaacattttacttgttgacaccagaagcatgttctggtgccctgttcataaaacattcaagttctaacataaccatcgcatacacatagaattcatattacaacgaatgttttacaggacatcactgcatcgaaacatctttgttagcaatgtctttcacaggagcaatggaagaggaaggacgactcgaag

SEQ ID NO: 57869 - DNA, 497 bp, Zea Mays
acatgtgggtgaacaaacaaaacatggcgtcggctggtgtgtctaggatgatcgttccgaccacctccagtttatctactagcgatgagttcatgcgtaatagttagcatcagagcgaatctggaaccaccacacgaacatcataccagattccaaatgaagagaggaagcatggtgtcggcgcgagtgcatgatcccatggcacaattgctggctaaaatcaaagaagggaacaaggagacgtatcgacgcatggagacgatgcgaagtggtgatcacgaacatggatggtaccgtgaagagtgtgatggccaagtagagtgacgtccaaaagtggcgaccagaggtggaggcgaaggtgtcaaagttcacagaggcgttgaagaaagacaatacaaagcaaggtagagaaggcagatcagaagcaatcgaggagtttgaacctcaatgaattgtcgagcgaatacggtgtatcggcttccacccatctttaagct

SEQ ID NO: 57870 - DNA, 280 bp, Zea Mays
tgcaatcaccttaatgagacgatgacagaagaaaatgagtacgactgcgtttgtcgaatatttcatcagtctctcatccatttagaaatcatgattaccaagcaatattttcactaaagagtatttcgacatacacaaggtgagcataccagcaactctcagccaacaaaacccaaagaatttgctcctatttccatttgtgatgtcataactgatgcaatatttggtgggaataggagaaaatttaggttaccttgatggggagaacggtgcctcgttg

SEQ ID NO: 57871 - DNA, 991 bp, Zea Mays
gttttcctctgtgcctttgccttgcaggcctattcaacctcagcctggacttcaaaagcatgccacacactcgcctatctaacctgccggggaggtaacaacacgtacgtagagtctgataagaaaaggaaagaaaggccctgcgtgaagcatgtgaaagcatcaacgtcatcactcatggacttgatggtacaatccaagcactgacgtgacacaatgaggaaattagcggggggtgttaaagcgaggatcgctcttgctcgatttcggctagtgaatgaaacgatagttcaagtcaacgtcgtttatattacatctgcctcggcactcggcagcttggcttgccgtgtcgccaatctcaccataccattcgatcgacacagcttgtgaagcaacaacaacagcttgactggaatgggtcgtccctggtggtttcaacgtccaagtgcctaatatattctgttctgtgagataggtttcaagggccggggttaatttactggtgtttgcagcaggtttgaaaaaaagcaagaaccagaaagggatgaaataatgtactactactactactacaagtgatgagttctggagtactgcaggggcaccaaaggactatgagatcccactttctgatgcgagaccaagacaacaatatgcctttcattaaaatttttaaaaaatgtgtatacaaccagacaacagatgttccaagtacttaaccggcaaatggctcccacgactgatgagacgtctggcttctttacttttcattgcgcaagtggggcgggggtcacggacatgaaatgaattagctcccattccagtggtacattgccaagccactgcgtgttattctaaaggtttatcgcccaataattaacggcgacctgacaagcgtgaaaacaacgtggatgtgactgctagtgacatgaggacaaaataacagggagtgtttagtcccgaactggccctggttgattttcgtaagcaa

SEQ ID NO: 57872 - DNA, 503 bp, Zea Mays
ggtgaggcagacgcggagctccaaactgagacggcataggagtagacggtgcaggagtaggcgcggccagatactgaggaaaaccctgcatcgacacaaactaagaagtccgaggcacataaagctgctgcggaggaagaggaactgaaaactgctgctcagcacttgacatcatgttgatagtgccctgagaagaggaggaagtcaccggctcccatctgagcttcccattaggattccttctacacaccacatccttgtggtcctgactgcagatagaacacctgccactccactggcactctgcacgacgatgcgcatcaccacagcggaaacacaccagccccagcccaggcttaggaacagcccgaaacctctgagtacttcctcccgaagtacccgagtcagaggattttccacgaaaaggatggtggcgctgatgctgagacttgcccctcttgtgggctggacctcccgtgttgcccctcctcgcgtcctagcca

SEQ ID NO: 57873 - DNA, 360 bp, Zea Mays
agggggggtacgacggctagccggaatagtttactggccgggcttattcacggcgtaactccgagcgtcatttgatcaacccgatcacgaatcgagacggcgacgacacgaatcgcggcagagatcatcggcggcgagctgagctggtgacctgatctatttcagagcactgtaccatggcgaagcccattcagtgcacctgacagtcaaagtttagggccaaatttctctcaaatttctatggcaactcgtccaaagttctgcagcaaagttgtagaccaataattcagatacaatcttgccataacaactatagccaaattcctactaaatcatgtttgaatttgtgcccaaagttcc

SEQ ID NO: 57874 - DNA, 478 bp, Zea Mays
gcaaaagcaataaatgttatggggtcacatgggaccgatcgatttatatacacgagcgggcgcagaagccaagaaaacgtcgtgtccctactcaatgtcttatggaccagaaaatataacccttcattacaacgcttcgcatttcttctcattttcaataacgctcgaggaaggtgttttcaggccttcgacgtaaggccctcgtttgtttcgtggcttcggcatgttatgaaaacaaactaatcctgcaataggctactattggagggaatgcatttgttgaaaaccctcaaaacattgtactaccggtcattttcaagtgtgttccaaaatgacaacgaaactacccttcgtcgaaagcaatgcacaaccaaaaaacaaagctaggaagctttgtctccatgggaccaacgtgtgtacaaatacgaaggaactttgcctccacaataccgacatgagagcaaaggtgaaagagaag

SEQ ID NO: 57875 - DNA, 318 bp, Zea Mays
tgtatatgtggcgcacataataatggagataaaaagaacaaggtgttcgatcgatgaaaagaagccaccagatgccatatgcaaaacattgcagcgcatatgtatgtttatatctccattattattcactccatgcgtgcatatattcccgaagcatagtgtatggaacaagctccaccgctgcagagaccaaacaagctccatgcgcgtgactgatatggaatggtacccgtcgaatatatatatgtaaataaatagttctctttccacagcgtgcaaggctcgtacttagcgaagagaccactactcgacgacgac

SEQ ID NO: 57876 - DNA, 287 bp, Zea Mays
tgattttgccattgattctaaaaacccagctatataaggattcacagccttcttctgttcaaagagattctcctctttggttagcttcgtctcagcaacagcctctttgccttaagacatttttccttcagcaatgacgaaaacatgtctttttaatcgaagctcaggaagcttgagaaactagcaagcgttagtaagcaagagctataaaattgagcaaataaagcaagtggcacaaatagcgtaccaaatgtggtcggtgtgaggtcttatttatatgctcggca

SEQ ID NO: 57877 - DNA, 687 bp, Zea Mays
ttccagtttattccccatacgcctatccaaccaggtccaattccacacttgcctttccagtatcatccaccgcctggtcctttcggtcctcgcccacacaatgcatccttaccatcacctttaggccatcttcccaaggtcaacttcccagtttttgatggggacagccccaaattgtggcaatctaggtgtgaagattattttcacatgtacagtgttgacccgagcctctggatccaggttgcaaccatgcagtgcaccggacccgcagctcgctggttgcaatccgtcaaaccatcgctatacaatatgtcgtggtcccaattcactcatatgctccttgaacgttttgggaagcatgaacatgaagtcctgatccgtcgtcttttccatttgaaacaatccggttcggtgtcagattatattgaccagtttgcccaattactcgaccaacttcgagcataccaaccagtcaccgatcctctctattataccatgaaattcatagatggcctgaaacatgacgttaaatcagttgttattattcaacgtccccaagacttggatactgcctatgttttggcttcattgcaggaggaggtgggcaactcggctaagaagtgggacagtcgacgttgggagcctgtccttcaagcaaaaccatatgctaagggacctatgccttta

SEQ ID NO: 57878 - DNA, 557 bp, Zea Mays
ggctagtgaagccaacctttggcattaaaaaaatcaatgtgttgcatgaaaaacgaagcacatattgccatagttgctttcaataccgtgtgcagctatattggaacaagagatctagattaggagcatttgacatataatgtttggccattggaagttgaatggtcgatgccagagccgaagggcgatggttacataaagcatgaagtaaaagcgaaaccttgttagattgagttacaaatacaaatttggtgaacctgtgatgaatggttgtaggccattgattcgaagtgtaatgatgtggttggtaattttattggtaatgaagatcgggcccatactattgcttttagtggccgagcaaaatgaagaataaatcatgtctttgaagctatagggatttctacccgggttaccctcatttggcacaagacgtcgagggaagaaagagaaaagaagtgagtaagacacaacaggatgttgtgaagcagaagaaagtaaaatagtaactactaaatgccaaagggcgacttcagggtccaagggtgaggtggcta

SEQ ID NO: 57879 - DNA, 906 bp, Zea Mays
ctctaagacccaggctaccatcactagcaggagggttagacgcaaattcagaaaatgatctatgaggtggcaggttctaggcagaataggcaacaggagcaccaacatttgacactctgcccctcagaatcttatccagctggctcaccatatctttagtggggattctttttttgtgacccgggtagagtcattgataccactgtacagataagctgggtacgccctatccttcaaaggctgaatattcttgaagatgaaatcagcgaccgcagcttcagcagtcaaacctctgtctttcaacaagcaaacctcaacaagcaatacttttgcctctgttatctctgaaggggtcaaagattctacccagcttggagtatggacatctggctgcctccccgaccgaggggaagggacttggagtggttcttcacaatgaaccactcgaggcgccaccccttgatgctatcctttagggggatgtcgaggtactctgtcttcctcccgcgacgcagctccatactagcgccgccaacaagttggtgttgtcccccagccatcctgggccgacaatgatacagatacttccagaggccgaaatgggggagaatcccgagataggcctcacacagatgaataaaaatggaaacttgcaatatagaattagggttcaagtgggtcaagttcagatcgtagaaatcaaggagtttgcgaaagaagggagaaatggggagagcaaggccacgtgtaagaaaaggaacatagacgacagactcatgggtgtgctccgtcggaacagtgacccgcgacaaattcgccaagagcagagttctttcggaggtaaaaccccaacatcgacaagatgaagaagatcaggattcggaaataacagacatatggttaccc

SEQ ID NO: 57880 - DNA, 613 bp, Zea Mays
gaaggggtggatgatcagtgacagtgagacccacgacgtgtattgctggacctggacatcgctgttttggaagctgctttcgtagagaacaaagtcggctcaagaaatctgaaatttttgaaagtagatagtgcgtgctgcagtggtgcttttatttgactaatattaacaaaatgcagtatatagaagggagtatgtgtatttcagtaggcagtagctgtcttgttgttacattgtaaagccgattgtatacaattgtaaagccagtttgtgtgtaatctaagggtgcatttggttgtaatgatagaacgggataagataggacattcccttaaataagattgtttgatttatggtcagaggtttagacagtactattctagcgttgtctcagttgttcctcaaaattggagtgataagagtgtaagggacatccttgtcctgcctgtcccagttgtcccgcaacaaaatacatcctaagtgtagttaggtgtagacatcttttatgttttaattagtggtggcaacccagctattgatagtttgcctctagatttcttctagtgcgaactgtaacatacgtgccacttgtgatttaagttgtgaacctaat

SEQ ID NO: 57881 - DNA, 611 bp, Zea Mays
attttagtagaaacttttggctgtagaaattcatttttgaaaatatgattagaaaacaaataaacttgcttctctccatagttttaattataaaaatccaaaaatgatgaaacttgttttgttggttagatgttgtcatactctagctaagaaaaatataaaacacatatggtgttcactgttttattggtgtgttaattaaaacatgttaaatagagaaaagaagattgatttgcttgttatttttttatctgtgcctctggtgctccaaataggttgaaagttttacagtagactcttggtgtgatgtttggtgactggtaaaaatttcatgaattgttgtgcatgtatgattaagttagtgatttaacttgtttaatgcaccttaagtagtttttaatgatttaaaaataattatagatgcaaaaatgtaaaatggtgttccactgtccttgcatgatattatagtagcctaataaaacttaatatggtcaggaatccacagaaaataattagttttagatttaacttgctctcacatgctttattgcattaacaatttgttatttttgtattaaataaaatataaaacctgggcatgtgaaatttat

SEQ ID NO: 57882 - DNA, 851 bp, Zea Mays
tacgagtattggaatgtttcgccctcatccatactcatgctaacccggcatgagaggcatgtaatgcataggctgagatgccgacacgttgggctaggaacgagcacaacccgttacaatgctagacacgaccttggcttggtgcccggtccccatataaactgagtgttaggtcaggcgttggtggtcttctctgaaccctaaccattctcatttttaatatgtcagcaccgctctctccctcaaccgtgtatcaaattatatctctacctcgactcctccatctctagcggcaatgcgggtggaaactatcattatcatagtcttgtcacgctgtttggacatctatggatatatgttcactagttcttgcatcttccttctatcctcctgagatctctaactctaaccctaatcccctttactcaatcctaagctagactatctaatgctcctcgctagtgactctagtgatccagttgtgtaggtaagttggtgctctagctcagtcccctttcttctttctccatgtcccctagatatagattgatgtaacattgtattgttctttcgttattggtctattgtaggtcatttggtgatgttggttagttggtgttgcgttagccattgaggagccagagccgttgtgaaagattttgtttgatatgctttctattatatttgatatgttcttcatattttagatttagattttagactatgtagatttaggtatagtgttgtatatctattggttgagttgtttttctccacgggctaccttgcggcccaaccactatgggccaccgtgccatattggcacaatatgattttggactactcttggc

SEQ ID NO: 57883 - DNA, 446 bp, Zea Mays
atttttcaaaatctaaaacttgcttagaaactgataagaatcgtcaggactagaacgctagacctaggacgaaaggccttagggatagtgggagaaataggtggctaagtaagtaggccctgtgggccagtatttagatttttaaaggatgccctaggagcaccctttatttcggagaggagacgttattttttcagcatgcatgcattataaaatttgaaggattaagaattaaagaagtaaaaattcgcgccaaccctcttcttttcaaaccatccaggctctttatttttcttccttccaccataatctttacatctgatacccttccgcagatgaattcacccacccccgccagcggaggagacactcgtttcagctctgacttcctctctcacgatggcttcccttccatcttgtgggaagtgcataactcagccagttac

SEQ ID NO: 57884 - DNA, 413 bp, Zea Mays
atagaagatgcaaatgaattgagaattgccttaaggaagaaaagttgctttggacaggcctccaaaatcaaaagagtatcatctgcatactgaacaatagggaaatcctggtccccaatatcaggtagaggaagcttaagaatattcaaatgtctagccttattaataatgctctaaagaaggtcggccgccaagacaaacaacagtggcgagagagggtctccttgtctaacacctcgcttgcaatgaaaggatttaccagggacgccattgagtaacaccgaagaagtgccagaaagaagaatgctccgaacccagttaatccacttaggaccaaaacctttatggatcataatctgaagaatcagttcatgctctacagtgtcaaaggccttttcgaagtctagtttaag

SEQ ID NO: 57885 - DNA, 485 bp, Zea Mays
atgaaattttgttatccattttttattattttgtgggcataaaaagcaattagattcaagctgtctgatgaactatcgaaagctagcaatgtctttgtctggtacaactaatcattatgacttcctgaggcaacgatggtgcgccgatggaggatgcgacagagcactcaaggctggggagatgccatgttctgtagctccaaggatagcatattgtgctcagggcgtagctaggattttttcttagactatcttcagcggttttccctaaatttcctcccctatatcttactttccctccacatcagcattctctctccccctatttcttcacatactgcagcggttttctctaaatcattcctctacaccccaccacacctatataatatcatttccatttcaacaaacataactacctctattttatttcctcttttttcttgcaaatgtaaaaaccgaaacatgtacttaccacatctgtg

SEQ ID NO: 57886 - DNA, 732 bp, Zea Mays
ggaggaaggaaagcttcgatcggtcagagatcctcatcaagcgggtcaacggagcggctaagcactagcaggcaggccttgacctactgaccggtcccacatggagcccccagcgtgggttcccctcgcctattgttcctcgactgattgttctttgaccctcaagcactccctactccaagcaacctattcctcccttctagatgaagacggacgggagaacagaccggcttggaggccaagcagcacgaagcttctgacgtgggagggttgccgtacgtcgccggcctcgatcgagttccttagctttgcggcttctgttgacgggctccagctaagcttcagcggtagcgcaggtgcaaatacaataatattattcttataaaaataacatgtcatatgattttgccagattgaaaagagttcttcataaaatcggttgatgacaatcatactttgattcgttaataattttcgcagaaaatcagattttggacaaagaccgatcgtgactttgctctggaaaagttccaaagtccagtgggcggtgtgctgtgctagctgtgcagtccccctatgtcctggaccagtagaccttccagcttcggggatcctatttctccatggatcatacatggttctcggacgttgatctgctactgatgagatggggtcttagtgaatttccttttacttgtgttgtgacattttcacattagagacgcctatttc

SEQ ID NO: 57887 - DNA, 765 bp, Zea Mays
ttaaataatcgcctgaaatgtcgagtcttatgctggtttgaaattaatcaatgaagcaagtatgaatttggaaagctcaaatcagccgtgtaatttttgtcccgagcaaattaagtagaactcaacgagatcaagataataagagccgatattgagtattcataattaatttgtttccctgttcagactgcggataaaattttccggtttcgaatcaaatctagcacagtctaaaacatcgaagaaaatgacgtggtctggtgtcagtttaaaattaatcgaataaagcggattggaaacgtcacctaattttttcgctcttgttcgagcgatctctacgaactctgtagcgataatgttaggggaaggctgtttaaataaatcaactctgaactaaccaaaaccaagacaattgtaagccgattcgatgtcctatttcaaagtccaagaaaataatatgtgtagccaaaatgtcgttttaattcggtctgatgcttctcgctcagatttacaacttcagatataaataactgattaaaattcatatgactccagagtattcaccacatcaaatcctgtctaaatattgttgtcgatctcgttttggctgatccttttatacatcttttagacccctcaaatcttaatcctaaaatcaaaatatcatttaatttcatccattttagtcctatttaactcctaaacttggttagtagtatattctctgattaaaagaaaggaaatatcttccacctaatatttttt

SEQ ID NO: 57888 - DNA, 884 bp, Zea Mays
ctgaaaatcagactcactggtaatcctaaaaagcgtcggaaggagttttcatgctttaatatcaccaaggttgtagattctgatgtttgcaatttcaaggaccttgtcgaagaaattgttgataagtacccccatggatacaatgagatagttcatgtttttactatgataacgtcgaaaaaacatttccacaaatcacaacagaccaagaacttcttaaaatgtttagcaaacatgctgacagcaaggtagtgtgtatgaccattacatacactgagcccacagatgatgtccctatcccaaagtgttatgctgatgaggttttagatatcccagacacaccttctatggcatgtccatctctagtggtaggtagccagctcactgaacctacaagccaacccactaaaccttgtactagcaaaccttccatagatcaggatggtgatgatgattatttggcaaatcctgaaccacataatgaacatgtgggtgtggacgacgaaatcctatatttggaaaatcttgaaccatataatgaacatgtgggtgtgtccagagctcatcagaatgttagtgagggcagtgactctgaatctggatctgaatctgatgaagagtatgaagaagaagatggattaattggaaaagatcctccgccacctatgccaattatttgttatgacaaacttgaccctccaatgagtgtaggaagcatatatcccaacatgcaagcatttaagttggcattatctcagcatgctgtaaaccatgaatttgagtttaacactgaaaagagtgacccagggcgattgagggcatattgttcaaggaaaagagaagaagggtgtagatggaggatacatgcttcgacaatgaaggat

SEQ ID NO: 57889 - DNA, 613 bp, Zea Mays
tgagattctagcatttattcatctgataaggtcttattgcttactaataaaatcccaatttgtgatgttttctgtgccaaaaaggctttgatgcattaatattgaatttcttaaggttacttcgggtaaaactttatgcacgaggagagagcagagatttaagttatttgtgtttcattgtatttcaatttaatttcccagatttaatatagttgttatggccacttggcgatatatataaatatatgatgccacacaacacaatcaaacaaaatatagagcgaaaacaaaattgtttacgaaggttgcacataatgtgacttcaggaccttgaacaacccaccacaatccatgtgagtacaagctctactgtatctggcgtcaacgcatgtacggccatcagggctacgacagtatagcaagctttcgtaataagcgtaacaggcataattatggctcggtaattggggtacacgataaatccatgcaacgtgcgcaacaggcgcaattgtggctcgcgacagacagacagacagtgcctacagggcatgcaaaaaatacgcgactcagcgatggcggtctgactcaacgggagcgatccgattaatggaga

SEQ ID NO: 57890 - DNA, 519 bp, Zea Mays
gcgctgatgatttgttgggcaggtttaagcaaaaaagagccttagaacttgattcaagaaggggctaaactcctagtgagagcggctagtatcaagttggacgcacccgcagatgatcaggtggatgaggaagatgatgaagctaagtaggtcaatccgtgctgtgttcgtcatgaatggtcggaggctgaaggaggatatctctacatgatgttttggctgcttagtcgtgtctgcttgtttctagtctttctttgtgctcctattttggctcctgcctagtctttctttgtgctcctattttgcctcctgcgtgggcatgatagtcacaactttggatttacttcctatattggttgggttgcgtcttagtatacgtttggacgtttggttgtgggacaaatgagaacatgataggatggttcttggtttgagggatgaaatgatccttggtcaggcccgggcgggggcatgtgcgaccggtgcacaagaacggccccctccaagggtctctaaaat

SEQ ID NO: 57891 - DNA, 773 bp, Zea Mays
gtaacaccaggggtgttacatagcgcatgtaaagcaggaaagcaagaactagggcgatcatacctccccatgccttctctgtgattattgcggtgacctcgcccgaaacggttgtaacccccgcgacgagcctcaaagttcggtcttctaaagccaatgtggttcatcaaactgccttgcccgttggtgcggccaccacgactgcccgtagacgaaccacgtccagtttcatcctccccactccaccgtcctccaccatccatgttgccgacgagggcttcagcataggattccatctctgaattatgctggagttctgggggcgtcatccgcagacacgcttgcttaggcagtggcacttttgagtcaggcgttgggacattcatcagagaatttggcagtacctggtgcctccatgacagtccctgatgctggaggtaaaactgatgataattcaatcatcaataatggtgaaggcacaagttctgcacatgtgggtgctgggaaacatgtccaaaaagagacctccggtaagcaaccatactgttatcgatgtctgacgaaagggcacacgatgcaaggctgcactgcaaaattattttgtgacatttgccgcactgaagctcataactctggaaggtgtccggtgtttagaggagataaacccggagctttaacctgtgggtatgcgtttgacggtcttggcttttattatattcctcatgctccacggcagaaaaacaaagatgattctcattctgcgcttgttcggg

SEQ ID NO: 57892 - DNA, 532 bp, Zea Mays
ttctgatatgactgaccggtttaaatttgcagctttttccaaaagtgcaaaccaaataatggtgttcagcacagtgtcttcgttttccaatccgcttagctagcctttatcgatcgttggcagataatctcaatgcatgtgtttcatttcctcagtttgatcccaaacttcttcgtttgccggccatcacagtttctcagaatatttctagctaccgagtaccaactgtggctagttgttggagtagagtgacacgtacgtaacgaacactaatctatatagtttcaacatgtcatgctaaaattagctaggcaactgatgaacaattatttgttcaacgtacgctttttcccaccacttctgacactagctaccacattttacaactcctacttttccctctgtgttaccgatatacactagcagaaaagagattaaatcctaggatgggatttcatttttacagacagattcggaaaaacgtcagtgaacaatgtgttcagaaccgtctgtataaagcttctgtgtacta

SEQ ID NO: 57893 - DNA, 272 bp, Zea Mays
tttggggatgataggctgagcttcgtatgacctgggtcccaagtgattcctgcaattgttcccaaaatcgtgccacaaatggtgctcctcggtctgagactatagtccttggtatcccatgcagacgaactatctggtcaatgtagatctctgcatacttctctgtcctgtgggtggtgtgcactagcaagaaatgagcagtcttagttaatctgtccacaataacccaaatagaatcatggtgcctggaggtattgggcaatcccactatg

SEQ ID NO: 57894 - DNA, 644 bp, Zea Mays
ggcggcgtcctcagcatccaggccagcggtcaccattggaggcggcaccgaagccatcaaagccaaagagatggagccgcagcatggctcacttcccaccccaaagagttggggcacgagggatggagccgtagctcagcccgctatccaccttcacgaggctggtgaatatccttccccccgaatgctagaggaagaagcgggaaggagcgtcgcccccacggacaccctgcggaggcaggcgatgatgccgcctgaaggatgaagcagggcgtaaagtgctaagattggaggccgagctcctccagcagcagcacgaagaaagacgaaatcggcagcgccagcccgctggggaggttggagacgaagaacacaaactcttcgacggcgagattgctgtgaggagaggcaccaacacggatctttctggagaacgccgacacaccccatccgagcaggttgcgcaccaagttgagtgccacctcgggctggaggcgctcgggaggatctagcaaggccatggcagatacggcggcattagagtgcagagcactcgagggcgaaagggcgctgcgagtgatgagaatggctaccacgctcgggggagtccctttttaaagaaagattcccccactaacgccctg

SEQ ID NO: 57895 - DNA, 391 bp, Zea Mays
gaccccacgtgcactatcacgaggatgtcagcgggagactagctatagggacccatttgacgagcggacaggatagtacgccatgatgggagtacaactacacacaaccctatggacgacttcagaggaaccacgccacccaagggctgccagccgagcttcctccagcagaatacaagtctccactgtaaagtttggcccttgaactataaaagggaaggaccccctctttctttaccacaggcacaccagttgtaacacgccttctgcaagtctacaatcagtacaacactagactagggcacaagcctgaaccagtataacccatcgtttccatcccatcgctcgagtcccggtgactcaccattcgaagtgagtccgcgctaacttc

SEQ ID NO: 57896 - DNA, 388 bp, Zea Mays
tgtgcaggccgacaacgcctacgtcgttcagcaagtgtgccttcacatgcacaccctgcgggagccccacctcactgctctcaagaggattatctgctacctttgtggctccatcgacttcgacctactttgactctccccaacttctgagcttgtggtctacactgacgtagactgtgttagctgccttgacgcgcatcggttcacatccagctacgccatgtttctaggcaccaacatcgtctcatggttcttgaagtggcagcccgctccagcgctaaggctaagtatcatgcagtgggcaacggtatggctgaggcctcctggtccccctcgagcgctccaccctcgtctaatacgataacgtcagcgtggcctacctgtccag

SEQ ID NO: 57897 - DNA, 509 bp, Zea Mays
ccaaaacgacaaaggtaggtccgactggatcatcattgatcgaaccatatccaataaagtctaattatgtcgttcagacacaccattcctctgaggcgttctaggtggcgtaagatgcggaacaattctttaaatgattgctaaactcatggctcatataatcacctccacaatcagatcgtagtgctttaattttcttgccacactgattttccacttcattctgaaactctttgaacttttctaaagattcagacttttgtttcattaagtggacatatccatatctactaaaatcattagtgaaggttataaagtattggaatcctcctctagttgtcgtactcattagtccgcacacatcagtatgtatgagctccgacaaatctaatgccctcttaggtaaacctgtgaagagtgccttggtcatcttgccaagtaagcatgcttcacatgtctcgtatgattcaaaatcaaatgaagttaaaagcccatcagaatgaagcttc

SEQ ID NO: 57898 - DNA, 439 bp, Zea Mays
ccgggacatcaagaccagcaatgtccttctcgatagcgagatgaatgcgaggctaggtgattttggccttgcaagatcccatgatcatggtgctgatgctcacaccacgcatgtggcaggtacgtacggttacattgctcccgagttggccaggcttggcaaggcaaccaaagcaactgacatctttgccttcggcgtgttgatgatggaggtcacctgtgcaatacggccaatatgggtgaacaccaccgatggggagcctctggccctagcagactgggtgcttgctgcatggcaaggtggttccatcaccgatgccgtcgacccaagactggatagttatgtggatgaggagatagagttagtcctgaaacttggcttgctttgttcacatccctcgccaaacgcgaggccttgcatgcgcctcgtcatgcagtac

SEQ ID NO: 57899 - DNA, 456 bp, Zea Mays
aaaaggtctaggtgaaggggtatggttctttctgagttgttggattagaaaccaagggctaggattagatctcaaataaaacgaatcggtatgcaactatggccattggatctgggatctatggtccatattcagcataactgcactctattcttgttcgcccgatcgcaaatccatgatccagaacccatcatgcgaaagggaatatggtgtcataatctcgtcgctccatcgcctatctgacggcctacctttcttcttccccctgactctaactgggcggcggcggcgtgctcccacagcgacgagcacaccgatgcaacaaccatttccatcccactgccccaatattcgatctggtaacttatacacgctgctaggggcattataaaacaggtagaactctcacctgggcaagcagagtgacagcagcgcccagggcggcagtgccattac

SEQ ID NO: 57900 - DNA, 492 bp, Zea Mays
tttagacataataattcaaaacaactttgggtcaatcttggatatatagatcattgaagattgatagcttgagttaataagaattgaattgactctctcaagcaccccaaagcttcatatcatctccttcttctgcaaagcttgtcaagcatattttggtacccatcgattgatgggttcatcaaggttagtcaacaaagatctaggaacccaaaattcctttgtgttagcacttgataaactcattacctttctagcacaagttgcaattttgggttgcctagttacatgtgaaataattgacaagatagaagtgggatagttaccaatgggacaatgcttgcattgatgtcccttctttcggcatatgtagcaaaggcggtcttcaagtcttgaagatttcttcttttgttccttcctcttggcaatcctcaagtccttgacattttcttcaagggatttagtgcatgccacggttgatcccgtctcaag

SEQ ID NO: 57901 - DNA, 389 bp, Zea Mays
ccataacaaagagcatgcttccataggaataacatcgcaatcagcataatcagaataagaacccattgaatgtgatacggatgtgggtgtgtgcgagtgggcaaggataatttctctaccaacgctgtacttgccaaattgttgcaactgccactatcgatgatgatgcgaatcgaccgttcgtgcacaacgcccttggtatggaatatagtgtgtcgctgatttttttggcctgggcaacctgtgtgctgagaacacgctgcacaacaagactctcatacctatcgacgtcgatgggatcaatgtggacttcctcattttctgcatggttagtggcaatcatagcatgactagtttcctcagaatcactagttgaagagtactcacca

SEQ ID NO: 57902 - DNA, 590 bp, Zea Mays
agcgaagcccatctttcatgaagctcttaaagaccaccacctcgtcagctttgggaaggggaacagtgctttccccccgaccctcactatagaaaaatcatgaaaatatttgcccttcatcgcttcgacttgtccttgcttgacagttgacttcccaaaaactacatggctcggcctccacggctgatcctcgacatcttcattcccactctccacgtcaaaactatcgctggaatccttagacaatccagccagcatctcattggtgatcttttctgtgttggtcttctccatagcttcgtaaaacccagacattgcggggtctgtgatcttctcctcagccattcggatgatggttgtggcaaatgccgaagctcaaaagtcaatcgagctcgcaaaagagaagaaggctagaatgacaaacacagcgcaaacagctagatggcatgaaaaatattcacgacgcaaccttctatatatatactcagagccccacaccttagtgggtcccacgattcagaatgattcgctattatagcaaaggaaagatgttttttggaccttcggctaaaagccttcattcacgttgc

SEQ ID NO: 57903 - DNA, 578 bp, Zea Mays
tcacggccggaagggaggtgagtcaccggagggcaaatgttgtggcgctcggtgaggtaaggcccctagcgataaatgggatgtccacaacaacatattgcgacgtggtaacttctccaagcacgtggcatcctcgcggcgagtggcagacgccgacgaggacattttagacggtcgtgaagcaagtggttatggtggctagctcacaaacttatttgtagtcacgatctttttcacttgtccggtaatatccgcgttgatccgtgcacgaatcttcacggcgggctcaaatcacggcacccgatcaccgacggcgaggtacactgcaccagaatcttcttcagtgtattgtaccatggcaatgttcattcaacgcacctgacagggccatttgagagtcatttctcttcgactttcgttcaacaacctaccaagccgaccatagcaaagttgttgtccatcatgtcagctttaattttgttatagggttcttgttcatacctccactcgatcaagcacaatttagctctcaagttgatttaatgccactgttagtctaaccttgaggccaaaccccg

SEQ ID NO: 57904 - DNA, 533 bp, Zea Mays
ggcgagatcaccagtggctccatagtccatacgcgcgcgactcgtgttttttagcctattctatttggcctgaattttgaaaaagtttgttcgtttaattggttgccttctctgggcttgttttgccccattgatcacgtgacccgtttctgatgtttttgcttactgaaatatacatttgctttagtattaagcgacgcacggacgctgcgtttctttttcacttattcctttttgcgtcattgtctgcttgttctttgttgctcgaaagtttgctggcctgaattctgaacatagagagtaactgccctctgggctctggcctctgcaggagcaggctgcaagccggttgcagaacctgcagcagcgctgcagcctttcaggatgccggcaaagaccagccccgtttctcttgcccgtttgttttcttggcccgcacgaaatggcgccgcgtcgcatgcttttctacgcgagagacgatactgcccttgcactaattatcactcttgttgttttatttttgaacgtgaaat

SEQ ID NO: 57905 - DNA, 554 bp, Zea Mays
cctcagcatcctctcgtgctattgccgcttctcatttgatggatcgtggcagtcgaggaagaggccagggcaggggtcggggatgaggtttgtttatgtgtctggccaagggcatcgccaaggtttttgccatgtgtcgcaatcgtggtgttgatgaggctatgcaccgacgtgagactcgggcccttcatgatgacatgtgaagctttgtagcttccattggacatcccatgccacaacaacctcctcctattccaattcctgtatacccagaaaatctcaatgaatggcaccaacaagaaaaatggcatgtcatttatcactcaggaagatgaggaagagaattatgatgattcatcttacttccagtctactcctgctgccgctctaggacccattccaggtgatcccagaccatctggctctactcatcctcctcctctgtcacctttttagggtcctctctcttctgcctatcctccttctaacgaccctccttgggactcatcgtatgaagaggagatggtccatgccttcttcgcggcttatcctcc

SEQ ID NO: 57906 - DNA, 684 bp, Zea Mays
gtataccgattaccacgtattgtcaaactctgtataaggtgtgatgatattggaacccataccaattgcagatataaattctctcacccatgtccgtgttcatgcgggtagtaagtacccgtgggccgtgggttgtcaagcccgagaaaaaaaactacatcattaccattacaccattaccattattagcgcaggagcaaacatatgctgagttaatccctactactaattaagcacctaacgtgggcgcccgcgcgtccatgcccccaccataccaagaaaattgtgcacatcaacagctcgcctcgcctacaccgcaacagcaacagcaaaatccccaaacccggccatgccccaggttgctagggaagcccatctgcggttgtcgcaccattccccgcctcgaatctggggtctccaaacctagacaccatcagcgcccaccgtcagcgatttggaaaccgcacagatccaggccatcagcgcccggggtggaggggattcttacatgtcgcgcagatctatgcattccccacctaggtatgtgtcgcgcagattcagcaacaccccaccctgccatgtgggctaggcaccgcgccgtctcctccgcatctccagcccgcccgaccaaccatgctagacgcagcgctcgtattctacagcttcccgagctgccatgccaac

SEQ ID NO: 57907 - DNA, 582 bp, Zea Mays
gatagtgtgtggggtgtggccaaggccacttggttgctccctacttgtgttcctagccatgcatgcctattgggaccaccattgtgtgtttatgccatgttataccatcattgccttatcgggcttgtgccctccattctcaccatgcatgcctctgacctccaaagggtataggagagcatagacacacgatggtgggcttggcatgtatgcacggtcttgaacacacacaaatagcagccaaccggccttggctgcaccccacaccctatcccttggcctacaggcctatccttatgtggtgtgtcccacgctactagcccctgcaattgcctttagttgcaatagtttgttgtcatagctcgtttgcccacgcttatgtatattgtgtcactgccattgtgatgtgtgggtcatgttagaatatatgtaactaattatagataaatatgtatacgtttaggagtctatatttatattagattagagtccttgttgtaggagtcctagttgtagaatatctagactcctattgtaagccatcgccaggggatgctcatgggtatatataatgtgtgtgca

SEQ ID NO: 57908 - DNA, 582 bp, Zea Mays
cacttggttcatgttcaagctagtggttgtgtttgttactcttaaactttgatcctagttggctagagcgtcactcaaggagcttgccatctcatgtggcagcactaggaagtttgtaagcaccctctttaattagtaagaactacacatctcttaaacgatcaccgaccatcagatgaggttttcgtactatagcatctgatttcatcatatttatgatgtctaattcttctatggtgtgtttctttctaggaagcatgtggttagcagatgattgagcgccacgaacaagactgcgactagaggagccaaccacttgaccctaaggcgacatgtgcttgtgcaagaggacaagtccatagatggtgagaagagttcatttttcttctaaaattttctccatggtttcgagtctactgattttgtgatgcactcttgtagtaggttgagtatatttgatttagggattgcatctaggtagttgaggcgtcgaggtagggtagggtcatcgtcgtcgcaaatgtcgagtactcgttcttgcacatccatatagttggagattgttaggctgcatgaagtggt

SEQ ID NO: 57909 - DNA, 843 bp, Zea Mays
ccagcaacaaagtatcacaaatagttacacatagttcaagagcaataagtttaatgccaagctaagaggacacgctggaccaactcgacgaagcccgtgatgtggcacttttgcggtcggcgaggtaccagcagacgctacgaaggtgtcacaaccgtcacgtccgaagaagaaccttgcaaatagcagacttgatcttacgacgggtctagatcaacaaagatcgacacaaactgtctgcgtcgtcggagggacctttcatgatcagatacgtacttcggtcggacacctacaagttgacggacgagaaggggagaatgctcgccaacacatggaacatcgagcaactatgatggttctacccatagcaaagctccgaggttccccaaacctacctgcccttgacctcaattgagagctcgggtgccagggggagtaatagacagagcagtgcaaaattaatgatttcctctctcactaaacaaatctttgtccttctagtaaatgtttatgaccgagcaaggcgacactaataccactttcctctttgccgtctgttcgattgatgcagaattccagaaaaatttgtggggagccagaatcaaccaggccacccttcgaataatgcctcagcttaaggaactaggcgaacgacaagggacactttccggtaagagcccgaacccgtcccaaaacggctagggactgctttccgataaggacccaaactcgttcgaaatacctttcgcaggggtcgaagagcgaaaaactcatggcaaaacaattgtgaattctagagttcgaaggtcgatccatgaagggctcgcggccgctctagcgaat

SEQ ID NO: 57910 - DNA, 319 bp, Zea Mays
gttgcttcatcctctccatggtgactccattgcactttacacatcattatcatcttatttcttgtaacacgagtcaatgtatccaaaatcttgatcgggtactccgtgtaagtcaaatcaccctgaacactgagctcttccattggtaactgttcctcggggacacggagacacttccttagctgagacacatagaacacattatgcacatcagatagattatcaggtagctcgagttggtatgccatctctccaactcgcctaaagatcatgaatggtccaataaagcgaggggacaatttgcccttgactttaaatc

SEQ ID NO: 57911 - DNA, 654 bp, Zea Mays
ttggactatacatctctgcatataaaaatctttgcttggcagcattggcctgatgtcgtgcactttactaccaatataaacacacattttcctatgtgcctcaaagcacaatgcaaccagtaaatgtctttgtgagcgttaaaccctgatggtcattttacttgttgatctgaagtcaactaatggctccaaatgacgaatggtattcatgagcccctgaagaagccttatggataaaatagtgttgtgcatgttagtctaaatcttaatgattgactgtgcatttgtaataataacaataagtttgcagaattgtaaccacgaagcaacttgttgttgcgtgtctcgctggatgttgagactaacccttcatgttgaaggaaaaatatgtagtattcatgccactacattaatctaagtccaaagctcgctgcataaaaccccgatctgtaatgtgcgtaagatttcccaaataaatcaccacaatagcatacattggccacaactggatgattgtggttggggattttatctgtatgcttttagaacatctcggcattagggggaggaatgcccatataatataatgcctcaatattctattaaacacacaaaagtcaaactgaacctgtcgttcggtgtgtactcctgtgt

SEQ ID NO: 57912 - DNA, 532 bp, Zea Mays
aagaagaagagacgtcttcgtcgggtgtctagcttggatcagggtgccggtccttctgctcctgttgctgaggaagtgccagtgcctgaattcactgaagctgaccccaatgggtgcgacccgtctgacgctgatcccaatgggtgtgctacccgtgttgttgatgaggatgatgaagaagaggacgaaatccctctgattcggaaaaatagccgttgttacatagttagtggggaaagtagcagtgttccttctcccgccttgtctgcccttattggtctgcaagaattatctctggcgaactttgatcaggctcttgaggacatgattccagaagatctgttattagaaccggcggacggtggcgcgatggatgtatgtgttaatgtgttcgacaccgggttggggtcctcccgggcagcgtcccgcgcctcatcgaccttggagcgcggtcttgagggtcaggaggctggtttggattgccctgctcctatggaagtgactgagggaccttcaaccttagaagtggctg

SEQ ID NO: 57913 - DNA, 793 bp, Zea Mays
cgagatcttggccctgcaaattgggctgtcatgcgcacttaatagggattccattgtacagtgactgaaaaagatcccaaattcatcccccctcgccaccggtgatcttgcgtcgggattctcatcgctgttgcgattcaggctcagcaaagtaccagatgtggctcagggtggtaaagatcattgtgtggataaactccggccactgttctcaccggccgtcgtgtcccgccgtggttagtcgcactggcatcaccagcgttcaccgttatccggccaggctacgtgcctcgacgctttaccacatcgtggtgagtcaccataaaccgctccttagtcctggctcgtcaccggtgggtctgccacgatgaaggccacgaatcaccgtgctagtgactcagttcccctctcgaccaccagcgcatttcttccaaattgaacaccaccgctcaagcacactataaattgacggcacggtctgctgcgttgggtcatcacgaagcctgagcatccgctcctgccgccgattagccaccacaactctccaatttcccatttcccccaattctgtttccgccgccgtggtagagccctcaccgtggtcagcgtattccaggtctgttcatgctccctactcttttgtttcagcatccttaggttctcctgatgctccccgaccccgccaattggactaggaccctttagatcgccgggaacgcgttcgattgcccgtggtgaccactgtcaccgtggacagagcaagttagagctccactagtgaaattagttgagg

SEQ ID NO: 57914 - DNA, 571 bp, Zea Mays
caaacatagcaggtgaggagttagaagaagaaccacctctagagactagggccatggtagttgcactagggttctcaatcttggcccgagtctggtggtcaatctctatggacttgagcttgctggagagctcatccacggtgagagtctcatagttgggcgactcgatgatcgccgagaccttcacctcccaaaccctccgatctagagcatgtagtattttcagcgctctctcatgatcactatagggtagctgtgccttgttggcacgcatcttgttcacaattgactggaacctggagaacatggaatcaacggtctctccagcaaactgtgtgaagttctcgtactctcgcatgtacatctcaaacagtctggtcttcacatgatcgttgccctcatggaatctatcgaggctagaccagatctgatgagccgtagtcagatgtccaactcgctcaaactcaccaagcgagagacacgagaacaaagagtttcgagctttgttgttcgaatcatggaactccatttgaattggagtgatccggtcacttgtagcatcgaaaatcgc

SEQ ID NO: 57915 - DNA, 537 bp, Zea Mays
cttttcttctcgtctgccttaacgtaaaaccgttcactcatccaaccagtgggccacttggtctggtagcctatcaagggggcattcatattctttctgtatgcaaagttatagcatctaaaatttttgtgcagaccgtcagcccttgcctttgtctggtaatgaagctcatgaacccggcagaacccttcggcgttagcactctttccttggcttcgcagagcccagatgtaaacgttgagcctgacaatagtgtttgaggtcaactgatggagatagatctcaaacttctttaaaacttcacctatcatctcgtaaagggggaaccaaagccctgccttgaagaagcttttgaataccacaacttcatcttccttcggctctagaattatttcttctccagcaaagcgaactaatttaccatcattctctccaaaataccctagtttcttcatcacaactagatcctctgcctttactgtggattttccaaattcaacatggctaggcttagttgtgtggtggaaccacctgaat

SEQ ID NO: 57916 - DNA, 570 bp, Zea Mays
tctcacaatatcgttgtaccttcgttattgccactcaaagacaatataagaaacagagaaacttcgagccaaattggtaaatgggtagcagaactcgatgagttcatcatcgattttgtgcacatgtcctccatacaatctcaagcattggtagattttattgttgattggaccccatgctcacaagatgaagcagcccagtcagatgaagctgtttggacagttttttgtgacaactcatagggatccttcggagccggagctgcagctgttattatgtcaccatctaaggtgaagacatcatatgatgtctggctacaattctagaatacaaacaatatagtataatatgaagctttgttgttgggactaaggaagctaaaagcaatcgatgtacgaagagcagtattgaaatcagattcccaggttatcacaggccaggtggataaatcaagcaaggtgaaaatcataatatagagaaatacctcgatatggttcgaaggatggagtcttcttttgaaggttttttagtaaaaaacatctcaagtctcagcaacaagcatgcaaaca

SEQ ID NO: 57917 - DNA, 576 bp, Zea Mays
agagaattcgatcctttgggtttccacccaagggaccaagcttcaacaagccagctggacccactccgtcacgtttcagtcaacaaggtcaaatctcctttcagaccccctcagttggaagcaaccaacctcttgctaatgcctgttggcactacggagaccccagtcactacaagaataattgcccccagttgaaggcatccatgcctacttactccaacttggtgaatggccccaagaatgcccagcaactgcctccaaggcaccctcctccaacagccagcaaaacaagagccagtatcatggcagggcacgagtaaaccgcgtcgacgctcaagaggcccagcaagccccgggagtagttgaaagtgcattcatcccttttgtgagttttggtgatttggataataacacatttaaaagactaatgagtttgctaagtgttgaataggaaattcagtatgatgaacatacttgaatagtgtataatgatcagtgaacaaaggttcatcacgaggttaaataaccaatgagacaatgtaaatggatataatatgatctctatattggtttgaa

SEQ ID NO: 57918 - DNA, 367 bp, Zea Mays
ggaatatcttgataagttcgttgtggtatttatcgatgatattctggtctattccaaggatgatggagaacatgagggacatctgcggatggtattgcaaaagttgagggataaccggctctatgctaaatacagtaaatgcgagttctggttggatgagataccttttcttggtcatataatatccaagggaggaatagcagtagatccggccaaagtaagagagatagtgggatggaagatacacgtgtcggttactgagatccgaagttttctaggactcgcgggctattaccgacgtttcatcgagggattctctaagatagcaaagccaatgacctcattgttagagaaggggaaagaattc

SEQ ID NO: 57919 - DNA, 284 bp, Zea Mays
gtgattgggccttttcctgagttgggtgtgcttaatgaactgttgggcttcggtcaaccctaatttgttgggcctcgaccaaccccacctgggctaggtgtatcatctggtatcggagctaggcccattttaagaaggtgggaatgatgaggacatcctccactattacccattggcaaagacgcaattggcccagttgtctcaattgtagttggacggtgaccgtgtgagcctcagaattatcccacctcgcttaacttgggaggaggaagccactttaaaag

SEQ ID NO: 57920 - DNA, 545 bp, Zea Mays
gttgattacaactagaggtatcctctaattgcaaacttgagtctctgtttttactccttgattaccattgcatggtgtgttgttactccagttgcaacgtttgttgcttgttgattgcaactaggggtatccgctaattgtaaacttgagtctctgttgttgttctagttgcaacgtttgttgcatgttgattgcaactaggggtatcctctaattgcaaacttgagtctctgtttttactccttgattaccattgcatggtgtgttgttactccagttgcaacgtttgttgcttgttgattgcaactagggatatccgctaattgcaaacttgagtctctgttgttgctctagttgcaacatttgttgtttgttgattgcaactaggggtatcctctaattgcaaacttgagtctctgtttttactccttgattaccattgcatggtgtgttgttactccagttgcaacgtttgttgcttgttgattgcaactaggggtatcctctaattgcaaacttgagtctctgttgttactccttgatta

SEQ ID NO: 57921 - DNA, 651 bp, Zea Mays
gcgaggaacagtgtctcacgccatgtcatgttcacaggcacagctactcagcagatcatgccgggccgcgctcgtctcttctgaatcctcctatgccgtttcccctctcactctcttctccattgcaatccctaagcttctcttgccgtactaccattgctggcgtcgttccatgcccgctcgacaggcgtacgtgatcgatgcgcaacgacatagtactcctgcagcgaaaaaagcgtggagatcgacaatctgcttgtcctgaaagcgcacgcaagctcagctcctgcgctgatcagacatcattttgcaacatgcgtggcgtcgtggtcgctggctggctggctgaccagatcgacttccagagattctctgaagccaaagcaagggactgctggtaaaaaaaaaaagtgggggcataattcgcaccacagcgacgaatgatgtgcgttagcggtcacaggcacccatcggttggcaggcagaaactgcaaggtcttcattagaaccgagtcaattctattcttgtcgactgaatagaagaaagtctttaccggcctctcgagaaaaaaatgaggacagaaacggtgcagtgtttcaataataaatgaggacacggcgctacatggttcgtagagaacagaaaacaaa

SEQ ID NO: 57922 - DNA, 484 bp, Zea Mays
gctgattagagaaatgtataatcggatacaaatcacacacaactaaaaactaagggaaacaatcaaactgacttcaaatcgacaaaaaatgcttcaaaaatcgacggaaacctcgatgtattttaagttggatggattacctggaacttctcgggaaagcaatagctcttcaatcgggctccaatgttcggagattgaaggagcgcagctggattggagcggtggaaatcgcctggaaagtcgtctcggccgcagggaaagtcgcctcgggcgaaggggttacggggtttccttcctattcggcggatgcagaagctgtaatcccggactcgcgtgggtttctctctgttgattgcgcgaagacggttttggaaaccgggaaacgggggagacgtgggctgggctgacggagaaataggggataacgacgtcgtgactgtgtaaatacccaccaggtatgatttaaccaaatgtgcatattgac

SEQ ID NO: 57923 - DNA, 468 bp, Zea Mays
acccgagtcccattttcttaatagacacatgtctcccatccgacgctttatgtcgtcttatattttcaattgatagtgccaaaacctattattttagatgaggctgataactaataattatagtagtagatatttgtgtggtgttcacatgtatcttgtccatgtttaagttttgtgcagagccgaggactccaacccatcccaatgcactctcctccgattcgccgattcgccgtcgttctattcaactcataaggtgtgtcctacaactcataaggttgttggttgttgatctactatattacttggctgctaatacaactgatagatgtactaattttttgtttttgttctactctccacaggttttatccctgaaaagggactgttaacactttccataagactccttttcatttactaggtaaacctataatgcactgttatgtttatgattttgtcggagac

SEQ ID NO: 57924 - DNA, 336 bp, Zea Mays
ccaggacttggaggtgctactcggaagtccttaaccgctaggctgaccatcattgtaagtgacacatccacatacttccaatcttaattattatgtttggctgtacttcagatattcttttggtgtctgaaatatcagttctatgactataatgtggatacaactgtgaaatgggaatatcttgaacatgggtaggtaggtagagttttcttctattaagaaacaaatattggtataccgtatagggctgcagtgcattccacgcttgttatcgtgtgtttcttgtgttccctccaatctagacatgcaatacgaagttgtcacatgcttgtggcc

SEQ ID NO: 57925 - DNA, 404 bp, Zea Mays
atttgatagtccctaagtaagtcaattcacatgttgagaacatgtgacaatctcaggtctaaggatatagtatacatcttgcatcagagcatgtggtgagccagttaggaggtgcatgtggcgcaggatgccacacggcaccacagtgtgcaggcatcagagcaaatcctcacacgctcgctagggagcgtcgtgctgtcggtgacaatcacgagcacgaggtgcgccatgaggagtggcctaaaaccctagccatgtttctgagcatttccaatgggtgagggtatgaaatgatggtatatcaaattttaatgggtgagaaatggactgaaattgttaattgaattataggggaagccaaatgggtcgtctcatggaaaataattcaatcgtggtcaattcca

SEQ ID NO: 57926 - DNA, 572 bp, Zea Mays
cttgaggatatttctttttggagggtcccagaacttcactgatgaaatagacgggatgttgtactggatatgcgtgtccttcctctgcccgttcgactactaacgcggtgctcaccacgtgagtcgtgcaggagatgtacaacagcagatcttccaccggcagatctggcatggctcggcgtggcggctttagcactggtagtgtggtcaaaaacttcttcagtgcatcaagagcttcctgagcttctaaggtccactggaacttgtccaccttcttgagcaatttgtagaatggtaggcctttttctcctaaccttaatatgaacctgcttaaagctatcatgcatccagtaagcctttgcactttcttttgtgatcgtggtgcttccatcctcatgatagccttgattttctccgggttagcttcaattcctcggtggctgacaatcaatccgagcaacttccctgttggcactccaaagacacatttttctagattgagcttccaccggtaccgcctcaggctgttgaagaccagatgcagatcctcaatgaagttttctgagtttttt

SEQ ID NO: 57927 - DNA, 783 bp, Zea Mays
taagaacgtttcgagcaaccaaacacggtagcgttcaaattgaagctagggcgagtatcactgactcactagaggtatggtacacgcgcgaatttgaactaagggagcacgagaggtctggtcgacgtgagggtgctctcgggagtgctctatggtggcgacacgatgttctcgatgtccagctacagtgcgttcaatcggtcgagtcggtgagcttcactattactagaggacgctaaaacatggctcaaaggggcatgatataacctgagaagggctagccacgacgaggtgtctcacaacggcgttctggctggtttgggggaatccggaattcatgagctatggttgatgatcgggtgtgaggggtggtgcgcttggtgcgtaacgagaggacatagcaaggagaggcatcaatttataggtatccatcactggtgccatgaatttgagatgagattgaactattcggcggcgagattctttactagcctaggcttcgtggcgcgtagcagtgcagccgctcatggagggtaacttgccatctccacggttacgatgacatggtgaatcgacccctggcatggtacgaccgaggaagctggcagccaccaaaacgaccgtcgctcagccacgtcgccgacaagtgggtatggcaaggcagagccccgattcaacccccctgatcttttcactctctcactgatccatttgctcaccacgcagacgtcgtccctagccttacgcgaatcacagcgctaagtgcggatcacggtgcatgac

SEQ ID NO: 57928 - DNA, 1416 bp, Zea Mays
tcgatacccaatttcagaatggtatgagtaattgggtaacccatgggcaatgataaaaacgagctggactatacatctctgcatataaaaatctctgcttggcagcattggcctgatgccgtgcactttaccaccattttatatgcgcaaattctcctatgtgcttgaaagcacaatgcaaccaatgaatgttcttgtgagtgctagacctgatggtcattgtccttgttgatctgaagtcaactacttgctccaaatgacaaatggtgtgcatgagccctaaagtattttgtttttatggctaacatattgttgcgcgtatcagtctaaatcctgatgattgactgtatatttggtgataataacagcaagtttgcagaattgtaaccacaaagcgacttgttgttgcgtgtcttgctggaagttgagactaatccttcacgttgaaggacaaatatgtagtattcatgccactacattaatctaagtcaaaagctcactgcataaaacccctatctgtaatgtgcgtaagatttcccaaataaatcaccacaatagaatacattgcccacaactggatgattgtggttggggattttatctgtatgcttttagaacatctcggcattagggggaggaatgcccatataatgtaatgcctcaatattctattaaacgcacaaaagttaaactgcacctgtcgtttggtgtgtactcctgtgtatatggagtttgccagaaatcgttgaggagtaaccatattggtctgaatgcttctacctgatgtagatgtggatatacccgggattaatatcatatccacatttgacttattggtatttgatctattctcggggacgcctacgaatatgatccatcggccttagtcaaagcatatgttctgattgcagattcacgtggtctgtgataactctcctccgattaattcaccctgatggtgatttgcctcatgaagaggttcatcttgatgatgaaattcctagcaatgcgcgcaatatcattgtgctgggaatacggaacaatgaatctctcgttttgggaaatgacgaagatcattattaaatgtgggagacaaatgtgtcgacatctatcttgcatctatagattgcaaagggatccaaaacaaagtcctaggcatgagtgcttgaagctctcttatcgggtcattgatgaatgcaatcgaggctgaaccaagaatcgcaaaatgaaagtcgcgagcttgaagttcggacatttatgggcactattgaaataatgtgtggtgaatgcgttggttcaagtggtcttgtgagagacccatcccacgtatgtgttgaataaacacaattccgctatgtaatatatctggcaaatggcatgaattataatatgcagttaataggattctgaagatcc

SEQ ID NO: 57929 - DNA, 329 bp, Zea Mays
ggtaagtcaggtcaaaatacagggaattgggccccaataggtgaaaacaaccccacagatgaaacttgaagcgactgttgaaaaaggcgaaccaaaagatgggctacaaatcctaagtgtcgaaggagttgtgggacacttggtatagagttaggtcttttatttttattttggtcgtactataaagaggggttgtggatgagtagcttcaccaatgatgtctagtgtagtgttggtgcatgaacatacttaagtctagtcctaagagtcactctctagcacacacaggaatcggagacgaaaccgttttataaaaacacattttagaa

SEQ ID NO: 57930 - DNA, 398 bp, Zea Mays
ctcaccattttctcttataattagcacacgtttgcttgggcagtcccttcggatgtgcccaaatcctttgcattggaggcattgtatgtcctttgttcttcccatggaagcaatagaagaagatttggctatagcttgggaggatcctttccctatctcaatagcacgagaaggtgttgatttcgatggtgttgtggatgatcgattggaagcatctgcctaaaacacatggttagagctagcaagatgtattgtgacctgcatcaatgttagttctcaagcgtcgtccctggacttctctttcagccttacaagcaagatgaaataagcgagtaacattagtgtgttccttgtaagctaatatatcctgaatttctcttgtcaaaccacccatgaac

SEQ ID NO: 57931 - DNA, 946 bp, Zea Mays
gtgaagtgttcgtgtaccaagtgtcggaattttaagtatgttagaaagatcgaagaactggagcatcacctttgcaagaatgggtttatgcctaactatcttgtgtggcgctcacatgcagaagtagagcagaatatcacagagtcagaaataattgatgatgacgaggaggatcggatggatgacttggtggctaatattagtagagagtatccaacattggcctcagaacaggctacaccagatgaagtgtaggagttttataagcttcttcacgcgtcagaggaaaaagtgcatgaggacaccactgtgaccgtgttgcaggtggttacacatcttatggcaatgaaggcaaagtataacttctcgaataattgctataacgatataatcaatctgattattgatctcatcccatcgtaccataagatgccaaaagacttataccaatctaaaaagattgtgtccggtctttggatgaagtataagaagattgatgtgtgcgaagataattgcatgttattctggaaggaatatgaagcggccacccattgtcagaaatgcggtaaatcaagatatgcggatgtacgaaaagaggatggagctacttttgctacaaaagtggtagttaaacaacttcgatatatgcccatcactccaaggcttaaatgtctgtttttaaccccagaaactacgaagctaatgttgtggcataaggaaggagaacgtgagatccaagacccagacattatgatgcatccatcagatggtgatgcttggaaggctctggatcattttgacccagaatttgcaagagacgctaggagtgttcgtctaggcttgtccactgatggtttcactccttacgacaacagttcaacttcatactcttgttggccggttttcatcatgccctacaacccccctcccaacaaatgcatgaaag

SEQ ID NO: 57932 - DNA, 298 bp, Zea Mays
cagcctgagtaatcgcgactaatcatgattagttggacgacttgaaatcattgcttaccgtttccaacaatacagtaggtaatgtcacgatacaaatcaatggtagagtgaaaatttactccaaggtaggaagagcgagaggggacaagaactaggtcaagggcctgatggctggtgcaccacgaaatccaggggactgggaactgattgagaatcttgtcagtgaatttcattagaaggcatttgttttggatatctaagcgacacagccccagcctgccaagatttttagggagac

SEQ ID NO: 57933 - DNA, 1062 bp, Zea Mays
attctttcaaagttgggaatactctaaaagctaagaattcttgcaccagatccctagtaccaatgtgctccgcaataactcgaaattcgcccagtgcaacttgacatggactcttcggtttcatgtcgcaccagggcctagtctctccgaagatcaattctaatgggctttggaccaacttctcctttttctcatcaactttgacataaaaccattcagtcttccagccatctggccatttggtacgatagctgataaccggagacttcgcatctttgcgatagtcaaaattgtagcagccgacgttctcatgcatcccatcttctctagcttttgtctgataatgaagctcatgtgcccgttagaagcctttggcaagcggttctgcccctggcttcggagagcctagatgtagacgctaagcctaacgatggcgttagaagttagctgatgaagataaatcccaaacttctccaaaacatccgcaatcatctcattcaaaggaaatcttaatcctgctttaaagaagcttttaaagactaccacctcatccttttctggcttcggagtaatttcctctccgccaaagcgaatcatcttctttttggcttcactgaaatagcctaacttcatcaacttaggcatatcatcttcggtaacagtggacctcccaaactctaggtggctgggtttagatggcagggcactataatcatcttcagattcaccttcctcagcaccaacctgctcagcttcagtggcaggtgcaccttcgtcagaaacatcctccggcactaccagccccgaccgtttcatcactttgaaaatcgaagcagtttcagcagcttcggcttcttctccgtcacgtgtaaccctggcagtggaacgtacccttgccaattgatgatgaattactcacaatttttgatgaagttgttgacttttttattttcctgaagctcttcctcttgtgacgaagcaaaaccaacagcggtacttcggttgagtgcgatgaacaagcttcggctatggtcaaatttttggcagcaaaatagtgcaata

SEQ ID NO: 57934 - DNA, 832 bp, Zea Mays
cccatgaacggtggaatagagaacttaattttagcaaatggatcatggtctggttgaggattatgatgacgacgtctaccattacctcccatatcttgtctattacgtgcgaggcgttgtggcagcggtgcataaacatcgtcgtcatcatcgtcgtcgtccacaagagagtgagatggggctggagttgttggtgggggatgagcctctagtatgtccatgcgtgtaacaatttcatcaactcgttgatcaaggtgctcataggatgtcgtcgcagagtcctggtattttttaaaatcttcagtcatcgcgagcatcatctccttcaattccatctgagagacacactcatcgtcgttaagcttaggccccttgtccttgtccatttgattctttggtcctgtcattgttagcacaaaatagagacaaaaaggcaacaaacaatgtgaaccctacaactatctctcagggtggtggtggaggtggtggaatacaaattatgaagcgtcttaccccgctcttacaacgttcttacgagcactgcaggtggcaaacggtgaccagtgtgactatctaacgagcgtgggtgtgattgcaaaggagtatctgttctgctcgagagaaaattggagctatgggaccgctgactaaatatatatatatatgtggcacacaagtcagtaacagataccaatgctgaataagtgttccaagtactcgtcctagttgctggcctagaaaatgtaatagaacagttggaccaaagcacaagaaaggaggtacaagtatctagtgggaatggcagttctgtaaatagggcagatttttcagc

SEQ ID NO: 57935 - DNA, 330 bp, Zea Mays
cctcatagttgctattgtgcattgtaatgtcaaactgcaaggattggaaggcagaactgtactccttcactgtgtcagtttgtttgagggctaacagttcagttatagcagttctaaagtctcgtatgagccaaaacttaaactggatgacctaacagaactcctttccactgttgattgcttgtgtgtctgccaccatttagctacattaccttccaagtgcataacagcagctgtaacctagaggtgatcttcaatgttgttgatggtgatggtgaatcaagaaaaatccgcggagaaaagtgagaactagtgaagcaacatgctcag

SEQ ID NO: 57936 - DNA, 577 bp, Zea Mays
ataacgctactactccccgctcaagcggagacccgatgctaccacatggcctaccatgcgtgacgtaagcccacgggcggagcctgacgtaagacctctgggctgcgctgtctctgcatttattgcgaagaagacgcgccgcctgactaccccactgacaaacgatgtgccccttcagcatttaatgtgtcctgtccactcagctggcaggcggcgcccgggccatcctgcaggcggcgtgcctatccatctgtcggtaccctgcatcaggggtaccccttactacggtatgaagacacgatgcctgtgcagctatccctaaccgcgtggagaacagccccaaggatatctcgtgagcagttgaggtggtgttctcggagacaacgtcatcaggcccagacctcctcaagaaggcgtaggacccctgtgcgcacaacccggacccccgaagtaaagcagcccggagccattggatggagttcggaccccaccaagtaagctccagaccacccataacaaggtcccgggggaggaagtgtcgtggcctaggcatgggtccggtgttgacgcgtgtccg

SEQ ID NO: 57937 - DNA, 623 bp, Zea Mays
gggacagtgacatacatacgagcaggggcgccagccaggcacgtacacgttacaagtgtacgttttggttagctagccttttttccggtgggtgatcgtgttctatttgatttgagtttgatacagcagtggacgcgcgcgcacaccacctgtaattatcgtgcttgatctagactcccccatacatacgtgacaactaaccgacacgtacaatatagctagcgtcggcggtgttagggagtaagctaagcaactttagttgctgaagcaaccccgctgtacgtacgtgcgcgaattggtgtactcgtgaatacataagcatgccgtcacggatagctagcgtagcatgcaaaacagtgatccaccagatgatgcgttcattgacgaagcctctcaactcatcatcagtctcagctactcgatcggtctactcgtactatattacgtaccacttctaacaaaaaattgactcgacacacacaaaacgcgcgctaccgcgcagcgcgcgtcaactgcctgccgatcgagggccgatcaagtcagagtcactagcgacatagggatactagctagctagctgaagcacgaacacggacgcaccgaccatctgtcacgcgtgataa

SEQ ID NO: 57938 - DNA, 401 bp, Zea Mays
gcttcgtgtggttgcggtagaactcccgtggccggattgggagagaatcgtgcggtcccgagcaaaggaaattgggaggagagagaaaacaaaatggacgccgccgcagaacctcgcctgggatgccgttcgggcctcgagtctgggccagggagcttcaccattctgcgcgtgattcgaccgtggacttgcttgggcgaagccacgctccggactgccggaattgctcaccggagccgctcctccgccacggatccgctacatcgcgtgagcagggcgactctcgccccaatccaaagtatgacgcatgtcgtaagcttcgctatatctttctatatgtgtattacttgttagatttaaccttgggagcctttggcggggatggcactgctcgccggagc

SEQ ID NO: 57939 - DNA, 832 bp, Zea Mays
ctcagttatattacctcagatcgctcagatttgtgcatgtcacaacaggcgtcatgaactctatatgaccatcgttaaaacggggcaatcggcttgggtctcggtgcgcgacccaggttcggtgctacatgctcacgctaaaccagaaaagggtacctcaaaacccttcctacggagcaatcggcttgggtctcggtgcccgacccaggttcggtgttacatgctcatgctaaatcagaaaagggtacctcaaaacccttcctatggagcaatcggcttgggtctcggtgcccgacccaggtttggtgctacatgctcacgctaaatcagaaaagggtacctcaaaacccttcctacggagcaatcggcttgggtcttggtgcccgacccaggttcggtgtcacatgctcacgctaaattagaaaagggtacctcaaaacccttcctatagagcaatcggcctggcaaaccgacactctacgtctttgctatactcggaattcaaacatggagctcactttacgccgcaccattgactcgggggctgggttgtcacccgcctcgccgactcgctactttgacagctcgggggctgggtcgttgtccgcctcgccgacttgctacttcgatagcttgggggctaggctgttgtccacctcgccgactcgctacttcgacagctcaggggctgggtcgttgtccgcctcgccgacttgctactttgatagcttgggggctaggctgttgtccgcctcgccgactcgctactttgacagctcgggggctgggttgtcacccgcctcgccgactcgctacttcgacagctcggggg

SEQ ID NO: 57940 - DNA, 442 bp, Zea Mays
ggttgagcaaagacaaattatagagaggagagaaaacccatctatctaaggttttacctagctaactgatgccattgtggacaaaagtcacacaatacaccaacaatcatttcaaagaagcaaatcaaacatagtcacaaagataactaacatgaactcaaacatatcagcacaacataacgcgatgttattcattcattcaaaaggcaatcttgcctagggaaaacaatttcttatagtttttttgaaaggcgagacaaggttaggaataaggaagagattataggaatcatatcagaaataacaaggagatagacaagatcaaaacattcttgttaatgaccaagggtgaaataagataacactaatcaatgaagtgaggataaattatacaaccaaggatatgagaaagtttttttaggatacaaaatataaaggcatt

SEQ ID NO: 57941 - DNA, 793 bp, Zea Mays
ggcggccgagcgggcgcacgcgcaggcagcggcggaggaagcgcagcgggcgcgaggacaggcggtgcgcggcgaggtgcgggcagggcggtggtatggacggggtggaagcgagcggaagtggaagcgcgtcccgcagcttctccgtgctagctgtaacggacgcgcgctgttgtctgtgcatgggcgccgccctccccgctggatctgcagccaccccactccccgtcgcgccgattccatgagaggtctctcgctcgatctctttctcactgctttgagttgcccggatttatctcgtgttttctaggtttttttttgtgtgtgtcggtggaggggtttgggtcgcgcgtagcgacgtggcggcagtagtgactccgtcaccgcagcgcagtgcggctggtttgggtgctggattcggtgggtagacgggaatgagtgggtggtagcgccgccggctcgtgatctggcttgccgggtacgcaggtagctgggtaatcgctgcttagtgcagctattcgtggaaactggtttgatggttttgcaattcggtagtggccgattcacttgatcgtagcggtagcggtagctgtagcatatgtgtttgtctagatctgggttaattgctgatgcctgaaacgaatttgtgcttgttcgatgcattgctgttgattgaatcgtgtgtcgtcgtggatctgacgcacgttgtttgctctcgagtgggtttcaggttgagaagcgaggtgggtgacgagatgccgaacggcgttgctctgcgcgaacaggtcctggc

SEQ ID NO: 57942 - DNA, 394 bp, Zea Mays
gggaaacaaatccaatagcatcaaagtccctgttcaatcttcgtttccctcgagcaccaaaggcagtatacatagctttgtcctcagccttcgtatagctccatacaaattcatcacttgttgcttcaatggtatagccaatcattgtctcgctcaccaaattgattcctgaaacgataagtataatttaggtgcaccagactgctttttcccatattaatatcaacatcaacattcttcggcatttcccactcatcagtcaagggccacaccttgaaagctatatgctcctgtactaagtccctggtactgatgtagttgcacacagcagtaaataccgccagacagccttgcgatttttctgtattgcctcctccatccaaagcagaatccg

SEQ ID NO: 57943 - DNA, 561 bp, Zea Mays
tgtagagagctgggaaatgccaaaggagaccatcaccaagtctagcgaaggtgaactagtccggctgaagtatacattcaggtatggggataagttcgatgagccaaacgatgactggttaaaatgcatcgaggctacaagtgatgaactgcttggatcatattccaaggcagaagataatgcattatccacagccttcggaagtcggggaaaaaagagattgaatagagtttttgatgccattggcttcgtttaccccgactaccgctacccgctgcggggtcaagggaaaaagaggaaaactgctacttcggccaccccagacgaacctgtgtcgaaggggaaaaagttgaagatcctaactcaccggccgcgatacatcgaaccggccgcgatacctgaattcggcgaagggacctcctcggctgccaaaacaaaagaaactattcctcccgtgcagaggactgaagggccggttataatgccgaaggtgcctacagtcaaggtagctgaaacgaaggttgataaggctgaaaagccagaaactgaagaaataacgaa

SEQ ID NO: 57944 - DNA, 700 bp, Zea Mays
ctactgaggatgaccccaccatcgtctacatggccggatatctccacactctcgataaccactatgatgacctttcctcccactgcacccacctaaactcccaggtggaaagcttagagcaacatgtcaaggaacttaaaaaggagaaggcgtccctccaagagagcctcgaaatagcagaaggtgaataggccaacactcgtgaagcctactgaaccctgaagatggattacgataagaagctgaagaagctttcccccacgaagaaaatccgaaagaagaccaagagccaaggatgccagactgagcggaagaaggaatcccctccagtgctacctccctccatgatagagaatttgtccgacgtcgaggatatgtccctagctagccttgacgaccttctcaaggaatttggggacactttagaaagggggttcggaagtaccttagaaagcgctcgcgtgtagtgcgacctgtggtaactgtatgcttgtaatgaacttgtgtgatgaataaaataacttggttgaaaaaaaattggcatatgcatagtagtaattctctccccctggcagatggcttcggataaaaccacgtctgtcggcgtttcggacccgcgaggaccctcaaccgaccagtgaatttgtcgttgcgtgtccctgtccagatgggttgatgcaagatggaacacaagagggag

SEQ ID NO: 57945 - DNA, 322 bp, Zea Mays
aaggcctgccttcaaaaagctttggtaaacaacaacttcattttcctcaggagcaggggcagtgttgtctcctccaatcctcacaatagacatgtcgcgaaagtatcttcctctcatggtgtcaatatgactttgtttaatggtcgatttttcgaagatggtatggcttggccgccagggccggtcctcagaatctccatctccactttccacatcataatcatcactgtcatcagaatcttcagacaaatcctccattatctccttggtaattttctctgtattagtttttgccatagattcataaaatccagcaataaaa

SEQ ID NO: 57946 - DNA, 615 bp, Zea Mays
aacggagctcacagaggcatcaatttatagaggtcgaccgtgagcacgatgaatttgagcggcggatggctatcactaagaaacaagatgagtcacccgcatggtgatttgtgcccttcaccgtggcggcctccccggcgatcatcggacgtgtataacactggtgattgcgacgtggtaattgctgaggcacgtggcattcggtcgacgggcagccaactccggtgacttatccggaccgggccgcaaagcagaaaggagcacgacggctagccggattagtgcccatatcccaacagcggtgacgatctttttaacccgcggcgttatcggtgcttaagtgggcacaaatcacctcaacggcgcgaatctacgcgcgaggtcgccggcggcgagggggatctgcttctgttgatattttggtattgtaccattggaagctttttcagttagcctgacagccgaggtttagggcaggttttctccaaattttccatggcaccatcattatccttctgcaccaaagatgtagacctatagatcatcttcatatttgttatagcagtccgagtcgaattcccactggatttagctcaaatccgatctcaagttcat

SEQ ID NO: 57947 - DNA, 370 bp, Zea Mays
gaacctgagagcttccttgcaaactaggcatgggaacttaccgtgaacacaccaggcgcagaatagcccatacgccggtaagtcatgcatggagtactggtaccaaacatgcattctgaactttgtcttcgtagctcgatcatacgtccataccccttcctcccaggcacgtaccaattcatcgatcaaaggctccatgtacatgcccattttattccctgggtgttcgggaattatcaacgacacgaatatattctgcctttgaaagcacacaccagggggagattgattgggataacaaacacggaccaacatgtgtacggggcaacgctcattccatagggattggacccatctgtggccaacgcaa

SEQ ID NO: 57948 - DNA, 684 bp, Zea Mays
cagggcttcgattcccattaagcaaattcctggttgaagtgctgaagaccttcaaaattttccttcatcaaattacccctgaagccattattaggatgggggtttttatttgggccgtgagaagccaggggctagagccaagcgcaaaatgcttctgcaacatgcatgagctgctgtacgagacgaaggctactggcaaggagcagtatcacaacaactttggttgttatggctttgtgccccgccccaatgtaagttacccggttccaacattccgaaaaaggtggcccgggcctgtatgaaggaatggttctatgttaagaataatttagttgagagggaagatataaaagaaattattcaacgccccatttggtctcgcttcgacatgaggaggccagccatcgcttttgggaacgatatagaggcatgccagagaagcttcaacactgtgtgtacttttattggcacaagagacctggttcaagaacacatcgcctatagagtatggccgcttgtgaatgaatgggagatgccgaaggaggctgctgtcgggtctagtcaaggcggcctggtctatttaaaatatactttcagatatagaggcgagtttgatgagccaaacgatgaatggttgagcagtattgaggcaaccagtgacgaattgcttggggcctacacaag

SEQ ID NO: 57949 - DNA, 930 bp, Zea Mays
ttgacactatagcgggttttctcgaactagtagaaatttttaacgacctcgcaatggatccctagacattcactgtaatacccaactttgaaaaataaagagatgaataaaacttgatgtgtaatgccttctcattcataagaactattaaaaacatatttaaagtgaataacccctcaataaaatatgcatcatattggattttgatttgtttgtgcatttaatgaaaataataataacatgaatcaaaatataataatgggtggagaatttggatttaacccagtacagcttaggaaattgggattaaacctaaactagaatttggaattgaaaatggaaaagaaggaagaaatactataaaatacaaaataaatttataagtaaataaacttgtcccataagggcatgttcaaatcataccttcaaatctgaatacaaattcccaacatgaattgaattaaaaaatttggaactcaaaaataaaaggtaaaaatagaataaagaaaaaggggaaagaaaactcgtgtgggcccaaagtcattcgcgcggcccatctaacttcgccccttctaccgcgcggcacaagttctcttaccgcgcgcgcgcaccgctgacgactggggtccaccgattagcctcatactctccttgcgcgcctcacgctcactgctggtgggaccgcgtagtcaggctgttcctcttccttcaccggccatctagggcggatctgacttccacagcgcttctcgagcttggtggttgccacctccggtccgacctcaggcgtccataaaagggcgagactggattccttcttcccctttggaaccccaccgccaacaccatagaaccgaagttggagtattggacgcgacaacctcgtcgccgccttagttgacccgtggattccacactaccgtggccccg

SEQ ID NO: 57950 - DNA, 429 bp, Zea Mays
gttgtatggaacagcttagacgagccagcatgagtaggacgatgtagtcaaattgaaaggagagaaaccatctgttgtcaaaccaaaacagacattctgcacttcgttaggaaagcaagaatcaaaggcatctagtgccttccatgcatctatattagctcagtgcgccatgacatcgagattctcacatacgccttctttgtgccacctcatgtgtctggctatattcttggagataaacaaacatttcaaaccgaggtataagaggcatgtaacgaagctgcttacatgctacctcgatcgtcatggtcaaacaatcgtcgttttcaacctctacgaatctacgctcaccacatactatacacttcttctcactcgcggtctccttccagaaaagcatagtgttattatcacagacatcgatttttt

SEQ ID NO: 57951 - DNA, 618 bp, Zea Mays
gggaaagaatttgaaactctagaatgtggggaaaacatgtttagtcaaggacatatgaaggatagagtccgaaaacaggggaaaataaaggattaactcttattatcaggttattaagcttaaaaagttaatatataaggggagttttctcctagtgggaatggttgaaggcaaactctcccaaatggagggagaaatctgatgctccgttggagccgatctaacttgatgcgggccagacttagttttgtcacatggactgattgatggaggcattataaggatcgtcttcattgttgattttgaggagtaataatgagagtttctactctctgtgttcataacgttcctagccttgtagcttctgagcttactgctttcattcccgaccctcctatataaggtgtgtgatctcacccgcctcgcgagcacgagagcatacacaaaacatcaaaccctcatctttgttaagttactttttaagttttttcctatttggatcttctgcatgcactaaggaatcaaagagtgggtaggtatatcgaacgatcaatttagaagcgtgtaacatgactgctcgccatcgacatgcttcatcttttttctcgattgattaat

SEQ ID NO: 57952 - DNA, 716 bp, Zea Mays
gcatcgtcaatctggagctgttcagttgggctctatgtgcgcgatagttatggctgcaaaagacagcaacatcaagaccttggagtgatctcccaatcagatgggtaagctttattcaatgttgcttctgtcgttcagatgggtaatgggaaatcaaccaaattttagacagaccgatggatacaaggcaaaactgttgtagaatgggcacctaatctagttcatttggttcctaaaggggctaaacggcagaaaaactgtgtcctaaggcctacaaaatcggaagtggctttctgatatagtaggggctctaacagttattagtggaatatctacagctctaaaaccttttggatattttgcatctgcagcaagacataccaaaccagcattctcggcgtctatccaagcatgggatttattctagaaaatatgtagaaacgcatatggaagacatgggctccattgaaatgtactctcttcatctggctggctgacagttatggctaacagacttgcaaaaagaggactatctcatcttggctcttgtccgctttgtgattagaccatccaacactgcctgaccacctgcatcttccctagagagtttggttccttttgttcactaagttggggctacaaaatcttgctccacaagttaatgacatattcatcatgtggtggagtgcaaaatcactaagatgatctctaaatag

SEQ ID NO: 57953 - DNA, 724 bp, Zea Mays
aatttagacgcaccaacatttaagaagttagatagagttcttacgagcctagaatgggaattaaaattccctaaatttatagtggaggccctcgacagatcttgttcggaccatacaccgctgttacttaataggagtgtggcttcacagctcaagaatcacacgtcgtttaagtttgaactaggatggatcatttgagatggatttcatgatatgatctcttcgatttggcagcaagaaacaaggggtgacactaccatgggaaaatggtagaaccaaattagtttccttcgccaacacctacggggttggataaagaacattgccgaaacaattaaaaaggaaaaatctcgacttactcagatgcttgatgagttggtcaaaaaggcggaaactagtttattgcctaatgagttagctatgaaactttgccttaatgaaataattgtgaccatcttgagagaagaggaaatctgtatgttctagcgggcaaaagtgaaacacctgcttgagggagatgataacaccaaatacttccaactagcggcaaatgggaaatatcggaagcaaggaatttataactcatgtcacaaactgcatgtgacatgtcactctctttggtcctggcttgacccaacactggatttctagaatattacagtcaagttttgggttgaccaagcaatgttctacatttcgactaccacatattacttgattctcc

SEQ ID NO: 57954 - DNA, 454 bp, Zea Mays
gcctggtgttacgcttgttgttccttcttcatcttggtgagggtcatcgtggaggatgcacatccttgattcttcatgagagggcatgacgtgatcatgtgatcctccttattacatatgaagcatgtccttacttcactctcagtgtccatgtgtggacatgaggcaatgaagtggcccaacttattgcacttgaagtatctcctttttcctctccctttttgctcatagagtacatagaagggtcattagtgcaaacaacattaatacttgaagtttcacctttttccttgttcttgttgtttgcttctattgttgtagtaggaactcactttttgtgagtttgacgcgtgttgtggtttctcccttctcaagcttcttcaccacgtgtccgtggatatcttgtgcatgttgagcaaggcatcttctccttagttgtttggctttcttgttc

SEQ ID NO: 57955 - DNA, 714 bp, Zea Mays
tggtgattgatggtaacacaattaaagcttacaaaagatagaaattaaagcataactttgaatcctaagttataaaatgctccctctaaatatgtgtttccatagaaatttcaatttggcctcaaatgctccctcatagtgtgaagcatttctacatcttagcattcgtggggtgcatagtgtcgtaaaacaaatcgtcatgcttatgacacacaaatgcacacaatcaaagctttgcatcaatatcacaacattaacatcacaactttgtaataactacaccataacacaccatatgaacaaaataaatcatcacatgaatatctatcatcaagataagcaatatgcaccgtactgattccacttcaacacatagataccatttatcatcaatttaagatgatgctacaacatgataatatgaattaaaacataagcatcgacaaatacacaatatataaccataatcacataatattagcattattaacatcaagaatgcattccctaaaagatataaagacacttaagaaaattgttcccctttgggaacaaggggtgcttgtcctcactacaaggacaagctttaagcactttatgcaccaaatcacttctccccctcaagacaagcttccctctcaagcaaggtaagctttaacaataacttctcccctttgacatcaaacacaaaaatatcatacaccacaattaaac

SEQ ID NO: 57956 - DNA, 464 bp, Zea Mays
atcaaggctagaaaatttatacctcttgttgttttgagtaaatttctctagtgttatttattttagtcaaaaccgtctattcaccccctctagccggtgtcatatatcctacaatcatgtacagaaagagagatctagcttaaaaagtggtatctaggcttgaggggcttattaccaactccttgtaacccacagttgtacaaatactccaagcagctatatttggcctcagaggacgttactaagtgtgcatggcacaataaggcacacacatgttacctcaagaagttacattgtagcatctgaatggcaacacttacatatatgtaacttgttcatcatactgtgcaaaagacttaccaaagcagagagggactgaggagatgttgtacggaatgcattagccttctctttgacccttactattcaagaaaacttgcagattcttggaataaactcctcca

SEQ ID NO: 57957 - DNA, 414 bp, Zea Mays
cgaaacctccccaaaataattagggttccctaacgatgaaggcaacagaagaggataggcaagaactaggtggtagtggcggcctcgtggggagcaatggcggtagccacatgaggccggtgtgatagcggtgcccacaagaggagcgatgcgcgcgaggcctaggtgacaacgatggtggccacgcgagacctagcgatgatggcggctgcaagaggtttgaacaagcgggcggcggctatgcaaggcgtaagcaatgatgggagactggctacgtgcatgacagatcgacgaagagatggcggtctgatcaagcgaggtaggcgtactccagcgtccagatccctcgacagctcgatgaggaggtgtcgggcgatccagcgaggatttatactatatctgtcactatttacg

SEQ ID NO: 57958 - DNA, 282 bp, Zea Mays
aaccatgcaaatataggatagaattagaggaatatcgtaatccaaactctggtgtaaaatgaatgtaccccatgatctgtttaactgcctacctgtgagaagtacatggggaagcttggaaccaatcgcacagacgcacgacgaaatgtatgtcttgcctcagggccgtcaagtatgggagggagccgatcatgctcatacactccttttggtccatgggctcactgtccacattggcatccaaagtcgtcgtggtggacatgggcttagaaagaggcctgg

SEQ ID NO: 57959 - DNA, 1102 bp, Zea Mays
tttccacctactgctccaactcttggatggggttgctcatctgttcaacctgtagatccttctccaccaactctaaagatagatcgaccacgaagtcgtccctatcatcgagggtggtctttgcagtttgagcgagcccagtgaggtgcgtcatggcctcgctttgcagggcctgcaggcggtacagtgcactcatgcactggatggtgattctcccaacctggtcgagatgcatggcccacacatccttgacgtggctcactctgttgcaccacatcggatcattcctcttctcagcagggaagaggccaagtgggtgcatcatcatctctagcgggtggtatccgcaaaaagtcgtcaaagtcttcaatgtcgcggcctcaatggtgtcatctgccctaaatccgatagtttcagaatcaattgaacgccacctaggctgcagagggtgagactccagggttagccaaaccctacagcgtggcgctcgatgatcctcgtacagctacaccgtgtatagagggggcgtggggtacccaacgacgtagagtacctcccacaaggtagagggaaagccctctcgggaaaggtagtcaaagctgaagcgggtgtctcctccatctgtaggggtgggtgaagtcatctgtgaaagaggggtaagtgcaagtgctaaggtagcggtaaggagatacctcccacaagatagagggaaagccctctcaggaaaggtagtcaaagctgaagcgggtgtctcctccatctgtaggggtgggtgaagtcatctgtgaaagaggggtaagtgcaagtgctaaggtagcggtaaggagataagcgtgcttaagtcaaacgaggatggttaattcagactaatttcatttaacttactttcatgttacacattcttaactaatgttcttatgggtcataagttaatatattcctttcaacttttaattaatcacttcttcctttttagtgctgatttactatgatgcatgcatgcttgaatgaacgtcctctcatcaatcataggggtgctcctagggcatcccttctatcatagtgttggcatatatggcctacttatatagccacctatcta

SEQ ID NO: 57960 - DNA, 403 bp, Zea Mays
gagggataatgttggcccgagctagattgacgcggccaaggcccaacagaattttgttcggtcatgatcaggcgtcccattttctaacatattctatcctttttttccccacaaaacctgatttttctctaggtaggcttattctattatctttgcttagaaggaactgcaatcacttgttaatgcctacttatgtttccaataggcttgtaggaggaaattgaaatgaatcaaactggatggattgttcgtttaattccaaaaacaaaatcaactcatgaagtaccgtggaattactctacgatttgcagtctacaacgttgtggcagagcatatttgtggcagggaattgacgtgctgcatacccattagcacgtaccgtatgctcctttcattggaattg

SEQ ID NO: 57961 - DNA, 621 bp, Zea Mays
tcgtccgggcctgctggaccgttcggccatgcctagtgccacaaatggtgctcaataggagccaaaccccttttttatagttcgctcgatcgcttgtcctcctttaactagcggtgtggtacaatatgggagcgatgcactaatgtggcttcctgtcgtgttgggcttaggtggtttctcacgacttatctataggataatgacccaattattaataaggcttggatgattttcacgacctatttatggagtaacgacccactggttggggaggagaataaacttacgcatttcgcgtgacctggaggagaataaacctatacgctttgcgcgtgatgtagaactaccgtcgaaactgatgctttatactgatagagaaagaaatttataaaaactgatgtttctttctacggccgctaagagagcatctctaacagtgcctttagtcagtaccatatcttaaaatatagtgctcaacacataaaatacagctccaacattgccctattttacaaatgtttataaaaacaatatagagcacaccatgcataaagtgacctaaatatattacaccctagactagtgtcgtatccttgttttctacaccattctcgtcatttt

SEQ ID NO: 57962 - DNA, 433 bp, Zea Mays
tcgcagcagatagagcaagcagcagccagtatagggcagtggcagcagtgtataccgggaaatgtttttgtttgtttgtttttccattcattcacgatggatggtcgatccattcatggcgaagggggaatacgtaccctgcttgtctctagcatgtgtcgtcttgctattgatacggggcgcggggtgcatcatgtgcatgagacgtacggtacatgcatgcatggatggcgaaagaaaagaaaggcgaggcgaggcgaggacggcgtgtggtgccagaggagtgacaccgcgctttattagctagggcatgcaggagccatgaagaagctgcatgcatgctcaagcaaggcgggcatggccaccagtagtctaccacagccacatgcatgcatggtgtggccatacagatatagatgccgcgtgctagcgt

SEQ ID NO: 57963 - DNA, 666 bp, Zea Mays
aaatgatgcatcataaaacttaataattaacaggaaattttgaactagattacactagagcccaaacatatgaaatacgaaatttgcaagaaacaatgtttgaaagataattaccatactatttgtttggacggcgctttctaaaagccataaaggtctcaattatatcatcttcatcgcctttgaagaaaagatctcgttcgatgaatgtgactagacaatcgtccaaaagactatcacccatcttatttcttaacttagttttgaccaaagacattgcagaaaatgccctctcaacacttgttgttaccaccggcagaagtaatatcaatttgagaagcaagaaaaccatattgaacacgatatgcctcttttttcaacaagcttaactgatatgtcaacaaggcaatgaaggcctttgaagttatcatcttgcctcattgcatcaatataattattaagctgcaactcaagtttcagcaaatcattcccaaatatgtcattagggtaaaattcagctagtcttcgtatcttctgcgcatcaaaggaagcaaataaatcagaaggatctaaggctgacatacaagaaagcaactccatattgacctcatcgaaccggttatcaagctcttgactaatttgatcaatgacaccaatatatatttc

SEQ ID NO: 57964 - DNA, 360 bp, Zea Mays
cggccgggatcgtatcgtctcactcaaatggacggcacagaaattgggaactcctagaatatagaacacctcaggaagttttatccctaactgtatttcaaaagctatcgggacgacaatgtactctgtaaaatgggagatatgtcatcaataaaaaaggcttcaagaatactcagcttgttcatgattgacctgcattcttatttaactcggggtgaccactatgccctgctaacggagcaatcggcttaagtcggcaacgactcaagacagtgcaacatgctcacacttacttaactcggggtgaccactatgccctgctaacggagcaatcggcttaagtcggtaacgactcaagac

SEQ ID NO: 57965 - DNA, 848 bp, Zea Mays
gcctggaagttagaaatgattgtgcagcaacacatgaagacaagaccgcaaaagtaaaatctcatttcgaaaagttattgcgtcgtccacccactctaaaaatatacttcaactggacgacgcttggtctacagagtcatgacctcttttctttagatgttccgttttctgagtaggagatcaaaagggccaatgatctattgccctctgacaatgtgccgggacctaatggcttcatagggctatttttaagatatgctagaacataataaaaggtgatttcctagaggcggccaatgctttccacgctcttcgttgtggcaacttgtcgctcataaacactgcaatgttatcctcatcccaaaaaagagggagccgaaaaaatgggggacttcataccaataagcctaatccattccttcataaagttcatttctaaaatattggcattgcgattatagtctcatatgaacgtgattgtatccacttgctagagcgccttcatcaagcacaagagcatacacgagaactttctagctgtgtgtaacgtgacccgccattttcatacaaacaagaccccaactcttcttataaaattggacattacaaaaacctttgattcgatacattgagagtatctcctcactctacttgagcatcctggctaccctatgagatggaggagatgtattgcgacaatcctctctacatcaaccttaagggtgatccccaatggcgtaccaaaccctcctatttcacatggaagaggcctcagacacggttgtaacacccctggtgtttagcatattcattcatggcatgtgcatcataatggcattaccatgagc

SEQ ID NO: 57966 - DNA, 524 bp, Zea Mays
tttttatgctggatcctttgaggaatcgaatccaaatctttcctactatagtcccacaatttattgcgtgtttctttactgcatggatacaaacatagtaaattcttgcggaggaattaaaatttggggttcaactggatcccacggcttgattttctcttggttaaatattgttcttacatataggatagacatgctctatgggggtactggtgtttgctagtttggtatatagtcaaaattctgaaataagaatcagtttaagttttgttccaaaatgcgataatttagtttatgttgggtgcaatgtgtgtagttctccatgccttttgacatttcctgacagattgcttattattccatccactccccctatggtttgtttgcatctgttcttctgtctcaaactcgcaccactagtattagttatttcacaggatttggtcgtttcaaattaaaccctatgccgcattaagtaatgccatgtggtaaattgtaattttcctgttcaaacaacacaacga

SEQ ID NO: 57967 - DNA, 321 bp, Zea Mays
gttgggtataaaagtaacggaagaacaaggtaaatgtgctgaaggacagcgggtaactgactttatacctgatcaaggttggaggtgaccaagcgacggggagagagacaccgaaaccgtgtagacttcgactcgatctccgaacgaccgcagaaccacaaccggagctaatccacacaatgcgaggcagccgtactggaactcataaggcacgaactagtggatcccagagggatctcttcacaagtccaggagaacaaggaagaacaggggtagagtaaacactcagcagctcggctgcggtaatcacttggattatca

SEQ ID NO: 57968 - DNA, 406 bp, Zea Mays
ttcatcgtggagaatcatgggaattccctccccccacggtcagggagacaaccggatgtccgcacaccgagctggaccgaatcctccacagactaggaggtggctgaggcaggggctctgctagctgaggttggattgttgaaagaaaggggtctgactgcagaagctgtggtcgctgactttgttttcaagaacattcagctgctgaaagacagagcgtatccggcctatctgtatcgaggccaggctgattcaacccgggtaaccaacagaagaattcctgctgtggacttggtgagccggctcgagatgatgcttagaggcaaggtgtctaacatcggcgctcctgttgcatactcggcctggaatctgcctccttcccaggcctttaccagtttcatgtcaa

SEQ ID NO: 57969 - DNA, 393 bp, Zea Mays
tcaccaaagggagaaacctaagagaaaaaacagaattcttctaagtccaaaaccaacccttttccaaagatcaaacatgttcaccctctttcaaacttcaaaaccacttggcccaattgacaaagtggcacctaaagacctctagaacaccctggaaaagtttgaacccaaccctaagtcgtttgacacgacttggcacaagttttgtctcggtgtggacagctaggacaaagacaacttcccacccccatatctctcaaaccagaccacatctacccttggaactcacatgaactaggtagccctaggtgcagggaagagatctctcacaggtcttagggcaagattcgcacgttttggccgctcagcagaggatagaacaagagcagaaac

SEQ ID NO: 57970 - DNA, 404 bp, Zea Mays
ccagctccctgaaatattttgtagtccataagcaaaacaggtaatacatccagatttattcaacaaaactcagcacccatcttttcattttggataggaatcagtatgccatatcttcatttgtttgctagctcagactgttttgttacagaaacaacataaaataattttgttcactaattaacatagcatgttgttagtgttttgctaaacgctaaacaatcggtcacctaccttttagccataatccaggcaaaatggccatttaaatgggataaatgggcgattaaatggaaacgatgtgccagtgtagtgtctaaacgagctcaacaaccgtttagaccaacaatgcatagtgtgcaattgagcatacctgaaactttcctcagccctcgagaaatcat

SEQ ID NO: 57971 - DNA, 1416 bp, Zea Mays
tcgataagaccgaaaggccttcttcaagtttaggaaatcccatactcttagctatctcctggcaaacagatatttctttgttatccgggagacagtacaggaaatcttcttcgttactaccattgaacactaaggcccccttcggatatttcaatctttgggtgtagtgtctggcttctagtatttcttcttgggataatttcttccccaaagcatgtcgaatgatgtagtcaacattttcgttcagagctttgggagcaggagcttcgatcttttcaggtgcaatctgccctgccgttttttcctcaggcgcggctagcttcgtctcgatgggcactgaaggcccagcttcggcttcggcctgaacttttgtagcttcggcaattttcttagggcagggctcagggccttcgtagtctctataacagcgtctaatacgctggccatcctcctcttgggaggtgtggcaggaattttttgcatctttggcaaatctgcctctgtcggtgggctcagggtttcttgcgcttttatcaccttttccacctgtggctcttcagccttatcatctctagcttcggttggcccgattgtaggcaccttcggcactacaatcagctcttcagtactctgtgcaatcggagcagcttccttggcctcagcagctgaagaggtccccacactaaatttaggcacaacggccggttcaatgtatcgcggccggtgggttagaaccttcatctttttgcccttcggctcagctgcaatggtcgaagcggcaatcttctctttttctcttgccctcgtagcgggtaatggtaatcagggtatacgaagccaatagcatcaaataccccgtttaatcttttcttgccccgacctccaaaggctgcagacaaagcattatcttcggccttggaatatgtcccaagtagttcgctggtagcttcgatgcacttcagccagtcatcgtctggctcaccaaacttccccctaaatctgaaggtatacttcaatcggaccataccaccctcactagaatctacggtggtctccttcggcatatcccagctctccacaagtggccataccctgaaggctatatgctcttgaatcaaatctcttgtgccaatgaaggcacacacaatgctaaaagccctctaacatgcttcgacattgccatcaatttccaccttcggccttcggaggctgaagcgagaccagatgggtcgctgaatgatttctttgatgtcttcccttgcctttaaatcattttaacgtaaaaccactcccccatccaggagctaggccatcttttccggaatgttggtaccgggtggcttgcattggggcgagcaataaatccataacaaccgaagttgttgtggtactgttctttgctagtagccttcgtct

SEQ ID NO: 57972 - DNA, 331 bp, Zea Mays
ccttttgggatttattcctcttccatcattaaatttctaccatttggcaatccttattcctttgttattgacatactcgtatccctgaattctttaatactcttgtttcaaatacttacacctgaatttctactgcccacttagacatttccgtttatatgtccatgaacttcttgtcctctaagaccccttcctattctgttgtgaagccattatcttttggcttttttctattctcttggtcttggtacgctcgtaccattggaatcttgcatactattatttttatatatgtttacctttatatcccaatgtatgtttaagacatttc

SEQ ID NO: 57973 - DNA, 330 bp, Zea Mays
cactaagcacacgctgtacaatggtcataatgctctgcatcatctgcaccaatctgttcttcgggtggttccttagtgcctgcatcatcagccgcaagcaaagcaagtgtagcttcatccaaatcactagcagaggaatacccaccatcgtcttttaccaccaaaacacgctgattaggacaatcacgctgcacgtgtccatagcccttgcatcgataacatagaacatctcttgttctacccgtggaggccactgaagaggcactacctgctggtttctgggcagattttgttgctgaatttgtggaagatgcacgtggtttgtcgccg

SEQ ID NO: 57974 - DNA, 568 bp, Zea Mays
aaagattctcgggcccatagggcccacgagtcagcagaaggacgagggaagatccaccccggaaggacccaccactggatagtcccaaggcaccaagcccgaggttgggcgaggcagagcgagaagggggatcaggcgaattgagagaaatccactcgagtggattttgtgactaacccaatactgacccatcgtaagtgaccagccacattaactgtgtctggcaccgaaccatagtgggagagacggccctccttccactcatgacttacaagccctaggtcggcggtccactcatgacctatcgaacctaggtctgagtgcactagccatctacaggactcgcaacacgacgagttgcgctaatacccaggctatggaggccaggggtcagcgtggcacagatatgataatgatggcaccgtagttgttcgtcgcccatgctaccagtcttaaagaacgcggctagagaagcccaaacgaccgaggcacataccgaggtaaaacaccccgttataccacggcgtagtagctccttcctcgagaagctaccggtaattgaccccca

SEQ ID NO: 57975 - DNA, 370 bp, Zea Mays
cacgaagcgcgctcggagaagtaattgggtgaacgaggcttcggcctgctgaggattcttcgccgtagttgtatcctgccgcggatccgccatgtcgtgtggcctgcctcgccgctgcttcaatcgccggtaagaaacccctagccttgatcgcctagtcattctcatcgtgtagcgcccgttattgcagcgagtgggggcggaatcacgcggatcctatgctctagtcatggcgccgccgcactgacgctgtgctccgccgaatagaggacctagggaggaagaaaggggtgagtccgttggattttgatccagcggctaatattagatcggactcataccctctgcgtttttttatatcagccgtagt

SEQ ID NO: 57976 - DNA, 486 bp, Zea Mays
caaatattcttcttcttgtttcctactcacttgtgacattacatgtgacacactctgtctttgatttttaaaatcatcaaaacatcttctagccttattatgagcactatcaatgttacccacatgtacatcaaatgacctaatcgcattcttccaattgttataccctgtcgcaccagtgtagctttcaacaccaaagttttcccttcttggttgcttgaaaaggaaacaataaaagcaaaagaccgcatctttagcaacactgtattccaaccattcatgctttttgaaccatgattcctgaaaacttgtttgtctatctcctattcgcttcttgggaaatatgtgaccttttggttgacaagggcctaacaataaatactctcttctaacaacatctcgaatgttcacatctaacttttcaattggttttcgaagtctaggatcaccaacaatctcactatctattgattccgtattatttgt

SEQ ID NO: 57977 - DNA, 328 bp, Zea Mays
cgtgttgggattggatagtttctcatggcccatctgtagagcctattaggctcattattaggcaagaagcagggagataaacagagatacacgcttcgtacttgacgcacgatgcacaaaactggtgctttaaaggagtatggcatctagatgatcagaaggtccggtcttttggttcagatagtctgaatcttggatgatctggcatgacagctcggacggtccgcaactagattaattcaggttggagtccttatcccttgcgtggttatcttaataactcacaagaaattgtcggatttcgtctaggaacaggtgaagacctccc

SEQ ID NO: 57978 - DNA, 927 bp, Zea Mays
ggaagaacaccgtggggggaatctggggtcacagtgagggtgaagtgtgatctcaccaccgaactgcgatctcgagacgattcgggggcagggaagagttctgggtgtttgtacgggtgtgtgacgtgtgtacatgggacaaccgggtctggagctcgatccgtgcgcggtcaattgctcgtcgtagtcgaaggggaaccgcggctccgcagggtgtcgtgggcagctgtgattttcacctcaaacgccagtaatgactttctccatcaattcatcttcccctatagaccgtttaggatcaatcgatttgggaacttggctctagggtgtcggcttggccgactctggtagggcaccgccgtggggagtcacggtgctgcgggagtcccgtgtccggagattgaaggcttgcgcggaccatcgatctcttcttggacggtttagattagcgagggaaaaagaagagggagatgatcgtggatcatgggatcataaacggacggctccgatatgatggcgcgaaccatttcagagcgaccgttgcgggccctcggatcatgctcgggcaaacgtgattagatcgcgatcatgtccaatgccaaccgttgatctgggatcctgcgagtcgtatcgagtaccgattagatttaggttggagttaatcctgaccgtgtgcaatcgatcagacggctcgcatggcgcaataccccttcaccgagcccaatttgcatataagcccctcaacttcattataatgaactcgaagtctacccagttcaatagaaatagcacttgggcccttaggtttgagaaataggtccccgctacttacaatcaattccctgggagacattttaggcttgaaagaaatagtagaaacacctagaaacttgttaaattcataactttcgcattttatctcctttt

SEQ ID NO: 57979 - DNA, 507 bp, Zea Mays
aaattcgaacagcatggactcaacaccttgaaagattttaaagtccaaaatttctctaaaatgtttggacaacttagataaacggagacagatacgatatcaaaatcgtgaatgacaaagatgattagaacttagtgacctttatattcactgatatctcgtgcttaaatccatactcgttgtcgcatgagaaataaacactaggggtgttacagagatcgccgttcaccgcgagtgtgccatgtcgtagtcgattcaccacatcgtcgcaagctgtaaggactcggtagtgaccgccgtagatagttagcctgtgagcgccacgttgcggcctctggtgactcctcccccttctcaccgtgagcgcttccccgttcaaatttgccctcctcgcagctgtcctctataaatcgatgcctcggcctatttgtctacttgttacgaagccagagcaccagccctcgcctccgatcatccacagtagcaccccaatttcgttttccccca

SEQ ID NO: 57980 - DNA, 530 bp, Zea Mays
gttaggggagacttctaggcacttcgtattgtacctttctctggtcgtcgcatgccttggtcgtggacatgagttgaatggccagggatcacaaacatgttatctatttctaaaggcttacgacacccccaagttgtgatgtccttctaggactgcacggttagattgacttggcctagcacaactaaggtttaggtcgactaactgaggagacatgggccaagactggcctaaggcagtttggtcaaggaacctgttgaggaactcctaggtaggtttgcttaggcctgacctagttgggatgatttggtcaagaaactaggttggttcgccatgactggatatgttgtcgtcgggcctggcctagtcgaagtgacccggtcatagaatgttggccatccttaccttggtaagatctaggtgtgtttggttcccacctcctaaactttagtgactaaagtttagtcacttttagtctctaaaataccaaacaaggtgactaaaataggtctttcaaatagattttatag

SEQ ID NO: 57981 - DNA, 271 bp, Zea Mays
gatgcccaagagggggtgaattgggcttttctaaaaatcaacactaattaaaacctaagcaagagcccaacttcaccccgacaactagcaataagggaataatactagaaatataacaatgctaagacaatacttcaaatacttgctaaacaaatacacaatgtaaaatgcttgaattaagtgtggaatgtaaagcaagatttagaagactcctccaatttttcccaaggtatcgaagagtcggcactctcccctagtcctcgttggagca

SEQ ID NO: 57982 - DNA, 602 bp, Zea Mays
attcaattccatcctctccaatatcgtcatccaaatggagcaacgtcatttgtatctaggtctccaaactatgaaattgtagatgtaggtccctaaactatttaagtatcacaattctgattcaaagcagccatatcatagaaaattagctaatgtggagatgtgctctaccatggaattgacatgttgctctgtagctcatatttacatggtcaatccctaaacctaaaatatatgtgattctcacaaaagttcccaaactatgaaattgcaaatctaagtccccaaactctaatctattgaagtactcagatcctggtccaaagcatctacgtatctccgccgctgcaagggcgacacacttgagacctactcatgtcggtggctactgagcattatcaagaatgagttatgcagggttctcaactgcagcaagctcacttgagacctagtggatctaacaaacattagtagtttattagtatgaccacaaataatgttgaagaagtcaccaacaaccgacgtccatgtacacctctagaatgagttatgcagggttctcaactgcagcaagctcactaagacggtgtccatgcatggtg

SEQ ID NO: 57983 - DNA, 430 bp, Zea Mays
cttgaatacatcttgaaacttgaactaatacgacaatcttacaagctttcctttatccactccctcctttggcttcagcattccctaaccgttcaatgttgggaacacttcgttggcaagaaattcttgaaccaagtcttgagtgctgatgtgctcaatcacaatgttgaaagtgacttgggtcacttgctgtggcgagcctagagccatatgacagactggtcatgttaagacaaagtttaaactcatcgggacatcataatattcttaaacttatccatgcccttgacattagcctccatgtaaaacaactctctagtccaacccgttggccactttgtacaatatcctagcactagagctttggtatcctttctataagcaaagttttaacagccaaaaatgttatgaagatcatctgaaggcctcg

SEQ ID NO: 57984 - DNA, 769 bp, Zea Mays
caaccgaagtgaaccctaataaactcaatgaaggcagaaatatggaaccttccaacataacggacatataatctgcaattatatattctgtgcaatcaagtaatttctatggtctatcgtaaatcatgtagtgacaatatttttataaataaccgcttgtttcgtgtcgacaattaaagatggagattgcttgattacaccttttcacctgactgtgcacgatatgttcccttgttaataagtcataccacacacaaaataccactgcactatattagtctgattggtttggtgcatgaggagcacacggctgatgcgaccctacatcatgggatacgagcctctctgatatcccttcggatgcagcaaaataagttattttgcatccgctcatgcagggtgagcctcccatgtacagacaaccatacagaagcttaagttcaattaccacgtgttttgttgtcgtgccagcaacgtccagactcaccagatgcgttgactatatatgtgcttgtgattggttacctgcatgcaacgatgcgagctcgcacacgcacatgtagcccagttacatttcccaccttcagcctgcatacgtggagatctagggaaagagcttctcgaccaggctggcgtgagcccagttacatttcccaccttcagcctgcatacgtggggatccacggagagagcttctcgaccaggctggctcgcgccagacgcttcttacttcttagtacaccaaccaatcatgtagttagcgcatgcg

SEQ ID NO: 57985 - DNA, 742 bp, Zea Mays
caactttgaagccctatatcttccaaattatgaagattttgccctaggtcaacacatcaagtttgtagagctataaaaggaggacaactttgctatagggattaaaccatggtcacatgaaaagtttggagaaaaatgtgcccaaaggcgagctgtcagactgccttaagtctgaattcagactgacagtgagattaggcaatctttgagcttggattcgatcatgatccagtcattatttggctatgattgatataacaagattgtagctggatcatcggacaacaactttgctactggcagatcaacaagttgtcatgtaaaaacctaagatctaagccctgcaaagtggtctgtcaggcgcactgaatagagactccatggtacagtaactgaacaagatcccaagttcatcccccttcgccgccggtgacagtcgcgccgcaattcacgctggccgctatgattcatgcgccgtgacttgcggataaccgtgggcgagtaaagatcttggcacctgatcgactcgggctcggtcacagctaagctcaccgtacccacttgctcgtcgatcggtcggatagacctcgccaccgttggccgcttaccgccgtgcgccacatgctaaagcgctagaccacatcgtagtgaatcacatcatgcatgcccggtgatcgccggagagctgccacggtgaaagccactaatcccgagtgccagtaaccttctctttctccggccg

SEQ ID NO: 57986 - DNA, 786 bp, Zea Mays
cgcggatctcgcgcacacgttgtgatcggccacgcagggagataaaacccacagccgccattgcctccttccgttcccctgctccattgagtccgcgtaaacctagctccccaaggccgccactgccaccggagagggaagagggacccgccgcgagggaatcctagcttaccgtcggtcgtgctctcagtattgaacccaggggctcctctaggccaggtggaagacagtcgcgtccgtattgcttgggattagccaccaatgccaccagaatttgtcgtcgtctctgcgaattcgtcgtgcgccgtggtcgacttcattcagtgcccatcttcagtgagtgtaccatgcgtccacgattagagtatgaggggtaagcgcctcggccgttagatgagatctgtgcggtggtgattgtgcgctcagagcgattcgcgggggttcattttggatcgtccgatctaatcggacgtgatcagagtaaggaggtcacaaagccttagatctctgatcctgtggttgagattcgcgtactagttcacgtgagggtaggcctgatctggatagttcatttcagatcgggcggttgtagtgaacccgtaagcgctcggtctagacattttgtgtatgagtccctgaactttagaggaataaacccgtcatccacacagtgtgataagtaattacagaaaggcctaattttttttgatttagacccctgagcttcctggtattcgtgcgcgcagtccagacatttaatagaatacagaaattaatatagaaaat

SEQ ID NO: 57987 - DNA, 731 bp, Zea Mays
gttattctctgcatttgtctccaaccctcctgctggtgatggtagcccgggccatagagtgcgaccctctcctgaggacatcgaggcgttgatcgctccacttcggagtcttgatgaggacgagaggcagactcattttgagatgccagccagcactgatgatgctgaaatggatgtcgtgcttagcctgctggctggggagtcatccgactctacccgcaccgagccgatggctatcacgactgggtaagaatttgatgaagaagtggagactcggaaacccgaaggtgctcgcccaaagtgtccacgccaagtgaaccgctcgactgcacctgtcgaggagaaaagaaagaagaggcggcttcggcgactgtcgtgcttggatcaggatgccggcccttctgtaccagttcctgattatgtcccgatagaggccattcctaaggttgatgccaagggttgtgatcatgcacaggctgttggctgcatgtttgacgaggacgaagaggaagaagaagaagaggtcccactgatccacaagaacagtcggcactatagaggcaacgagggggtagcgatattccctctccagctctgtcgggacttgtcagtctttaggggctttcaatatcagattttgatcaagcactggaggaggtcatccccgaagacatgctatcagagcctcctgaagatgatatcctagccatctgttcagaggtcccagaggg

SEQ ID NO: 57988 - DNA, 545 bp, Zea Mays
gttgagaaggtatatacaccatgaaaaacataaaagtaaagtcacaggaaaaggaaataaacatagagtgataaccaaaaagttctagaaaggaaaaagaatgtaagtgcacagtcacgatcagtaattagagttgccagtgaaatctagcaaatggttaggcagcagggctccaactcgttcaaatcaggaaaaggaaatggctctattctgcaattgatagcgctgaatattttttgcaatcacaaatgtaaagagacagagattgaacacaaggatgaataattgaactgtgacaacacgtgtcgtgacgtgagaagctgacgtggacgccggcgagatggatcggcaagcgacgtaacaactcgatcggcaaggtgactgtctttttgttctctgctttctcacctcacccactcattacgggcttatagagctatggcccaactcacacacgcggcccacataacctggttaaatctctactactaattatgtgactaatgtaggcgtccacacctctcccatggtgcacgttctgccgc

SEQ ID NO: 57989 - DNA, 370 bp, Zea Mays
cacaccatatccaaccggcccagacacactcccgctccctctcccaccatcaaatccacaactcaaatccgactcatatccaaccgagcagaagactatgctctctttctctgtagcctgatgcaacaggtaatgcaatataacaatgccgacatcgatgaggacaaaaacatcgagaagtcactccacatttttccaaagaaacacatgaaggccatcttggtgatgcagatgctactagagatggcaacagatataatacccatcggattgtattattcgatatacatacccatcaaaaaaaatctaaccattggcaagtctctctaattggtctctttgacagaaatgttggagcagtaaagctcgg

SEQ ID NO: 57990 - DNA, 498 bp, Zea Mays
gctcctagagcgatcgttcgctttgggaactttgatgacgtccttggcaacaaagaaacaacgaacaaggccctgaaagccctggcgggtgagtcgctcgacattgttggaagcctcaaccacctccgcctcgatcccttaggaggtaggaacgtgcatccatgctaacagcaacccattttcaccaatgtcgtggaggcaccaggtcccattcaggactattgttcggtttccccctgataggattgggaggtagacctggtaacccgtcgaatgggaccacccacgtttcgacctagaaatgcctcgtgatctcgtcgaccggggatccctcctttctctcggagagccttgaggagaccctcgcgatgccatggtgtgcgctgcggcgtcagtcccgtctcaactcgacctgccatgctaggaatcggccccaatgcaagaccctgcttggggcagccgaggtccgcctcgccaggaagcgagtgttgcctcgat

SEQ ID NO: 57991 - DNA, 316 bp, Zea Mays
tgcccatcagtctgtggatggtaagccgaactaaaattcaatctggtgtccaaggactcgtgcaacttcttccaataccgagaggtaaactgtgatccccggtccgacacaatcttctttggcacaccatgtaaacagacaatctgtgccatgtacaactctgccaacttggctcctgaatatgtggtcttcactagaataaagtgggctactttagttagcttgtccacaatcacccatatagaatcatacccagcagaggtgcggggtaacccaacaatgaagtccatgccaatctcttcccatttccactcag

SEQ ID NO: 57992 - DNA, 393 bp, Zea Mays
ggcgattccgggtctctgcggtggagaatgtgaatgcgacggcggtggaactacgggaggagaatctctatgggttcggtggtcgcggtagagaagaagcccacgacggcgattaatctagggttcagcagctgcggtggagaagaagcagacggcgacgattgagctaggattcggtcgctgcgagcgttacgagtgaggtgagctgaaaaaaatgtgtgctcggttgctggattcgtgggcccgatacacgtaaactgctgcgcgaaatcaacgcgaaggcccatggaccgacacgtggattactgtatcgtaaaaggcaacataagacatcgtaatataaatatttatgtggggactagtacgactgcccagattgcgggaacagaatct

SEQ ID NO: 57993 - DNA, 670 bp, Zea Mays
acagaattcactgatgtgtacattgtttcctatatcctaaaccttatgaactctttgtcggtgtttatgaccagtcgccacagggttcctcacgtgatgcttttgagtaggacgacgtcgttgattgcgactcgatggttcatgcggatgcacgtcggatcacacaagggtttatataggttcacgctgctagaatgcgtaacaccctacgtcctgtcgaggctgagtgtttgagtatcattggtgtacacgggttacagatgagttgtgagtggtggagggtgagttctcctgtcgatctagtggttgcgtagttgctatgagaggattaatgagctatgaggtggtagtgggatgtgacgagataatcgtaggcgtaccccctcggccttatatagatgacaagagggttatccctttacaagtcgtgatgactatctaactctgtctgagtctatccttttaacgcgtcatgcattcctgcttatccagagtttggttgagcttcacccgagttatctctgagtatctaacacttcgggtatgcgcaacctccctgcgtgagacatcggtgctccttctacgcgtaactcaatcgtccgatctttgtctccctgggtcgagctcatccatcctggttgcggcccgagggcgcacctttctaggcaag

SEQ ID NO: 57994 - DNA, 390 bp, Zea Mays
aagcgggtgaagtgcatagatgcactatctaggaacccaagaggttcttggatcgattcattcaacagaaaacataaagggggaccagatccgtgattagaaacctctaaacttgatcccacatattacaacagatggtggtgcacccacccaaagggatgcacgcatcggcagttaagcctatgggaccccacctcgcctaagaaggtaaaccggccatcgccgacgtgtacaaagaagagacagtgaggagattgaagattccaagaagaactggagtagtaacaaagaggtgagtggagaaagtggcatcgtgcggctcgaccaagaaaagcagatgaagacaatcagggttccgaattccacggcttatataaatcatgctacagt

SEQ ID NO: 57995 - DNA, 838 bp, Zea Mays
atgagactggccagaaatgagcgatttaggcaagatcaaaattcgatacttgagaacgggttatagcagataaccagataatagggcagaatcaatgaaggatcagagatttggttgataaagccacaacatgattcgcaaggaaaaagattaccagatccaggtgaaaggagaggtaggcaaacaggatcggctaggatgatcaatagaaatgttatgaagtttcgggactggatctatggaaagaaacatgaccttgatagggtttgcgcaactagacaccaaacaacaattttttttgacccaacaagtgcacaaggagactggggttggtctagtggtcaagctataggtatctctataagttgtgcaggtgtattactaatggtgcaacacacaagggctagaaaacaccaacacaagcatatttaatttttttaaaaaaggtttcacttgctaaactcaaggttgtttggagggggtcttttcatgagcaggacagaaaacaaattttgttaaaagggttgaacaattaaaacattttctagatagccagacaagagacgcacataacacaacctagtcaagactatcacgacacacatgataagacattttttgcagttcatagcaatacaacacattattcacagtttcttattattggaataaaggtgagagaagcatgtttatgcacaagacacaattataatgcaacaatcatgatgcatgctcattctagtcgtcttctcagacctaactaattttcgggtgcttctacagcatccttattaatagtattagtagcctttatggcctatataaatagccacctagc

SEQ ID NO: 57996 - DNA, 592 bp, Zea Mays
tcgctggtaccctagtccttgatatattgctaattgattttcccttccctgttgattttgtttgtggagttgtctcctctgccatgattgagtatattttttattatattggtatggatttgcctctaataatgttctagggtttgtgtttcactttctgagtaataactcgtatggatctgcccataagttgtagattatggtgttgatctctatggtgttacaatgtgatgaatctttgttctttccaaatatgtgctaggctttgtgtcattgctgcatatgatggttgtatcttacatgcaccttcatgcatatgttttgtctccctcccctctttcatactcccactgcctttggatttgttgctaagtgttatggttggatgctctatgatgtgttgtacatttatgagcattaatggtatggtctataatgtgtgttctcacatactagtaatatagttcaatggtctctggattcatgggcactgggtggcgcaaactattaccattatcgctaagtgctaggattggttggactatgatgtgttgtacatttctgagcattgctagtatggtctatgatgttt

SEQ ID NO: 57997 - DNA, 731 bp, Zea Mays
tctgtttgctatgacacattaagagattgtcgactttaatgtacagttggaaacaaaaggattagctgaaccagaaatgtaaatacgtaataacaaagttttggcaggtgaaatcaagtaggatttgtcagtatacatctagaagcagggcatatcatgagatcgacatacctctacggctctacgaaaagttggccatggccactcaaccttatgttttccaaggccgtacggaaaatgttatatgtctctgagcaatgattttaaaggcgtccagattagctatgcgggtgcatagtgtttgccttgctgtcctaggcgcccgctattcttgtttaggcatgcaggccttggcaaagagctgtggacagtcaccttattcgtgaaagagccttgcacgtgcaagaaaagagtggccttgcactcaagtgggaagaaaatcactcccatgcagtacattctgccttctgcgtggggagagagggacttatggattctgtttcttccctgtgcgttcatggcaagtccccacatcgattccccatgtgatgtgttcctgtgcatccatgagtcaattgtggttctggctgtgctctccataagttgattccggatgcacatccacacctgccaggacccaaggtgaggattagtggacgactgctctgccgcgtctaaccacaaactccaccctgctcttcactggctcctagcttcacgctaccttccca

SEQ ID NO: 57998 - DNA, 942 bp, Zea Mays
ccatgcaatcatagggaggctagggctcgcaaagttcatggtgatccccatttacacgtacctggtcctcaaagtgtcatgctctaatggggtgatcaccattagaggcaacctaaagcagtcctacatctgtgatagagatgggtgtattctggctaagtcctaggtgatgcaggcggagtgtgatggtttaaaggaagctcttcaattaagttacctagagacaggataactaaagaccttgaacctccatagaataaaacctcacaagctactctgcaggctacaccattatcaagcacaacctcagtgtcaaccattcggtcagaccaaagaaacaacgacttcataggatatcacacaaaaaggttgtggcaacgaaggtagaggtctaatggctcctagaagcaaactttattgatccaatcgattactcaacctggcttgctaatgttgtcatggtaaataaaaagaatgacaagtggaggatgtgtatggaattcacaagccttaataaggtctgccccaaggataacttcctgctgctaaggattgaaaaaatactcgacttggctgcaggttgcgaagtaatgttcctcctcgactgtttctccagttatcaccaaatttacctaaaggaagaggacaaggccaagacaagtttcataacacccttcgagacatactgctttgttcatatgcctagaggcctaaagaatgcggggtcaactttttcagattgatgaagaccattctggaatgtcagataggccaaaatatctttacatatgttgacgacatagtcatcgccgacaagaaaaaatgaacacctagcatacctcgtagaaacatttgcaaacatgcaagaggtcaggctctgttaaccccaaaaatgcatattcggagtccagcagggtaagatactaggttaactgatatcac

SEQ ID NO: 57999 - DNA, 1144 bp, Zea Mays
ggatgtagctaggggtaaaactttctgaggtgttctatgttccatgagttcccaatttccgtgctgtccatctgagtgagacgatatgatcccggccgagtgacttcagctactatgaatggtccttcccatagaggtgacaatttgtgccgtccctcccccgttagaattcggcggaggacgagatctcccactacgaaggatcgatgtcgtatgggccttatcgtgatagcgcctcagagtttgctgatatcgtgctgattgaatcaccgtatttagtcgctcttcttcgagtacatcaacatcctccagcctagtagcttcagcttctgctatgttttcaaagattaacctttggtgccccgaacttgagatcagcaggtagtactgcctccgaaccatagaccatgaagaaaggtgtgtttccatgcagagctcgactaggttgagttctcaggctccaaacaacatacgacagctctctgatccactttcctgcgaacttttcattcttgtcgaagactttctttctgagcgcctccaatatcatctcgttagctctttcgacctgcccgttggctcttgggttcgccaccgaggcatatttgatctgaatgctcttttgctcacagaaatcgaataactctgaactcgtgaagttggatcccaggtcggctatgatgctatttggtattccaaacctgactattatgtcttgtatgaattctacggccttagctgaagttagagaagcaatgggtttgaactctatccatttagtgaatttgtcgatagcaaccagtacatgagtgtatcctccttgagctttcttgaaaggtccaatcatatccaatccccagcacgcgaatggccaagttacaggtatggtttgcagttgttatgctggtagatgctgctgctttgataagtactagcaggcttcacacctctggactaactcggttgtatcactctttgctgttggccagtagaaacccgacctgaagaccttcccaaccagggttctggatgctgcgtgcactccacattgccctccatggacctcatccaaaagttgttttccagtagctgagagaatacatttcatgaggactcctgatgcgccccttctgtataatgtttc

SEQ ID NO: 58000 - DNA, 544 bp, Zea Mays
gccgagaaaccgggttcacacccttccgcttgatgtatggatctgaagcaatgacgctgcaagaattaaagcacgggtcccccaaacaaaacaagctagccgtccccgaagtcgacgaaccaacctccaaggatctcattgacggagaccgtgttctcgccctgcaggccctcaacaagtaccaggtccagaccaaagcatggcgtgacaacacagccgtcccaagagaattcagcaaaggggacctcgtactagtaaggaccacccggacagagtcctagggcaagttcgagccgaagtgggaggggccatacatagtcaagacaaaggcatccctcagtgcttataggctagcaacatcattcggcaaagacctagaacactcatagaacatcggtagtcttcgcaaattttttatttaagatccaaggcccaagcgcctttgtaattctccaaactatgttattcgggtcagcactcttttcctcccgggggtgaggtttttaacgaggcggcgccatgtaatataccaacgaaaagcccc

SEQ ID NO: 58001 - DNA, 783 bp, Zea Mays
atgggcggctggacaagcgtttaccataccattgcagccagccaatgtccggtcgggggcgtatatctgcttacatttctacgccggctaacgatgactggtcgctaacgcttaacattattatcttcatccagaactcaggactcaggaggcttttccacagccctggtcgtcatggtcgtcgttgtcacagggccgtctgctagatcgtcggagccgtcgcgatgtggacaggtcgtagtcgtacgatgcgcacgggccggggtgcggaaatggaatggaccttgaaccagccagcccatggacccattcatgtcgtccccgactcccccggtgccggtgcgttgctttgggctggctaggagactgggaaggcgtttggtaaccacagactgttcaggtagggagggactggtggcgccgacattctctgacgggcattcggtcggtcggtttgttcacgctctccatccgtaagctgcgtgccgacttgacgaagcgtacactgagagggaggacaggacaggacaagccatatgcgcgtggttcgactcgacatggctcatgacaacacatgcagaagcaggatcacttcccttttttttctctacacaggcacacagcctcacgggtgcagtgcaaagcacagggccatcggacggtcagagaatgccggcgctgctgcctgctgggacagacaggacagtggtagatgccttgcccgcgtctgacttttgtgcctcccctgggccctgtcccttctctccctccctttcactttcc

SEQ ID NO: 58002 - DNA, 386 bp, Zea Mays
ataaatttacataacattgtgcaagtcagtatgatatcatatagtacgtgtttaatcaatacgagccatttattataacatacctgtcaacatcactcgtggtccgtcacatcccatgcatgttttgaacgtattgaagacccactcgaatgtatcaactgtctcgtctcctagtaaagcaaacccaaatattgtgcattgtaggtggtggtttgaaccaacaaacatgcctaatggcttatcatacatattagtcttatgtgtagtatcaaaggtaactgcatcaccaaaatcaatgtactcggcttgctggctagcatgggaccaaaatatgcttaaaatcttcccttctttgtccagttgaaagtcagaaaaaaattgtggat

SEQ ID NO: 58003 - DNA, 690 bp, Zea Mays
aaacagtgtcatcgataattatgtgtctcctaattaacacactctactgaatatagtctaactatatatattctgtggctccatcccgcgccatttcttctacctccgatcgctcatctcttttgttcgttcgcttgctccatcacacgccgccccttctcccaccccctgctcgcctgccctcttgcccgctcatctcatatgcctcgatccatgcagttgtatagtacaaatcgttcgctgtcagtgcgctcgcttacctcctctttgcacccgaaataactcgatccaacccgatcaatgcaatgggcgggtatgggcaatagtttttgacatgcaacaatccattggtcaggcatggcccataatttattactcaaaacctaatccaatccgacatgtccaacagttaagcacgagccaacctaacctgacactaagcatggtcgggtacgggctgtgccaaaggacccacgacccgacctcgaccagaacccgacccgccccgtcccaacatttgaataggtctacatttgccactcggctgcgccatcaatggcggtcaacctctctcctccccccaccaatggccattccctccatctttttttggctataaaaggtcgctcgagcattctctccttgccctcccactcgcaccccctctctcgtgcgctcccttccctgttc

SEQ ID NO: 58004 - DNA, 610 bp, Zea Mays
cgggtgttcgccatgatgcatcggatgcgcctttggcatcaattcgcatggagtcgtcgcggtccgtagggaaatcgttcgccaggacttggatttccgccgtgaccgtgcctcctcgtcgacggagctctgctgggtgctatctatggtgagaaccttcttcgcgcattcactcttgcccctacatcatgtagcttccgttaggttggatttcgggtcgcctggggcacgggtggccagctcgataatggagtgccgccgtgggtctgtgtgcggtcaccggagttcgctgggaggagggcgacgaccgggggccatcagattcggcttgatcggctaggattagatcgcgacggaatatgaccctggtcgtccgatcgggatcggatgacggtcatcgctctgggcttcattaaaccaagggcgtcggatctagatccaacggatcgcgtagcataccggttcgccgtgatccagatctaatctcgagcgtccaagttcaatcatgcggcccatattagatcatacccctttggattgggtcatttacaaaagaaaccccagagagtaacaaaattaacccgcggcccagtccagagatcgttaaatc

SEQ ID NO: 58005 - DNA, 373 bp, Zea Mays
gtaataagcttcctcgtggacgtgtccgtcttctcctccttcgtcgtcgtcgtcatcctcgtcatcatcgtctccggagtcgtcggaatcgtctcctccgggtgcaggtgcttggaaggctggtgcagacgatgctgacatcgatgacccagctgcgaaagccagggattcgaccaacggagtgggggtcggcagctgttcctccgagctgtcctccaggttgattacattctccactcggatgggagggagatccgccggaacttcctcgactaccactaggtagaccgggatctgccggggatgaggggcgtagctggtgttcacacgggtagtttggagggtgcgaaccatctacaagagaagtgtcaac

SEQ ID NO: 58006 - DNA, 1011 bp, Zea Mays
atcatgagccatgggccgttggattaaatctggacgacccagattacatcgcgcgaagggttagactcgctctgatccgtaccacacgatccgcaatacacgactcggatttaaaacatcggaatcacatcatggccacccatcatccgatcgatggctggggcacactctgcccaaacggcaagctagaactaatccggacagtccatttccggatcaacgctcaaaacctcatctcccccacggtgcccagcagaggcggcgcccggtgtcgtgcccgcgatggtcgccatggccggcaaccagaggccctgtgtactagcctgaccaagtcgcgcaaaacggaatgaagaaggtagcagcgcagtaactaagatactcaccggctacagagacgacgacaaaggctacaggcgacgctcagacgacagctagcgaagaaccatggagagcgtcaatccgccaatgagtctaggaagctgctcgagcatgactttcccccttttcttggcccagcgaagcacccgagcaatctaactgcgatatcagcacgatagcccgccccgacgacaatccctcaacgatgacgcttggttccggccaccatctagctcgtccttcggggtagcttcatcggaaagggttgcggccaagttttatatagcgccatgacgagtccgtggtgagaatatatcgcttggtttttacggcttaggaggttgagcgtaggaaaatctcaccccgtcgagtatatcctactgcttgggattggagttgagtccgaccaaggggccacaggttagtgggaaaccgggtggttgagcgaacgcaggaagcttgatcgtggttgtaattcatagccagggagacattaatgtaactaatccaacggatgacatggacgtgatgtcgtagtgattagtgaagccttcatcggctagggggaaaaagaaccggaaggaaatatggttgtgcacacatgaagtggactgatgggtctgtaacttggcc

SEQ ID NO: 58007 - DNA, 693 bp, Zea Mays
ctttggtggtttgtttcagtgacgatgtattttggcccttactaaggacatgcgaccggactcagttagtctagcccacgagcacccaaagtgaatgtgggttcatttggagtgtccttcgactaggacacgtgttttttcttgtagacatcgttctgtgatcgtgctttcaatctcgctttgcgatgccaacccctgggcctccgctcattgcggtggattggtcagagagttgttttgtctttgtcatcgtcatcctgattgtgtctcatttgctagagatggaggtgttggaccacgcctccactttgcctcagtggtacaaagtgaggagtctggtgagctagaaacgagtttttccaaatgacggttggatcacttctagagggattcgatggattagctagtgattagccatcaaatttctcgacttccacccatatacttcctaggatcgttcgactgatcctaatggctctagtgtctttctttgaggaaataatcatggctcggaagtcaaaactagaacaggggtcaagatcccatttggccacttcgaagtctaggtactagctggtgggcccatctgttccatccctcactcgggtggtgccctagagtgattggtgaacacttcgatgggccaactatcaagcccatggcctgctaatggaccatataggcatatacatg

SEQ ID NO: 58008 - DNA, 840 bp, Zea Mays
aaaatgaacagaatgtaacaaatatgcaattgaaaaaattggaagccattatcggatactacatataatgaggcgattcaattaatttcgaatcaattaaagggatgtagaaggggcggggcgaacctgatggacattagcgacagaactatgtaaaagaatggggggaactcgaaagaatgagaggggaaacaaaccagggaaggagaacgacggcggtgaatcgatgaagcgcggagattacgacggtggaagaggtgggggcggtcgtcgatggcgatcgcaggagcgaatgacggcgacggggaggaactgattattttagggtttgggtggacccgagctgaattaattgaaaggggtatgatttgtctggctcgttgaccatattagctcggttggcccgcgggggagcggcgagggactgtgggtccactagtcagcgcacagtcagtgtgaaggtttggttactgcgtgttcataataagcataaatagctgtgcaaagtatcgtaaacagtttacaaaaaagaattaatcaagacccacgccaaagtacgtaatataataaatcccaattgatatgtagttgttaacatcgaattatacaatgataaatcccaaatactacaccacaccgaccaggccgcatcgacgtgtcaatttatgtaaccgttggagtcataatatgcaagtataaacgcggtcaattccaacgcgggacgtgaccacgagccggagaactcgcgtggaacgcgcagactcaccgtggtagttacgcgtttatgcatacagaattcgagtgaaacggatgcataaatggtaatagagggtgcgcacg

SEQ ID NO: 58009 - DNA, 535 bp, Zea Mays
atctccggccacccgcgctacctggtcaaattaagtgccaccgtcgaagcctcctataaattgagcccgtgactagcttcgcaacatcatcacccactcagccaccgctaatcgctagcaatcattcgccagagctcgcgaattttgaattcgccccaaatcagtctccgccgccgtgaatcacaccctgtcatggccagccctccccaggtctgctcataccctccttgttcctattctagcatctttacatgatggtgatgctccccgacccctttaattgaaccggaccgcctgagatcgccgggaacacgtacttttgtcttcatcgtccgcggttcacgtggacagggcttgttagcttagcaattgtgaaattaagttaggggaaacatttgggaagggttcaatccggtgtacgtcgctcgggagcactggtcgttgcgtaaatctgccagtgcaacttcaccggagttcatcctccgcgctgccgtcgtcgtggacttcacctcgcgaagaattagaaaccggaggg

SEQ ID NO: 58010 - DNA, 314 bp, Zea Mays
atggaatggaagagagcgcccgcatcaccaccatccaatcggaaaacgcagcgtgtgatcgagctactagcttcggaaattcttttccttgtggaagtcatggccacacgccggcctgatgactggcatggcatggcaatgcgaaggggagaattcaacgtgtcagcactgacacgcacgtcgtcaattaaacacactccatcgatccatctgtccgtcacactcagtcagtcttgtacatggaaaactgacggtgttttgttcttctttatttctttgtttctttgtatgaatgtgtatgtgttatatttgat

SEQ ID NO: 58011 - DNA, 441 bp, Zea Mays
cgtgcagtgacgtactgcaggcgtagaattggagggaacattgagcggctatctatagagagaatcacaagttttttttgtttataaaaatagcttttagacttctcgatggagctgaggcatgagggtcgttggccatgctagattttttagggaaatcgaaagctacaggaacgtagggcaggatgggaacaggggtacgatctgggtccgggtccgggctgggtcccacccctcccaccacctcgtctggctgcctgctagagtatgtagcaagattcgggttgcatgctaatcctagaggaaacaaaccatgcatgtacgcatgtttggttgtctacaaacctcgcaactgagtaataaacgccatagttatagagtatttggtttgatgaataagttagactatcatcttctcactccttacttttttgtttaatt

SEQ ID NO: 58012 - DNA, 485 bp, Zea Mays
tttccaacgggcggacggtccgctcttgaggtcggacagtccgagcttgctcccggacgttgttcttatctccttcgaatagtccgtagtagaaatgtgagttttgcatagttcttgtccgaggcttatcgaggtgtcccagaatattcctcaccacagggtcattacagcgtggccctgagccacagtagagtaaagcatgggccccacggacggttctcgaggccttcgcccgtattctggatccttggctttgtcggggctttgactctgctgttgagggagaagtcgagccttcgggacacgtggcgagagtactgcaagccccctcttctcgtgtggcccttcgctcagccttctccgatggtcgtggtcgaggactccgacgctgggacaggatgaagtcctccatcgctgctgaccctatgctcatacatggttagtcgtatccggataagtctaatcaaggtcaggttcgcccgctc

SEQ ID NO: 58013 - DNA, 455 bp, Zea Mays
cgccgtcgggtaaggaggtggtattcttgggaagttccccgaagttcacgttatccttgttggcgcaattgcttcctgatcgccggtcaaggaagtcggggatctttttctccatggtggtggagggtgaggctgccttgcgggtgcaggacatcctggtggtgtgtgattttgctgacgtgtttccggcggagcttccaggcattcctccggagcgcgatgcagcttttgagattaagctgatcccgggtacgcagcctattcataaggccccgtatcgaatggccccaaaggagcagattgaattaaagcggcaattggatgatctgctggctaagggcttcattaggcctagcaggtctccatgggcttccccggtattgtttgttgagaagaaggataaaagcaagcggctatgtgcggattatcgcgctttgaatcaagtgacaatcaag

SEQ ID NO: 58014 - DNA, 345 bp, Zea Mays
atgtccaaggtcttctagagtcggttttttgaagccacagccatcgcatccggagggcccatccaagctctgggaggcttgatattcccagacctccaagctgaagaggacgacacaccttgccccaagccaccaaacagtgccccctttagcttcctttcttcctctccaaagaaatccctttcttattttatcaatagcatcaagggcccaatggggtatataaattgccattgcaagatacacagtcatacctgtaagaacatgttgcactaggattctcctgcctgctctggtcatcaaatcagctttccaattaggaagttggtcagcaaatctatcaac

SEQ ID NO: 58015 - DNA, 738 bp, Zea Mays
gggctccacaccgcccatactgcctaccataaatgacagagccagggaagcccagacgaccggggcacaaagtaataagcatgatttactgtgggtagaacgcctcgttttaccacggcctggtagctccttctaagagaaggaaccaataatcgacccctaccttggtctataaaaggggagagtagaagacgaatacaatagaggacacacaagacacacaacacatgagggacagacgaaccagaagacccagaggaccatggaggccggagccgaggagcaaaccatcatgatgcccaaggcttagcagagaagctttagtctcgtagtccttaggtctagccatgcataagagatttgggagctcttcttccctctctcgtctgcttgtaacccctactatgaccattgagcaacaactgcgctggtagcgcaagccaccgaagactggatgtagggatgttctacccaaaccagtgtaaacctcgcgctctcttagcacaccattcgaaacctagaacgtgcataaataaatttacttgtcggagcaaggtttgaaacatcgacatttggcgcgccaggtaggggctttgcatgttctcgatgaacactctaggctctagatggccagcagcgacaacggtgtagtttgggcccttggaacgaccattcgttttgggagtctcgacttcatcgtcgacgattgggaacgatgatcagggcctcgaaagctca

SEQ ID NO: 58016 - DNA, 454 bp, Zea Mays
gctatagtgccccctaacatggcaggtttggcactctcttatgccctgacccccactgtatgtgttgtatggattagcaggttccacactatttttagcacatttagccccactgcagacttcctacccttcgtgcgcgacattggcggttcagtcaatgttagatcagcgaggcagtttgcagaacctggattgaggcccgattctggtggtggtgtaggaccagtgggcatcacaacaggttccatattgttgtcagaactttgttgtgttggtgcaatgggaccaatattccgccgtccatctgcatcttgctgcaactcagtatttgttgcttcatccggaccaatctccgctgttcgtagaagctcaatcccaggagttatcatgtcgatgtgcctgatagttttagtgtatgctctatcagatttgcttcccgctcttcccagacgca

SEQ ID NO: 58017 - DNA, 410 bp, Zea Mays
gtctctcccatcagcagccgcagagatttcctttttctgtaagaggctagtcagttccaaccccagaggacttagcggagcgaacgagaaagactcagtcattaccttcaatatttccgagacctccacaggagaagacgaagggctcgtagtttgcttcggcatatcttgcatgttcgtcttctcaaaggatttctcagcaagcttccattttttgggagccgatactttctgctctggcacattttttctcttctttgaagtctcttggtcttctttgacagaccggacaccttgcccactcagaatactgacaacccttttcctcttgactcctctggccccttcatcaagcctttcgtagtcagggtactcaaagttaagagcatccattacacggttcagccttt

SEQ ID NO: 58018 - DNA, 514 bp, Zea Mays
ccgcgacatcatcttgcagtcatcaatgtcaccattcttaccaagagtggggacaaaagcagaatctgggataaattctagaatatcattgatcatgtcaggaagggggaggtgatgaatattgttctctttatgatgagacaactaaatgatctcaagatggtaaaaaacagaacctgacatatgctccttatattatggctctgtttaaagccaaaaccaggtttgaagggcggtgtgaaatagctcacactccatttaggccatttaagaatgagattgattttcttaccagacccctcactcattttctttatggtgagggagttcaggcgtatccagcttagcaaatgcctcctcctccacctcctcagcagcaaggacagtactagcagcctacacctggatattgtgatccttattttcaacaaatgcagcacgggctccagacacatatggatggtcaatttcagggcatgatgtcatatgtcgatgaccgctttgatcacatgca

SEQ ID NO: 58019 - DNA, 467 bp, Zea Mays
tgccatcgaagcaaccagcgatgaattgtttggtgcttattcaagaccgacgatgatgctatgacagcggccttcggaggtcgaggcaagaaaaggttgaatacggtttttgatgtcattggtttcgtatacccaaattactgttatccttcgtgaaagtaaggaaagaaaaggagagttgctgcttcgacgatttctactacaccgaagctgaaaaaagttaaagttttgacacatcgccccaagcgtgttgagacggccgaagagccgaggcctgctgaacggtcttcttctgcttttgagtcaagtcacttcgctcctgccgaagctaagacataatcggccaaagagccaaaaccaaagatagcagcagagcagctgaaagctttgagtccattgcaagaaacagaactaccgaaggtaccaaagattgcttcagtaactctgaagagaagaaggatggccag

SEQ ID NO: 58020 - DNA, 743 bp, Zea Mays
cggaatgatactgtttggtgagttacaagggcgcattagccctgaggattcaaacaaaaaatttacgaagattatcgatattataggaatgctctaggtcctcgccggatggcgttgttagcctgtacacgctgggggacgccttcgtcttgacgatgaagggaccctcccactttggctccagcttgccccgtgactctatccgagttgtccggacgagtacgaggtcctcgttgttgaattctcttgggacgactatgtggtcgcgccatgcctttgtttgagcttggtatttgttgagggcctgcaaggcgaagacacggtctccgtcgatgaggtccttagaggttggttcgtctatgtcggggacggctgaagcgcttgtccgtggtgacccatgttttatttcctacggggtcatggcctccgatccatatagcaggcggaaaggagtgaatccagtcgcccggcactcggtcatgttgagtgcccagactgcttcaggtagcaggtcgggccatttacccttcttgtcgtcgagaagcattttcttgatggccgtgaaaattttgccgttggcgtgctccatgacgccgttagattgtgggtgatatactgaggcgaaaggcaagcttggtgccaatggagaagctgaaagtcctgactgtcaaactgtttgccgttgtcaactgtgagctcggacgggactccgaatcggcaaacaatgttttgccaaaagaatt

SEQ ID NO: 58021 - DNA, 595 bp, Zea Mays
tatttctccaatagccattgtcttcatagcatttctcaattgagttccaccaacatcatcaagattatcactttcatcttgagacccattagtttcatcaaactcaacatcatatgcttcttcaataataccatgagtcttgttgaaaactctataagccttgctatttgatgaatatccaagtagaaaaccctcatcacatttcttctcaaatttagagagtcggcttccctttctcaaaatttagcatttgcaaccgaatactctaaaatatgagatatctggctttctaccaatgagcaattcatagggagttttcttcaagagcctgtgacaatatagtctatttgatgagtgacatgcggtgtttattgcttcggcccaataagaatccgacacattatattccgctaacatagacctagccatatcaatgagagtcctattcttcctttcaacaataccaatttgttccggagtatatttggaagaaaattcatgtttaatacccttgtcatcacaatattcatcaattctagcatttttgaattccgacccattatcacttctaactttcttgatatcaaaatcaaat

SEQ ID NO: 58022 - DNA, 833 bp, Zea Mays
tgaagctagagaaaattgccattccattctactggtgattctgaacatctgaattgactatctgtttggttccctgtatagccatgctttgctgctttttagccatgctgctttttagccctctcttctttactctttgctttgctgctacatactcttgctggtcacaagcagtacctaggatcaatgatgttgagctgagttctatggttacttttgaatatattcatacttgtttattagtttctgagctgtcgatcaatggtatatgatgcttcaatgcctctgggtggcgcatctcttgtatgtcgcagccgtggctcgtgtaagaatctgttttacatatttgcaactagcacatcactgtttagcgtgcttgatcatatattttctgagctatagatcaatgttctatgatgctagtatgcctctgagctatagatcaatgttctatgaatttcctttttagcaactagcacaacacatgtgagccaacttagacctctaatcttcttttctattttattactctagcaatggatcctgctattgcacgccgtcggctaattgcaaaggcagtggtccttgtagcagttatgtcagcctggttggatgcatggttgaggcaccgactgcatgctaggaggtctatcacttatggcccaatgcaccaaagagaccaagagaggcaaaacaacctgagatttatttatgaatccactgatgttgagtgtgtcgacttactcaggatgagaagagccccttttatgcagttgtgtgacctttttcgcactaggcagctattgagagatagcattcatagctcagtagag

SEQ ID NO: 58023 - DNA, 515 bp, Zea Mays
ccccacctctcatcatcccgctcgctgccatgtggacccatctgacctaccccactcgccaggataggggcgaggcggcgacgtgtcctacctgctgtcccacccgtagagtgcaagggagcctatacttcgaagacacgtacgtaaaggttcactcttactgacgtgtgggactaggcattctcgttggcccaaatgtcggttcctgggggttagctatgcaggagaagttgggcgagaccacgaggaggagaaggagaagtggacaaatgagagctcgcggagtgtgcagcgctttatggtggggactggaagatggaacacgtagggaggtctgtgggcccgccaccactgctttatctccctggaaaagacccggccaccaatattcatcactagccccacacaggcacttgctatgtacggatgacattcctcaccgatcagtgggccctggtgaagtcgctagatttctactctccgcatctcttgaaaaagtatagttccggttattg

SEQ ID NO: 58024 - DNA, 357 bp, Zea Mays
ggccaagggtggggaaaagggggggttggcggccaagaaaagggaaaaataggggggcgaccactagggttttgtgggagaaagaaacgacgcctcagatgtctcttgactttgcatccaacggcccacaactctttccccacatccacgcaccgaagatcaacctttggcaacatttttttaggatattacattcttttactggagaagaacttcttctttcttgaatcaaacttgatgccttttctattgagtttcttcaacattttggtggccttcctcaccatcaaagcaatgttagcatcaagatcatcatcccttgaggattcctcctcaatttgcattttagcattccct

SEQ ID NO: 58025 - DNA, 305 bp, Zea Mays
gaaattccgatacaattctaatttcctcaatcggattggcctccttgtcatctactgataaatggtgacatgctccttcttctagttcaggcaagtacaattagttactacttcctttccggatggggacaccaacttgactgttctcttgtcgcaactgacggtggcttggtttctatgtagccaattcatccttaggatggcatctaaccttgagtacccattactactaggttagcggggaagtctatcccccttatttcaatccttagattcggacaaatcctatcggactgaacttttcc

SEQ ID NO: 58026 - DNA, 814 bp, Zea Mays
cccagatctaatttcttatgagttgaagccgagtgcgggttgaatagtaaaaattaaaggggttcttttacaaaactaatgcgaccgaaggggtatcatgacatgtgagctgcccgatctagggttaacggccccaattagatcgatccttatgtgaactggtactcaacgatagccatccgatccacgatcggtggccaggatttaaaacaccttagatctattcccgaccattcccccacacaggccgagtgccccgcgcgcgacaccgccggatgctacggtggtggacattgcgatgacagccaatcttcaaccccgcacacaaaatttcaaatcgaggaaagctacacgtataggaaaccaaggcgaatgattcagaggagttattaccggttattggctaatgcagagccctgtcttcggtgtggtgcgaatgatggaaattttatgtagtcaggggaggaattctcacccgctaggcttcagtcgtccctcgtggcttcagtcgtccctcgtgaatcttcttgaccaccagtggatcccccgaatgagggtatggacgaggcgcgacattggcagcttcgcttctttctctctctcacgtggcgctctctttctctctcaaccctagggcttgacggcgtttgaggtgatggccgaggggggtgtggcaggtcttggtttatatagccgcaagggcacgtgctagggtcgcaatggcctaacaaccgtgcgtcaaccccgacgccacgatggtggagtttggcgcacaacttcaagaagattgtggtgaagaaaacgctgctaggag

SEQ ID NO: 58027 - DNA, 595 bp, Zea Mays
gaataggagagctcaggtgcacaatgaaacagtaggtagggaactgtagcgtctcgttatgcctgtcccatccgtgtatagtgtggggtatttataggtaaccgggcaggtaggtgggtccacaagtaccgttataccccagttacctgccacattcccggaatattcccctcaacggggtcattatagtggggtgaagtatagtaccttagacatactctggaatctacaccattaaggggcttataaatgggctcggatggtgacggagcggagcctgaatcccactgtaatctggcgtggccttcgcctacaagttgcaccctcgactccacgaagtcacgcccttgactttgttgggacatggacttctctatcgaggaaagaggttgagccttcgggacgcgtgtgtggagctgcagtgagcctcccttgactagtgttgctctttgcttcatcccctctgaaggccgcagtcgatgacctcgatgctggtacgagtcgaagtacccttcgctacttgtatctgtgccaaaacatgtttgattgtagctggattagtctggttgaggatgtgttaggccttcgctccagc

SEQ ID NO: 58028 - DNA, 385 bp, Zea Mays
ccactctcgtctaggacatgtttcctatgctcttctgtaatttctatcccactacgtcgcttgggcagtcccttcgtgacgatggtgcccttcctaaattcctttctctaccttctgaagggtgattgaagggtagaaaacatctatggcaatcaaagtaacatatcttgccaccagcactaagacgaaaacaatctatatctttatcacaataaggacacgtcaatctaccatgcacgctccatccagagaaaataccatacgccataaaatcatgaaccgagaacagatatgcaacacgaagattgaatttctgcttcttgaagcagtcataggcttccacaccttgccatagcttctttaactcttcaatcactggttgaag

SEQ ID NO: 58029 - DNA, 648 bp, Zea Mays
ctgacaggtgggcctgggggttgaggcactgacacgagggttcttgtcggcacacccagatgtgagatacaaagcatgttttacggaggctcagctacaacagacatcctctctgcatgaaccgtggaccttgacacctaccaggtgcgttacatgcaaacgttttaatgaacatggtgcacgcttatttttcaagtctgaagtcatggagaagatgcggagccttttgaacctgagccaggagaaggccttgctgtcggagaaaggatctgcaatgcaagagatgtcgttgagccagttttggcgatgaaagaagaagatatgaagctcatgtgttggtcgacgctgacgtggggcatgtgaccattgagaccgaagcggaggctgtcgtacaggcgatgtgctcgtgtgcgtttggccttcggtgttgtgacgaatctctatctctttgctgaactgagaagcttgctagctcttaattttatttcatggtagatccagcgtaggccatattgaattggctggatttcgagcgatcgtacatatggtcgtgcacaatattatatgagagctgttggagatagtctaaacgattattttcatccaaacatacgagctaattgagggtcttgatcatgcatgtgaaag

SEQ ID NO: 58030 - DNA, 354 bp, Zea Mays
cgactgtaatgccgaagacgcatacagtcaaggcagtcgaagataagattgatacggctgaagggtcaaaggctgaaatgatgcaagtgccaaaaattctgagccctccgacagaggcaacactgccgaaggtgcaaaagacttctgctgcaactcctaagaggaggagaatggccaacatgctggatgctatgctggaaactacgaaggcgctgagccctgctcctgcaaagaaagttgctcaaactgaagccaaatcataggccgaagcagaaaccgggcaagcagaagccgaagctacacaagctcaagctgatgccgaagctgggccttcagtgcccaccaagatggagc

SEQ ID NO: 58031 - DNA, 379 bp, Zea Mays
attctatagtggatttagtgaaaataatttgtactgtggatacgttcttctttataaaacgttgaaacgttttatgtccgacccctggccctggctatagctactcactttgtcgtctcgtgttacacttacacgcaaaaatatatgccaccgtccggtgtgcatgcgtccatcaattattatcaatgcattctcagccccatgcatcatatatatttcacgagttcagcccagtcgtccccttcagtgcgcatgcatgccattagctagttggcccatctcgatagcgttgcaaccttggccctcaagaagatgccattagctagttggctctctattgttttcatggatttcattcggtctccgatacaaggctagc

SEQ ID NO: 58032 - DNA, 448 bp, Zea Mays
taattccagaggtctcttatgtaaaatgaagaggcgaaggggtatcggccgcccagagtcgtccgatcacgaccgatcggacgagattagaacccggcgctatatatacgttgcaacctgccctggccatcatatctgatatcaacggatgagggatgcccacgccctgatttgatcccaaccctgcacccacgatccaacgaccaaatttcagttggacgaagaggtgggctatcttctaatctcggccgcccagaaagcgatcaacggcccatgccttttcttccccacaccactccacacagctgtggtgtcgccggagcggcagcgaagttcaccggagaccatgattccggtgcctcgagcactaaactatggtccacacaacaataccggaagcccggtttcatccgaagtcagcactctcccacacaacactggatttcta

SEQ ID NO: 58033 - DNA, 429 bp, Zea Mays
ctctactttaatgaaaagcggtggtcgagtcttagagaatttcaaataagtagtatcacacggtccttgtgggggaactctgccttcgtgcggttgtaattgattgcccgccatttcgcgcaagaagcgcgtattatcagcggtggcattcaccagggcaacgatagcctcgaccaatgttggtggtactggtggcgggttgggagtatcctccccacctcgggatgtccctgcaccatcatgtgcgtgagtccgtgatggcatctaaggcaaagaaacatttgaaaaaaatataacatgccaacatacaccatcatattacattaccaaaatgtaataattatatagattcccatgtacaactagactttactacttattttacataagtataacacttagactatattattctagtcttcttcatcc

SEQ ID NO: 58034 - DNA, 638 bp, Zea Mays
gaccagtccaccaaacaatagcaaaatctttaaattcactagtggcttgtctaacttgatgtcgttcaggtacaaggtgggcagcaaatttctgttctatcatcatctcctaatcaagatatccctcagcatcataatgacccaaaaaaagatggtatagaaaatttaatcttagcataagggtcgtcaggagcacgattgttattaccttgctggcggtgtggcataccttctgtgttttgatgaagacgacgacgtaggtgcaaatctctggtggccgcttcatcataattaccttcttcatcaaacaccgcatcatcgggaagacgtggacgaggaggtggtggtggcggtgcttgttgttgcgtctccaacatagcaagtatgtcgatgatctgggacaatcgtcgatctagcctctcgtaagtcttgccaaggttcatgtcaatgaaggcgtcatgcactgacttgtggaccatctcccccatttgctccttcaggagcttgttgtttgcctccagatcttggcggctaacacattcatcaaagtctgtagggatccttgcttcttcttcgtcgcctgccatcgaaacacaaaaaacaggaaacaaacggtgacagttatccctaataatttc

SEQ ID NO: 58035 - DNA, 797 bp, Zea Mays
aggaattgaagcagtcgcgatgcagatcctgggctcaccgtacatgtgtgtggtcttgcccggggtgatgatagtcgtgaaccgccgtaatttctcgccggcagtaaagatccggggcatggcgagaacccacggcctcgtgacgttgacgttggtaagatttaccccaccttgtttgcattaatacccactccgcgtagcacccttcggattcgaggattaaactagggagggagaacgagctgctccggctgggtctccaccgtgggctggaggtggcgccgccgcatgggtggtgtctgaggttggggatgatgtcgtgaccgtcgatcgaaatgtggacgactcagattagagcctcgcgaacccattcgcttgatggaatctggatccttggatccggatcgggtggactggagtgcgtaccgcttcatcaaaacccttgtttgatcacaggcgcaggatctcgatcctacggatcatatggaccgagacctttcagtgcgcgtgttttacattagagcccccgaactccttacaaatgaacccgccgtccatctggcttgattctgagtcttaggacttttatgcgttagacccctgaacttctctgaaattagtgtccagtccagtcagtgaataaaacttgtaaaatcatttataaaatgattttttatgtaaaaataattattaaaacttgtttaaatcatataaaattcatactaagtccaaatgagttcattttaatctctataattttgtaatattattgttcatcatttagtatcactgttttc

SEQ ID NO: 58036 - DNA, 288 bp, Zea Mays
gagaacatcgcgaatcaattgtgggagttcttgcctcaaacggtggcgactgcagtgctgaccacaacgagttgcggaaccatggcaaagttctgcgctagtgagcaattcctcgagcccagtgcatccccctcgcccgatgattgcccgcttgccacccgcatggtctgccttttaccaaggaatgctagccaaggtccatcggcgaccacagctcaaagttcaccccggtggaactctcctcccttaggctgatggtggcgccgaaccgcatggcgtgaaggtgcg

SEQ ID NO: 58037 - DNA, 629 bp, Zea Mays
tcagggcttccattacctcttctctatataagttgaaataaaaatggatcagaggtagtacatactaagttatgaaacatttaaaaagtaaaataaaattgtaggggttgtgtcttacgacaagtgtaataattaatttattgctagcttacaatagctgtaatttgcatgacgtactccaagccgctaataacgttgtggtcacttgtccatattacggaagtttgattgccagcatcacgcctatgccaatgcttatccatttgactagctacaaactagtcctcgtttggcggtgagtgtcacagcggcgcagtgaagagtttgcagcatctcatgtgcagggcgggtcttgaggtttcatagagacggggcgaaacaaaaaaatttgtgccgtttaagaattatatatatacacttttttctaagtacataaataagacggcgacacgacaattaaaattccagacgcagttttgataagttaaacaattgaaaaacagatttattataactttagcaggccgaatcaaatacctatgactatatatacatgtgcactacttaaggacccttctagaattagggacccggtggagccgctccacttgcccccctccaggtctggc

SEQ ID NO: 58038 - DNA, 300 bp, Zea Mays
gaaacatgagctcggcgtaaccgcctcccggtagattcgatgcagtatatatctatctctattagcttcccatctgtcatcatccagcgtcgtcagggtaacaaccaggcggacctcgtggcggcttctgttcttcttccccaaaattggaaccaaagtgggttgtttggacacggagagatctgcgtggtattcaatcgctctgggcgtcacctccatactataaagccttggcacctccctcgacgcctcgtccacctcattcaagttcgccgtgcaccaagcagggagagagaaaaa

SEQ ID NO: 58039 - DNA, 312 bp, Zea Mays
atcggcgacaacagcgacggcccgcggtggcgagcaggaactagccgaagggaagtagctgcaacgatgagccggacagaacgggagccctacgactaggctaagctggagctaagcaaccaacaaactttaagatatgtgcaagtgtacgtgtcgtcaatccagggctggctgcaaagctcccgctttacatacggtctgtatagaatttttttccggctggaggaagcctccaactgatggaagaaggagcgcttggctacttgcaggggagggcgcgcgtgaagataaaggagcaggagacgatggctg

SEQ ID NO: 58040 - DNA, 729 bp, Zea Mays
gcggaagcgcataggtcgaagcccggacacgcgtcagtaccggacccttgcctatacttgacataggtcagggtatcccctgttccacgaccttgttgtaggtggtccagacctcactcagaggggttcggatcccacccaaggggtccggcttgcttactttggagtcccggaccgtactcggaggtccgggttgagtgtacaggggtccggtgctctctcgtggaggtccgtacccactgatggcatcctggagtatatcacctcttctggtcacgtggcgtccttggggccgcccacgtggtggcgtcgggcgctgctcaccatgcggccagagatagctgcacaggcaccgtgtcttcatactgtagtaaggggtacccctgattcagggtaccgacagtggcccccgagcccgcctcaggtgagggtacgagcctgtaggtggggccaaagtttgattggcgattggctcgctgcttctttgtgctcgctatcgtaattaccgctagtccaccttcggtcacgccaacttttacgcctgtccccgtagctgactgacctgtcgcctttgcacttgatggttttgctaggccatgcacggggtgcctcggtaccgccgcattggatttgaaaatttaacttctccgtctcctgcggcggccccgaggaagcacggtactggcgcgagcggcggttcggcttctctgcacccaggaaccgatgcct

SEQ ID NO: 58041 - DNA, 366 bp, Zea Mays
gtccctaacccctcaactgtgcgctgccatgggagaagtgggtgatcaccgtcgttgggtcctcgggagttggtcggcgtgcttcttcaagtattctggaagagtgttgcgttgtccgcgagtggagaaagcctctgcgcgtggagcaattcctcgtcggtcttcgcgggcaccgggatatcgcccctcgccgcgggtagctccccagcgaccgtctctagccccggtgagccatccatcctcttggttgtacctgtggcactgtgtaggttgtcgggattgggggaattaggggtcctagctctagatttggcagagctccggccatgggccgtcgccactccaggcggcgccgtcgtggttggt

SEQ ID NO: 58042 - DNA, 452 bp, Zea Mays
tagaaattttatttggcactgtaagaaatctaataggcactcagggggtatcttgttaggcatagatctagatttgttcgatattggggccattgatgaaggagagttttatgttaagttcattttgtgcaataaatatgattgcttcaagtgggctttaacaattgtctatggctcgacccaaaatgataaggaggttttttgactgaattggtcctaatggcgagtcatgaaaccttacctattttaataggtggtgactttaacattcttcatggacaaaatgagaagagccaatggaaatttgaacaacgctacccttttttattcaatgcagttatcgatggccttgatttaaaagattggagatatcgggtagacgatacacttgggcaaataatctcccgtgtccaacttatgagaagttggataaaattttagttgccactaag

SEQ ID NO: 58043 - DNA, 549 bp, Zea Mays
gtgaaattgatgtacaaagcaaactagcagtgccatcagggggctggttggggccggctactagagaatatatgcaaattactgatgtgcattgcatagatcaattgtgtattgcatgttgggggtggccggatcactctggtactagaatgggggatatggaagtgtagcagttttctgtgtgtgcaaaacttttaaatgtttggaggatgaattatgacatgtgatttagtcttgtcgtttcttgttctgaatgtagaacgcgatatgaatagaagattcaatgtatatggttgagtatgtgttactatataaatggtcgtcaagggaaactgttaagtttacccttcctgttgttgaaatactgcatgtcactatatcgctggcccaaatttatatgtgccttcattctctgactataattattttgtatggacaatctacaggcagtgggttaacattacatttagcctcccatttgcagtatacaactcttatgtctagagttaccctttactactgtctagccaaacaaatatatgtagaatg

SEQ ID NO: 58044 - DNA, 777 bp, Zea Mays
tggatcatgcacatttacgccgaggattgggaaggcctcagccgaagtcatcgagattgtcccgtgcgcgaaaaataagtggggcaactgctgggaattttggttttatgtggcgcccagtgatgtcgaagggttgcccagtttgccccctaccatattgtgcttgcattgctatgtggtgtttccacattttgaggtggaagaagaggatcaagacgaggggcccttcgctacgcagcccgcctaagtagtaggcgtgatttggtggaaaagtttattgcttgtggggtatggcccttggtgcatggttgggctttgggtgagattgccccccgtcgaatgccaaccttgggtggccaattggtgcgaagtctggcattcgctgtggagctgcgcgggcgagatgcggttgcattcgttcgtgaagtggaggccgaagccgtcaagattgtcggtaaatatgcgccgaagaccgaaacgttgaggagctaagatattcgcgattccaacgtcaggttgaaccatgtattcgaactgaataatctaccttatggtccttacccggaggggactccggcaacaccgttgatctccgagggaagcaagtaaagccccgggccaatgaaggcccctcaagggagaaagcttcgggtgcagctattcgaaagaggaaattaggtacggcagatgatgagatggggctgagggctactgggcattttgttgaggaattgatggaaacgtgcgcggttcccgaggaattgatgtcttcgtccg

SEQ ID NO: 58045 - DNA, 407 bp, Zea Mays
gatctccgcatcgtattgcaccgattcgtataggtagtagagccctgaatcaccattaggccgacctccggtgaggtctccaccgtgtgagcactactccaccggcgcagcaccgtcgagttggaagggatgagccgatcaacgttgatccagtcgctaatggtcacgattagtttgatgagtactggttcattcattaaatgcccgccatcagatttcgatcgatcggctatggtatcgccctctcccgcggccgtggatctttgatcctatggatcctgagcgtaccacttcgggttataatacagaccgctggatggagatcggacggcacaattgtaaccgtaccccttcggttatggagaattgtaaaagaatcccaaggaacttgataaccaacccaccgg

SEQ ID NO: 58046 - DNA, 578 bp, Zea Mays
cgggtggccaccggagctcccaacaactgcagccgttgttggcaaagcttcagctagctcttggcgcatccaactttactgtgcgctataacggtgacatcaatcgccttgtgacttgagaggccagcgaaacaccggcagcttgaatgcaatcaaacagttgggcgtcgcatcagtgatcaggcggtggtgatttggggcgaggtgtgcaagtgggtgggccggggcggcaggtggggagcggatgagaccagaaatggataggaatagatgatttgtactactcctttcccatccacgcaccgcaaccgcaactggtggaggcatggaccctggagtgtctggatggaggagcgccggccctcgatcgcatgaagaagcagaagggacgtactccagtatgctttttggttgctcgtgcttcaagttcacggaagccaatacgtagtgatgtggctttttggcattgcaagtcaaaaaggcccatcccagtcgcgcactcgatcgatacgggtaaagtggacgctggctgtgcagtgctgcccgtgatcgccgccgacgcaatcaatataaagcgg

SEQ ID NO: 58047 - DNA, 292 bp, Zea Mays
agacagtactgcgtgcacttgttgtgccagctcttgtaatcaccatgggtgtctgtgcaattatcatgaagctccttatggacgcggtggcgagttctaggaaggctgaaatagaatgggagaaggagtatgggcctccgtcgttcacgtacaaagatctgtcggccgccacgagaggattcgaggacaagatgctccttggaagaggaggcttcgggagtgtcttcagaggagtgctccaccactccgagcagatgatggttgctattaagcgggtgtcgccagagtcgaa

SEQ ID NO: 58048 - DNA, 790 bp, Zea Mays
tttacactaagcctccggcggtaactcgggcagatgagtgaagagggttccagagatgtaggaagacgattcgctacaaactgggacatatgcgaatggattacatttatcacttgtgcggggatagccatcctcgatcgtgtatataaggtcgggaggcacctgtaccattttcatctcacctcagcccaccgtacccatagttcatagcttgtaatctcatcccaataccaagatcgtcacaggacgtagagtgttacgccattctcgcggtctaaacctgtattagcctacatgtctccctgtcgtgtcaccacacaaaccatcgagtcgcgatcaacaacgccatcctgcccaaaagcatcacgtaggtaacctcgtggtacgcagtcgggtaataaacaccaacacttaccatggagctcatgccttcactgttccacaagcacaacccaaagggtgccacgaccacgacaccacgatgaatcaggcgactacgtgtctttcactgagaacacggcgaacttcggcgatgacagactgaccatgtgggcaagtgggcacgacagatgagcctgcccagacccctggttcaccctcccccatgatcttttcactccaccgtagaattcgtccttagccgtgcacgaatcacagcattaaacatgaatcatggcacaaggtttgccaccagcgggtttagtgaacctaggatcttgttcagttaccattcccactgaatacccctttctaactgactgatagagccactttgaggtctttttactcc

SEQ ID NO: 58049 - DNA, 437 bp, Zea Mays
atatctaaaggtctcacccactaaaggagtatagagattcgaggttaaggtaaattatcccctcgctatactggaccctatgagatcaccgaggcatgtggaccagtggcttataagttgaaacaccaccatgcacgtctgcaatacatgacgtgttccatgtttctcaactgaagaagtgtgtttgggtaccaacaaaaatcttgaatgagctcgaagtagaaatagaacccgacctgtcctaacaagaataccctgtcaagattctagattgcaaggaaagatccactcgcaagaaggtaatcaggatgcattaaatccaatggagcaaccacacggaggaagaagccacatgggagactaaggactatctgagcaagaactaccccgatttcctacctaaaagtgttggtacgtaaccataccctagccccctg

SEQ ID NO: 58050 - DNA, 394 bp, Zea Mays
aagcacttggttggttctcttagtttggccatcgttttggggatgataggccgagctgaaattcaactttgtgtctaggctctcttgttgcttctgctagaaccaagatgtgaactggcatccccggtcagacacgatcttcttaggtactccgtgtagacaaactattcgtgccacatacaactcggctagcttagcccccgtataattagttcttagaggaatgaagtgagcaactttggttagtctgtccagattacccaaatagagtcgtacccagcagaagtgcgggtagaccaacaatgaagtccataccaatttctcgccacatccactgatgtatctttagcggatggagtaatccagctggcctctggtgttcagcctttaccct

SEQ ID NO: 58051 - DNA, 315 bp, Zea Mays
gttttaaaaggtcatttatgtttatgaattatgcatggggtatccatatttgttccacgtccaaaataaagaaaaatgaacatgatcagtagtttgaacaacattctttaagcaataacacgtcattccactatttgaggttgttcatttttagagcatgtttgatagtacaattttatatactatagttttgagatagatagtttacagtattcagaatattgcttaaagatggggcctgtttggttacattggaaaaccaacgtatggatcgctcccccttgctggcgcctctcatcgctgaccccattttca

SEQ ID NO: 58052 - DNA, 368 bp, Zea Mays
ttcctgttcttgcatttttcctgtgaagttactgcgttccaaacatgcaatgtgcagctgtgatagttggggttgggaggaaatgacaatgatatcaggcacatgatcaacccacagggattgagaactccctcttattttttatttgaaactgtggtgtatcttaacagcagtgaaccattcaccattgcatccagagggtttattcagaatgaaaaattatggacattttaccattggagaaccgagtctaactgtcatatatttgctgggcgaaatatttgaaagttgtctccatttgtgcgtcatgtaatcagatgtccttgttcattatatcatcatttatcctagtttaggttttttttttg

SEQ ID NO: 58053 - DNA, 396 bp, Zea Mays
aacaacttgaaaagagtctgaagcattatttcctgagtcactaacaattgcaccgagaccctcgcacttctattccttcacaacgcgaggtccgcgatgctgaacggcggagcagtggctccggcgagcctataccggccaagatacgcaatgaccggtgctcagaagtggttgacacctaatttgacccctaataatcatttccccttaaccaatttcaagattctaggccccaatctctctgcccacggtgacagtgcgatcaacggacaacttgaagcgttcccggtgatcctatgggttctagcttaatcaactgggtcagggagtatcaagagcacatcagagtactgaaacgagtgaatagagggcatgaacggacctgtggatcgctga

SEQ ID NO: 58054 - DNA, 494 bp, Zea Mays
aaaaggggttattcagtgtcgtacatggtctcgcttcggcatcaggaggccagtcattgcacttggaaacgacgtgcaagcgtgttaggcagcttttaatacagtgtgtacttacatcggtacaagagacttggtccaagagcatattgcttacagagtgtggccacttgcaaatggatgggaaatgccgaaggagactgcctatggatccagtcagaatggcttagtctatctgaagtatacctttcgatacagaagccagtttgatgaaccaaatgatgattggttggatgccatagaagcaacaagtgatgagatacttggagcgtattcgaaagcagaagacgaagctatgacaactgcctttggcgctcgcggcaaaaagaggttgaatagagtgtttgatgttatcgggttcgtgtacccaggttattgctatcccacgtgaaagcaagggaagaagaggaaagctgctacctcagcaacttctagtg

SEQ ID NO: 58055 - DNA, 333 bp, Zea Mays
aagggatagaaaccaatttcgacgtggaggaggtgtccctggctagccttgacgatcttcttagggagtttggggacaccctagaaaacgctcgcgcgtagtgtgatctatggcaattgtatgcttgtaatgaacttgagtgctgaataaaataatgtgcttaaaaaatatggcatatgcatagtagtaatcctttctcccctctcgtagatggcctcggataaaaccacgcctaccgcctcagggattggagcaaggtctcccctaggtgctgaaggagaagtcggtggagaagggagtgagacccacctccccgcacctccggagctgcca

SEQ ID NO: 58056 - DNA, 853 bp, Zea Mays
gcaccagggggcgtcaaagaaaagtctaaacctctatgttgggcatcactttcctaaaaccccatgtggaacctgatttccgttatattcatgagctttaaattatgcaacaaacctgtagcttagttttaggtccccttttgttatggatgacattcgaatcgtaagggactagacccatgggaaaggaccacgttcacgggggtggtctggagccggagtacccacttagcgtggtcccgtaccttaagcctacactctccgccaccctataacagccattcgagtaccaagttcttgactcctagaagttcagaactcgccctaacaaaaggactgatttccgaaactaagctcaataggatctcgttgcatacctaggaactcatgaatgcaataggacgtagttcctgtgggtatgctactaatcgcctattttgaagccatgtgtagggacaccctttgttcggatcactaggcataggggtcctaggctcgatgccttgagcaacaatgataatcaacatgcccaaagcaaagcataggtctggccccacctgcgggttcgccgcctcaccctagttcatctcaagctctcaccaatacaacacactttggagtagggtattacgcgccgatggctagaaccactctaagtctttgtgtcttcttatgttcgtctgtcttatctagctagccctaggctacccctgttcttaggattaggcgggcaccctccaccactcagctagagttttctctccgacagtttttatttttcttctcaccccaaacttttttgttgtgtttctacggtatctagaactacatgaccaattttggcacatttctc

SEQ ID NO: 58057 - DNA, 297 bp, Zea Mays
tcacagaccacatgaatctgcaatcagaacatatgctttgactaaggccaatggaccatatccgcaggcgtccccgagaatagatcaaatgccaataagtcaaatgtggatatgatattaatcccgggtatatccacatctacatcaggtagaagcattcaaaccaatatggttactcctcaacgatttctggcaaactccatatacacaggagtacactctgaacgacgagttcagtttggcttttgtgcgtttaatagaatattgaggcattacactatatgggcattcctcccc

SEQ ID NO: 58058 - DNA, 682 bp, Zea Mays
gccagattgcgatcggacaacagaaaagatttgagtcgacgtggacaacttatctatacccgttttgaaccagcttggtggtgctcattagcaccgtggtggtggatcaggagctcaggccgagcgagtgagggagtatcgagtgaaatgggctctgagtatatgaccggaatagggtgcaccgaaggcggtgctcatcagctccacgggtggtggattagggatctaggtgggcgtttgtggggacagtgagtgaaatggcatctaagcctatgaccgaaacagggtggcccgactgtagctcgcggcgcgtggcacaaacttgcatcggatagtgccgcgctccaaaggaggaggacgccatcctcgtcggggttgcgagctttcctcgtcggtgttgggtccagacgaaggttccaaagcgtatactgatatctcaaagcgtccgctacgactttaccacccaacttcgcaggtaaggaagagacagtagctgtcagattgcgatcggacgatataaaagatttgagtcgacgtggacaccttatctatcttcgttttgaaccagctttaatatatatgaaatatatagatgggcctctataatagatttcgtcctgctccctaaaaagtcaagaatggccctgataagaaacaaacgacaatgtaggccttacactca

SEQ ID NO: 58059 - DNA, 458 bp, Zea Mays
gctgaaactgcgcctatctccaaagttatgaggcggtcgggattggttgtgactgaaggcgcttctgacgaagaagcacccgctgctgaagtcgagcagatagatattgaagagggtgatgctagagaaggagagattgattatgacatcattatgccatcgaagcccagccatctggattttgggaaatcgactgtgtctgaagctgatatgactatgatgacgaagctaggctatttcagagaagccgagaaggggttggttcgctttggcggggaggagactatcccgaaaccagtgaatgatgaagttgtagtttttaagagcttcttcaaagcagggttgagatttcctctgcacggaatgattgcagaagtcttgggaaaattcgggatttaccttcatcagctgacccctaacgccattgttaggctcagcgtgtacatctgggctcttcg

SEQ ID NO: 58060 - DNA, 670 bp, Zea Mays
ctagtcttctttgtctgtctcttcatgtctcgataacgcacaaagaatagtagaaatcataatgaaaggcgcccaaacggtgccctaggtcaatgccccttgcctcgataacgtgcgggtaacagtaaaagctgcacattacagtcctggcgcgtcagatgtatttaatgtgggaaaaacgctacccgctgctggcgtgggtaagtatgtgtcccatctatactcaatgctggtgagccctatgtcaggggcttttgtcaggcatcgtccagtggcttacgctaggggtgtatgaccacgtgttagcatcggatccctgcttgggtgaggggcaaaccaagggataagtggtgacaatgttttccccagtctttctcgaccatgggctcgaccagcacccgaggggtccagactcctaccacccctgcctagacacgtggcgactccggacctcacctagcctgaggttcggatggtgttttcagtgccggagccattttgaaggcttggtgctgtaactagagagcaccttctcttctggggctttatgttccctctagatccctttgtctaggatctgctgggtcacaaggaggttcaggttctatttgcaagatcctagacctatagctgaagttgttgattcctccctttatggggcttgatggag

SEQ ID NO: 58061 - DNA, 303 bp, Zea Mays
gaaggattagggcaaggaaagactccatcatggacggcgggtcttgactcatctggtgatcgagttttgctctttgaagacttgagttggtgcttatccttccttgatgaggttggtcttctttggccttcattctttgagttgccctccgagttagggacatgtagttaagataattgtgggtaggatagatttcatgaggtaggttggtcagaatctctattttgttgttaggttgataaagaggggttatgcaaccatctgatgggtaaggtagttgcatatgactaggttggtctaaga

SEQ ID NO: 58062 - DNA, 722 bp, Zea Mays
taagaattaagccctgcaagaaagaataaaggattagcatgagaataaaagacttcattccaaagtccataagcttcaaaattcacaacttctgtaccttcagactgttgtatgcgaggctgtctatgaggtcagccttcgtcatggcgcaaaggccagcttcgagcatcggaaaacccatacttttggccatctcccggtagacggataactctttgttgtccgtgaggtagtacaggaaatcatcttcgtccgtaccgttaaacactaaggcccccttcgggtacttcagttcccgggcatagtgtttggcttcaaaaacttcttcttctgatagtctttttcccgaagcatgtcaaatgatataatcaagaccttcggacagtgtttcgggagcaggggatttggcttctttggccacacttttctccaaagctacgccagtatctagagattcttcttcggccctctgctcagttgcagcgagcttcgtctcagcaggcactgaaagcccagcctcagcttcagcttgagcttgcgtagctttggcttctacttgcccagttttcgcttcggcttgcgatttggcagcttcagcaaatttccttgtaggagcaggactcaaggcttttgtagtttccaacacagcatccaacacgttggccatcctcctcctcttgggagttgcgacagaagccttttgcgccttcggcaggtttgcc

SEQ ID NO: 58063 - DNA, 1174 bp, Zea Mays
gtttacatgggccacatgggcctagccttaacaggcctaacactctaacagttctttcgacccaacaggttagctatatagtgtttacatgggccacatgggcctagccttaacaggcctaacactctaacagttctttcgactcatcaaggtggagagtgccactgtggtcggtgccgctggagatagcttgatgcttgcgtgtgataggagcagagcctcctccgcctccgcctgtgtgacgttggcctagccgcgtcgtggttgtcgactatccttggcccagtggccaagcttaccacagttgtgacagccatcgtctcgtgctggcttcttgttgtcgacgctgccgccttgggtgcccccacgggcactacccttagcatgtcctcgcgcctcggcctgggcgcctccgcacgccttgtgcggcttgccgcatttgcggccacatgtcgaggaagaggacttccccttcttgtcaccctggcaggcctcccactgctcccgagtgagatgtagcttcccatagatggtgataggtcagagagggcctgtggttcgttgtcgtcgacgaccttgaggcgacctatcgcttcttcgatcgtcatcgtggagaggtttagcagagactcgatcgagcgagccatctgtttatacttctctgggatgcaacataagagcttctcaacagctctctcctcaccgtaggtgtcgtcgccgaactgcaccatcttttgcaacagaacgttgaggcgaagagcaaagtcatcaacatcctcacctggcttgaaggccaggttctcccaccccttgcgaagcagtgtggtcttgcgggcacgatcgctgccgatgcgggtcgcagcgatgacatcctaggcctccttgacaatccgcttctgggaaagcaaaaactacatctcgagcggggctgcaacaatgagggcatccagcgcctgtcgatcctcgtagtagtcaacgttgttgtaccgaattgcttcccacatgtggcgaacctagagccgtaccctcatcaccgcggcccactcgacgtagttggtcttggtgagggtaggtcacccaccgcctggaccgatgtccctgacaacggcctggaccccgcggtgaccatggtaccaatccggggagggagagccgcgtcgcctgtagatgccga

SEQ ID NO: 58064 - DNA, 707 bp, Zea Mays
ttcctaatgtttaatatgcttgaaatatgattaaatgataaattaatcttcttactgctttcatgtcaaaacagagaaactaactgatagagaatattattacaaaattttagaaattggaatggctcaatttggatttaaaatgaactaaatatgaattttccaagttctagcaattgtttttgcattaaaaatacatttactaattcatttattcattttatacaggttctggactgggcatcaattttcagaaagctcaagggtctctgcgcaagataacctagactcagggaacagtggccaatggactgcgggtttgttaataaattgtccagggactcttatgcaaagcgcgcaagcgaaggggtatcgagagatcttggccgcccgatccgcaatggtcggcccagattagaagttttatacgctgaaccagtatgcaatctgagccacaggatacgtgttctacgacttagattagttcctagcgtgcatcacacttctacctttggatccaaatcgagcggtccagacgcgcgatcgatctagaccgtgagttagcaaatcaacggctgttgatcgtcttcttccccacggcggcgccatccatcggccgaatccatgccggtgagcgtgccctgcccggctattccgagcgccatacaccgattcacatggcccccgtgaaattgacgactccccgc

SEQ ID NO: 58065 - DNA, 592 bp, Zea Mays
atgaccttatttctagccttttagaaccgacggacacttaccatcggtcataagccctaagtcgtcagaaataaattatgtctgacgatataaaacttatatcccacggtttaggtcgttagaattttttggctttattgttgtgccactccctaaaggcatcaaagcaaatgcctccctagacgttgggggacacaatcctctggtgcttgccattccctcagcttcatatcagggcccatatgagggaaccttgacacaatggagattcatctcaatagtggtcatctcactgggctcattggtgcctcgacttcaacaccaacaacatcattggacctctcatgtgcaagtaaccaaggcagtaccaggatcaacataccttagcctcattctatccttcactcatcaatcctcttgggtacatatgctattctggtgttgtaacatgactagagatggcaatggggaattctccgttgggttttagctcgccatccccgtcctcgtgacgaaaaaaattccagtggggatccccacgaacgcttgcatgggacatttcttctctatcccccgcggggataaacccctg

SEQ ID NO: 58066 - DNA, 422 bp, Zea Mays
gatgttagtggatccggttacaaaatgtcttctatccaacgcgtttagaaagaacatagctaacatggaattatacgaaaatctatgattctggatcgaagtgctattaaacaaccatctcataaggtcgagaaaattaccttaccatgaggcataggagcatgttatagttaatgagttcattggcacaaaattagtctctataatacattgagctgatgtgtaaatttttcaaagggtggaacatatgaagttaaagatcaagaaagccgagaacaaagagaagaatgttggacatgtccttggacttggtcaagggatctaacccatgttccctgattgggggcacaaacctcccgttgttgtggcccctatcataggtgttatattacgaggataggggctagcacagaaactaacac

SEQ ID NO: 58067 - DNA, 629 bp, Zea Mays
tggatggcgggttgaaactctaaatttgcaggggttcttttagaaaaacgtcacactgaaggggtacggggcaaatctggccgcccgattagatttcaaaggctaggattagatcaacattaaatcgaaccagtacgcgctagtggccatccgctcagcgatcgatggccacgattctaaataagcaggatctaatcccacgcgcatggatatgccaagccaatcgtagccgcccatgcccgatccgtcggtcgcggctgaatgggttctagatctaatcgtgtccgcccatccttggacggacggcgcagagacagtcttctaccaccagccgccagcagcggcgccacccatgcgctacggcggaagcccaactgggaaacccaaaaccaatgccctagtgagctaatgcgcgaacgaaacaacgatacacgttcaggagaggatgatgaagattctgagaaggttctcaccaagcttttagcgcggagcaccctggccacggtgaagcgcgctaccgccgcggcagaggtacatcggtgagaaattgtggagccattggcccacaatcgcacccggaaagaccacgagtaccaccagtgtaactccccaaagcgcccaggtccggc

SEQ ID NO: 58068 - DNA, 760 bp, Zea Mays
atttgcacagagactcctgcacttctgtttcttcgtagacccaggtccccgacgatgaacgacggtgagcgcgccctccggcgagcttgtaccggccgggatatgcaaaggctaagcttcttacttggtcgccagcaaattctacccctggcgaccctaatccctccatcaattgcataattctagctcaaaatccctctatccacgacgacggcgaaaaccgaggacaacccaaggtgttcccagcatctagcgtggtctagttcaattggttgggccgataagcatccttagcacacaaaggtgctgaaacaagggtaaggaggatgtgaatggacctggagacggcagtccacggcgcgatggttcacggcggtgcggagaaccgaattgggggaagtttgaaattcacgagctacggtggctaatcggaggtgagggcttgtgcactggacgcataacaacctaacgaagctcactggggcatcaatttatagggtgcatcaacggtggcacccaattttgagaagatgcgctggtggccaaggacaggggatgagtcaccgcggcgatctaccgtggcattcactgaggcactacttccggcgactgacatgctacctattatggtctattgtgacgtggtaacaccacagattacgtggcgcacaagcagcaagcggccaacactggcgagggttattttggccggccgcagagcaagtgggtacaatgaacaatccagtgactgggttcgagc

SEQ ID NO: 58069 - DNA, 353 bp, Zea Mays
ctagccaataaaagggagaggctagcctcaggacaaggggatcggaaggagagagctcttggggcaaccagatgccttcagacggacacgaaccctcaaggacaaacaggaggacgaggagtgccaacgaggaccaggaggccaaagctccaccgagccaagacttagctagggttccactctgataaagagacttgggagcctctcctccctctatcaactgcttgtaactcctactatgagttctatcattaatgttgtcggtagcgcaagccatcaatgactggaagtagggacgttctacccaaactagtataaaccttgcgcccttcgtgcacaccctccagagcccg

SEQ ID NO: 58070 - DNA, 806 bp, Zea Mays
ccacggtgggtgaaagagaggtcggggtcgaggtttgggatctcggatggcacgtggttttgcggccatattctctatgtgtcgcgacatttcggccgatgtgcatgagttggcttggcaccaatgggagactgatgaaaatatatgtctttagtagtcttctcctggtgtgtcgttaccaccttgctctcaggatgtgcctctccatccacccttcaccgacattgatcagtggcatcagcatcactttggtgtcccttatatgactccaaaagatgatgatgatggtgattggggacaaggccagtatgttcctcgtcctcctccacgcccagatcagatgttagcttgccatcctcctctgcctcctcctgatcaggtgcctttagatgattaggacttcactgccgccttcaccgagcagttcttctctccgcctctaggtggtgttccttatagcgggtggtgagccttctcttttgcctttttggtgctttgtgccaaaagggggagaagattgggagggctatgagagctgggttggttggttttatctagttatcttatttatgtaattgaacatctagtttgtaataactttgcgatgaacaatatataatgaactatgtgatggacctctatgcttttatgtcttggtattagtcttatttgagtatctttttatgttgcaatatgggttctaatgatatcatgatatgctgagtctctgatatagctgttgagatacttgtgtgcatgatctgtcatatgcataatcacagatattttatgacacgtgtgtgcac

SEQ ID NO: 58071 - DNA, 376 bp, Zea Mays
cttaacgtgaaatacgcgaaacgacgatgagctctggttcaaccattccaacgaacacttaacaagtgtcgtgctggttctgcattctgcttaacctacagcaccaccctcatcgccaactagcctccttccccatcgcaactctatcagccacaaccgatgaccaaccagaggcaccatacaccggcatggctcctaattcgaagtccacaacagcaatctcacatatgcacacgcatgatcctatgacatcaaaatcaaaggcacaaaaagcgacgtgctgagcatatagataagatggcttagcacgtacccaacaagcggtggcgagggtgccgagtgtggcacggcgagcgtgacgaggtcagaggagggg

SEQ ID NO: 58072 - DNA, 788 bp, Zea Mays
gaagaagagaggaagttaacactgcagtcgactgatcagattctaggtatttcaaaatatctgaagaatatcctgacccactactttttctagcagattctaggcagcttgtagataaaactaacttgggattataaaggaaaatatttggagtacatttttactgccctgagaagagaaaggagataagtttggagcctgttcctgggagatgactcagctgctggtctgctttgctatcaacaacttgagccctcattcttttacccccctgtccagcatgcaaaggcatgcttcaacttgttcctgtgcttggggctggtgtgggttatggtgaaggtgtccacctgcatatgttcatgcactatctaggactcaagtccacccctcctggaggccaatagagtttaccctttttacttcttgccaccaccctcaactcccataaaggggtactttaaatatctctgttgtcctcaaccaccacctgatagagcatcagttgctatcacccttgtgcacaaggatggccaactgaaaccatccatccaccccagaaaaccccagtgcctctgaaaaacctgaaagtggtgaccacacacttgttcctctcagttcaccgtgaccagcaattcccgaggtgaatcctacacaattagttcatgtttcatgatctataggttatgatgattctcatagcgttgcccttttgaactctaccgtactgccctagccggaacgccgtgaggtttgtccaaaacgccgccacgggcagttcccatatcgac

SEQ ID NO: 58073 - DNA, 855 bp, Zea Mays
accagtacattgagtacacatgtaacagtttgtttgtttgtctttttctttgtcattgatttggtgacaaaacgatcatggagggattgaaagtaattaagggagaaatgtactaatttttccctcaatctcctccaacaccaccgtgattcctggtcaccaaatcaatgcctcttcttcaccgaccggccatggctctgtgtcccttcttcctcaattgtaccctttccctagctaccctagctcagccctaggcacgtgtggccgtgtcgtggcttgccgtggatctccatggttgtgccatgcctaggccatgtctatgccacagttgtgtgcctgtgttgtcccttagtcatgccatgcgctcagacctgatcttcttcagcccatgctgcctcccctgctcatccttgtgcatgtgtgactggatgtttgactgtgtagtcgtgccttgagcccacgctagggtcacaccctctaacatgttgttgccgccaaatcttagccaaattggtgcaacaatgcgctcaatatttcatcgcttagaatctacaaacaataaaaatgtacatttcctattatcataattagaagataaatgtttccaagtagcatgtgtttctcatctgttcgacatattgccacccctttctaagggttccaagattagcttcatgttgccctaatgtagtctctactagatcacattagggttgtgcggtgctccgccttattttggtagatcttgtactaagcgttgttgttggcaaggtctgctagttatcttgtgtcgcatcaatttactatttctttttaagcttcatgctatagatcaattttacatgaccagatttg

SEQ ID NO: 58074 - DNA, 432 bp, Zea Mays
tctgaagtctggctatcagataatgcagagactgaatattgtctaacagtgaagttgggcaacctttgagatgggattcgactatgatccagtaattgtttggctatggttgctatagcaaggttgtagctggatcatagggctacaactttgacacagagagcaggtcgagtcactacatgaaattgggaacaaatctccctgcaagttgctttgtcaggctgactgaatgagaatccaatggtacagtgcactgaaaatatccccaatccactgaacctcgccgccgacgagccgtgcgcccggattcgcgccacccgctgtgattcgtgcccagcgcatgtggataacagagaggagtaaaaatcttggcgctcgtattagctcgagctcgctcaccgttgtgcccgtcgtacccacttggacggtggc

SEQ ID NO: 58075 - DNA, 758 bp, Zea Mays
aaaaaatgcacgaccaaatctttcccaacgccctcctctttgttcgatcacactttcttttcttgctggaatgtttgctccacctatttattaatgggaggttgctcatttctgtggagctgtggtttctagatacgatggccatggcgttcttcttccagctgctcccagatcaccccggggttctaatagccgcagcccaagtaaacgatggatttctggttacgcagcctcgcacatcaattcgattggtgcagctctatgttgtagccatttttttctcttcaataattgtttgctgaaacctggtgacgagtacagtctctgctgctgcgtggctgtgatgacaaaaaggttatttggttgattatgattcttaatgccatttaaggatcaaattgtgatgacctatttgtgcgtgtctgagccgatgcaatgaagagtccatttttgctgaccgttctgctgatctttctgctaaggattttgcactattgtttatctgattttggtcgtgggatggtaatcaattcggggtgcaagtatccttttatctgtagctggcaggatgaatggcaaagggaccaatcttgaatttatgtttgtcgattggatttctggcatctttggaacatctggcatggctgggatgacaaaaacatacgtttctcgatcctgatacttggttttatcaaggaccaaactttgatgacctttgtgcgtatctgagccgttgcaaatgagtatgttttccttat

SEQ ID NO: 58076 - DNA, 775 bp, Zea Mays
cagatgcaccctgcgatctcatctgaccagccatctcgtcaaccaaagcctgacatggaaaacaaataagtaaaaagacagtatttcactcggagtatagccagatcgggaaaagtcaaattacctggagattggagaagaatgaaggaagccccaaatcatgggaagtcagttggtgacttgacgaaggattaccaactgaagaaatctgcagagcatcattggggaccaattcagcatcaccaccagaaaccaaaactctagcgtcaggtgcgccggcctctaaggtgacttcctgacccaaagcacgtgctgcagccatgcaaacagagtgtggaggagaagacccgatgtggacatccatggaagtatgagaaggggaacctgttcagacaccctcgggggctgggtcatagctcgcgctgcccacctgaaccggatcatcaccggcaacaccctcgggggctaggtaaacgccagcgccatcctcagtgaccgggttctctgtagcagccacctctaaggctgaaggatcttcaaccacttccatgagaacggagcaatctagatcagcctcttgactcttaagaccgcgctccaaagtcgatgaggcacgagatgctgctcgggataactctaatccgacatcaggcatatcagcgtaaacttccatcattccaccatctatcggctcggacagcagatcctcagggaccatatctttgagagtctgatcaaaatttgccagagactattcttgcagaccaacaagagc

SEQ ID NO: 58077 - DNA, 601 bp, Zea Mays
gcctgccgatcatatgccacgtgcccaggcatcttaccacgtcgtggttagtcctgttaagcatatccgatgatcgccggagggtccgccacggtgaaagccactaagtgcttgcgctagtacccctcttcctctccgaccaccgcgcgtcttcgtccaattcaccggccaccgctgatggactctataaattgggcacgccataagctccgtagggtagtcaagcaccaagccaccaagccgtgccctcaattgatcactagagctcgctaatttctcattctccccaaatctgttctctgccaccgtgaaagagccctcaccgtggttagtgtattccaggtctgttcgtgctccctgctctcttgttctagcatccttaagtcctcctgaagctcctcaaccaattcaattgggttaggctgccctggatcgctgggaacacgttagttcctttgactgtctgcactgtctccgtggacaggatgattcagagccttgttagtaaaattaagtggggggaatgattaggcggggtccgatttggtgtctgccgctcgggagcgccggtctttgcatgatccgaccgatacaggctcgc

SEQ ID NO: 58078 - DNA, 369 bp, Zea Mays
aaactagggacgctcatcagctttctctgtcgcgggtggatcgccattgccactttcggccggcatgggggatgaaaggggtgcaccatctgatcctacgccaatggccatgatttgtggcagggtaccggatcggtgggtttgatgacagccatgggatgcggatcgggtggctatggacaaacgtgacatggtgaagcgctggccattggatctccaatccaacggtccctaatgtgtatgggttcataaaagaagtccatgtaatctgcgccgttaatcctgcatccagcggtgctcgttgtctgataccctattggcttggcgactttgcataagagccctcgtaaaactagcaaaccaacccac

SEQ ID NO: 58079 - DNA, 1219 bp, Zea Mays
ctgcactgcccaggtggagcgcaggctcttcttcccgaggccgggttcaatagggcaagcagaaaacacatggatgcactgcacaacgtccaacacaacacctcattgcgttgcgcatctgcccacaagatattaccaaactcctcttgtgccgtcgcttcactactctactactaccagccaccaggattcggaattgtaaagcagccaccggaccggaacaacaaaactgaaaaaaaagcgaacctgttgttgttactttaaactgccgctctgatgttctacacaatgtcatttaattcgggaatttgggccagcggcgagtggcggcgttatgggcaagaaagctctcatctttagagatctccaaaggggtccacaccctttgttcttcctctcgaaccgagggaagttctagatttgtagctcccatgtgtttctggtccccataacggacggcatgtgccagagggcatccttcctccttgccctccatgcttgtgaggtggcattttttttcttgctatatagcaacgagccataaagaaacgaggcaattggcatgcgaaagagcatgtgacccaagcacgctgcataatcacctttgcgattagaataagcatgcgatgggttttaaccctcttgattgtttttcatgaaccaggggtcagggctaactactgtataatactataatcacacacccgccgcgagcatactagcgtcctccattagcccctagccgacaagcgaagcatgctttttgtatcaaaaccagagggcctagaaacacctttaccgtcacgacggcagcatgaaaagccgtgaattgttgtaaacaattgagcaactcatgggcgagttttaaggaatagtgtgtgtgtgtgtgtgtgtgtttagcagccgaactagtagaaccgttgcacagcaccatggtgtaaaaaacatctgactgcatgggaccgcattgacatttctaaatgatcctactgtttgatgcgtattcatgacatgctgcaaaagtttgcactatatttctgcatgactgggaggcttactttcactttcgagctcatcattcatgtgactgaagcatgcaaagagaagccctttgcagtagcaaatgataggaacaccggtttaggactcaaggatggattcatgttgcaggatgatatatggtttcaaagatggatatttgcgagcagcagagagaggg

SEQ ID NO: 58080 - DNA, 589 bp, Zea Mays
aaaaaaacaaacgacgcatgttaatcatatataggaatgtggccatgtgtgcacaaatgatcaataaaatgaatagtcaaaactagatgaagcggatattcttgggcgaggaggtaaaggaaaataaggaagggcgagtaatgtgtagtagcaactttggagatatgtataactcatctgttatgacatcgacagcaatgtttgataaaaaaacttcacatagaaaaaatagcagtgcaggttgcgaaaaaatttggggcatggcttctatcgcagtaaataccattgttgtaggccacaaagcttgagagcatatgtgttagggagtacaacatggaaaggggtttaacaaacaaatataattagttaataaattcactgcattttgtaccttgttgaatggacgaccgcccagaaaatagtactacctcttattttttatttgacgctggctaatgctcttacactaaaaatgttagctaaaaaccgagggagtatgtttttatacagagttggccagatagctattgttgtgattattcttcattattctatgtaattgtagggacgtaagaatgcatgagaaaac

SEQ ID NO: 58081 - DNA, 1030 bp, Zea Mays
tcaaatcataatttgaaccgcccactaggcaaggcgaccgagggaggagaacgtggggtggcactgttgtcaggagcgttgctagccgatgggaggccatcatcgccggcttcattcgcggtaccatgtacgatattagaattggcgtaattggatggatgtattgcattgagcctcatgggctaattatatagggtacataggactaacaccccacatgggtagacaatatggtactatttctatttactctaactttcgcctcgtggtcttggtgcggtggtgagaactgtttcactgagttactgggttgctggttcgaacaagcttctttgtatttgcgggagaaagcttgcattggtttatcctttcccttgatcccgctcatgtgggagcctccagcactcttttattcgcttcgtggtctgagtctaggcaatcagagtcatcttggaccacctcattgccttggaccggcctagagaccccacagggaagaagggggggggggggtgagtggcaagagggggaggaaggcactttacctaaagcagcagttgcgcaggagcctttggtgtccgccagtgcccagtggtgaagctagagcaaaattgaggagggtgcaattgccttatgggtgcatataaggtgaaaataagataattataactagttttgtgttttagggggttgcagatgcaccccttaaagtgaatatagcttggcccctgccagtgccgtagtggcggccagcgggctggggttcatgttggcgtgggggtggagggagcaaggttgggagggagtcatcctcaaggacggagacccattaggtctccttttaaccaaagtttgctacctacttttattgaaagcatatgatttgttttacaaccaaactgctgggggcaccagtttgcagcgaagcaacagagcacataaacaaaataaaactggggctagaaaatgtagacagggagccaactagtaatcatattctaaatagatagaaggggccatatattaattg

SEQ ID NO: 58082 - DNA, 1633 bp, Zea Mays
gaactaagtaaaacagtctaagcaacaaaagaaggcatgaaaagatatcatgcataaatggggcaactagtcatacaaacaaggtgcacctgcaatcgctcataagccttttgcacagcaacaaatttctcccttccttcagggttcttgtctggatgatattttattgctagctttcggtattggcgcttaagcttctcctcatcaatgttttcaattttgtttccggaattagccaaacttaagtcagatgactgcttgatgctaccgttctcaccaagcacaagatcatcaagagaaatctcgagtatcttacagacttcttcttcagataaatccattggacgacgagttaactcttcacgccacatcaccaacaatgactgcaaaaactccacatgttctacaatgggccagttaggaaacctaatctcatcacataggttgcggaggtagtaacgatggcaccacatctcatctttcagattcgggtaagtcacaggtggcataggagcataatcatacaatgaatggcaatgctgtgccaatttctgaggaaattcaccgagatgctgcagaacctgccaaaaataagttgaacaaagtaatttaaaatgagattaaaatctcaaaacaagagagcaaatgttttttacaaataaaaataaagtacatagataaaagacctgacaaataaggttttctgctcgcatcttgtgggtccatataatttctggtgtgtcagaatcagacaccattgcaccggcaaaagcagaagggccactgcgctccaagacatacagcaaagattctgggaggagtccacccagtacactacgctttgccaaaggcaaagatgaagatagtgctgcctcttcaccaccatgaaaagcttgatgagtatgtgtggccgaaaacaaatgtgcaattgataggagatttgaaccaggatatgccaatgcaaagtaaaaggcaccagtaatgtataatcgaatcatagctttagggtttcttgtaacaatagccataagcaatgaggcagctgcttcaacaatgcttggttccccagtaagcataacctatacaatacaatttgttttttgtcagcatttggtcaattaaattgttcaaaagaaagagaaacatacatctgaaaagttgaataagataattgaatcacaaattaaagcatgaattttaatggcacgaaaaatagcttatatcttataacacaactgacaactgtgcattatattgcggacagagttacaatttagtgacagttcaaggaaatgctacttgcatcaacagagctttaaggattgcattgtattaacttatacacattaatctgatggttgtagactaagatactgtcacttttatgttgtacttatacagtctccaacatccacttatatggtggaaaaagatagcaaacacttgaagctagagataacctgggccacatgaggaaggcatcttggacttgacaatatacgtttcaccctaggagttggagttactatttcacctgcatcatcaagatcggaccgtgcagatgtcatactgtgtaatatagataatgcagcatccccaatctgtagaaagaaatacatttttatgtgagtca

SEQ ID NO: 58083 - DNA, 474 bp, Zea Mays
ggaaaaaggaagagaaaataaaaagaaaaacagaactgtgcactgaatgggccggccgccaccaatctggcccattaccacactaccaccgcgcagcccaacttgtgaccgtggtgccgacaggtgggcccaatggcgcagtctctgttgtcgcgaacagggcacctctgtccctggtggatggcccgcgctgtcagctcgttcttcctcgttctttctcactcggacaagaaaaattccatggccgcgaatcatggcaacaacctccgtttcttctaggaccccaatccctctggaaggtgggcatgcggctggaaacacgcctgctctcgcgtccccgttagacgaagaccggtgcacaggacctctggctagctgtcatcttctctgcgtggcctggggaatcagtttcctctacgacatggaaaacaaaatacagacgtcgagctccgcggatggttgttgcgtgggcgg

SEQ ID NO: 58084 - DNA, 336 bp, Zea Mays
cgagtttgggtcaacgcaaaagcctctcgccaaaccctaaacccacggttgcgagtctgatctattgtctgcgcttgtaatgattggaaacactatgagctatggcgtcagagaccaatggagcctctgcaggcactggatctgaccctcctcgtctgtaggtcaacagcagcgagcctcctctaccatgccaggacgctcctccaccacctctaagggtagcacgctgtcaactacaacaatctcgtcctttatcaagagcaagatgatatgcctcaatctcctctgtttatatgtttacagtgggcacatactagatccattctctgttaattc

SEQ ID NO: 58085 - DNA, 679 bp, Zea Mays
ggccaaatctcttgcaggcattcacaatgttcttcaatactttatctgacttgctatcaatgtgctcccaatcaacatacttcactcaaagcactatgtcatgctttgcattgtagggcacagagagatagaaatatgagtgaaatccattccagaagcgataatcaatgcttctttccctgggcacaacataaggcatcctcatacgagcttatctgacagtacagaactgattctgatagatcaccctatgtctgtcctgggtgtcatgtggccttctttcttggacttcctcactataatgaaccatataagaggagtcatactcattgatactcgctggagtgccaggacaagcatcctcctggatcaatcgcccatacatctcaattcacatctcttgctgagcctgctctcggagctttgccactgcccactgttgcttctcccaccatgacgggcaggctgcttcatccatccacggtgctctgtccacatcttggtgcggtgctctccatcatctcccgaagcaatctgtttgcaccagagagaatggatcagagaagtatgtgtcagagaatatatggcgccatgtatctatgcgtggaggagagaatcgaggattgaaacagtcatagcgtggcccgacactgtcacctagaggcccgacactgccgcg

SEQ ID NO: 58086 - DNA, 351 bp, Zea Mays
gcgtgatatcctcatagtcatcacgatcccttatcatccttgctagactcttatccttttctttgtaagctctcatgaatagtcttatgaccttggagtcactccaatcttcacttccaagcactcttattttgtttactaacaccatcaatcgatcaaagagtgattgaagcgactcacccttagtccaatcgtatctagcaagctcactctccaaagcttcaattctatgtcttttagctttgggatctccttcatgtgacattttaagaatattccaaatatcacgggcatcttctcttccttgaactttccggtattcttccggacaaagacttcctttaattatgc

SEQ ID NO: 58087 - DNA, 893 bp, Zea Mays
actgttttgaaataaccaaatgtttgccattttgatgactgagggtgcatatcataccatctgattgtttaattgtttaaaggatggttcctttgatcaagataatctcaatactggtcctagcatgccttctttgctgggcgatacagtttgtgcagcagtttctgcttccacctgggttgaaccacatggaagatgtgcagttgtatttgcattggcttggtcttctcctcaggttaaatttaaaaaggggagtacatactacaggtaacttctttattcctaacttttatttggtgacaactgttaatcacgatgcatccaagaccggcacaactcagagcacttgttaaaaacactttctgattcctttcattcaaaccttcaagttgttggacaatggatgtgggaatagtctttgcactctgtcaatcttttcctccacatgccattcagcttttactatgcagtatatagcctgaatagtaaatagtctgttaatcagcttatgttttgacaagggctaaacattgataatacttatatctttcattaatgtatctgtagtgatgtggtttatattattgatagcaaaactcctgtattcctagctttgttccactttaataagatttaattcatgctgcgctaacaggagatatacaaagttttatggaacttctccaagatcagcagtaaatttggtagaggacgctttgatgagtatgtttcctgtaaacatctattgcacaacatatgctttcctctcatatttgaatattctggtttgattctcttatgatcagcatcacctaccagcgccaccacaaacatacacatggctagggtaggccgcccgcaacagttttttatagatttgattaggagtttgt

SEQ ID NO: 58088 - DNA, 395 bp, Zea Mays
cacaacagctcacataattgccaactacaacatgtcagcatcattaggagtaagagaatatataatccttgaacattagaccacacagatacctgatcgtccccgcggccgaaatgcaacatgttgtcttggagcatcttcagaagggggatcacgacaccatccttccatgttgccacggctgttgcggccagtgcaccgatcaaatccctcgcaaatacagtgtctcccttccataacacagagaacaacgaacggcctcaggaactagagcacccaatccacccccatcggcaaccatccctgctgcctgttgcctgccgcgtcagttccgtgcacactatcagaccccgacgcgagcgcctggacaaaggggtggtcgtgggccgggaagc

SEQ ID NO: 58089 - DNA, 414 bp, Zea Mays
ggagagggatacaggcaaatcctaacacaggcaaccaatcatcttcttccattggttcatccagagggagacttacataaccacttcaacgaccgacacgacacgtggagtgacatcatctcttcacgcgcttgcctgcacgaaaaagagttgaggcgccaagaggactacgaccaggatcacagctcctcgcggtggggcactgagggcctggatgactccaccactgactcaacgacacgttcgtccgcgtgctggccagcacgcaaccgactgcaaaacccacgactaccatcaccaccacgggaccagcgccacaacggcacacatggcgcccggccacaggctcacgacatctttggggtgtcggccttcaccccgcgactgcgcatgcttcatcgccctcctaatttt

SEQ ID NO: 58090 - DNA, 332 bp, Zea Mays
aatttcacattttcatactttatttgtaccaaggttcaaattatagaacttaattccctgacctcacaagtcaaagtgcataagctaaacaagtattcatcacttgtatgcacacatttaggggggagaatggtctataatttgaatctttgagactaacttcatttccaagtctcttatgtgtgtagtctcaaattagaaaggaatcttcgggcaaagacaatcacttccactgcaaattttgatgggtattaaagattctttgctcgaataaatgtatcttttatacatttcataagagaatgagtttctcttttatatgctactccaac

SEQ ID NO: 58091 - DNA, 747 bp, Zea Mays
taactctaaccccacatctggaatgtcagtgcaaacgtccatcataccaccatctgttggctcggatagcagatcttcaggaaccatatcctcgagagcctgatcaaaatttgctatggacaactcttgcagaccaatgagagtagacaaagctggagaaggaacatcactactctcaccactgactaggtagcgccgactatttttccgaattaaggggatttcctcctcttcttcctcatcctcatcaacaatacgaacaacacacccattgggatcagctctggctggattacacccattgagatcagcatcatcaaggtcacacccattgggatcagctcgagcaggatcacatccagtgggttcagcatcatcgaggtcacacccattggggtcagcgtcagcagggtcacacccaatggggtcagcgtcagcagggtcacacccattgggatcagctccagtaaaaagttccactggtacttcttcagcagcaggaacagaagggccggcatcctgattcaaacatgacactcgccgaagcctcctctttttcttcttattcccctcggcaggagcagttggatgactggccgggtgaaggcgctttgggcgagcaccatcagatttttgagcattcaaggttttttcgggctctgggatagttgcaacagctatggtttcagcagggacggagtcaaaagaatcctcagccaacatgtccagcatagcacttatctctgc

SEQ ID NO: 58092 - DNA, 467 bp, Zea Mays
aaaacgaataaaaagttacggcctatgtcagtccaccgatcagtcagtatgagcaatgcggcggtttgccttcttcacctgcaggactatataaacagatgagctagtaagaagttaccacaacattcattgccattgcattgttgtgctgttgaaattttttaccgaagccaaaactttttgtgctttgtgcatttgctgtctagtcttcgaacaatcatcaagctagttgaaagttagcttcgtcttaagaaataaaatggctcgaatcaggtctactgctaggctgacaaacgagggtgaagagactgaggcaacgaagacagctccaatttcagaagttatgaggcgctctgggttggttgttcaggaaggagaagcttcttttgagaagaatacccgtaatgtcgaagctgagaatattattaccgaagctggaagtgatgacgaagaggacgatggtatac

SEQ ID NO: 58093 - DNA, 375 bp, Zea Mays
caggcagtgaggcaggcactacgaatcacggcaagcagtaacccgatgcgtgacgcgatggccttgcttgcttatataaatgagagcaacgtcgtcgtcagacatactgtagctagaggcctagagcccctgcttaattattactattagctctagctataccctgcttaattattactattagctctaattgtggtatcctttcgtcgagtgtgctacgcatagcgatcctatcgatccgacacgtaccgctgatagatggatccgggcatcttgctgctcgttccgtcgtagtagtagtagtaacttgatgcagcagacatatgaacggatgcattgtagaggagtctggccgtctgggtctgcaaaccaact

SEQ ID NO: 58094 - DNA, 490 bp, Zea Mays
gaaccctatgctatggactgcgggttgattccatacaaacggagggtttgttttgtttaatttccaggccgaaacggtatggaggattctcgctcgttcgatcaagtgggaatggttcagcttaaaatgccgagacgcctaactggtatccagtctcagccaccagacgtaagctctacagcatagattttaaacaactaaaaccaatccgagcgcgcaggatcagaatcagatggaccgtgttcacccggttgaaacggtaccgctctaatctaatcgcgcccgttcacggccgatccaatggtcacaacaaggcccctaacctaatcctcaggatgcagcggtgtcaccggcctccacggcggagcttcgccgatgaacatgaatcaggcgcgcttatggcgaaatcgtccatctaactggtgctacgccactccaacgacccaagcaacagtttgatggggacacataccgacgacggggacgcgga

SEQ ID NO: 58095 - DNA, 397 bp, Zea Mays
cggaaatcatccttaactaatcttatcttggaaatcaaaatgttgtgttagctctttatcttaatgtcatgcaagccttttatgcagtctgtctcactaactcttttaccctctgactagatgatgaaccccaatggaaatgaagtaaatgatggcaacgacaatattcctaccataacaactatgaacgaaaaaaatgagtcacagagatattcgatgaatggaatgaagaacaacaaaaggaatagaaaaatgtttggatacatgattagtccacctcaaccacaagcaaaagccacgaaacatatggatacccaaacagaagaatcaagtcaggctcagctatatgagatacagacacccaatcaaccctcaccccctgttggtcaagcaaagt

SEQ ID NO: 58096 - DNA, 744 bp, Zea Mays
ggattctatagtacgattaaagattgttgtttagtgaacaaactttattaatagagattaccctgttattaacaagaatcaagagaaaggggaggcgaaagggggtcggttgaataaagcgctgaagatcagaacactaaaatatctaaaaagcaaggacaaagatcaagggcactgtagaatcggatgtgttcgagtgatttggggtaaggatcgaccgcgaggagatagcttcggacgtgtcacgattccatggacctagccagagcctagccgtagataattcaccggcggtcgtcgtggctcggtcatttacgccgccttgtcactcatgcctcgctcttccctcactgtgtctcttctttacgtggtaaccatgcacaaatgatgtaatccgaggccatggatcgctagctggaccaccgggcctataaatagccccgccacccacgacgaggtattcaccagttcaccagtgagctgggttgaagcataaattcatagaatcctctccacctctccccaaattagtggtgcacagtgaaaaagcagtcctttgcgaccgtgtagccccaaccgcacctcctaattccactagaacccgtcgcggcaccattttcccccttctcagtcaccgacgagcgaaaatcctccgcgctccgtggccagccgctcccagttctgctcctgctcttcttaatcgtgttttagcacccatacatgctcgtgatactcatcggctca

SEQ ID NO: 58097 - DNA, 318 bp, Zea Mays
gaggaggagagtcggcgtcgcccgccatgaagtcctagtacctgtgccggtgtttgggactaagaagggatcgagcgtcctcggcatcgtgctcggagagtgtgggtggataatcgcctccagtgttcatcccgggcgtccagaattgctcaccggactagatttccaccgccgtgccgcaagacatcggtgataggattctgtgccatgcaatacctccgtaaagaagccactaccacactcgctagttccttagctacgtttagcaccccgcggattaaagatcttggccgccgggacccatcggccaccggcagg

SEQ ID NO: 58098 - DNA, 648 bp, Zea Mays
tactaagtagtagcaaacacgttttcgcttgctgctctgtctcctcagctcacctaccctccggcctgaaatctgaaccacaaccactgctacagctagccaagctgccacgcccgccgacacaacggagatcgagccgagctgcttcttccatactacacgtccgtccaatcagcacacggaggaatcctttttcagcgcatgtacgtactacgactgcagatcaccatatgcatgcgtccgtacgacgcgcgtagtagttttatgcatatatgccggcgagttcgtccaaaccgctaacactaaggctacccgcagtgatatactgtaaagaagacgccaccaatataaggctaggtatagagtaaaattttactgcagtggagtactctataggtagctgtaaacttatggggggcaaacaaaacgctatttacagcgtcgatgcttttttactctatcagtccacacgtccatgcagcaggtacggtgccgagcgccatcagccggtgtggcagtaggggacaaaaaaaaagatatataatatatgtggtgattggtatagagttgatgtatggagtaaatatgactgcagtagattatgatatagggtagagaatcttgatgatgaggatagaatatttcttt

SEQ ID NO: 58099 - DNA, 650 bp, Zea Mays
cgaaggacccttttgggctccctagaatagatcaggtagttgatttgactgttggctgttctatgctccccttcctagattgctactctggatactatcagatcggtttggcaaaggaagacgaggaaaagattgcattcatcacgccatttggagccttctgctatacctccatgtcgttcggcatcaaaaacgctggagcaacttaccgaagagctatccaaatgtgcttagcccaccactggggcaagtgagtagaagcctacgttgatgatgtagtcatcaagaaggaaaactcagacaacttcatcaaggatttgcaatagatcttcaacatcttgaggtgctaccgatggaaactaaacctagagaagtgtgtgtttggagtaccgaccggaaagctactcgagtttatcatcagccatcgaggaatagaggcaaatccagaaacaattgaagccattatgagaatggagccaccgtgatcacagaagaaagtacagatgctcacttggtgcatggcagcgctgagtagattcatatcaaggcttggtgaaagagggatgccattctataaactactcaaaaggtggataaattctagtggaccacagaagctcaagaagccctagaagcactaaagaagtttc

SEQ ID NO: 58100 - DNA, 713 bp, Zea Mays
tgacatcagtgcactagatgagtgccatatagttgggtagttgggttctctttttctgctctctcgctttaatccgcctatgcttacctcttttaactctctaccctttcctcttgtacctgctcagttggcagaggccgagttgaatcgaagaatctatgtgccgaccttgttttcttgctagtcttaccttgaaacacaataccatcaacctatccatgtcaaaatacaacaccatccttgtttcacgctagctgacactttctttctattataaatgtctaaatgaccttgtttcatatttgccctttgtatataccatgaaccttgtgaaaccttgtctcactctcccttcacccctacctagatgatgaatcccaatgaagataaagtggatgaggtcaacaacaagattccaacctcgacagtggtgaaaaggaaggatgactcacatagatatctgctgaatggaatgaagaacaacaagaggaccagaaaattgtttgggtacaagattaaaccgcctcaaccgcaagcagaagcgccaaagctcgtgaatacccaaacaggagaatcaaatcaagctcagctattcaacatgcaggcaactgatcaactatcatctgctggcaatcaagcaaagctgactcgtagagaggtcaaagtaagaggtgattgtttctactacaaggaagaagggcacttcatttgcc

SEQ ID NO: 58101 - DNA, 824 bp, Zea Mays
tttccaaaactgagagtcagtctgtctttgtttaactgagataaggggttttcccttaatatatttttcagtaattattctctgccataaaccactagaattttccaaattccaaagccatttgatcaacatagcatcattcatagaacctagattcaacacacctaaaccacctaaacttttggaggagcaaaccgtattccagttaaccaaatgcattttttcgtttgggagccaccttgccaaagaagccttttcctgagcaaatccaactttttaataaccgatttaggagccggataaatcgataacatgtacaaaggtacattagaaagcgaactattcagaagagtcaatctacctcccaaactcagtaatctacctttccaaccagcaagtcttttatccattttttctagcattggactccaaagagacttgctaaccttcttattgtcaatgggaacaccaagatacttcattggaaggctaccaacagggctagtgaaaatgtcagcatataaatcagtgaactccttagcttcccccaaacaaaaaatttcacttttgtgaaaatttattttcatcccagacatgtgttcaaaaagacagaggataaatttaagatttctagctccttccaaacaatcttgaatcagaaagatagtatcatcagcgtattgtaaacaacaacaaccattcagaatgatgtgagggatcaggccacaaatcaaacctttttcctgagcttgttgaataatacaagccaaaccatcagcaaccaaattaaacaaaaggggtgaaaaaggaccaccctgtcgaac

SEQ ID NO: 58102 - DNA, 530 bp, Zea Mays
gttcccttgagaattttaaaggtcaatctctcaaagaatcactagagattgatgtggagaggttgggagccttcaatggctacatagaagcttgtccgctggttgttaagagcaaatggtcgagttggacgctgggaggaggagaaaaaggtataaatacccctagcatcaaaattgatcattaagtcatggtagtaccatgaaatcatgatagtgttgtagtgcaacatattcacacgacactttcgtacaagccaacaacaaaaataacattgaaacttagctggactggctaaggtgtgaggaactatatatggtgggttacgattgagcacttggatgcatattgaagcttgcattttgcatcccctttatagtacaacggctcgtaaactcaaatttaaaatataaaataaatttaaccctccattgagtctaacacccacatcctttttgtaatttggggctccaccaagacatatagtatcatcactaagtatatattcacttacatgtcaactcaataaatc

SEQ ID NO: 58103 - DNA, 613 bp, Zea Mays
cagagttatccatggcaaggacccttactcgatcccaagcgctatccacatgatccgagcacgaatctcggcgacgacggcacgaatcgcgcatggctcgtcggcggcgatggttgagctgtcgatctgatcttattcagatcactgtaccatggcattcttcatcaatcgacctaacagagcgatttgaagctaaattttctcctaattttacttggcaacctatccaaggctctgcagcaaagtcgtagtccaacataccatattcatctttgttatagtattccaagacaaattcttactgaatcatgcttagaatcaagctcaaagtttgcttgaacccactgtcaaaccaaattcaggcttcaaacagcctgaaaacctaactttgggtgtatttatctccaaattcctcataacaaccatgcttactcccttaagcaaagttattctcctttgataggtctacaagattgatgtggtgacttagggcaaaaacttcataatttggcagatataaggctttaaagtagggctgacatcactggtttcagacttaaccttagaactcaaatatggcctttttgcaaataggtccaaaactaagggttta

SEQ ID NO: 58104 - DNA, 320 bp, Zea Mays
ggagaacttgaggatagcacagactcaacagaagagttatgctgataaccggagaagaccactgggatttgaagagggtgaccacgtgtacctaaaggtgtcaccaattcgtggaatgagaagattcaaagttaaaggcaagctatcccctcgctttattggacccttcagaatctttaagcgagttgcggaggtggcctgccaacttgagctaccagatcatttgtctgatgtgcacgatgtgttccatgtatctcagcttaagaagtgtcttcgtgtcccagaggaacagttgcctatggaagaacttagtgtgcaag

SEQ ID NO: 58105 - DNA, 275 bp, Zea Mays
ttgctgtagacactgtttgaagagtgtagtttgaatataggttgaagagtgtagtttgaatataggtatgagatggataagttgctgaagatagcttgaagatgcaattattctgggactgggggagtgcctaaattgaggcataagccatccatgatagtgcgtcgccattcgagatgccctaagtacgcacgctgacatgacaattcgcatatgggatatcccaagcagtagttagccaacctctttcagttctgaacagtgctagatatttt

SEQ ID NO: 58106 - DNA, 392 bp, Zea Mays
cttttctagcaggtgatggatacaggtggtggaggagagtcgtctcttttggtgcatgaataaggatgtggatctctaagaggagacaatgacctatgaggtgagtatttgtcatcattctcttcatccgaagatggtagtgagctttatgaagagtatttactaggtaataatagtccccttattctaaataataagtggcctatcttacttagtaggttaattcagtaccttgttgtacttcttatcccataccctatcaatgttgaccatagtgtacccatatggagttgggcaaccatgaatggtctcgccttcggtaggctaggcatcatcatcttccaccttgttacttgtataacactggtggatgtaaagcttgataagcatgc

SEQ ID NO: 58107 - DNA, 508 bp, Zea Mays
agttctaggccacccttgattcctccagacaacagttcgaattctaccgcccagctcctgaggacaccacttcggcttcagttccgccggcaccagacttcaggaatgaggatgaggctatccgtctgtttgaggatcagggtgctacagctgacacttccttagacgatgaggatctgtggattctaccaccacctcctgtgccacctcattcccatgatcacgaggttggtggctccagtgttgttccttcggctgctcctccatcgattgaccctgcgttggatgctatacttcagtctctcactcaacagcaggctcacctggcagcggagctggcccgacaggcagccatccagcagcagatgttcgagcggatgttgtccatgttccagaccattcaggaccaccaggacacccttcaacaacagctcttggcagacatggcagagcatcagacattcatgactcatatacttcagcacaccggtgtttctattcctccaat

SEQ ID NO: 58108 - DNA, 455 bp, Zea Mays
ataagctggggcaatggaccgacctcataccaagtagagagcaagtcacccatgtaaggtcctacccttgaactataaaagggcgggccttctttcttctagggacacacaagcatacttgttgtagcacgtccaaagcaatactacgatcagcactacacgtctacattggagtagggtgtgaactcgaactagtataaaccctgtgtcccaagttattcgctcgagtcctagcaattcaccatttagagtaagttcgtgttagccccctaccgaacacaaatcttattgcccctggtttctgaaaccatgacagttagcgcgctaggtaggggcagtgctagcgtactaagagaagctctccactctgatggtccactcatcaccattcgccggaggtgagatcttcgctctagggagctgcatcaccttcagcatcctcgacttctttgcac

SEQ ID NO: 58109 - DNA, 1111 bp, Zea Mays
ctcagccatagagaatcttctcttgggataggtccatcctgtgacatcaattggataatctggatgagcgtgtggagcatcctctgtgtccatagaaatgctgcccccagctgatgattgggcctctgagtctgtagctggattataatctgcatcatctgcacgacggtgctttgacttaaaacgacctgcaagcttcttcttaagaccacccagaccactgcaatatatatgaggaatatccattggttaatagttgatgatgtcacaccatagagaaaggaagtgtaagtttctgtcagggaccggactgtccgcgctagggggccggactgtccgagttatcctggcggacgatccacgaccgtccagaggcaatttctagaaccctagccgccccatccatctaatcatcgatttgacagaaaataacaatccaaatccattcaaatttttgcaccatattcacaatgagtaacacgagcaattccaccagtcaaaattgtaattccactgcccaattctagatcagagagaaaaccctaagaattcccaaatttgaataaatcagacaaattccatgagattttgaaataccaagatgaagacatggttgatgagctccaaacaatctcccggacagtctgtgcgcaatttcggttcaccgtccgctcacaaacaacaagaatcacctttggcgtgtggagtgtgagagagaaagagacaagtgttgaagaaagtgaatatctgactgcctctgcccgatttatctgcctgtcgcggacggtccgcgtggggtctgtggaaggtccacgccctgtcaattcagacagtctgctccgctgactcggactgtccagaacctgatacgtcggacggtccgcggtcattacccggacagtccgcggcctgatactcaaatatccaaactttgtccactttctgattttgaatttcaaatttggtttatcactcaaatatggacattttgaccaatccaagggttagtatgcatgcatatacacattatgtacttgagtaacacatattttcaaataaaactatttagatcaaacaagaatcaaaaaattatcaaaaatatccaataaat

SEQ ID NO: 58110 - DNA, 426 bp, Zea Mays
ggatctgtgcaagacttcaccaagtaccctgtagacgatattgttgaggacaagccttgctttcttcatattccaatcaatcgatctgggacaaaaacaaaacaagctgctactggtttggtaaaaccaggacttgttaactacaaggataatcctatctcgtcacactatgctgtggtccaagttctagaaatcacagacagtggttgtcaagattgggagatagactttccagttgaggggatcataactttgcaggaggcaatgaacgagttggtcctttggcatcgacgcgacatcaagttgggtgatgagccgatcttaagccaatcaacaccaatgcaacagaaagatagttcgatcattccataccccatggtgcaggaaaatatgacaccgacctccacaaaaatcgttgaaactttc

SEQ ID NO: 58111 - DNA, 555 bp, Zea Mays
ccctgaagaagattctaaaaccctaaattccctcttgagccattaaaccctaaacattggataacagggaaaagattatgcaaatgtccaactcatgaaaggaaacctttaccatagatgaagtatattagtaaacctacaaaatgtattaaggtagatattacaaaaaggccccacaaaaaccccaaatcaatttcactaagtggagagcacactagagccatccaaattttctctaagtcacaaaaatcaaccctagcctaaagatcagatgtgttcacccttgtgctggcgccaaaacaacttggtccaaataacaaaaagtggccaaactacccaaggcacaccccagaaaaatttgaaaccaaaccatggccatttgacacggtttggcatcctttttgttgttggtgaacaatgcagcagacaagacttggcgcccccatatcttctaagctagggcagatcttcccttggaacttacacgaactagctagccctaggtgccaggaagaaatcttgcacaagacctttggcgagattcacacgtttgtg

SEQ ID NO: 58112 - DNA, 663 bp, Zea Mays
tgcaaagatatgaagtttgtggggacattatcactactatatgatgctaaagtatacaagatagaaatgtacctttgtagcgtgtttactacttttcatcgcactcttagcatcatcttgctagaaacaagtgaaactagataccacatgagatcaacataataaatagggttgtagttactcctttcacactaagactaagcttataaatatcactaaatcactcatcatccaagtcttagttctagcaaacacttacacacaagtatgtaggaatataagacaaatgtgatgcaagcaagcaatgtaatgcacaaacaaatgcatcaaacatatgttcacgagcttgctccccctacttgtgtgcatctcttgttcagtaaaatctcataccattatactttgctcttgatccatttgtattcattctagctcaattgatcagtagttccccatgagttcatgtccaattttctcttgtgcatatttccatatctttgttccaacttgcacatttgcatatctttgttccaacttctccccctttgtcattaattaccataaaagattgttctaaggctctaggaaaatgtacttgtgaatattataccaacttgaaagtactcaataagtttttgatggacaccatatgcatgataaaat

SEQ ID NO: 58113 - DNA, 1154 bp, Zea Mays
gaaaaaaaacaaaagaaaaaggaaaaaggggaaaacggttaatgggctcgctggttgcattctggcccacctagtccctccgcgccaagcagacagcccactaccgcgttctggcactggcgcgtgggcccggcaaatcagtcacgcgcgcggtacctgagtgcgggatacactgtctggcgggcccctttcgccagccgccctccgcaactccggcgtcgtcatcttcctcaactgaatcccgcacatggcgggcggtctcctcccccttcttccggagctgctggccaaggcttcacctcaaatagcgtgcgctggggtcttcgccactcatccctacctccatctccgcaatacccgtgggtttcggctgttgaattgggagctggtcgcaatgcgcttacgtcgtcgtcgtgcgccgtagcagagagggagagagagggaattggagagcccagcgcccccaccaactcctcgccttgtggaatcaccatcgagttcgcctggacaccaccggcaacgaagacaattgaaaggctgagcggaattccacgttgtcctcgcccgccgtcgtacaattccaccgcagccgagcactgcatcaatcaggcaccgattcatggtatggaccacacccatcgcattcgccttcctctcaacatcgtataggatcgttcggattgagtcttggtggtgaatttgggctaacagcgtcggcacggctgcaaatcgaggcctccgccatgggaagggatctgtgctcgatggcagatgcgattggttgaggaattagattcagggagtcatcgatttggcaagggttgagctaattggagaatggtgctcgggatggtcggattcgcagttccgacgatctcgccgccgcgcggtggctttgctctggtggtctgctgctcggggtagacgatggattagagccgcccgtttgatgatgtgtggttctgattagaacacgtgtacccgttgcgcgattcgatcccgaccgatggatcgagaccggatgggttacatcagaacgagcttaatccaatatgggccgtagatctcgtatcctgtggtcataaatagatatcggttcagcgcggttgtggatttaatctgcgccctcgattttggatccaacggctgaaaac

SEQ ID NO: 58114 - DNA, 489 bp, Zea Mays
ggaagatatgttgcgtgcttgtgttctgtcttggaagggtagctgggaagatcatcttgcattggcagagtttgcttataacaacatctaccaggctagcatcaagatggcaccatttgaggctttgtatggcaggcggtgtatctcccctctgtgctgggagaccttgggagacttttgaaaaggttcgggaaactcgtcagaatattttggccgctcagagccgtcagaggagttatgctgatgtgaggaggagggatttggaatttgcagtgggtgaccaagtccttcttagggtatcacccactaaaggagttgtttggttcggtgtctccggaaagcttagcccgagatatattggaccgttcactatcttggcccgagtgggcaacttggcttatcgcttgcaattgccggattccatggcaggggtacacccagtttttcatgtctctatgctgaggaagttcttgcgggatccggaccatc

SEQ ID NO: 58115 - DNA, 621 bp, Zea Mays
ggtaaagcttccggtaaaattagtgtgcgtcgttcgacaccctaaatgtggagttcctctgggcgttcgctatccatcactccctctccctcccgcgccgccggggtggaagcttcccctcgcgcattccatgtcgcaggttggagcacgacgggtgcggtcgagtccgtcgcgaagaggttcccgaagctgggtaggtccagcggcggagcaatcgccacgggcgacgatgtgtggtggtgcaggtctacgccacctgcgaaacactcaaccataggcacaacactgcaactttgggagcaatggcatcctcgatctctgtcgccttgatcccccacgctctcttccaccaccttgctgctacacaacacgaccagcaactggagcagcaacagcaggtccgacaacaggaagcaaagcaacgcaaggagagagaaggggattttttacgacacatcaccaaggaccgataaaaaaagaaagccaatgaagataagaaaatgacatattaaaaaatatatgtttaaaatgatttgctatatggacaatattttgtttaaaaatacgggttctaaaatttctgttaatgtggttgagaaaatatataatatgaggtataaa

SEQ ID NO: 58116 - DNA, 684 bp, Zea Mays
ggcaatgcggatcatgatcatatgttttgcgtgtacggggatcgtggcctgcgccgcgcggtgggttcaggcctctgaggcgaactgctagattggtcagtgtgtttacgacatgtttgctatggtgattgtgtcgttgggagttttttaggtgtcgatttctgcggattttgaggtttttgtgtttattatgatgggatcctgcggcgcttagtcgccgttctggtgatgcatgcgggcttgttcataattcgcgaggcatgttcccaattactacgagtctagcctgactggccttgattttgttgcaatttctggcatattggcatgttttgatcgggttggtaatttctgagtttccgtgcgcctggctgacctgttttgtttttacttgaactagttcagcgagtacactgtgcatcccccgtttttggtatgatgaccgcttgagcagaagggaagtgatgatcaaacgtgaacattaggtgctagctccaatttggatatttgatggaaacactgtgatttactgtataattggtggttggttttagagttcatggtgtcaactgtcaaatgcttgtgccttgaaccacctgggaccagctattgtacttcatgttcccagtaattagtgacattgctgatgtgccaatgcaatgacgatacactgtttcattctcc

SEQ ID NO: 58117 - DNA, 351 bp, Zea Mays
cctgctgctatactatcactagtatggtctctgatgacaaaccctcgggcccctactttcagctctggtagaaaagctccatcacaattaattttgaggaaaccttcaggtggtggagtccatcgttcttgcatctgtacaacaactgcatttcttggtttcctacctttcacaattttctcccatcctgtcatgctcattaccgagtgaactacttcatcagttgagttcatttttccccattgatcactttgtttcttacattcaaccaagcccagagtaaataaataatctccaaacaaactgtctttggtagtttaataatttcatggaccatgttcagagtcattg

SEQ ID NO: 58118 - DNA, 586 bp, Zea Mays
gaagcggcgacgcccgcgtttgcggcggagaactcaccgaagacgaagagagcgcaggttccaagggtcttagggcaatcggggtggcctcaagaggttagggagggtgtagggactcgctggcgagggccaaaccatggtggaagcaccgaaggtcggagatccacgacgaggtggcatggtggcgacgctagcaactccgacgagcaattgcgcaatgcagagagcgagggtgcaatcagagtgggtagggggggttccttacctcaaggtgagactcgggatcccctctgaggcagcgacgacacgacgacgacttcaaacgatggccacagttctagggctgcacggggaacgacgattgaacgcgggcagagtgaagtagagggatagagagaaattgagggtgagttccaggctattggcaccgagacaaagcttaccgtggcaagaaaaacgacagggcctcgacatcggtgagagaatgggtgtggggcgatgatgagcggtggcggttctccctcagcgtgtgtgcaatgtggaattgggagggtgagagctctcagagtgtatgagtgagagaggg

SEQ ID NO: 58119 - DNA, 536 bp, Zea Mays
tatggtttgaagaccgattggttgttcctaaaaatccagaactcaggaagaaaatattggatgaagctcatctttccaaattttccatgcacctcgacagtaacaagatgtatcatgacctcagatctttgtattggtggacccggatgaagagagaaatagctaagtatgtagctgagtgcgacacttgccaaagaatcaaagctagtcatttgaatgtagctggtaccttacagcctcttcccataccatcttggaaatgggaggacctcagcatggattttattgtgggtttacccaacacctcccggcaccatgatttgatttgggtcattgtggacaggctaaccaagacagctcatttcttgccagtacataccacctacagagcggaaaagtatgcagaaatctatattgaccaaatagtgtgtttgcatggaataccaaggactatcgtgtcagacagaggagcaccgtttgtagcacgtttctgggagcagctgcaagagtcacttggaacccatgtgataaaaagc

SEQ ID NO: 58120 - DNA, 778 bp, Zea Mays
cttcggcgaagacccggccggccgtacgtgttcaaagtccactcggatggtttcatactatgtacgtgtgcgtcaaggccgtactaaatactcccaatggatgtagccggatcggttcagaacaatgatttcaagtcatccgactaattaggattagtcaggattagttgggctagtcggctattttggctcgattagctagacgactcgactagataggctggtcgtccgactaatcgccgattaggatgactaatcgctcaattactatttcctagtcatccatcctagctagtgttttgttattgggctattttcagcccatctacagtatactttagactaccctctcctctcctctgtaatacctagccaccaaacagtgcactacatacgtctcctactctcctctcttgccatctcgactgttctagcccttgcccttattcacacatggtcgccggtggttgccccttcaggcctcatcggcggctacaccaccctgccccttcccttgctcgtctgctgcagtctccacctgcgacagctgtctcaaggttcactggctgcagtctccaccctgccccttcccaagctccagcacacctgcaccattgaggagatgagctcgtcatctcaaggttcctcctgctccctcccaatcccccccttctctgcagttctaccaaactagtggatggttgctggctgctctaatcctaagcttgtgctaagtagtgactttttaatttatataatgtatagttgtatataggta

SEQ ID NO: 58121 - DNA, 790 bp, Zea Mays
gagaattctgactgctgaagctgtggttgcagactttgtttttaagaatattcagccactgaaggacagagcttacccgacttatttgtatagtggtgtcactgactcaacccgggttaccaacaagaggattcctgctgtggatttggtgagctgactggaaatgatccttagaggtaaagtatcaaataatggtgctcctgttgcatattctgcttggaatctgcctccttctaagtcctttttcgattttgtgtccaatcctcctgctggcgacagtggtttgggtcttagagtgtgaccctctctcgaagaagttgaggttctggttgcttcacttggtgatcttcccaacgatgacaagcaagttcactttgagatgcctatgagtctaggtgatgcagagataagtgctatgctggacatgttggctgaggattcatctgactcggtccctgttgaaacaatggctgttgcgactatcctagagcctgaaaaaccgtgaacactaaaaagcttgatggtactcgcccgaaacgcctctgccaggctagtcatccaactgcacctgccgaggggaagaaaaagaaaaagagacggcttcggcgagtgtcatgtttggaccaggatgctggcccttctgcccctgctgctgaagaagtaccggtggtactctttactggagctgatcccaatgggtgtggccctgctgatgttgatcccaatgggtgtggccctgctgatgttgatcccaatgggcgtggtcctgcttatgcagaacccaatgggt

SEQ ID NO: 58122 - DNA, 466 bp, Zea Mays
ggcagaactagacatgggagtaggtaagccaaagggaatccactcgagtagatccctcgcccgacccgtcataagtgatcggtcgcattaacagcacctagcgctgagccacagcaggggcaccggtccacctcccgctcatgacctatgagcccctccggctatgacacactcatagcctacgaacccctcgtactgcggtgcatttacgacccacgtgcccctcgacctgtggcgcactcatgacctatcggtactaggcctgtgtgcatagaccactagcaaggcacaacatgacgagccgcgtcgagccccaaactatgaaggccaggggttggcgtatcccaaatgatggcgcccaggccccacgctacccatgccatctgccataaagaaaacgacgcaaccgggcgatcttagaacccaagggcgcacatggcttcaccctgggtaaaacgcttggttt

SEQ ID NO: 58123 - DNA, 658 bp, Zea Mays
gaccttccagtagttgaattagctgataagattagagaaaagattatggtgttgtgggagaaaaggagacggataagtgagaggttgagtggggtgatttttgccagccataattcaacagttgaatgctaagtctagaggactgggacacctaaaggtgattagtgctgggaaaggatatgctgaagtatttgatcacctcccaaagcaagaaaggcatattgtacatctgtctgcatgggagtgctcttgtcttgagtggcagcatacaggtagaccatgtcagcatgcacttgttgtcattaccagctttagaaatgagaaaattgagaattatgtgcattcttattactctgtggacatgtttagaaaggcttattcaaacattatttaccctctaagagataagtcacaatggcctcaggttgagttggaccatgaggttagggcacctttgggaaagaggggagttggtagacaaagaaaattgaggatcaaaagttgccttgagggtgggaggaaatcaaaatcaactagtaaagaaggggatcaacctgcaaaaacagtaaaaagagggcctacaaaatgcaagagatgtggtgaacttggacataggcaaactagctacaagtgttctttaaatggaacaaaaaaaagg

SEQ ID NO: 58124 - DNA, 367 bp, Zea Mays
gccatcttcggctcacgaactatatcttcagaaatcctagaaatttttgatgctccaggtggcatcatcttcgtaggccttagaacagcttctagcacattagccattctttttccttgcctaggagttcctgccgggcatacgtcatctttcgctgctcttgcaccttcggttgttcttgcatcttcgaacactctgctactatcgtttccaaatgagtggtgggcattttagccactatgcttgttttggtttctccagcttttgttcaaaaattccagaataacattagaactttaacaaataagctcaaagttaaagaaaaatcaaaactcattaccttcggaagtctagcagtcacttcact

SEQ ID NO: 58125 - DNA, 664 bp, Zea Mays
ctttagcaaatatgccaactctaaagtaattcaccaccttgtgcacgtgagtttgcattttcacaattattttcaaaaagggttagacggttagctcactaggttctaatgcatgtgcatgatgaagttcacctagtagcacttagacaaccgcgttgcaacgagaattcccctcttaatagtacggctgtctatcctaaacgtgatcacactcgctaaatgtcttgatcactaaacaaaatggccctataatgtatgcctttgccttgagctcattttgttattctcctttttctttttcaattgcgaagcacttgatcatcaacatcaccatctagctttataacttggaaagaaccaccatatctaatgacacacttagatcaaagattagttctataggtttcatcaattaaccaaaaccaaattagagctttcacctgggccgctggaaaaaggaaaaagggagcgaggagtggagaatggagactggagagcagagagagaagaagtccagcacgtaacacagagcttcttccctgctggcagcgaacgaagctccacacacccacccacggtggactttcttttctactcctacttttatgcagtgctccattcgtcactcgtacgtaatccgtgctttcgatctgtctctgccgtg

SEQ ID NO: 58126 - DNA, 1072 bp, Zea Mays
gccgaatttattcctaacaaaacaatgtattatcctaacaaaataatataagagcatctccaacaatagcttaagctggtgctttaaactaaaactaggtgtatgctcgtgcgttgctacagagtaaatatgtcatgataagatacgttgaaatgcagaagcattaattgttgttctatactcttgttagtatcttttaaagattaagaatgtttacaaaactgtatcatggtaaagcttgaagaattgcttcctcatttctggatctttatctctaagtccgagcatatacaatatctcagtcttatgaaaaaattcttactgaaaagccaacggatacctgcacgaaaagaaaccattaaagaatagtgacgaagcaggcagctccatctaatcagtttttggcagaaaacactgatgaggccattccgacctcatgccctcctggcctcatttcaattgctaatgcccccagactcaccagcctattagtccttacatccctccttctattcccttcactaaggacagggacacggaggatcgtcaccatgtcatctagtgacgaagcagcctgtatcatctactggggaaaatagtcttgtaattttaatgtttgtactaaacatctgcgcactttgtaagcaagtatatttagacattgcttatctctctcgttttcccccaaaaacataacaatggtggtaataaagtattgactcaagtttaagtgaaactggagaaagaataactgaaagcggactcaagttttttctctgaccaaaatctcttgcatgctttgactacaattccgcagctgcccgtctatctatatctacagcttgcatgctttgctgtgcatggtgttttttggctttttagacatattacctgactattcgttttattcaaaaaaatgcggaaaataaatagttaaacaaaaaaacatcgtctgttttaggagaccgagacaacaatacccctagacaagcatggagaggagtgaagatcctgacgtccatggctcgtcctcatctatgctgaatccgacgcaaaagccccagggcaaacg

SEQ ID NO: 58127 - DNA, 395 bp, Zea Mays
ctctagtattcagagttgctttggactttaaaggcccagcccactggttgcaccatgaagggaggcggatgggtcgaaaataaaggcgaataattgacggcccagtccatctgtcatatctggcgtgtcctactactatctatagctagcttccaacaagatttgcgcttcagactttttggaggtctacttgggtgacatttttcagtaaggtccatgagagaagtgtgtagcttgtggactaggtagaggacagcaacatcgacagtccagcaaatgacatcaagatatgtcgaggaagattggagctttcaagtcgataggtacaagtcacaagccacagtccgagaatctgaaaagcttaagctaattgttggtacgtagggagatacccc

SEQ ID NO: 58128 - DNA, 365 bp, Zea Mays
aagtttggaaggaaaaagagacaactacaaagggaggacactcaaatgaaaaaggaagaacatcaaggacaacaacacctacttagacaataaggtctttccaacaatcaattgtgtggttgtaagcactctttatctttttcattatgagattacaaggcttaagttgtttattgcaaatcttataagccttgatcaaagataaatagtacttctccctatttgcctttaaaaatgagtgcattcacccatttctttcattcttgatgcatatctttagggggagcctatttctatatctttgttatattgagactagcacgttatcttagtaatctcatatagtctcatgtgtgagaacaagt

SEQ ID NO: 58129 - DNA, 408 bp, Zea Mays
caaccctggtctaacaacatttctgtttttcccctttattattaagttttgggcagttttcttatttaaatcaaaactctataaaacattacaggaactatggggtttactatttttgcttgatagtttatatttcacaaagtctagcaaaattggtttgactaaatttggatgattattcttcaagttatgcatttattaagttctctgcaatatttaaaagaaaagtaaattcgaaatgggaaaagaaatacagatttacgctgaagtccctgggttttcttcccccttttctctcacaaaacagccctcggtctactatttgcatgagtcactgaccttacacaaaaccctctggatttaacctaaatctaacctgcgatccttggctggctggaacagtaaccg

SEQ ID NO: 58130 - DNA, 565 bp, Zea Mays
aaaaagtcgcccaagggtgcagccggactatcacaataagtgcaaaaaatcgaagtcttttccaaaagaccctccgcgcaaaagtcgcctacgggtgcagccggaatactatatcgaaaaaatcaaagcctacgggagcggcctgatcaacaaaagcgcgcagcttcatcacacaagagtatggttacatacatacaacgagggcattgcacattacattggctcaaccttcgggatgatacccatctccctatagttgaacaacattattctcaattcttcacccgcaaacagacttcgcagctccccctcacccacactcgccccagccggcgaggacaacaattcccgcttgccagccctgtccacacgaaggcgaccaccttccacctcaccacgatgacgcccactcaccctccgtttcgccaccgcccttcgccgcctatgcccaacactcgcacccggaaggtcctcatcacccattacacgcggcgacacctccgccgcagccacatccaatgccgcaaagtattccaaatcctcatccaaagactcctctgtccac

SEQ ID NO: 58131 - DNA, 323 bp, Zea Mays
cgacaatgggaatgagaactgctagtgattccccgcttctgttgtgaggcatggatggaagataccggtgagccatctaccaccaccaagtgccaactacagtatgcctgaaagaggggaggggctgctgcccaactatatatatatgtaacgggtactacattagtaatatccacttgtgacttgtctctgttcctctcaggaagcgtgtttgagagaacaggcctgaaacccgggccatgcttgtgtctgtcgtcctgtccagattccagaaggcggccatgcatctcgcgcctcgcgggagcttctcgggcgcaggctgg

SEQ ID NO: 58132 - DNA, 605 bp, Zea Mays
accggtgaacttatccaacccgccatagagagcttggtacggtggccggagttgtttactggccggggcttatctacggcagcgatatttacatgacccgagcgttatccaggcactggtgagcgtgaatcatctcattggcgggaatcgtggcgagagggtcgtcggcggtgagggtcactgaacttgatccgatcggctactgtaccatgggatgcttcttcagtgtgcctcacagtcatagtttaggaccaattctctctcaattttctatggcatctcacccaaagatctgcagcaaagttgtagagctacaaaccagctacatttccactataggaactaaactcagttgagcactagatcatgcttgaattcgtggccaaagtcactgcagttgcactgtcagtctgaatttcagacattaaacagtctgacagcctgactttaagtgtgattatctccaaatttttcataacaaccttgcttacactcttaagcaaaattgttctcctttgttaggtctacaagtttgatgtggtgacctagggcaaaaaccctagaatttgaaagctacagagctccaaagttaagccaattctctg

SEQ ID NO: 58133 - DNA, 466 bp, Zea Mays
tgcctttgtatctccttagtttctttatgattgggttgatatgctggacggttaggaagtgcagcccctggaatgagatcaatttgatgctcaatcccatgaattggaggcagtctagccggtgtttcttatggaaacacatcttcatagtcctacaaaagatcagccacaacactaggaagagatattatgtcattaggagaaatcaaaacatctttgctcataagtataaatagcacttgatatgggttgttcctcacttctcttagcttagattttatggctagcataactagatgttctccctcttctttctttttatctcttgaatttggcttgtagaactcactcaccgaattgtggatggcactcaatttcttttgctcttgtcctcctctacttgctgcactaatttcaattttttttgtaagtgttcatccatgatttgttgaggggtaataggctt

SEQ ID NO: 58134 - DNA, 791 bp, Zea Mays
accgaatgctccaccaaaagtaaatcataaggccatcaaaggatcttctcgaatgcttgttgcacctacttctcagattcctccaccaatcatacaaggattcagagccatagatcccctaaaggacgaaaggttcgtccaagacaagattctgtcccacacctccctgctgaaggggcagtccttgcataaaaaatatctgctacaaaaggaaaacgaatgaatttcaagccttcagcaaaaatacattatgcgtcacagccaccacttcaaacagttataaatgtttacatagggatgcatagggaaaaaaccaatgcaaggtgcatgaactgacaatggcactttgaaacaatcccatagcgcactgaaatcggctgcctttttcatattatcattgttaaggtaacatcatgtatccctgataatactactgatagccttttatatcaaaatgaactggcagatgatgctttgaagcaatcccatgcttttttattctttcgacggggtagcaaaccctcacctgatatattaggctctagcagactgtagaaaaaaccctaagaggcaaaaggtttacaagcatgagagggcgtgagagaggcatctatggcaagcagacatcagtgtggttcaaccgataagcccacaggcgggcatccacaatacatgcacgaagagtgacatctaacggtgaggattcagtcgaaagacagttgttgcttcgcttccacaagtgccaccagcaaagagcagcgaaggtgggaaggtggcttggtgtagggcaa

SEQ ID NO: 58135 - DNA, 741 bp, Zea Mays
gcgggtctttctgactgctgaatcaagaatcttcactggtttttcacggtactgaaggtctttctgaatctgtactgtctcttcttcgatgtgactttctggtgcttgcaagcatttgcggagctgggatacgtgaaacacattgtggatgtcagacatggattccggtaattccagacggtatgctgcgggtcctaccctgcgaatgatgggatagggacctacgaaacgcggggctagcttcccttttacttggaacctcctgacaccacgcattggagaaaccttgaggtagacgaagtctcctttctcaaatcggagttccctccgcctgttgtctgcataactcttctgccgactctgagcttctagtaaccttctgcagatcagtgcaactttctcttccgcctctttgacaaaggcaggtccttctagtgctttttcccctacattggaccacatgagagtggtctggcatttccgtccatacagtgcctcgaatggcgacatcttgatgctggcctgatagctattgttgtatgagaattctgcgtagggtagactggattcccaacttctatcaaaagctaacacgcatgctcttaacaaatcttcaaggactttgttgactctttctgtctgcccatcggtctgagggtgataagcggtactgaaatctagcttggtgcccatagctttctgaaggcttgtctagaacttggatgtgaactgggttcccct

SEQ ID NO: 58136 - DNA, 802 bp, Zea Mays
agtggacttctccctttaagggttaacctactgcttctctgaaggggcgagctccgcgaagagatttgctggcgaagggccccaccaatcaaaggttccatggatacctccatcaagcttggatgcgttgagctctccttttcagcagaagcgaaggcacatatgcatcatccatgatcccgccaaggtgggcctgtccccgtacaaaccgggcccgcttgttagcccttgactgggtagaaaatctggtgtaactcaggaaaaattgttccactctgtaattacctcgttgcacaacatattccaggaatacaacaggtaactggggcacgaacgtacttagaccaactaccctcggttgccctataaataccctcgccctttagctaaacgggacatgcataacaagacactacaactccctacctaacattttgtcgtgcatcgtgcctctcgcctgctcctgagtgtttgggttcatgtgtcggactcgtcagtccacatgtctgacctaacaacgctctccttcaggttttgtgcgttgttgccttggttgggctctacttgatcaatcgagtcagcctacttgatcaatcatagtcgagtccatctgagtagtgtccctgacatttccctctcctccagaaatagcttccccaaaaactattgaaaggatcacgatgcccaagagggggggtgaattgggcttctctaaactttttgcaaaagattaaaccgtaaacaaaagaccaacttcacccaactacttagctaaatcacaagagctaggaaagaataagca

SEQ ID NO: 58137 - DNA, 473 bp, Zea Mays
aaaaagttaaagtgagataataggataacaactttgttacagaaggattaacaagtttccacatagaaatcggagatcaaagccctgcaaagtgctttgtcaggtactctgaatggggtttcccattgtacagtagagtgaaaaagatcttcagatgcatcgcccctcgccgccggtgaccctcgtgtcgtgatctgcgccggtgctacgattcgtgctctctggtgaggagatagtcgcggcggagtaaagatcttggcaccggatagactcggacccggtcactggtgggttcaccatacccacttggcctgcgggcggccgagatgaccctcaccggcattggccgcttaccgaccatgcaccacatgcctaggggctttaacacgtcgcagtaaaccgttgaagtaagtccgtccatcgccggaggccttgccacggtgacaaccacgatcacccgtgccagtacattt

SEQ ID NO: 58138 - DNA, 413 bp, Zea Mays
ttttaaccgaaacagacttctaagtacttgggatagcaatcaacgttcctctttgacacataatcgatttctaaacctactttatgcattactaactcgaccagacatcttatatatattaaccaattcaacgatatttgagacacacagtcagcaaagcactccacacaatatctgtatctcgaacttgagtatttactacacgaagtgattacttcatatttatgcacataacactacatgagatggggtgtttttaacaaacactatacacacaatcacaacaccataatacctcaaacctagacttcaccacacatcgcacctgttaatgacacaaaatcaatgtgactaatacacatgttcaattcatccacgagcacaaacaactaacagagatagcaatgtagttt

SEQ ID NO: 58139 - DNA, 368 bp, Zea Mays
cggaagtaataatcagaacaaatagaggccaaggatatccatatacttaatgtcatgcgcatttcttctggctaaatgactgaccaatggctggactagagatggcaacggataaactatccgaggatagtgtctctggacatccatatccacgacttatatccgatatccgaacccgtacccgttacccgctacgaataaaaaatagtatccacatccgttacccgcgggtaacggatatccgcggatatatccgtttgcccactataagtttaacttcacacactttagataagaaaagactagttataacatatttggtcgcagaaaacatcatggttaagtcataaaatattcccagttttctc

SEQ ID NO: 58140 - DNA, 498 bp, Zea Mays
tggagaagtcgaagatggtggcgtagcccggagacccggccatggagaagttacggacgccggaggccagtaggcaggtcgacaaggacctggcgcgcacgccattgtcgcgcggagactgcgacgcgatgacatggggatgcgttgataagagtatgctgagtatgcctagaagtaaggaagttggggagctattggtgtacatggtggtgatggtgctctcactctagtgcttgtacaaacagtagcgttcttgagttcggttagtttccttctaaaaaggcaatggttagtgtatgatactatgatcactggtctgcaatgatatatatactattcaactcaacacggtgcaacttggctacaagttggctacttggattaatctatagtacttggctgctaagtagtagtaccgctttccttagtttcaaaaaaaccaaacttaatgatcgttgactaatcattactctaacattatttctaggtacaaaattg

SEQ ID NO: 58141 - DNA, 478 bp, Zea Mays
cacatattgtaatttaacttgccatagccgaacagtcaccagttccatcaaacttgcttactttcgaatgtgacattttgagacagtaaccacgtgcctttgatataacacgactctaataccacttgtgagggtcggacgcgcaacgaaaacgggccccaaaagcagcaagctaagctgtcaatagcaattcatcgaagaccttgtgtgcatcaaccaaaaaagcacttaagcttcagatcagacaaccacaaactgtccaacagtacaacaacactatatgcacagcaatcagctcaatacaacataaaccccgtcaacaaatcaccatcatatcaaagaacacctatatgcctctcatgccaacaagaccatacaccaagactattgagggaacaacaagcaatatgttgaacaatcaacacatatgacaggtaaaataccacaacaagtgaagacaaataaatttacgtgggaa

SEQ ID NO: 58142 - DNA, 499 bp, Zea Mays
cggataatgatttctgttaaagaagagaagaagcctagagatatgtagaaatgactaggggcttcagggaaaggtttaatccaaggcatgccaggactatccacaacccacctcaaaacaaagacaaaaccaactagactcaggggcaacataatcaatcgtaaggctttaggacccagcaataaccctctcaaaacaacttccatccgccagcctcaagaggaggcaggggaggatgaagcttcaaggaaggtttaattcccagccaaggaagttgttctgtcttatccgtggagaagacaaggggtacaccataaggacatgctaggtaacaatccaaaagcagaaggaagttgctgaagcacaatagaatgaaccaaagcaagtcctccacacttcctcatactactccccatacatcctagagcatgtccatcgtcaacaaccaaacccatagtctttagggtccattgcttttgcaagccaatcttcagctcac

SEQ ID NO: 58143 - DNA, 415 bp, Zea Mays
gagaactgatgcggaggtgactaggctcctcggtagtcgccattatccaacgacaagcatctcattctgtttcgtttatgttgctaaagtagatgtagaccgtagggttcattccacatggtgatttctccgtcaatgcgcttttgcttggaataccatccagcattccaactctttgaggggaggaatatgctctcgtggtagcagttgcgtgccgccctactgcacgagtagccaatggcgcccaaatctttttgcgtccagatgcgaggagatagcatcggttccatcgtttatttggccgtccatagcactgcgaaattgatggggcgactgaacctgaccccgcatgtggatgttctgatatcacggacgaacacgaagctacccgcgaatctatctttgcccttgttcg

SEQ ID NO: 58144 - DNA, 643 bp, Zea Mays
accttatcacataaattaatttacggttacatacacacagcgagggcatcatatattacattggctcaaccttcgggatgatacccatctccctatagttgaacaacattatcctcaattcctcaccctcaaaaagatttcgcagctccccctcacctacattcaccccaatcggcgaggacaacaattctcgcttaccagtcccgtccacgcgaagacgaccactctccatctcactacgatgacgcctaccacttcgcgacaatccactcactctccgtttcgccaccgcccttcaccgcctatacccagtactcgcgcccgggagctcctcggaaccctccgcacgcggcgaaggctccgctgcagccacacctaacgctgcaaaataatccaagtcctcgtctgaagactcctccgtccacacaatcaaactcccagaatcatcagactcaaaacacttagacacagagccaaatgaattgtcatcagcagccacggtcgaagccaccacaaaaatagcattgtcagtagtggttgcatgcgcaggcccaaacctcagaacctgcgcagcaaccgaggttcagtatcacatagacaaaatttacaaactcctcaacacctattcagccacctgcgaagg

SEQ ID NO: 58145 - DNA, 557 bp, Zea Mays
ctacgtttggttcttgagctgcaagaaatgtgatatggcctagccgcatagagtttattttaggaaacattgagctgattggttgtgttcatttggtagcaaatagtccctttttgtactggtagcattatttaccttattgagcattatactactccatagtttctatgtttaggagaaaattttggggaaataaaagggggaaaaggtaaaagaaaaaaaggatgattcttttccacaaattacaggctcaaacgtcgtcgatgataaacggtcgatggttttgtcaactgctaccataggtcgctggcgagccatttcggtgccgccccagcctactcgaactaggttgcggcctggtactcgttcctatcaacgagaacacccatatcgactggtggtgattctggtgcatcccttcccatggctttcgctgaagatcgtgtgggggcatatggaggcatcgaacgtgcaactggcggttgttgtgaaggacatccagtccaccatagtagagctcgccaaggttatcatcgactcagtgcagccgatgggag

SEQ ID NO: 58146 - DNA, 446 bp, Zea Mays
gaataagactcaactcatctatagatttcgcaaactctaacacacttcaaatgatcgtgtacatagccattgttagggaccttctcccaccgaaaatccttaaaatattacgttaacaattggtttaagtctattttaggcgcttcgaaacaataataaagttaaacctcattcaagaccttcctctggacatctgacatgcaatggcaaagctaagaagcttctgcttcataccctggatgcgatgacaagctaccagagaagaagggggaactggtaggcttgatcaatacatctgcaaaggggaatacgatgatgcccctaaggaattttgtgattcatagtgcaaaactatgagcacgttcataatttcatacgaagttgtatactaggttgtccctataaaataggcaaacagtgccatgcacaatgacacgattttctgc

SEQ ID NO: 58147 - DNA, 340 bp, Zea Mays
gaagaggctcgtaatgtacgtgttgcgttggccatagatgggttcaatccctatggaatgatgaggtgcaaaatgataatgacttagtaatccttgaaggcaatgacattaatgacgaacttgcgtcttccgatggtgttgactatgaaacggttgatagtgatgatgagagttatgatccggctaaccccaacacatatgaagattatttttaatcgatgtaatgctatatgactttttatttcgcacctgtttttaaatacatctttttatatgtgcttatttgtttactcttaattgcaggtttttggacaaatatggtggacggtaattggttgag

SEQ ID NO: 58148 - DNA, 932 bp, Zea Mays
ctaaaagttaaataaagagcacacctaaaatttcggctacatatttaaactatactttgaaataaataggatggtgaattattatttttacctaaattattcctattgggttatataattatatggactccttgcatattgaatttcatacatacaaataattatttgagcaaattaactaaggagtgaataaatataaaatatttgcattcatgttggatatttgttttattgttgcacttgactacaaagcttggatttgaaagtaaaacttgaaacgttattgaataacagaaaatacgtaagaaaacaagagaaagaaaggaaaaatgataaaggaaaaaaagtgaaaaaaaaactttcatacgatctcaacctaaacccattttcctacaaccgtcccactcccttggaaaaagaaaaaccatagcccgcatttttttttattctcttgccgcggatgacatcaccttgatgtaatgatgacatcaagctagcaaagaatccagcacgctctgttttctcttggccatcttcttcgtactgcatgcaaccgaaataccaggaccatgccatagaatctctccgttgttgggtagttgcacgatttgcctgcatgccgtaaccgtcgaccatctagtaactcggcgtggatctcgccatccgcgcggactcggcttgagccccaggtccatcttctccttcctatcgcccgcaacggaacaggccgtagttcacgcaggaagaatcggcctcgcccgcccgaccaaaacggacttcacccacagctatataaatctgttgctgtgcctccatgaccctgcgtgggagctcgcacactccaggcgccgggaatcacggaccgcggatctgactgtacgccctcgtcctcctcgacacctcctccgtcgcgtccagccatccatcgttcc

SEQ ID NO: 58149 - DNA, 421 bp, Zea Mays
gcgttggatgcggcctttcccaggttgccagggaagcctgtccgcggttgccgcgccattccccgcctcgaatccgggatctccaaacctggacgccatcagcgcctgccctcagtgatttggaaaccgcgcagatccaggccattccccgcctaggtatgtgtcgcgcagattcagcaacatcccaccctgccatgtgggctaggcaccgcgccgtctcctccgcatcgccagcccgcccgaccaaccatgccagacgcaacgctcgtattctacagcttctcgagccgccatgccaacgccatgctcccgccttgccatcctctctgcctcgccatccagccgtgcaatcgcagtatggccggttgtggaggatccctcgcgtcccctagcccgaccagccatcaacccccttcgtttc

SEQ ID NO: 58150 - DNA, 344 bp, Zea Mays
gccggactcatcgagtccccactaggagcttgcggactaccccgagctctacgaggcggcatagctgtatccacagggatgagaataataagtatatgagataagcatagcatctctctagataatgtcaaaactagcacagagaataacataatcatatcaatagcaagaccgaaaacccatcctacatgtgcagtgtgtcaatttattactactccacttgctaggacctacagcctatgctctgataccaactgtaacaccccactgatcccacacgatggatgataccaaaagaaacctttctacaaaacttatgcaacacatagagaaagaaagtattg

SEQ ID NO: 58151 - DNA, 928 bp, Zea Mays
gagcttcaagaataccatgtccccaatctgaaattcacgctcagaacgacctttatcttcctggagtttcatccgaagcttggcacgacagagatgctggtgcagtaaacttgtcatcactgatttgttttggatgaaattggaaagatcagtagatgcttggtccaactgctgcacagcaaagtgacgcgggggatacccatacaaagcttcaaacggggtgcagttaatagaagagtggtggctatattataccagaattcagccattgacagccactgtgcccacttagcaggacaggcatgaataaaacaacgtagataagtttcaaggcattgattcacccgctccgtctgtccatccgactatggatggtaggaactgctcatgtgcaaacggacactagcttgttttaagagggcttgccaaaatttactggtgaaaatcttgtcgcgatcagacataagagcagacgacagcccatgaagtttgtagatatgatggaagaaagcctgagcaaccgacactgcagtgaaggggtgagtaagtggcacaaagtgtgcgtatttagtaaagagatcaatcaccaccaagatgcaattaaaactaccagaccgtggaagaccctcaatgaaatccatggaaacagtgttccaagctgatttaggtacctccaagggttgcagcagaccaggggtgcgggacctgtctgatttagcttgctgacagacgagacaagcacatacccaatcatgaacaaaagagttcataccccaccaagcgaagacttgtttcaaccgtcggtatgtgacagggatacctgagtggccacccagagggctattgtggaacgcttgcaccaattttgccttgagagtatcatcctcgccaacccaaattttgtctttatatcgcagcagtccgttgt

SEQ ID NO: 58152 - DNA, 770 bp, Zea Mays
cagaccattatatacataaaccctattcagtgacagtaacgtagactaggctactactgagagaacttgaatctttctagatttgaaagcatggagctgtttttgtttaggcgatggaatatcatgtaatgcagtacaagagagcgaatgtcctctgaattatcctgcaaaccaatataaggaaagtgtgagttaaacataattatacatacattgtgtcataacacaaaaagtctagctatcaattacgtaccggatcaatgactgcattgatagctccatccatgtagtcgtagtgctgcatatatctcataacgaagaatccacaatcattaaaccccgctttaattgttgggcagttcgtggggagttcaatagggtacttccaaaaagtagggagggctgatcttggtcgaacattttgtatggctagattgagcctactcattattaacctagcccatggcaactgcctgccacccagatccataggtgtacaatggtaactctgctaggtagtcccacccagttatggcccatatgggttggaatctaacacatgtatgcatccaatctgaaaattaacaacatacaaggtccaatgtcctgcgcgtagcatgagtaccattatctgcatgtaaaaaatgaaaaagccaaatgttgaatacactatggttgatatgcatgaatgtgattgaaacttaaatgcagcaaaatgcagtgacagtgtgatgggtcagggaacagaaatttactgatttgtactcatc

SEQ ID NO: 58153 - DNA, 539 bp, Zea Mays
tttagtcagccttcccagagctccagctttctctcgagcataacaggtactcctttgcaatcacaccacgctcgttggacagtcacaccggtcaccgtttgccacctgcagtgctggtaagaaccttgtaagagcggggtaagacgcttcataatttgtatatccaccaccaccaccaccatgagagatagttgtagggttcacattgtttgttgcctttttgtctctgttttgtgctaacaatgacaggaccaaagaatcaaatggacaaggacaaggggcctaagcttaacgatgatgagtgtgtctctcagctggaattgaaggagatgatgcgtgtgatgactgaagcttttaaaaaataccaggactctgcggagacatcctatgagcagcttgatcgacgagttgctgaacttgttacacgcatggacgtactggaggctcatcccccaccaccaactccagccccatctcactctcctgtggacgacgacgacgatgatgacgatgtttatgcatcgctgccacaacgcctc

SEQ ID NO: 58154 - DNA, 461 bp, Zea Mays
gggagacgacgtcggtgagaccgtaagggcataaacggtatgatggcgctatgggcccacctgtcaggtccgccaaaggatctgtgacctattttgacgaacgacacagcttaagcgaccctcttttacaactgattcgagaagcggtccatttagtagagcggtaacataaagtgacccatttttgccaaattcctcaatgtaatcctagctatatatgtagtcaaactagctacaaagaaatttgactgcatatatgttcgaatagtcaacatggttgtagagaaatttggattgcaacgatcaggatcgaggaggagacgaatcggccgcgcggaggactcctaggtagcgtgaagtgggtagggacaagcatcgctggaggaccggctaggcctggggaacaatgttaggacgacaacagcacgaccagggacggcggggacaatcctgttagggcc

SEQ ID NO: 58155 - DNA, 377 bp, Zea Mays
gccaaaattaggagccaccacccttggaaactataaattggtaccctgacctgctccgctaagtaattgtgcacccagtgaaccagccctcacctccaatcatccctcacaactccccaatttgggatttcccccaaatcagtcaagaaccctgccgtgtgtgagctcgtcgtggccagctctccacaggtccaatcatgtcctcctcgctcttgtttcagtactcttgtgtgctcttgatgcttctcgactcggccaattgaactagaacacgtaggatcaccaggaatgcctcggttcatccgtagttcgcgctgtcaccctggacagagagattaggagctagaactttgcaattgattgaggcgaaatggtcg

SEQ ID NO: 58156 - DNA, 367 bp, Zea Mays
cccccctctaggtgctctcactactaagatcacttagcaccccacctaagagaagagaagcacacacatgaagccggggcagctttaaattttgtgaccacacatccggacatagtacaccggctcaccatcgtctggccccttaacaagctcgcagacgtcttcagcccgaaggtcgtttgctatcaccaaatgtttccagccatcggtgaagcccacaaataacgggcagtggtggatgacagggcgtaatctattcttggggtccttcagcattataacatcacagccatgccttctctgtctaactgtattggaaagtgcacttctatctgctccgtgcttcctgacccgattcaggcattca

SEQ ID NO: 58157 - DNA, 699 bp, Zea Mays
ccccaccgagcaagccaacgacgcagatcgactgaccaagtccacgcagtgtaaaccagcgaggcggagctgccgaccaaatcctcgacgagcaagccagcgaggcagagcgaccgaccaagttatcacccgagcaagccagcgaggaagagctactgtccaagtccccgtcgaacaagctagcgaggcggagcggtcgaccaagtcctcgtcgagcaagtcagtgaggtggagctactgaccgaatctctgcgcccacgagctatgcccacgaggtggaaatctgaacccagtgaagcgagcccatgcccaccacgaaagacacgtcttcaccacaccacgcctgaacgtgcacacactgcacaagacaagcccagggggaagaccttagcatagtactcccaacagtagcacgcgtatcgagaaagacgagacaacacatcatagtgagcgtatgtatcgtataggatgggaggagacgcaaagcgtgcgacgggtgaagccacgccatgtacgaccacatccaaggacatactcatgggacctgccatgtactgccactaggacatcatcaacggactcgatataagaaccggcacggaggacggagccaagtcaggggtacatatatgcacaaaaatgggacccagttcgttgacccaggcggatagggctgcctttcttcttcttcttcttctt

SEQ ID NO: 58158 - DNA, 1641 bp, Zea Mays
agcaaccatgtaccactcatgcattctaatctccagagtcgacaacttagaaagttgcaccgtcgtcacgaacggcctcccattcacaaatttaggaggaacatcctccttcttgtatatcgggatattgattttaagacgtaatgattctcgagtatgaatcattccatcttcttcccatacttcgaaattgtctatttgggaccgtgtgcgtactccacgagatgttgattccgcttttgattgatctgtcataactctcttcaatttttgcaggtagcgtgtcactgattctgacggtttcttgacattgttagtggcgattcgctgatgaattttctttgaagtagttggcccttcaacattggtgtcaacctttgcttcctttttgatgtttgcgtcgacattctgaggaacaatttgtctacgtccccctcgtcgagttccttcgcaagaggtgatatgattgattcaacgatttttttggaggtcggtgctatattttcctgcaccatggggtatggaatgatcgaactatctttctgttgcattggtgttgaatttggcgttggtgacttacgacgcgaatgacggcttaagatcggctcatcacccaacttgatgtcgcgtcgatgccaaaggaccaactcgtccattgcctcctacaaagttatgatcccctcaactggaaagtctatctccgaatcttcacaaccactatctgtgatctctagaacttggaccacaacatagtgtggcgggacaggattatccttgtagttaacaagtcctggttttaccaaaccagtagcagcttgttttgtttttgtctagatcgattgattggaatatgaagaaagcaaggtttgtcctcaacaatatcgtctatagggtacttggtgcccgatacgaagtcttgcacagatcctacgctgctagggactataggtggactcatgtggcctggctttagttcaaatgatatgcattctgttttcttcattttgttcatcatgtcattaatagccttttgtaccctttcatcaatagtctcttcaagggtccttttcgacttctcgtgtttcctatatgacgccgcatactctggatatgcctctctctaggaaatcttagaagagattccccgagcccgtccagtgtgtttaggattgcctagttctgcagttagtatgtcattctctctccgaggcttaaattcgcccttctttctctgttctgcatattcttgaatttttgtcgaaacttcgcctaccaattctggatgcaaaagtttgtcgtcctcagtcaaacctgcccgacctaagatccaacgaatagctcgctcatcgatatcttttaatattgggtccaaagtgtcgttagctatagcttcctcgattatcatgttccactgcacaactttatggtgatatccggttgaccccaggcgatgggggtgtttgttcatcttcgctctctgagaattagtttcgcccagttctttggccttcagttcagtcttctgacgaataaattcctcccactgagcatgagtgattttccccattttcttgggaggaggaaccttattcttcttaacaaaatccctattcatctcggccttccacccacgaaacatct

SEQ ID NO: 58159 - DNA, 329 bp, Zea Mays
atatatgactctcatcggaagtcttcactcggggtatacttcgtcttccagcgggtcgaccttggagaaactcgaccagctgcactgatgcgcttagatcaagaggattcgaacgtcccttcaatcactgccgcctcgacgatgatgcactgatcgaggtagtgagattcggttccatcgagctcgaggtcgatgcctgttcgtctctcccgttgatctcatttctacgattcagtccagcactattcatcgtttcgtcctagatctttcttttacgagttgatccttgaacgcaggagggctagctcgggagtggaatatctactgac

SEQ ID NO: 58160 - DNA, 582 bp, Zea Mays
caagtaggcccttctagcgccgtagcgaatcccagacgccacactcgtggtagaggaacatggacttagccatggttttcgccataagctcctgaaaggaaatagagcgcctaaagattcgctgcttcagcgctcttgtgatcaagttgttcatttggttgaccaagcaggcccttccggtgccatagtgaatcccagacgtcatgctcacggcagaggaacacggacttagtcatggttttcgccataagctcctgaaaggcaacaaacgccatcaagacacatcccaggtggaggtatgtattgtagttgagaatgactcttccattacccagctgaggatctagaaatcctgccacgtctgcatctccacctagtcatcgagggctaacgtcggctcgttcttcaggggaagcggagtcctgccacataagacgtggctctccccacacaaagggatatctcccaaggggggcgacgacattactctcctcatcatgaaagagcacggtacactctagggcagggataagctgctccgaaggaccgacttcacgattgccagccacctccataccccgg

SEQ ID NO: 58161 - DNA, 705 bp, Zea Mays
cctggagcgagtgactcgctcatgaagctccctaatcatctgccgaggtgggtgccaacattgaatgtgctatggaggcttccttgaggaagtggcctccccctcaacagcagtctgaccgcctctaggctcagcaagcccaggctcgactagaccccaagtagtggaggaagtagggtcgggtccgtcagccaaagtagtggaagcaggctcgactggggcagccagtggagtcagcttgggatcaccccgatcatcatcgtcatgctcctccacaaagatggtctgtcccatctggtctagacatgtaggcttaaagacaggggatggacaaggtgtagtcccatcgaatgtaacctcacaagtctccataatgcggttagtctctaggttaagaacacaataagcatgagaatgtaatgcataacccaggaaaaccccattagaataccgagactcaaatttgtccaagtttccctgtttcagcataaaggttctgcagccgaacaccctaaaatggctaacctttggtggccatccaaaccgcagctcataagaattcttgttcaagaaagctctaagaaagatgcggatcgacacatgacatgcagtgtcgatcgcttcggcccaaaaacgcttatgagtcttatgctcatcaagcatcgtcctagccatctcaataagggttcagttcttgtgttcaac

SEQ ID NO: 58162 - DNA, 523 bp, Zea Mays
cttttgtataaggcactaattgggagttgggagttgggactaatggctccgcgctctttagtttagtgggagtggcggagctagaatttagatatagagatggttagtttaaaagtatcgatacatttttttaaagatattatcaatattggattacaattattaaacttcatgctggcttaaaaaactataaatcatttaattttttttattttatacatgtgttagttgtttagattaaagataaaaaagacattatttataaaactaattatttatattatactagttagatgtccgtgtgttgggaccggagacaacactcggtagtagggatgacatgtggtacaacataacgcatggatgagagctcaaatgtcttctcaagtgtaccccatcatgctataggacgtggtatttatacggcgaccgggggttggtggcctaaaatacatctatagccccacttacctactacatttctgacatataccgtataacggggtaattatggaacaataag

SEQ ID NO: 58163 - DNA, 338 bp, Zea Mays
aacaaatatgcctatttagacaggttactggaaagccctggactttagatgagtttatcaactatgtgcaatacttacaaaaccaagtggaggtatatcacgaatcatgaatagttaaatattagtgctaaaattgtggcacttacagacaataatttgcaaatcatataggggatgggtaaaagatatcagagatgctctcactttaaaggcaacaatggaatatatctaactatgtgctcccatgcattaaagataacaataccgagagctaccacgcaaagccagtgctcccctgcatcgacaacggtcagctctcagcgtcgagtggtctggat

SEQ ID NO: 58164 - DNA, 638 bp, Zea Mays
gaagggttacagccaaaggtggaggtagttctagctgaagttcaagaggtgttaacccagtttcatgatgtgttcaaaactctagatgttttaccgccatcaagagattatgatcattccatcacattgttacctggaacagctcatgtgaactgcagaccatatagatactcacctttacagaaagatgaaattgaaaggcaagtgatggagatgctcaagtcaggactcatcactaggagtgtgagtccctttgctgcacctgtattgttagtaaagaagaaagatgggagttggtgtttttgtgttgattatcgaaagctgaattgaatcactgtcaagaataaatttcccatgcctgtgatagatgagttcttggatgaattggcaggagccacatatttctccaagatggatatggcatcagggttccatcagataagaatggctcaagttgacgaggaaaagacagccttcaagatgcaccatggtcatttccaattcagagttatgccatttgggcttacaaatgccccgaccacatttcaatgtttgatgaatgcagtatttcagcactgtatgaggaagtttgtgttgatcttcatggatgacatcttggtttacagtcccactttgca

SEQ ID NO: 58165 - DNA, 1668 bp, Zea Mays
aattgtcatgtacactgagatatctttaggattaaatgtcgaaaaacaaattgctagtactcatccacgcccagcctttgaaccactgtgttgcttatgcaccccaggcatgcacgaaaagagtgatggtctctttgactttgagccaaacagaaaagctctaaggggaacaccacctttcgttgacagggtccggaagttttgttgagttcggtggcttcttgcaatagataccttgagattctctctaagcttcaagatcacccttccaagctccacttgaaggcctcttacatggtccagcccagcttctagctccttagcgactttgttattctcttgtttcatattaagcacctctccttgaaattttgcagcttgaaaagggttgaagtgaacttcatcacatttatctagagttgtaatctttgatatgtcttcttgtatgctgcatagtgatgaaaatctgttctctagctctcctttcaatcgcacgttcctttcaatccaaacttgaagatctgtatttaggtccctcaatttcttttctagtactgctgattctagctttgctacctgataactaccagcaaagccataaatgccctcatcttcctgttcatcagtcattctgtgcatctcagttttcaacatgtcaaaagagatttggaaattccgtatttgatgatataatgtgctaaacctcaaccagaagttcaagttctcccccaacaccctgtcaatttctactctaaatttctcctctgcaaccgaagaagctagcggttcatcaacttgccattgcttaatgtattcctctatctcagcaatttctttgtcttctgtagtaggactggtgcttatcttggatgtttgttctgacttagcaatctctttgtcttctgtagtagtaatggcgcttatcttggatgtttcttctgacttctctaaactctcaataatagaggcactcatctttttctgcaaagaacttagcatgtgcctaagcgagtggatctcctcatcttttcttgcattgacactcttaagttccttcagttctgacattgcctcaagatggtaatcttgatttctcttctcaatttccgaaagcttttgctctgtatttttgtagctctgaagtacagatgcgtaatcttctaatataatcttaccctcaccttcggattcttttggaactagctgtttctgggctacaagaccttctgaggtttcttcatatttctcaatttcacttgtagcgacacgtaaagatttggatggctcattttgcacatacagacttgttagtcctgaatcatcttccagagaagcatcgcctttggagtctcgcaatgaatccacgaagtcactgatttcttgcttaggagaatgtaatgtttcaatgaattcagtaagttcatgggtggcttcagtcatttgtttacaaatattctcggacccatttcgtatagacttccaaatttgttgtacttcttgcagcatttcttcaactatcctcaacctgtcagccaagttactagaatcaacagccaaagctacattgtcttgctccaaagcatgcaggcgctcatgaagtccatctatctcaatcttcattctattgatgtgagcattctgtgaagtagtagcaagttcaaggttgat

SEQ ID NO: 58166 - DNA, 735 bp, Zea Mays
ctcaaatgtgctagacattatgtctctcaaacacaaatcgatcgaatgcgacacgggaattgctttgaatgtgtggagatgttgcacttaacgtttggaaggttgggaggattcttgtgtcttcaatgtgctggttggggtatttatagccccgaaccactcaaatagccattggagaaaaactggcaaaactacatagtcgggtggtgcaccagaccatgaacagtgttgatccgatgcgccaaccgcccgtgaacagtggcctggcaggtatctgttctgattctacatgttactgttggatatctatcaggtggttcagtgcgtcgccggtgctcagcccaattttctcgagagtgagcagttcactataattcacacccgatcgggtctgtgcaccgtacagagaacaataaatgtctagtgcgccatttggtgcaaagctgaaatttgtgaagtttttgtcctctgataggacggtcaggtgtgtcactagattggtccggtgagcccccgttgtgccagacgggagattagatttcccccttttcttcaagtcttcttcaagtatttttggctttctttaagggtgttcctttgccttagataaacttttgtagtgacaacccaactagtctaagtcatggtttttgaaatttttgctctctccaacttagaaacttgttttagctaaaacttgctccaaaagtgtgacttcccaaacctaagctttac

SEQ ID NO: 58167 - DNA, 611 bp, Zea Mays
ttcatcttgccctaattagcgtgtttatcccactctagaataacaaccatgagctaacccaaccaatagagtcttgatgaattgcataatctattaaccccacctaaccaaccagattttgacctacatcatgtagtccatctcacccataactattctaaccatatttccccaactccgataatatacactaacctcgaatcaatgagctcaagaccggaaaaggaaaagatcaaccccgtcaaggaaggagagaagtcaaaatcgatcttcaaaggcattaccacccaacaaggagttcttgctcaccataaactttctcaccccatgctattcttgccctaacctatcttttacactacacaaaaaggtgactatacatatatatacccatgctttcataaccactttctaaataacatgaaacttcttattcttaacctaattagaagttaaaagttaaactataaataaagttttctttttacatccatgtccttacaaatctcgaggacgagatttctgttaaggggggtaggatttgtaacaccctaaatcttattttgagaatatagtaaaaaaaaatcaaagatcttgcattagcatttttt

SEQ ID NO: 58168 - DNA, 475 bp, Zea Mays
atatcttcatcatataccatatggcgaaacaggatgagaggatcaccgttacgtttattgactgattaaccacactttgataatgaaaagcaatctgctatctccatcatctcatgcccccttcctacctggctactccccaccccaccaaaacaagaggagggagcaagcaacaagcacgggcaggagacgaaacaagatcaaataaaagaatctagacctaggatcatcagattctacaaatgctaacagcagcagctgcctgcaagcagggagattaatccgcaaggaaggaacaattaaaacattttgttacaccgacgagggaaccacaatggcggtggtcggatccgtcagcatgtcgtcgtctccctccatgagcagctccgcgtccctgtcgtcgtcgttccgcaagtccttccgctccagcttcgagttggccaccacgaacaccagccgttgcgcgcgggcgatg

SEQ ID NO: 58169 - DNA, 597 bp, Zea Mays
ttttatattgacgtaaagaccataaaaactgactaacctgccgactggggaagaatatcatctgattttgtagttgttttctgcccatcataaccatcttcattgtcccccaactcagcacggaggacctcatcaattaactcgccaaaaacatcagatagattgtattgtttctcaacaatctactgaagagtctgtttaataactgaacaagccttaccaacctcggtatcataatgtgacaacttctctatgaaacccaagcggtggtgggatggaagctgatttagcttgcttgatatcaaatccctgatgagcgggagttcgatgtgaattgtgtgctgtccagatgggtcaggacgcggtacatcaaaagtgtttgtcctggtcttatgctgttgtaaaataaaaattattaagtaaatatacaacatataactgaatattatgttgaaatttatgacaaaaaatatataaatagaatcttgccttaaattgtgcttcaacaggtggtacagctgtgtaacaggtctctgtggtgcttcggaactaaaaaagacgtgaaagatggagtaaaacttatacacacatataaag

SEQ ID NO: 58170 - DNA, 322 bp, Zea Mays
gaaaaagagagactcgctcaagcaaccaaaagccagataaaagtcaaacaagtcatttagagtatgcaaagcttggttcccaaagaaatgggcaacgtctcaacatgaccaagcaagaaaaggctaccctcaataggaggcaaaagcagggctcaacactactagccagaaaccaaatgctcatcggagcaacaaaaatctttatcggagcataaaaaccaattcagagcataaaatcagcacaaaagctaaaatcaaagctagtgatgaggacatcctccactattacccgttggcaaaagacgcaattggcccagttggc

SEQ ID NO: 58171 - DNA, 630 bp, Zea Mays
tgggttgcgtgtgcaatttaccagaagctcggggtttaattcgcaaaagctaccagacacaggctaacccccatatggacgacaggtttatttcaaataagcgcaggggctcatttgaaaagctgcagctgtgaagaggtacggttaactctcggccgtccgatcaaatatcgaaggctaggattagatcttggctcactgaaccggtatgctacgctcgtgcttggatcgcaatcctgcggtccagattttaataacccgcggcaatccaggatcgctagatcccattccaaccgcccggatcaatccatcgaagcggtatgcgttgtttctaatctcagccattcccctccgatccaacggctcttgctcatctccctcatttcgaccaccaagacagcggcgcaaggccttccccacggcggaggtcccaccgaagtcggccaagccgccaccccaaagccataccccctaatccgattggtcctacacgatctacagagggaaacaaatcaattgagaagatccctaccgggttttgtgaagcagatacggttgaccacgtcgatgtgcggttctgccgccgaggattgactccggcgagcgattagaggtgaaccagccggtcta

SEQ ID NO: 58172 - DNA, 682 bp, Zea Mays
ctgccggcccggcgctccccggggcaggcgggtaatgcttcgtctccgttgtgtgcctgtcagcctgtgtgacggttaccttaccttggtttcatctgtgcggaaaaaatcggagccttctaactgttcttcgccgggagcgacagcgaccggcgagtttgtggccgggaatgggaaggtttttgtttctgggaagttctgagtggatctttgctgcttttggcaggaaagggaacggctttatttgttggtcgcggcgtgtcggtttggcgcggtttgagagttcttttggttccttgtttttgttcttgtttctctggacgaaaccggcttaccggcaagccaagcttggcttagccttactggtacagacacctggagtttacctgtcgaggctgggattttttttggcataaatatgtgtgttttcgtaggctcctgcaatgccgaacagttagtatttgggcgattcaaggcggagagtgcctccgcctttgggatcaggctgggattccgatgcgattcgtagatgttcctatgctgctcaggtgtccccctctgatcaatcgtgtcagttcttcgggtacggaagaaaaattttcgcataaatttgttgcgtttcgtctttgcttctttcagctgccatccgtggggtttgtggggacgtgagtccaagtctttc

SEQ ID NO: 58173 - DNA, 324 bp, Zea Mays
gtttgacgccaccatgcgtaagtcgagcgcatcagcctcaaggttgaaacttgagataagcgcatccaagacatccgccgcgcagaaagggccctctatagcaataaccgagacaagtaaaccacgtcgaagctcttccttagcctatgaaatgctcctggagcgcttgatgaaacacacctgacggtcggaggcagtggcaggagcagggacaggcggcgatgaggaagaggtgggaggatcaacatgaccactgccactccaagaactcctccttctcggaccacgacgagtacaccttcttcctctgccaccaggaattcc

SEQ ID NO: 58174 - DNA, 519 bp, Zea Mays
ccctcgtgcgcctacacaggcacaaaagtccccctaccagttagaactacgtccaatgcttcgatttcaccctcaatccattttatcacactcgggatctccactgataaaatttcgctcagccgagaatgcgccaacactagtaaaagcatttttagcttattagagcattgcatagcaatagtgtaacattcttccttctcttgacaaagctcttgaacattcttttgtaccctggaccgcccagtgtcggatatctcatgcttcgattgctcaacgttaaagttttcggtaactttgccaagtttcttctccagtctcatcacttcagatttatgcaattctacttggacggataaagcgtattctagatcggctatgcattttgcgttagcctctttttccttttcaagctttgaaatcttctgatctgcttcggagaatttagccaaattagcttcattcgtctttagcctttcgactaaagaaagaagaatcttgtctttttcaagggccttg

SEQ ID NO: 58175 - DNA, 329 bp, Zea Mays
agctggaataattcgggtggttctgccacagctggtatcggagcaaattccaccacaaagaaggacaataaaccatgaataccaactttcaaaacctaaaacttgcctagaaactgttacggatcgtcaggactagaccgctagacctaagacgaaaggccttaggcatagaggggaatataggtggctaattaattaggccccgtgggccaatacttatattttcaggatgccctaaaaaggcaccctatctttcccttgagaggtaacgtttcttccagcatgcatgcattataaaacaccaagaagaattaaaaatttgagctaac

SEQ ID NO: 58176 - DNA, 377 bp, Zea Mays
gggcaactgaagctgaaccacattctgaatctccgatttcatgccataaatgaacttggcgacaaaaaaacatttcgtccaactttggattatgcacctcggccacataacgagcctgttcaaattctgctacgtacacttccaaagtgtatgactatattaacttcataattgttctcaaagcctttgggtaagattcagtaccaaatttcgctagcacagcagcagaaaactcctgacaggatcccaacccatttcgaatcttatacgattgccaccatctagacgcattcgaatccaagtgcatggtagcagctgagacctagatcgcctcggggacattgcaaatgttgaaataattcttacaattatccaac

SEQ ID NO: 58177 - DNA, 788 bp, Zea Mays
agagccgaactcaaataatttctaatcggtttaacttcaacgaaatcaatcgtaaattaaaataccaaagctgaaaccagtgtagttcggtcggtgtgttctcgtctcgatctgaatctccggatacaaatcacgggtgaaaactcaattgattccggaaaattcgccaaatcaaatcctacccaattgttgctgtcaatcctaattattcgaccctttaatcatcgctaaaaataccaattcaaaatatctgcaattttatttaaaaaaggggaagaaatgaaaatatcttcatagatttttcttctcttgaatcgttcctatctcttcctgtgtcatcgttcttatccctctcgcagcctcccctgttattcttccacgccgcgccgccgtgcttggagaagaagatcttgccgcccgaccgctcagccgctgtatgctctgatatttcttccgctcagccttatcgtcgcgatactcctccttatctctatcctccgcagcgcttcctccagcttttgttcgtcggcaatcctccctgcttctctcttccccgcggcttccattctctgctcgccattgcaagtcgtgctccctcgccgtgggatttccctctgcccgaccgaactcgccccggccccttcctgttgcagctcgcgacccccagctcctctgcgcgcgctgtcttccagctgctcagcgcccgttgaagcttctctgctgaccgcagggcatttccggtgccgcgccccgttccctgcgcgagctcctgggcgctccctctctgc

SEQ ID NO: 58178 - DNA, 540 bp, Zea Mays
cgccctatcacccgccacctagaacgccccttggttcaccttctccccctctggttcgtccggtccgcgctcactggagcatttcttgccccgtcggagaaccgccgctgtcgacccacgtcctcgtcgcgccccagccttcgttcgtgagcccctaagtctccacttgaggtaaccgtcctatccccgcccttattttcccctactgcgcgcttccttgcccgcaattgctctccggagtgcctcagtctgccgaggatctccctctccgatgtctggtcatctcagccccgttcacacaaacccgaccccgccatcgtgttcgccagaccctccccaacctctctagctacccggaccgacctctcacgccctaggagacccagtctgcctcgcctccagcgacggtgccgtcgtgcctgcagggagcgctgcccctggcttctgggtggagacaaagtcccctggcgcgcatcctgtccgcccaaccctaatcggatagcccgatttcaattaaacccgatctaatcctgaccgccc

SEQ ID NO: 58179 - DNA, 1280 bp, Zea Mays
gtgagcatgtcgcatcgacttaagatgtctccgacttaagtcgattgccccgtcagtagggtatagtaatcaccctaagtcatgtaagcgtgcaggtatgttgtgccggttttaagtcatttccaacttaaatcgcttgttgattgagagtttgtatgcggtagaacatagaagctttattgttaatgaaaccttttgcttacaaagtacaacttgcccaccagagttttgaggtattgctacggatagaattttctgaggtgttcaatattccacaaattccccacttcggttccatccatttgggtaagtcggtagaatcctggccgggtaacctctactatgatgaatggtccttcccatggaggtgacaatttgtgtcgcccttctcctgtcagcactcggcggagcactaggtctcctaccgtcaaggattgatgccacactgctttgtcgtggtagtgcctcagggtttgctggtatctagccaattgaatgacaacgttcagacgttcttctaatacatcaacatcttccagtctggttgcttctgcttcagctatacatttaaatgtcagtctgggtgctccaaagatcaaatccgctggcaatacttcttccgatccatataccttgaagaatggggtattttccatgcaagtcccggcttggctaggttcgcaggctccaaactacatatgttagttctctggtccattttcctgcaagcttttggctcttgtcaaacacctttttcctaagtgcatcaagtatcatcccgttggctctttccacctgcccattagctcttgggtgtgccattgatgcatacttgatctggatgctcctctgcttgcagaaatcaaagaactctaagctagtgaagttagatcccaggtctgtaataatgttattaggtaccccgaacctaaacattatttcttgaatgaattccactgcttttgctgaggtcaaagaggcaatgggtttgtactctatccattttgtgaacttgtcaatagcgatgagtatgtgagtatatcccccttgagcttttttgaatggcccaatcatgtccagcccccagaacgcgaagggtcgggttacaggaattgtttgcaaatgttgggcgggcaagtgttgctgctttgataggaattagcatgctttgcacttctgaaccaactctgttgcatcattctttgctattggacagtagaacatggacctgaaagctttccctaccaatgtccttgatgctgcatgtacgccacattgcc

SEQ ID NO: 58180 - DNA, 748 bp, Zea Mays
ctacattgcagctcacccagcgcagtcaacacagccctggtacaagaaaggtgcaaagaaggcaacacccagcaatgtccagtatattttgtctccgaagtactcaccacatctaagtgcaacatggttgagttagaaaagatagcatctagtgaggcaattcaaaggattcactttgcaacacgtagaacggaacaagaatgaagaggccgacatattggcgaaagcagcagcgaaaggcgacccactgccatctgatgtgttttccacacgatcggcacaccagctgtaagaaaccccgaaggcctgtagataacacaagacctcgatgggcacagaatcgtaaatctgataatgaccgaagactggcgggcacccatcaccttataccttcaaggtcactatcaccccactttccaaagcaaagccaaaaggttgaaacatagaggccatgactttgttgtgatcgacggataactatacaagaagggaataagccaacccatgctcaaatgcatcacggaagtcaaaggcatagagctccttcgcgaggtccacagaggaacatgcggatcacactcgggacctagagctctcaccgctaaggtcatgcgacaaggtttctactggtcagacattgtgtgtgcagccaacagagtggtccgctcatgcgtggcgtgccaaaaattctcacctcgaacgggtaccccctcgcaatttacaaagttcatcgcacacacctggccac

SEQ ID NO: 58181 - DNA, 338 bp, Zea Mays
gggcaaatagaggttgttaatcgcactttatctactatgcaagccaatgaatcaaaagatcaaagctcacatatagtagctgctcctccgtagcctttgctaccccaacaactgatagcgcgtcttccattggccttcacaacatcgagaccgtcataccagcgactgcgctcaatgcagcacccctcgggtcccttctagtctcaacaaacaagcaaaacatcgcccacatatcctgcgccgcgccagcaaccgctttagggggctcgctatgaggtcttgccaccaagttcatccctatatctacacacaaaaaattataggagtgcaaaggtaga

SEQ ID NO: 58182 - DNA, 665 bp, Zea Mays
caaattttagaaaagtccaattcatcactttttaagtatagtgatccttttaaatttagtgcacatttagacactgtatatttaaacggggcttactcatttttgacgtatcgaaagctcctttttgacgagtgctattagcaataataagtcccgacacgtgcatatgaacacatgagagaaatgtgtcaaagcgagtggagtgggggctacgacgtccacttcaggaaagcatgagagaggaggttcatcaatcgcgatgcgtgtggcccttttggtaggggagaagggcagagaagttgatggatgcacgtgatggcttcccctcctaccggcaaaagaccttcttgtaccttacagccatctcacctcatccatctacctgactacctgatcgtcgccatgtccttcttgccttcatcgtcttgcactgcatgcaccagtagataacaaaagtgtccgtctcatcacctctgctaaccaactaattagtaggcgtgatagcctgtcgtcctagctctgctcaaccagactggtcaattttattttgttttgtttggccacatgcatgcatccttttcctgtcctgcagatgtgatgtaaagaacggtggaaaattaggcaaattcgtgattgacatcaaaatatattgaataatagtcaaa

SEQ ID NO: 58183 - DNA, 416 bp, Zea Mays
tgggggttgtcgggtgtgataattaggggtacccggattacacctctaaaaacacgctcagaaaaagttaatggcccagacataatccccgaaggtaagaggccaagtcacctcctcacttgacgcccactgtaggggtcttccccataaacgtcgtcatgaccaagacccctccccgagggtcctccgcctcaggcaagtctccatctcgctcgagcgtctcacagctcgtgcctcccatttctacctcgctaaggtcatctcattctacaatcgccctatccgtctcgacccgagcttgtatcaggcgaggaagacaaggcacacccgaaggccatcgggggacacttgcatttaatgcgcacacctaccccgcacaggaggacagtggcaacaagacaacagtcacgtccggg

SEQ ID NO: 58184 - DNA, 457 bp, Zea Mays
ggggcctctgcgcaagcttcctaagactcagtgaacaggatccgaggactgcgggttgatttataaaggttccaggggcaaaataccattgccgaagcggtatagggcgagatcggccgttagatcttgatccgacagtctggattacatggtggctaaaccgaacaggtgagcgacccaaaccgcacgatcaccatcctatggctacgatgaaaacaaagtcataaactcccatagtcgttgatctgcagaccaacagacacgatcatcccctgagcgaagcgccacctagatctaagctcggacacccatagctcatccaacggttggcgccgcttcttcttccgtcgcccataccaaccggcagtaggtccccaccgcggcggcgccctcaatggcgaaccccaccccggagttcgagcaacccttttcccccgcgagcaacacctaaacgtag

SEQ ID NO: 58185 - DNA, 280 bp, Zea Mays
gaactgatggatcaggattcaacgacgaggatccaagatctaactctattcgtccgatcgaagatcaacgacctcgatttaatgtcgtgaaaggggtatggcctgcttctaatccgagccgttaacctccggatcaacggtgcacgcgaccccgacgctactccgtgccagcagtcgccggacttgggcggcaggtcccattccacggcggcgatcttaccggagttcggccactaggcgttatagggctccattctctatcctgaatagtgctacgcga

SEQ ID NO: 58186 - DNA, 458 bp, Zea Mays
tgcattatccttcctcgccacgtggtacccttaggcctgtccacgtggtggggtcaggtgccactctccgtgtgacctggaggcgtcgtacgggtgcagcgccttcatactgtagaagagggtacccctgattcagggtaccgacagtggccctgggctcgcctcatgggaggatgcgagcctgtaggtggggccaaagtctggttggcctgctgctcctgtgcgcccgttggcgcgattaccgctggcccgcctatgccgtctgccatgcctattcccacggctgactggcccgtgaccttcgtacttaatgtcactattgggccatgctcggggtgcctcgattcgctgtactggttctgaaaaaacttagctttttagacttccgcgacggccccgagaagtcatggcattagcgcaagcggcggtgcaatttttctgcactcagtaaccggcgc

SEQ ID NO: 58187 - DNA, 933 bp, Zea Mays
taaaagacactccgtgcaaaagtcacctaagggtgcagccggaatagcacaacaagtgcgttaatcgaagtcttttatttaaaagacactccgtgcaaaagtcacctaagggtgcagccagaataacacaacaagtgcgtcaatcgaagtcttttatttaaaagacactccgtgcaaaagtcacctaagggtgcagtcggaatagcacaagcacgataatccaagtcttttattcaaaagacactccacgcaaaagtcgcctaagggtgcagccggaatagcgttaatcgaggtctctctttaaaaagatactccgcacaaagtcgcccacgggcgcagccggaccaacacaggcgtacgaatacggccaacaggccacatcaccatacaaattacaattacatacacacggcgagggcatcacacattacatcggctcgaccttagggataatacccatctccctgtaattaaacatcattatcctcagctcctctccctcaaaaagcttccgcagatccccctcgcctatgcccgccccaaccggcgaagacaacaattctcgttttccaacccggtctactcggagacggccacgctccatccccatacgacggcgcctgccacttcgcgaaaattcacccacactatgttttcccaccacccttcgccgcctacacccagtactcgcaccaggaacatccccagcaccctccacacatggtgaagtctccgccgcagctacatccaacgcaacataataatccaagccttcattcgaggactcctccatccatggaaacgagctctcagattcaccatcagactcaaaacattcagacacagaaccaaacaaactatcatcggtaggcactacggttgaagtctccgccgcaaaatcagtattgccagtagcggttgcttgcgcaggcc

SEQ ID NO: 58188 - DNA, 680 bp, Zea Mays
gaaaccataaacaaataataaagcaaaagggaattaaatggaactacctataattaatacacgttcagcaacttcttcagcttcctttgcttctactcgggcatcatgggattctttttcatttttctttattgcttcgtccgctgtctcgcgaccgcccttcatccaaacatcggaataaaatttcccacccatcagagtagcttcgcctaaaggttcccttgtatcgtctatggagaaggtaacttctgcctgggctacagctttaacatgttcacagccagctttctccaaaactgctgcaacccctcgggcaccggcgaaggcacagaaatccccacgaccgctaagtattttgtcaaaagcttcagcttcttcgctgatccattcaatgactccttcgggatcgcctcgaataaatttttgctccgatgagtatgcacccacctttgcaaaactatctttcagtttctttgcgcaatccaaggatttctcataacatctctctttcgattcacgaagctcatccacattcttttgcaatcttgaactagtctattcgcttatttcttgctttgctttcgccacttcaaaatcttcattcatttcggcaagctttttctttaggccttcaacttcgactttatgagcttcagattgtgcattaagttttgcttcgc

SEQ ID NO: 58189 - DNA, 381 bp, Zea Mays
gggaattttggtggcttggaaaaatcatttgagatacacagatgcgagcagagttgataatcatagtgtgtccattcagtttcataagcaggaaggaggtacctggtggttaacctgtgtgtatggtcctcaaggggatgaagagaagatctcatttttgcaggagctaagaaatgtcagagagggttgcaatggaccttgggtcgttgctggggatttcaacttaatttacaaaacctcgaacaagaacaacaacaatttcaacagagctatgatggggtgttttaggagctttatcaatgatcttgcccttaaagaagttcctctccatggtcggcgttttacttggtcaaatcaacaagtggagcccattcttgtcag

SEQ ID NO: 58190 - DNA, 583 bp, Zea Mays
gctttatcataaatcgatttttttctaaaatttctgcatttcgaaggagcctaaacatataaaactaccatgtaattaatccacattttccctcctgcgttttttcatgtgaactaaaccaccttttcgagtaaaatttccatgtgaactaatccacgtttttttcctgccgcgcaagtttgttatgtgaactattttttataatgctcaattttccatgtgaactatgtcccctgatgcgtaacttttgagattttattaaatttatgcaatagtttatcacctgtaagtgtgtaagttgttgttaaaaataccagagtagataaaaaattatacataccagggtcacttaatgaaaaactaagcatcacttagatatcgtagttgagattgaatataaactaacatgagttgagttggctagtgggtggaagcttaggtattttgctcaaggcatccagggttcgattcctgagcctagcagcaatttttttgctgcgacaataacggacggggagggcagaacgagggaggggcagaacggggtggcagcctacccccttacattcttcatagtagtata

SEQ ID NO: 58191 - DNA, 676 bp, Zea Mays
catacactagggatcctcgaggatacttcagatccttagcgtaatgccgagcttcgacaatttgcttctatgtcaattgttttcccaaagcatggcagatgatgaattcagaatccttggataacaccgctttaggtatcaacgatgatactttctctgataagctttcactcacttgctctgttggcctactttccgaaggtccagcttcggcgtagtaaagagcactgctttccctagcctttttcaattcttctgatttatctttggaaatttttatagcagaaggcgttaccactttctaaggtttcaaaacatcttcaagtacattagccattcttcttcctcccttaggcgttcctactggaacagaggcaatttgtggtttcgctggcgccttcggctactcttgaacattaggctatctgccagttccaagtgaataggttctgaaccatccattgcagttgccagggggactccttagacctttttgacaatatctattttaggcagttgagcagccctctccaagaaatatgattttggtcggtgggttaaaaccttcgccctattttgctttggtgcaacagaagaagcccctagcgcacttttcctttttaacccccttttccaggcagggaagcggtaatcaaggtaaaaaaatacgatagcg

SEQ ID NO: 58192 - DNA, 381 bp, Zea Mays
ctaaaggttccttctagtggaaagacattctcaagctccttgataaattcaagggcattgcaagggtcacaattaatgatggaatcatagttcagctctagcaagaccgatggagaggcagaataccaaaacttcaatacccataactcttctccttcaccacacaaccaaaatgtcgtgatcaagcaatgcatactacttacacatttttagacttgttctagctacccctataccatcaagcctttcaacaattcctgaacctagagaacgacattctattgattcctgtggagagcatgtccctagatatctgatcttacatgtagggaaacccatccttatcctcggcaaaagcttatagatgactcattgggcacc

SEQ ID NO: 58193 - DNA, 593 bp, Zea Mays
cgcgagtgaccttcttcctctccggccgccagcacatcttcacgaaattggacgccgccgctcaagcctgctataaattgtcgacccctcctgctccgctaggtagttgtgcaaccagtgaagcaacccgtgcctcgaatcatcccctagagctccccaatttggaattttccccaaatcacttcaaaacaccgagcgatttgacctcaccgtggccagcgcatcctaggtccgttcatgccctctgagtcctcgtttcagtatccttggatgctcctgatactctctgacccatccaattgagctagagtccctaggatcgccgggaacgtgttcagttacccgtggtgtccgttgtcaccgtgggcagggcgtgttagtgcgccattggtaaaattagttgaggggaaatactcagtagggatggaattaggtttaaaccaaagaagggcatcggtcattgagtaattcgaccggtatgcgcttgccggagcttggctccccaccggtcaccgacgtggacctcggcctgcgaagaaatagaactcaggggaggattctgtaaactgtcagagactcaaggaatagtactg

SEQ ID NO: 58194 - DNA, 527 bp, Zea Mays
gaaattttataccgtcaaattcagggtgttacatccctgctctctctacgagcctatataagctgcaaccaagctctttccccaatttcctacctctgcttcttccacgcgctcctctgctcaccgccacattttccacactgtcgcgtcgtgagtccaccttcatgtcatttctatactcactgccaccggagtttggagtcctcgcccgagctctactcgtcgtcgtctgcacctcgccagtgtccctcatagttgaagctccctccttccttcttgtgccaaagtttcaccctcctctgttgaagctcgtgatgctctgttgcaagtaaggaagaagaggttattttgcaagctacccctccgcgtatgtggttaattgcatatatattcccacaacttgatttttattgtaaaattcatgtgtgaagtccaaatgaatcaaatataatgttgttaactttataattatatgctaaactcggtaaaatgctttttcaattggttttcatgttctcaaatttagt

SEQ ID NO: 58195 - DNA, 830 bp, Zea Mays
aagtattatttgatactagagccacacattcgtttattactgcatcatgggtagaagcacataatcttccaataactaccatgtcaacacccattcaaatttattcaaccggtggtaaagttcgagacgatagtgtttgcttgaatgtaagtgtaaaaataagtgggatagagtttcctgctaatctcatagtaatgggtactcagggaatagatgtcatcctagggttgaattggctagataagtaacaagcaattatcagttgtgataagaggacaattaagttggtgtccccactaggagaagaagtggtagctgagttcgtctcacctgagccaaggaaaggaggttgtcatcagatggctattgatagcaaggaggcagattcactcgagactatcaaggtcgtgtcaaagtttccggatgtgttcccgaaagatttaccaggtatgccacctgagcggaaagttgagtttgccatagagcttcttcctggaaccgcccccatttctaaaagagcttatagggtatctggaccaaagttggttaaactcaagaagcagatagatgagttgtcagagaaaggttacatcaggccaagcacctcgccttggggcgcccctgtcctgttcgtggagaagaaggatggcaccaggaggatgtgcatcgattatcaagctctgaatgaggtcacaatcaacaacaagtaccccttgcctagaatagaatttctgtttgaccagctgagaggagccagcgtgttctcaaagatagatctgaggtcaggttatcaccagctcaggattcgaccttcagacattccgaagacg

SEQ ID NO: 58196 - DNA, 564 bp, Zea Mays
tttggctgtcaggttcatttaactgaactcctgatggtacagtgcccaccggatcagaccgccagcgcggctgtcttcaccatcgacgaccgatcttcgccgtgattcgtgccaccgccgtgtgattcacgtcgccgatgacccgataagaccgccaggtaaaagccaccccccctggggataactccggtgactcaccgtgactgcctttctgctttgcggctgtagccgataagctcaccgtcgaccgccgcctctcggtcgtgtgccgcgtggctcaactcttccaccgtgtcactgtgacccgctactgctgtcaaatcggcgccggtgagcttgccacggcgttagccacgaattctacacgccgccttcttcctcatctccggccgccagcacggctcggctaaattgatcgccaccgcccgctagctctataaattgacctcgcccgtagctgcgccatgtagttgtgaagctatagcaaccgctcccaccctcgatcgtccatcagcacgtccgaattgcgcattctccccaattcggttctaaaacaccgtgaac

SEQ ID NO: 58197 - DNA, 385 bp, Zea Mays
aagaaaataaattcatatttcatgcaaagagctaatagaaggttgtatgaaatagcaaacatgggtcaacatgaatacgacgacacacttagattgaaaggcgtgaaagcatatgttgccaaacctatacggacatttctcccttccctattaaagctcgaatcaaaggcacctagagccttcaatgcatctatatcagctaggtgcgccatggcatcgtgattctcacatacatattatctgcgccaattcatgtgtctgactgtattcttcaagattaacaaatgtttcaaccaaggtacaagaggcatataatgaagttgcttacgtgctacctcattcgttatggtcacaccatcatcgtttacaacatctacaaatctcg

SEQ ID NO: 58198 - DNA, 722 bp, Zea Mays
caagactccatgggtacgtgtctgaaccgatgtacccgtgccgctgtagcacgctgaagatcaaacagcctgggatccgcagcaagtggacgcacctcagtctcatcgcgctcccggaagcgagcaggtgggataggaggagcggaagcgggaggaggaggagtggaagcttgagtagtggaggtggtgggtatggctgaggtggaggttgttggatggcgcaagagtgacgggggcaggcgaagtggttgttggagtggtagcagtggtgggagtgtaggagcggaggagcgaggacgagaggcgaggtgacgaactcgataggcaatctgatcggaaggaatctgcaactgagctcctcgttctgcctgctcagtggctgctgctgctatcgctactcgggctgctatgtccagacgttgcttcttgcggccttcctgctgctccaaataaacggtctttcccttgacctgcctgaaggggcgaggaggatcctcgtcatctcctccccctagcgtcgacacattttcgtgcgcggcatcctaacctaatgactgcaaatgagggagagaagctaagcacatgtcgataacatccaatagaatatcaaaagagtggatgtctacctggaaagctcacacgagaggtgaaaatctaggcaggacaggagacggctcacgggcaggcaaggtcactgaaatcacagaagaggtgagcacgta

SEQ ID NO: 58199 - DNA, 670 bp, Zea Mays
aacgatgatacagaccaagctctctcggggctggttagcctccagggaatgacaatgtccgccattgacgacgtgctggaggaggttattctcgaggacctttcgcggtagctttctgaagctaggggtgccgacgtccttatagagatcctggacagcgcgccctctgctagttttctggctaggcgacaaataaccccaccagtttgccatacatctccagcccccaagggtgctccggttcatgaggatgctccagccctcgagggtgcagctgaagatgatctagcccaagagggtcctaggactggttctcccttagctgtctccatggacgttcatgttgggtcgccgctggttctatcttaggaagctgtggtgatgggttctagttttcccattagcccaactggcccgatcaccttagaggtcggtggtcctggcaccgaggattcgatgggtactcctggagctaagatcccattgggcgtcgcactgagcatggactacactcttcctttggtgtctaaccctacccctaatgttgcttctgtcattgcttttccgtctgatagtatctcgatgcctccagccctgggatttcccttgttcctttccaaccttcaggtatgtgcatccctactctgctctacccttatcagtggatgtt

SEQ ID NO: 58200 - DNA, 836 bp, Zea Mays
ctctgtttgcatggcttagaaaacaccctttaatttgtatagcgtgggcatgtaacaccaacctgagctgatcccctgacttaggtcgattgccccatttatagggtttagaaaacacccttcagtttgcattacatgggcatgtagcaccgacctgagccggtcacccgacctaggtcgattgctccatttacagggtttagaaaacacccttagtaacgaagatacatagacaaaaatgcgtacgagaaaaggtatttttattgatcatgtgtcccagagtacaagtagtacttggccattctgaggtcatgacaccactaaggatagaacttgcgcaggtgttcgttgttccatgagttgccaactgggtcccatctgtttgagacaaacggtaagaccccgacctccttggcaatgtatggtccttcccaggtgggaggtagcttgtgtctaccctctattgacagtattctccagagcacaaggtctctgactgagaaagctcagaatcgaactactcgatcatggtaacgtcgtagggtctgttgatatctggccgactgaataactctgttaagtcgttcctcttcaatcatatcaatttccttgagccttgtagcttttgtctccgctatgtctttaaaagacaatcttggggccctgaataccaggtctgtaggtaacactacctctgatccatgcaccattaaaaaatggtgtattaccttgcaacgcctggctgggttgagttctcaggctccagacagcataggataactctctgatccacttcccagcaagcttttcacttttgttgaaaacttcctttatta

SEQ ID NO: 58201 - DNA, 415 bp, Zea Mays
aaaattttcattcttgcattaatgcacttttgttgcaactaggtgaagtgattttattgtcaaagagcttaaagcttaaccttgtaacgaggataagctgcctttgttccaaaggtggatggtccttaagcctctttgaaatccttaagggtaaatgcttaagatgtttctaacatgttttcataagtgcataaactgtcatgagcatcacacttatactatgacacaatgcacttcacgttctgtatgatatagatatgctctcattaacctaattatgtgcaattggcatttaaggccaaaatatgtgttcctctcaaggcacatatttaggggagcaatctatattatatagactgtttaagcttaattgacatatccttttaatcatgtctctttcctttggtatgtttgc

SEQ ID NO: 58202 - DNA, 929 bp, Zea Mays
gtaaaaaccactgctgatacttcttcagagacaggaacagaaggtccagcgtcctggtccaagcatgacaatcaccaaagtcatctcttcttcttctcctcctcagaaggtgcagttggacgactgacctggcgaagacgctttgggtgagtaccctaaggcttttaggtttccactgttcgatcaagctctggtataactgcaacaaccattgtttcagcaggggccgagtcagaagactctccagccaacatatcaagcatatcatttatttctgcatcacccggactcgctggcatctcaaaatgaacttgccgctcatcattggggagatcacaaagagaagcaaccaagacctcaatatcttcgagagaaggtcgcactctaagacctagaccactatcaccagcaggaggattggacacgaagttgaaaaaggacttagcaggtggcagattccaatcagagaatgcaacaggagcaccaacatttgatactttgcctctcaagatcatgtctagccggctcaccagatccttggcaggaatcctcctatcagtaaccctggtcgagtcggtgacaccactatacaagtaagctgggtatgctatgtccttcaagggctgaatattcttaaaaacaaagtcagtaaccacagcctcggcggtcagacctctctccttcagtagacagatttcagtgagcagagtcttagcttctgttacttccaaggcagtgggagactcaatccaactcggagtgtgcacatctggctgtctccccgactgagggggggggacttggcatggttttccacaataaaccactctaagcgccatcctttaatgctgtccttaagtgggatgtcaaggtattccgttttcctcccacggtgcatctccagactcgcaccacccacgagctggtgc

SEQ ID NO: 58203 - DNA, 750 bp, Zea Mays
caattttgaaaagtcagaaacccttaattctatgctattgtcattgtgaatcgctcttatggcattcttgggaaattcattttgcaatcgaataatcaaatgtcaagcatgagaaataacctcatcctttgcctccatgaaaaatacccaagagtagcgagaaaagttgtcaacaatcaccaaaacatatcacttccccctaagagagcaaactcgagtaggaccaactatgtccatgtgaagcaacccatcgggttgcttggtaattaccttggtgactgggggatgagaagtagcaaccatttcccatgacgataagggtgacaaacaagatcttcctaaaaaatcaattcagggaatccttggatgaggtcaagtgagctcaatcgaataagaagaccaaaactcaaatgacccaacctcctatgctactttcatatctaagaggaagatcctaccacaagacatcgagaagggccaaaagagtgggaaaagttagcacgaaagactcgtccaaatggcgaaattcaacaaaaagatctctcttgccatccaaaacacgagaaatgcccttcttaaagcgcatatcaaaatcgttctcaaggagttgcgaaactcagcgcaaattaaaatgaaaattggaaaccaacacaacatccttgagaacaaagctctcattcacctgaatggtgccccaagagacaaccctacctctcaaattatacccaaatgtgatgtactccttaccga

SEQ ID NO: 58204 - DNA, 635 bp, Zea Mays
ctttggcggtggccttcgtctcatacaaaagttcatgcatactacaaaaacacttcgcgctcggttctagcccttggcttcttacagcccaaacaaacaagcccattctaattatagcttcgggagtaagttgatgaagaaagatctgaaatatctttagcacttcaataaaaaatctgcttagtgggaatcgaagacccgccttcaaaaagcttttgtaaataaccacctcgttttcctcaagagcaggggcggtgctgtctcctccaaccctcacaatagacatgtcacgaaagtatcttcctctcatagcgtcaacatgactttgcttaatggttgactttccgaagatagtatggcttggccaccaggggcgatcgatctgtgtttgtcatcattgtcatcagaatcttcagataaatcctccattatttcctttgtgattttttctgtgtttgtctttgccatggattcgtaaaacccagtaataaaaggatccgcaactttcttctcctcatacagcttctcttcctcaatcatcttcttctccttagtcatcttcttctcctcagacatggagcaagcacttatctttaaaccgaagctcaaaaatcaggcgagggctgataagcaag

SEQ ID NO: 58205 - DNA, 312 bp, Zea Mays
tgggtatcctctatcggaacagtgacccacaacaaatccgccaagaacagagctcttttggaggaagaactccaacatcgacaaggtggaggagatctgattctaagacaacagacatgtggttacctgcgaacggcaaccggctattgggatcgatgggaggaatgactaccgcaacagaactctggctcttccgcttgggcaccatcgcaatctcgccggcgaatcgaacaagggcgaaatcagagggaaacaaaggagtgttttgaagcggaaatgtgaagttagggctcagaactcaagagcgcgcga

SEQ ID NO: 58206 - DNA, 809 bp, Zea Mays
cagcaccagcgccaccatccttaccgtggcaaatcttctgactcaggtacttcgggaggaagtactcagaggtttcgggctgtccctaagcccgggctggggttggtgtgtttccgctgtggtgacgcgcatcgccgtgcagagtgccagtggagtggcaggtgttctatttgcagtcaggaccataaaggatgtggtgtgtaggaggaatcctaatgggaagctcagatgggagccggtgacttcctcctcttctcagggcaccatcaacatgatgtcaagtgctgagcatcagttttcagatcctcttcctcagcaacagctctatgtgcatgggacttctcatttcgtgcagatgcatggttttcatcagtatcaggtcgcgcctactcctgcaccatctactcctatgccgtctcagtttggagctccgcgcctgcctcatccagtggctcagtggggttcttctgttaatttcactctgggggcttcctcttctgcgggtatttctggagcttatgtgctacccgctacggatggcagggagcaaggagatgtggtgacatgtacgattttagttgagtcgtttgcagcccatgctctttttgacgctggcgctagctattcgtttgtttcggaggattttgtgtcgcgggctggtctttcggtgcagaggttgggtcacccaattttggttagttctgctaatggctccattagtagctgttcagtttgtcaggggtgttccgtcattcttgctgatgaggtctttttggccaatctggtggtgatttccctgcgggcattcg

SEQ ID NO: 58207 - DNA, 387 bp, Zea Mays
atttgatttactctctctgtctggccatctgtttgaggatggtatgctgagcttcgtattacctgggtcccaagtgattcttgtagctgctcccaaaagcgtgccacaaacagtgctcctctgtcagatacaatggtctttggaataccatgcaaacgcactatttgatcaacatagatttctgcatatttttatgtcttatgggtggtatgcactggtaagaaatgagcggtcttggtcaatctttccataatgacccaaatggaatcatggtgccgggaggtattgggcaatcccacgataaagtccatgcagatatcctcccatttccaagagggtatgggaaggggttgcaaagggcctgctgccttcaaatgtctggctttg

SEQ ID NO: 58208 - DNA, 285 bp, Zea Mays
gtgaaagagaccgaagaaagagttcaaagaataattcataatatgaagaaagcccaagctcgtcagaagagttatgcagacaaacggcgaatgcccttgtattttcttgaaggggactatgtctacctgaaggtttcaccaatgaagggagtatcgcgttttggggttaaaggaaagcttgcaccacgatatattggtccttttcttatcctggaaagatatgggccagtggcataccgacttcagttacccgaaacattgtctgctgtacataatgtgttccac

SEQ ID NO: 58209 - DNA, 579 bp, Zea Mays
gtcaaagatgccttccccatccccatcgtcgacgagctccttgacgagctgcatggtgcgtagttcttcacgaagctggaccttcgctctgcttatcaccaagtccggatgcggtcggctgacgtgcacaagatggcgttccgcacccacgacagcttctacgagttcctggtgatgtcgttcggattatgcaatgcaccggcaaccttccaggcgctcatgaacgacgtgctccggccattccttcgtcggttcgttcttgtcttttttgatgacattttgatttatagcaagacctgggcagatcacttgcgccacatccgtgccgtcctcgacgaacttctccgccatgtcctcttcgtcaagcgatccaagtgcatttttgggtccccatcggtggcgtacctaggccacgtcatctccacccatggtgtggccatggacccggccaaggtgcaggccattcacgactggccgacacctcggtcgacgtgtgcggtgcgtgggtttttgggcctcactgggtactaccgcaagttcatccacgactacggcaagattgcagcacccctcaccgcg

SEQ ID NO: 58210 - DNA, 407 bp, Zea Mays
gtttacctacgcttcattaagaggagccacagggtccaatgatttcttacttgattgcacatgtttacaaataaagagaccagcgagcttgcagatccagacaaattagagaggtaaccagcaagaggggtcccaatcataccagtaataccattgcaaacaccatcaagacctctcaagttaatctgtggcaggcagaaacgcccccgaaaattcaattagaaacttatagaatccgtgcaccaaatagtcgtaacattgatggagaatattaaaacataatctgtagcttacatcgaaaaacatggtgttcctgttggcagattatctatatgaagatgattgaaactttgagttagtgcgccctcttagcactaaattgttttccatgtggggggatctttatg

SEQ ID NO: 58211 - DNA, 315 bp, Zea Mays
gaggacggacctcgccgcggtcgatgttttgtcgcaacatcggtgagcgccttcacatcagttaatcacgtcctcaattatgtttgacgctagatctcatgcgaggctaggcgcgcgacacttctagcgtgcctcaccggtgtgggcctcgagtagcgcgcagcgacggtgccgtacgccggggacgaaagcgtgccggaggtaggagacgaacctaggcggttcgatcttggttgagcgactgggattcgatctcagtaggttatgatctgaagcgtcgattgagatcgtgcggtcacgatttgccaccctgta

SEQ ID NO: 58212 - DNA, 498 bp, Zea Mays
gagtccgtactctcaagcggaatctccaatgtgttgtcctctaataaatttttctccaattcggcttaaaatctctgtgtccaatctaaattcgaaaatcagcatcggcaatgatttttattaatccgactcattttatttcgatgccgaatccgaagccgatcgacctcgattcattttatttctacttatgcgcgagaatttaattcccaagaaacacccaaataaaatgtctcggtctattttattctgtggcctctcgttcatccgtacgtcagttcggtctgttccctgcataggtctcagccaacgaataagcgctgcataaatcggtcgacagatgaccacttctctccaaccaataattgttgtcatcctgataaacaactcatacgggagctcttgtctcagagagaatcaaataaaaaaagatattatttagctcctaaacaatcagccctttttctctctaaataattcaccagcatctgttttctt

SEQ ID NO: 58213 - DNA, 358 bp, Zea Mays
tactatagcaaggttatagctagatcatagggctacaactttggcacagaaagcagatcaagttgttacgtgaaattaggagcaatcactctgtatgctgctctgacaggccgactgaatggcagcgtgatggtacattgtttggatcagaacaccaacacagagaatctcgtcgccggtgacctctgcgctgcgattcatgccgatgccacgattcgtgccggtaaagagtagataaccgtgaggggtaaaaagatcttggggatgaaggtcttagccggagctgagtcaccgccgtacccacttgcccgcgcgatcggtaaaatatcgctaccggtgctcgtcgtgatcgcagcag

SEQ ID NO: 58214 - DNA, 426 bp, Zea Mays
aattccttaatggtaggttcggaagctagttcctaaacttcctcctgggcacgtactctccgtcagcgagattgcaatctaatgaatgcaatgtatacgatacaagtatgctatagtatgaaaaatgacaattatgatgcgaggttgggtaacactaagtatgtgtttggttttggaacgatgtgggtcgggtcggagctgacccatttttctgggttgggtcggacccgtttcttgtttggtttcagggatgggttgaacctagtttcttgtttgattacagggttaaagtgggttggagctgcaccatttcttgtttggtttcgtgatgagtgatgaactgaatatggccattttcctggtcatattaccacactcagaatgatatcttcaattccaaacgagatgacaacattcaaattaaat

SEQ ID NO: 58215 - DNA, 676 bp, Zea Mays
aaaagatacagggggtaaaacaagggagcaacaaacaccaaagaaagttatcaacccactaaccaatgttcgaggctttcaggtcatctatttgtttttgatgcaggagaggattccattgcagcaaggatgatcggggacaggggcaccgcatgacctcaactgaagcgacacaaagctcagagcattatgcaaatacaagaattagcaaaggagtcctctatcaacaaaggtaaagtagggtaaggatcaaatcacctgaatgttagaaaggaacaaaggaaatcccaaagctggaggtgccgaggtgccatcaaacgacgtgacactagcagaggaaatatcgagagcagactcgagtccaaaggaggattagacctcatgtccaaggcaacacctagtggaacctcagctccaacagcgtgcagcggatcctcaatgcccaggtcactgacctctaaagtgaccgggccaacaagagcagtaggaagatcaaggcttgtcaccgctagctcctcagactgaactggtggtgatcggacatgaacattcatagaagcagccgaagaggagccgagctcgggaccctcgggggctggctcacccaaagaagcaccctcaggggctgggtcacctttagtagcacccttaggggctgaattacccttagcagtgc

SEQ ID NO: 58216 - DNA, 384 bp, Zea Mays
gcagtataagaagtcatcttcatctgtgcctttaaacactaaggcccctttcgggtacttcagttctcgggcgtagtgtttagcttcaaaaatttcctcttcagataatctttttcctgaagcgtgtcgaataatataatcaaggacttcggaaggcgctttgggagtaggagcggcagctttttcaggcaaaatctgttctatagcttcttcctctgctgccttttctccaatttctgaggacttctccttggcgggctccgaaggcccagcttcggcgttagcccggctcattgtagcttcggctttggtcagctttgtttcggtttcaatctgcgctttcaaagccttggcaaccttccccggagtagagcttgaagcttt

SEQ ID NO: 58217 - DNA, 607 bp, Zea Mays
tatttgatactggtgccacgcattcttttgtttctacatcttgggtagaatcacataacatccccatagaaccaatgatcccacctttaagagttaattcagttgggggaaaagttcagtccgataggatttgtctgaatctaaggattgaaataagggggtagacttccccgctagcctagtagtaatgggaactcaaggttagatgtcatcctagggatgaattggttacacagaaatcaagccactgtcagttgtgacaagagaacagttaagttggtgtccccatccggaaaggaagtagtaactaagttgtacttgcctgaactagaagagggagcctgtcaccatttatcggtagatgacaagagttaccaggcatgccacctgaaaggaaagttgaatttgccatagagcttatcccaggcaccgcccctatttccaagagagcctatcgagtgtctggaccagagttggtagaacttaagaagcaaattgatgtgttgctagagaaaggctacatcagaccaagtacctcaccttgggcagccccagtgctatttgtggagaagaaggatggcacgaagaggatgtgcaatgattacag

SEQ ID NO: 58218 - DNA, 523 bp, Zea Mays
aatgatttctctttatctatatgtgagtttgacgtttatgtatcatcacatgtgaacacttcattgggaaagcaaataattaataaaaaggtaggccaataaattgtgcatcatgctgaggcttttggtggtgtgcattttgtgacataatataaaaaaataatgtaaaaaggtgttaatgctcaattagaatttaagttctaaggaaaccctagaaattgagaaaagagagaaaaatactatgcaaatgagataaaaaaataaatatatgaataggaatataactgccttctactaaaatatgaatcaatacgtttttaatcaagggtgaacttcataaccaaattcaaattcaaatttgaattgtggataaagagagaagaaaataaaggaaaataaaaagaagaccagaattgttgcgtgggccaactgatcccgcttccggcccatgtaacaaatgcctgcgcgcggcccaactgtggctatcgcacgccgacaccacggggccgctagtcatcctctc

SEQ ID NO: 58219 - DNA, 1018 bp, Zea Mays
gtgacacgagtcaaagtatcaaggatcttgataggatacttagtataaatcagatcatcctgaacactaagatcctccataggtagttgctcatcaggtaccctgagacacttcttcaactgggatacatggaagacacatcatgtacatccgcaagatggtcgggtagttccagttgataggcaacttcccccactcactttaggatcaagaagggaccaataaagcgaggggacaacttcaccttgattttaaacctcctcatgccccgaactggtgacactttcaaatacacgtgatcaccctccttgaattctaactgccttctctgggtatctgtatagcttttctgtcttgactgcgcagttctcaagttctcccgtatcaagcgtacatgttcttctgcctcttgtataatttctggcccaaagaactgtctttcaccagtttgatcccaatatagagaagtcctgcaccttctgccatataaagcttcaaacggggacatcttcaaactagcctagtaaatgttattgtaagagaactccgcatagggcaaactcttatcccaactgccaccatgtttaagagcacaagctcttaacatatcttgtagtacttgattggttctctcggtctgcccatcagtttgaggatggtaggtcgagctgaaattcaatcttgtatccaagcattcgtgcaccttctgccaaaaccgagaagcaaactgatatcctcggtctgacacaaccttcttaggcactccgtgtagacaaactacccgtgtcatgtacaactctgctagcctggctcctgaatatgtggtcttcactgggataaagtgggctactttagttagcctgtccacaatcacccatatagagtcatacccagtagatgtgcggggtagacctacaatgaagtccctgctaatttcttcccacttccactcaagtatcttaagcgggtgtagcaaaccagcaggtctctgatgttcagctttcaccctctcgcaaac

SEQ ID NO: 58220 - DNA, 777 bp, Zea Mays
accggatcaacgaaggcacgcagcttcatataaattacggttacatacatacagcgagggcatcacactttacattggctcaaccttcgggatgatacccatctccctatagttgaacagcattatcctcagctcctcaccctcaaaaagatttcacaactccccctcacctacactcgccccagccggcgaggacaacaattcccgtttgctagccccgtccacacgaagacgaccaccctccacctcacttaccctccgtttcgccaccgcccttcgccgcctacgcccagcactcacaccaggaagaacttcagcacctatcacacgtggagaagcttccgccgcagccacatctagtgccgcaaaataatccaagtcctcatccgaagactcttccgtccacacaaccgaacccccagaatcatcagactcaaaaaacttagacacagaatcatccgaaacatcttcagcaaccacagtcgaagccgccacaaaattagcattgtcagtagcggttgcgtgcgcaggcccaaaaccgtgaactgcgcagcaaccgaggttcagtaacacgcagacaaaatttacacaccccctgcacctatttagctacttagccacctacgaaggcccggccgcggccgtggggtcttcaactgccggctcggccaccaccttcagagcaccttcgaccgtcggcgcaagggctgacacagggtcttcgccggccatagcaggcacgggcacggccgaggggccttcatcggcatccgaggg

SEQ ID NO: 58221 - DNA, 475 bp, Zea Mays
cagtactgtgctctgaccgctacccactccaccagtctgcacacgcccgtggaccaaacgctagtgggcgctcctcagctcgcggtttcaggtctgggcaacagagtggtgctctcgctactgatgagcacgcgagttggttttgatttggctgttcccgtcgttcctgacagaaactatcccatcgtaagccaaagcaacctttgtcgtgccaccatgaactcacgatcattgcatcgcagcagcaagccgcacggccacgatcgtagctagagtgtgataaaccagggtcatcggttgattgtctactatagaaagtgaagatttgttgggccaagaaggctgcagcccatccagagatcgtcgcgttttccggactccagagaaatggagcgggctgtcatgccaaaaacagaccccagcgtaggcaagcccagatagcataggtgacgccatcgcaacagcccctatgact

SEQ ID NO: 58222 - DNA, 550 bp, Zea Mays
agagtagaactgagcaatgatctcatcattccaatcatataggaatgtcatgatagtcttcatcctcttttactcataggccctcaatgccaatgtcatctcaggatccccaatagcttcgcacccactccaattgataaagcgctgatggaggatgggctggtgcttctttgaaagaatgatagaattgtagaagtctacatgaagtagaatccagaagtgattaccttcaattttgacatcacgaattcatagagtaggattctaaaagcgcatgtcttgtagaagagcagatcctccgctggcattgaaatcaataaccttttcatttgaggaacggtgagcctgagctttgtgcagcactaatccttggatgatgggggcgtgagcaggaggaaggtccacaacgtcatctttgcctccatcgtcatcacttgtggactcttaggtctgagggtttgtcacaggacgagaacgactagaagggttttgagtcgtctatccgcgagtaccctgagacccagaggcctcaccacccatcataacattg

SEQ ID NO: 58223 - DNA, 454 bp, Zea Mays
cataggggatcttagggtgtgtagacgcagaaaatctatgtgtagttttccatttgttagccgcatgcagggaagatcataccgtatgcatggcttttgccctgcatgagcatgcatgggggacccagcacattcctaagcacgttatgggaatttcatcaagtgcatgtaggtggggccctgctgatggtttcttactttcttccacctaatcacacggatggctggccagagtgcgggggccttcagccatggcgcagccgcacaagcatggaacgcacaagggggagggctggctagagcagggacttggggctttgattggttggagcaagcgactgccgcagctggggacgcaggcaacgacacacaatgtgagcgggtggccaatgacgaagttggggctgcacatgaccagcagagacatggaacgatgcggccacgacggttcggc

SEQ ID NO: 58224 - DNA, 364 bp, Zea Mays
gtgtgggcagccgctcctattttggagccgcgacacctcagagcccctcctttcccttaacgatgagttggaggagcagttccgggataatttccgtgaatataccgaggcggcgatgaggtcgcttcggacgaccatggaaatcctttctagggacgttcccagggtcttccaggtaaggatttagacgtacacctcgcgtgatcagggcattctttgtgatatcctattttctccctcaggagctcgtggacatgagcaccgctaagtcgctgttcatccgtcgcgagagcgacgtttgggagtcactgcggtcctggtgggccgcgcttactgaggccaatgagcgcctcgcccaatggag

SEQ ID NO: 58225 - DNA, 954 bp, Zea Mays
atccagaccacccatgtgaacaccaactatatccctccgccacggcaggctcctatctatccagtggtagtagaggacgtttctgtggatctccatcaccttcgtgtggagaacggagtgattatggaggatagcttagaggagattctggcgacacccaccctattgtcagaatcactagcctttccagctagagcgtcatcttcagcaccgccagcaccagcagtccaagcccctgctcctagaggcgacgactcggatgattccggtgatgatgaagatgatgatgaagaagaagaggaggagaacaacaactaggaagccaatgacgagcaggacgacaacttcgttgggatatggcctgtcactgagcattatacttcaatgttcaagatggggcacttcccaaacctgctacaggatgtttggcatgcgctaggaacctacgtctgtcctctatatgacacaaggcgagtgcctgagcctccctgggcttactactacatcacttgtgtgcatatcagggtgatggatgcaggagatagaggtttcatgactctatcagcctacgttgcttcgtatcatgagtctttgatgccgctatctacctacgtttcttcggtcagcaatgctgctaggcgagctttgtggtctctcagccacacttaccggcagctactgcatgacacgagatacaggcatcttcctcaatgtcttcgtgaagaaagccagaccagtgttgttccaagtgaagctggagaagatcgcataaacacccttgtaggtgtggtggcaggtcttaacactgacctagacagtgctaccctagatctttcgagggtacatggagaactggaagaagctcacgccaggattgcaaccctcgaagctcagctcaaaggaaggaatccacccgaagcccaagtccctgccatggctgtgttctcgccacgc

SEQ ID NO: 58226 - DNA, 744 bp, Zea Mays
cagcaaggtcgcgagaagagccaggacgacgccgcacattcacatggtcatgatctacagtaaccgaaggcgaagaaggtatacggatggacggacaggggttgcggtgggaggaggaagggagagagagaggtggagtcatgggagggcggcacttgcaaccacgggagagcgacatcagcaacaatcaaagcgcacgctgcagccatgacgaaatcgatgggagacaaatcgattttggctagggaagaggcggagagagcgaggaggatgagaaacgtcacagcacgggtgaagagagacgaggagggagaaagcgtcggtcagagagctgaaaaggagagaaggaggcgaggagacacgaacgtgagccgttggttggagatcgagcgaggaggagtatttggctgacgtggacatcgcgagagaggccgttttggaccgcgtttcatatataggaaattgggcgtgagaaaaagatgtgtcaaggcacgacgcatccgtgaacatttttttgacgctgcagccggagttctgcgtgcgacttaaaccagtaaccctggagtccggctccgcccggcagcgcgggcctgtgcaggccggctctgggtatagggacacccggcggctgccctagcccccaaattctaggctccatctcctataattaattatatagttaacatgatagataatattgagttaaataatctaatctttaaattaaggttttaaagttcaaac

SEQ ID NO: 58227 - DNA, 353 bp, Zea Mays
agggcgtcataatagcgttgaagaaatagaaagttcgagaggatgactaggacgagcatgcatgcataatagttaaaaattagcataacatgtcaattgtagtagctagctaaacttttattgtttaagttattttagcaaccttaattcacctaacattaaacactaaagttgctcccaattgagttgagagtttgctacccaaaaactataaggttcacctaaataagtttctaattatgcatcgtgcaccgagttgttgtcctaaactaaaaacagattgtctgtcctgtaaagatttggttaaatcagcaccctaaagtcctttttggctgaacacctaaataacaaag

SEQ ID NO: 58228 - DNA, 423 bp, Zea Mays
atcgattttgtctaggcaaggcagagggagcggatcggagcaggtttcatcgattttgtcgttcagtcagtgtatcgcataaaaatcattaaaataaggagcgcgtggtcggcgaggttgtccaaaacagtactactagtctactactacacggaatgagtaagcggagacagcaagggacatgatcttagtactactatattgctatgggtccacggcggtcccatactccatctcatacggtgccacataggattttcgtcgttgtggacacacctattgaatcattgcatgagttgtcttaatcatacagcacacaactttatttttattatatgcaataattcgacaaattatagattactttcacacaccttgcattgctgcaggacaaccattattacacacactacctagtactcc

SEQ ID NO: 58229 - DNA, 1902 bp, Zea Mays
tagacacttaactagccaaacagccccccgaaaaagccacccaagaactctagaaagaaaaaaaaaggataaagaacgctacgcagagacactagcaaccaaagtcaaaagaattagcaattcgttgctgcccaaaaacatccttgattaaccctgcaatcacacactctgacttctctaggctttggaaggttctgatgttccgctctttccaaatctcccaccagaaaaggatgatcaaaccatcaaactctctccttgagcatttatcgactttggctctgcacttgttccaccaagtgtttattgacgaagattgtgccatccctggcagcaacgcgaggtcaagccaatgagaaagttgcgcccacaccgccctagtgaagatacagttttggaacaagtgggttatagcttctggttcttgtttgcaaagtctgcagatcggatcattactccaacctcttttttggagattttcagctgttaagatcttattatgtagtagagtccacgcgaagaaacgacattttggctccactttcgccttccaaattggtaatagattgcacttggcataccctccaatgaattgggccaaataggcactcctggttgagtaggcaccatcattggtccagcaccagtaaatggcatcctcaatccctggatttaattgcacctcgcgcagagcttcctagagagccacgaactctctaatttccttggccccaacaactggagaaatgtggaatatccatctgttatttgttgtggcttttagaactgaaatattcttccgtgaggacttggcaaagagcgtgggagctatcaatcgtgccgacatgccatcgatccaacacgaatgccaaaaagaggctttaaccccattgcccactatcaccactatagacgcatgaaagagatcccgatcaaccttgctacagggaatgtccaaaccgacccaagctctttcttaatttttccattcaaaccaaagccaacgaagccgtaaagctcttgcaaaacgctccagatcgacgattcccaaaccacctaggttcaaagggcacttcactaacggccacctgacaaggcagtgtcccccagaaatattttctgcttcctctcccttccacaagaaactacgacgaattttgtcaatttgcttgaaaatccacctctgttctgggaacacagtcaagtggtaaatcggttgagctgatagcactgttttaaccaaagtcaatcgtccagccttagataatagtttccctttccatcctgaaagtctggcccgcaccttgtctaacagtggctacacatcaatttttcggaggtttctcaaatgcagggggagcccaagatatctactcaggaatgatgccagcttccccgggaaccacatgggcaaagattcgaccacatctgcatgacaacggatgggaaaaatttccgtcttattaagattaaacttaagccccgagcaacgactgaaagtttgcatgatactttggaggacgtcgagctcggcctcaactggtttgacaaaaatacccgcatcgttagcgtacaaagagcaattaagggttgccggtcgtggaacgatttgcgaaaggattcctgactggatcgcccgctcaataattctttgaaaaggatcgatggcgaggataaagagcataggggacaaggggtcaccttgccggagtcccctcaaatgggtaattctcctacccggctttccattcataagcacacgagaatatgatgaagcgaggagagcagcaatccaatttctccatttggcaccgaagccaagaatcgcaaggacttctaacaagtgagcccagctgacagaatcaaacgccttggaaatatcaagcttgatgaaaagtgctt

SEQ ID NO: 58230 - DNA, 998 bp, Zea Mays
ccctattctgcttatggaccgcgggttcattttgtcactcaacaggggctctttaggaaaagtgtatggccgaaggggtattctcaaatctgggccgtcatatcgcaaatggacggtgcatattagatcccgattcactacgaaccggtacgcaacgtggggcttcccattaaaatcctacggctaggattttatgaggatgggatctaatctcggtcatcgaactaccatcctacggctcagatttatttgacgaaggggtacgctacacacgaccatggccgtccaacacgggatcgacggcgcacaaacgattttctctaatctaatcttggccgaccacgtatggatccacggatgagaagcgatcccctaatctgaaccgctcgtacacatcctacggttggcgccttcactctctgcttcatttaatcctagccgttaaaaacaggatcagtggtccccatgtaatctcctacacccgcccaaccgaagcaactacggcggcggccagctccggtacagagaagccatggccgagaacacatcctgccacgatccacagccctaaacaccgatctgactgggggtatacgacggggcgacgacaacgaaattggacaagggctaactaccggctataaggcgatgaagttgtctgtccatggattggggaagaaacagcggcgctcccccaccgtcagcaagaaatcctgagcaccggtggccaattcccgcctgaaccgactgcgaccacggacgaggagcaccgaaaaggttatgcgaccaccctccgaggacgcggtgtggttgagaaccacggtcgataacggtggccatgttttcccccttttacccagtcctcacacgacggcacaccgagggcgagtatggccgggacgcgcaagggcagaggcgggcgcgacttcgatttccatttgtagccaggtgggcgcgagccagggggttgctgctacacgcagagagtgaggtccctg

SEQ ID NO: 58231 - DNA, 297 bp, Zea Mays
tgggggcccagtgctgcctgcgccgcctggaaatcatggacctgctcctccagcttctgctccttctcctacgcctcgagctcatgctcggccagcaacttctcctgcctttcaagcatttcctccctgaaggcgagatccttctcccgcccggcgagatccgtctcccgcctatccagggacgcatccttctccttgaggttctcctcggcgagggcaatgttgctggccttgtcctccagctcccgctcccattttttgatcttctctatggcctccacttgctggatccgctgc

SEQ ID NO: 58232 - DNA, 330 bp, Zea Mays
gcccattaccctgtgcacccttcattcgaagcgcttctttatctctgagtgtgtcattacggttgtagcctttcgtcattgatgcagacttagtctcaggataaaccctctgtcttctctaaaagcaagacacacgcactagtgtttcattgtccccatacaagcacgccaccgagtttggagtcgtccatcaccgacgcaaattttgtgtgcctcacgaggtatgagtcccctccccttaagctctccctccctgtgtctccactcatatggaggattgcatgtacccattgatgatcgccttggctttcaaccactccatattcaaat

SEQ ID NO: 58233 - DNA, 765 bp, Zea Mays
cttctagaacctctgttatatactccaaccttatctaagcctttacaaccaaatgacacacaataaaacactggacttaatcccatattgtggtcagcaacccatagataggactgcactagtaagtaggctcaaaccagtccaaactgaaaacttctcaatatggagggacctcaagatcattttctgtctacccaaggtttacctcagcttaatcacacaagtgtaaggcagcaggggaagaagatctttgctgcaaccccaaacctggtctaaaatcagttaactgcatttccctctccactaagagacagtagataaggttccattgtttactgtcctcaaaatagtccacactgtgatatttatagcagggagagacccatagacccttaactatgtacccatccttatccccatccatacaaccaaacaaaacagcagggagaatgatcttcttcatttatccaatgccaccctgaactctactgcatcaggtttgttgttcatcttgctcacctccatgcttaaacccctctatctcacaaatcctctcaacagcaaaccccctctcccttaaccaaatttactctctaaacgtagctcttttactttggtattttgaccttttgcaaattgtggctaaacctccaaatccaattttgggctccagtttagggttcagagatactcaatcatcctaagtgcttcaccacttataatccacatatcaaaagcaaacttctccctcctcctaaagcaaag

SEQ ID NO: 58234 - DNA, 937 bp, Zea Mays
gtcattacctttagaatgtctgctacttcggcagtagtgggcgttggagtttcttctcttgcctcagctacctttggctctcgtacttcaggcttcttctcagacttcctcttttttgagactgcctttagctcagaagcagattttgtcttctttgcaatcttctcatcctctttaaccagtctggcagcctgtctgttcaaaatactaacaattctcttcctttttaaaccttcggcacccttgtcaaatctttcataattcggatattcaaaacctagcgcgtccatcacgcgattcaaccttcgtttttgccgggtgccgaaggcagcattcattagttggtcctccttcttggtataattaccaaggattttgttgcacatagtttcaatcatttccagccattcttggcatggcttgttgaactctttctcaaacttgaaccagtaggggagtcgaacaagttcgtgcttcttgcccacatccttcttcttgggcatcccccagccactagaggtcgggaataccctgtttgccaagaattcctgcaccagatccctagtattgacctcggcttcggctacttggcatggggagccaagctgcatgtggcacaagggcctcatcattccgaagcttaaagtcaatggactcataaccatactcatcagcttctccctctttttctcgtctgctttcatgtaaaaccattcactcttccaaccagttggccacttgatgtggtagctaagaactggtgcctttgtatcctttcgatacgcaaaattgtagcatccaaaattttcatgaagaccatctgccctggccttcgtctggtagtgcagctcgtgcacccgacagaaagcttcggcattagggctcatcccctggcttcggagggcccaaatatagacactaagtctaacaattgcgt

SEQ ID NO: 58235 - DNA, 287 bp, Zea Mays
ctcagcagcaggacaggcaccagagaattcgatcctttgggtttcaacccaagggactaagcttcaacaagccagctggacccactccgtcacgtttcagtcagcagggtcaaagctcctttcaggccccctccgttgcaagcaaccaacctccagctaatgcatgttggcactgcggagaccccagtcactacaagaataactgcccccagttgaaggcatccgggcctacttacaccaactcggtgaatggccccaagaatgccccagcacccacctccaaggca

SEQ ID NO: 58236 - DNA, 590 bp, Zea Mays
cattttctctggtatgaggatctgaggaggagatactcttcgcatcccaatcaatttctcggcattctcctttctggtacttgaaatctcccccaatgccaggaaatgttcctcattgaaaatgcaattagcgaactaggccataaatagatcacccgttaggggttttaaatactttattattgatggagattggtaacccacataaatccctaattttctgtgagggcccatagaggtaagttgtggtggtgatatcggtatgtagacgacacacccgaatttacgcaaatgagaaatcctaggagggtcccctcatactaactccaagggagaggagtcatgatatgcagttggtcttagttgtagtaggtcggcaacatgtaaaactgcatgaccccaacatgacgtaggcaaagagcaattcattagtaatggacgtgtaacgagctttactcttttcataaaggattcatccaaactattttgagtgtggacatatggaactgagtgttgaacttgaattcctaaagccatgcaataaacattaaaggcatgggaggagaatttagcagcattgtgcattcgga

SEQ ID NO: 58237 - DNA, 408 bp, Zea Mays
ctcggacaacacatccacaagatgggctcgaatacgcgttcgagcccttggccttggcctcggctctctgcttggtcaagatacgagatacagggaccgaacatccttctcctgatcaaagagaacagcaaggacagaagtcattccggtggccatactgctacaggggtcgggctcgcctcctctccacactacgacaaaccttggtgctcatgggatcctttcttgaggctataaaaagagaagtacagggcttccaggaaaaaagaggacaacgcacttcaccaattgtcctccatgatcgatattggcaattatctcaatcatccgtggagacttgggattcactccctctctcgaccagcttgtaccccctactacaagcacttaggtgcaagataatataag

SEQ ID NO: 58238 - DNA, 748 bp, Zea Mays
caaaaaggggcaatagtatactatgattccagtcccagaagaacaagcatgacagacagatgctcctttgaaaagtttttttgtccaacggaagaaaatctaatatactcctaacagagaaatcatgctagtagtattgttgctacactaacagagtctgcacactgagttgctgttttatacatgagccttgtttatatgggttacaactgtactcgagatcccattatgttgtggagttcagatgtaaaaaacagaaagttggttgttcctatccgctacaatagaataccatgagttgcttgcatctctatatattttcaatcacttacgaacaccaaacaaagtaattaagggattcatgggactacttcaccaggtaaatggaataaatcacacaaccaatcgtgctagaacaatacacagaaaagggtcataccatgcttgtacttctagatcgtcagcaatggaagcaccagtaccggcaggttcccacgagaggccttgagacgacgacgagcttgccatacctagttgttacaatctggtgaaccaattgaatgcagatgacgacgcaacagccccatctcactggcgcaaggtcttcttcgtcgtagtccggcgtcaggctggggagcagcgcgagcgcctcctcgatggccctaggcccctagtcgcggccgcgtcgaaggcgtgggcggggtggggagctcctgggattaggttttgccggcctcggcgtcggcgg

SEQ ID NO: 58239 - DNA, 452 bp, Zea Mays
atttcaaggaattttatgcttctatcagcacgtgggcagtcttcgcgtcagtctaccacccacgatctaacagagttgtggagcgcgcaaatggtaaaatctcaccataatcaaaaaagactactagaagataaaaagggcaagtgggcggagcaattacctgaagtagcttgggcactcaacacaactgagtcacgtgccaccgggttcacaccatttagactaatgtagggaacagaggcattgactccgcacgagctcaagcatgcatggcttgccctagacaaaccctaaggccaccctagacatcgacgagccaacaatgaaagacctccttgacagggaatgtgtcaatgccctcgacacattaagcaagtaccaagcagcaacaaaggcctggagatacaaagttgtcactcctaaagagtgcaaagaggggggccacgttctca

SEQ ID NO: 58240 - DNA, 604 bp, Zea Mays
gaacgacagaacaaaaagagctaagttacctgaagattagaaaagaatgagggcaatcccaaatcatgagaagctgtgttgtagctcgacgaaggaagatcaactggaacaatctgaagagcatcgttgggggttgattcagctccaccagcaaatattagaattctggcatccggctcgccgacctccaaggcgactccctcactcaaagttaaagaagcatgcatcgctatcactccatcagatcgtggtggagacgacccgacgtggacgtccatggaggtgtgggaagcagagctcactcggacaccctcgggggctgagttgcagctcgcactacccatcagagccggatcactaccggcaacaccctcgggggctgggttgcaacttgcgctacccaccagagccagatcattaccggcgacaccctcaggggctgggtaaccaccagcaccacccttgggggctaggttttctgcaacagccacctctaaggctgaaggatcctcagtcacctccatgggagtcgagcaatcctgaccaacctcttgacaccaaatactgccttccaaggtcgacgatgcgcgagatactacccggg

SEQ ID NO: 58241 - DNA, 418 bp, Zea Mays
atttgtttttcgatgcctataaatttttaacgtgaaatcgccgaactaagactaatagatatttgatgggatatagcatgagcgtatgtttacatgtttgaaacaagggggataccatgacggtttcaaatcctatattgttatgcagagtcaccaacttaaatttatcaagttttccctcccatgtcatgcaagatagggaattcttggtgacagtcactgtaaaaaagattggtgataagtggtggtacaatgcatgcaagaaatgcacccgcacaactgtggctcatggggattcctacaagtgcagcgatcaagtttgcgctaccattggcatgtcgaaccaaaggttatgcgacatctcttcacttaaattgcatccatcctacctttgcctcccaaaaagcctcgttgtttt

SEQ ID NO: 58242 - DNA, 437 bp, Zea Mays
aacctcattcgcaccctcctgttttaggcctcccttcttactcgttactaggttgagggactccacactgtcagtgtcacctaccttctgaaccgcctcccctccaagacggctagtcatcccactccttccttcgtcttgttcggcaccgcccattcctattcgcaccttcgcgtctttatttgtgcttgatatcctaacacctctgccaccgctccccacaaacttgcgccctggtccactcgttgcctttttctcaggtactcctctgatcacaaggggtaccgatgcctcaatcttctcacccaccacatcatcatctcacatgttgtttttgatgagcacattttcccccttgctagctcctccccacctcacgacatcggctctctcctcgaggccgatatcttcaacgtccctcctctccttatcaccgc

SEQ ID NO: 58243 - DNA, 815 bp, Zea Mays
tggctgtagctccttaacctttagaaggaggttatttggagatggggctaaacatttggaagacatgaaaaagttgtgatttgtactgtcttttggacagagaagacaaaccctcttggttgttagataaaaaggattttcaatgaagtcgatgtacaagagctacaaaaacagtgtgactaaaactccatattggtttatatggaaagctaaaattcctcagagaataagagtttttttgtggctgattttaaaggacatgattttatccaaagaaaacttgaaaaaaagaactggaaacggaatgtaaattgtgattggtgtggttgcctggaaacaactaaacacatatttcatgattgtcaggtagccattttcacctggagagtgatccaaatggccttaagtactttatcccttcccataaactcaaatgatatgtttggggattggttatgtagctttaataaaaatgaaagaaatctgatcactattggatgcagtgcagtttatggtctctgtggaaaatcagaaacgattgctgtttcaacaacatcaaccctgttaattctgctaacatactatttctttgttgtttttggttggattcttgggccattctccagaaagaaacaacaagaaagatcttgggggaaggatgctccctaatcagaagaattgctaaagaggtcttcaaccgaagcttcgactgggcgcctgtggacaaacgtctatgtaattaagattaggcatgggctgactgtacttgctatgagaaaccctattttcccccagcttttactgtctttttggct

SEQ ID NO: 58244 - DNA, 565 bp, Zea Mays
ggattattacattattctgtgccttagaatgaatgagcggcatcaggaagaagcgacatctacacatcgaactgctgggatgggatgctacttacatacacaagaactgttatctacgctaaagcagttgccaaactgcaaaaaaaaaaaaaaaaggctgcagaaatcttctcagtacgagcaggtttgatgataacggaatattggaggggatggagagcaaatccgttaggcaatgttcgttttaattgcgtaacctatctatacgtggctgtagtctttgcagacatcctaattaccggccagacatactgcttgcttctacaagcaaggtagggtgtcagctataatgtatattttatccatgctgttgtgcatcttggactcaaaatgccttagctctgtctgtaacaagtctgcaacggtactgtcaggttcaagctaatggcgccattgaattgatgtcagctaaatgcatgtgagacaacctccacaaggtcgccgcgccggcgagagctaggatcagcaacgagaaaacacaccgctcgctggtgggagatcctgg

SEQ ID NO: 58245 - DNA, 1231 bp, Zea Mays
aagtatttacaattccgagagatgtatgcgacacaagcatagaggtcctagatggaacaagtaaagtggttcgacgggaactcactatggttttcacaccaacattgtgaaaaatttctcagaataatctctcggtatactcgcaacttcgtgttattagcggttaaatgtccttttatctcatagtttgcttcatgtcatccagcgacaaagagagcaatgtgctaacatctggttgagcaatgtatggctgagatttctgatcttaaatcatttggtaaagtctttttgcttactaatataatcccaatttgtgatatcttctatgccaaaaaggctttgatgcattatattatatatcttcgggttacttcgggtaaaactttatgcatgaggagagagcaaagaattaacttatctatgtgtttcattgtatttcgatttaatttcccagatttgatatagttgttatggccacttggcgatatatattaatatatgatgccacacaacacaatcaaataaaatatagagccaaacaaaaaattaggaaggttgtgcataatatgacttcagggccttgaacaactcaccacaatccacgcgagtacaagctctagcgtatctagcgtcaacgcgtgtccggccatcagggccacgacaacacaacaagccttcgtaataagcgcaacaggcacaattatagctcggtaattgaggtacacgataagtccacgcaacgtgcgcaacaggcgcaattgtgacttaatgatcacgacagacagacagtgcctacagggcatgcgaaaaatacgcgactcagtgatggcgggtcgactcaatgggagctgtccaaataaacgagagtgctacatagcaatcacatgacgcagccaagttcgtacgacacaaacactgcgtcgtgttgccagggcgcagccagtgctcagccaatgccataactcggtcgattaataatgtagtctgatcgacgtgtctgagtacccactatgcaatttaatcgctcgacgtgagtccaaaagctcaacacatcataaatatttagagcgatttaaaaatacccaacgtagccttcacatgcaatttaattattttctgttaattatttgctgtcagaaataattattaatacagaaaaaataaataccaaaattaatgcatgagcatcaccacagaaggtgcaaaaggcattttcctattattaaacgtg

SEQ ID NO: 58246 - DNA, 608 bp, Zea Mays
cagtttaacaatacacaactaaattcccgtttgctcagctaacaggtacacaaaacacgctcatgcggacacagaggcaagcgatggctgacgagagcgtcaccttggaggaatgatagggcagtgcagtagtaccttggcgatcggatgcagagaagcacggcaaggatatcaccagaagcaacacaacgaagcgcagctccctcatcttgcgtagatcccactccggccgggcctccattctactccacctaatcagcccagccgcgctagagggccccggtggccgcgccgccccccgggaggggggggggaggtgcagcgcgttgaggagaagagagcgtcgagttcgagcaaggcggacggacgtcgggatcgcggagggggcggccgcggattcgagagtttcagtgggctggggctgggatgagcaagcagaaagaagagcggagcaagaacctcgagcacttgtcctttcctttttccttttgttttcttttgtccttattttctttcaggatggggattattcggattcgtgggccgagcattaacggaagaatggctggatggggaagcctgtgaccgctgctgtccttcagtccttg

SEQ ID NO: 58247 - DNA, 358 bp, Zea Mays
acggagcaaaccatcggtaacaagggcctccagatcctccacagtaatggtggagaaaggccacgggtcgcgcggcggaacgacggtcaccttgtcagccatcgccgaacggaggtggtggaggcggaggggatgaggtgcacggttttctctgtctactctcttaggttgcggaaacaaaagcagaaggcaagcacaaatggcagggtaaagaaccaccaccggcccctcttccgggtatataaagacccgggcgagatccacccaaaacttcgcctaaacccatcgcgaaattcaaactcaaaagtgaaacgatttttctgttcctcgaatgactcgtgcacgcgcaacagacgcc

SEQ ID NO: 58248 - DNA, 496 bp, Zea Mays
caaaaaaattggtgtaaaaaagtcaaacgaattataaaattagacggagagagtacaatttttttcatgtaccagagggaccctaagtcccaccttgtgtcacacatctacccttttatccttactatcccctctcctctcctggtctttgtcttcgtattatcattgccattcttcttgcttaatcacattgtccctagctatcctcatcttggttatatcgtcattggtatggagagattgatggcccaagtgccacaacatgcacctaagttggctctataagaaaaatggatcgtggcctatttaaagtattgttttggtgtttcatgctcaacataaccatttggactagcattatttgctatgctttgaggtatagttcaaatgatgcataattatacatgaactaaggcaaaaggttgatctagatgatcaacaccccaagcaacacattaacaagagatgttgaagaccgatagataatggcttgctg

SEQ ID NO: 58249 - DNA, 1194 bp, Zea Mays
cgagttgctggattaggtgcttgactacctagcggagccgagggtgtgctcaatttatagtgtgcttgagtggtggccagtgaatttgatggagacgcgcggcggccgaagaggaggaggggcactggcgcaaacgattagtggctttcaccgtgtcagactcaccggcgacgagccagtgatatagagcggcttgcggcgaagtggtgaagcttcaaggcatgtggcatctgatcgacgggcgaccaactccggtgaacttatctaagccggccgcaaagcaaaagggggtacggcggccagcctccggtgttatcctgtggcgaagatcttttacccagaagcgttatccgggcactagtgagctcgaatcacaacgacggcgtgaacccgaccgcagagatcgccggcggtgacattcaatgtactggggatattttcagtgcactgtaccatgggaaatctcattcagagcatctgacagacaggattacagtgcctagatctcggatttttgtgtgaaaactcaccaatccatctgtagcaaacttgtagccctttatttcaactataattctgctatagcaactaccctcaatcgagcaatgaatctaactctaaatcgagctctaagttcatcctactttactgctagtgaggattcagacttagggttgcctgatagcccgacttggatctaattatctcaaaatttctcatgacaccatggcttaattgttatagcaaagttgtactcctacaggagctctacaagtttgatatgttgaccctaggcaaattctttgtatttttaaaattacagagctccaaagttagcattgttcaactgttttcatacttagccacatgagaggaattgagtggctttttgcaaataagccccttccacatcttttgacttggaaatcctcaaatgtgtgaaccatgtgctttggggtgccctaataccatgatttttgtacttgggtccaaaagtgggcaacatttacatataaccccctagggtttcaatccagggttttccaggggtttatttaggggttttggtacttctagggtttgggtgctacttaagtccattaatggtgatattttatgaccatttctaatgagttttgaggttttctctcatttaggctttgtttacacttctaagcccagtttagggttaag

SEQ ID NO: 58250 - DNA, 463 bp, Zea Mays
tgtaagcacgattaaatccctatcgcacattcagatcccactgctaccaatcataccacacttcacctaattgcggccctccatcaagaaatcgatgtcccgtgccatctcttctccgcactcgcctgggtacggcgaccccactatgccggcgacgaacaccgacgaaccgcggcccagcgctttaagaccctatccctgagcccgatagcattgacacaatgcggaactaatggtgaacacgtggatgggtgatttacctgcagtggcgtagaagaaatctctagccacgaaaccgagctaactgcggtggaggagatagcggagcgaagaattctgaacgccagacctagccgctcgagtggacactcacaccaacactatccccggcttctggtgaactccgcgtgaacacgaattgaggcccgagcggcgaaatctgtggcaatcgcagaggcagcgg

SEQ ID NO: 58251 - DNA, 425 bp, Zea Mays
ggggaaaccgaagcagcaattttcctctttttctgttgtcctcgcagtgggtagcgataatcggggtatacgaagctgattgcatcaaaaaccctgttcagccttttcttcccccagcctccgaaggctacagatagagcattatcttcggccttggaataagctccgagcatttcatcattggtagcttcgatacacttcagacagtcgtcatttggctcatcaaacttctccttgaatctgaaggtatacttcagtcggaccagaccaccttagctagaatcggtggtggtctcattcggcatttcccagctttctacaagcggccataccctgaaggctatatgttcttgaattaaatctcttgtgccgatgaaggagcaaacagtgctgaaagccctctgacacgcttcgacagtgtcatc

SEQ ID NO: 58252 - DNA, 731 bp, Zea Mays
gtgaagtcaaaagacgtgttgcgcctgtctgacgggaataggtgcgattgtagcaacatcgtgcccactcctagttgtcaggccccaacattttagggtgtggtgccaccgtggcactgtggcagcatgtacgacgtgtgccacgacctgccatgacccttatgtcgacgtggacaatatgagacatgtgttgtcacgttcctgacgacacatatcattttccacggtgtacatggcttcggtcatctacaacctataccacgactcccgagtgcttctgtagcagcgtggagggcatactcctctacctatcacatatcaggaatccagcaacatgggcacatcctgctcgtgcccaggccatccgatgtgggcacgacatgcatttgcagctcctcggacactccaacgagaccacggactgacgttaacagactttccattaatccagggtgggacaggcgttagactcagccccacttgacacatgtaaaaccctttctctaggtctataaaaaggagaggtgggccttttttggacatccttttttagacttggacactttcaggctctccttctcacaagcatccttgtgctcaggacttatccgttttcgagaaccattcaatccactcaaagaggacgtagagtattacgcctctcggcgagtcaaatctctgtaaacctttgcctccctctcgtgtgtgtttgtcgtgcacctcctcctagc

SEQ ID NO: 58253 - DNA, 478 bp, Zea Mays
attctatgcatcttctcactcttgttcattgcttcatctagaggacagtggcattgtctgggagatggataaatgatgcaatgcatgctttgttgtggtgaatcccgcgttgtcatcatggacacagctagctctgaagatttctggtggaaattgacacaaccttgtttctgtatctggatctattatgcataatggcagaatgatgtcacaaacctttgagcctcattagtcgaataaactcaaattatccaaacagtataagaaactgttgttccggtgggcactgtcgcctatgcactggtaagcatcagtctgaacatttcttgtttctgatggttcggtggcatgttgtgatcaaatttggtgaacaatgacattttttgttgcgtcgatgacttttgaggggcagcggtacatcaaattatcgtgcattcacctgtatgttaagcagaaactttattgattatgttggcaa

SEQ ID NO: 58254 - DNA, 483 bp, Zea Mays
agggaccggagcctccggagccctggtcatttccccttcattattgacggcgaaatccagactcctaaaacggatggtcgtttcgggggtccagaccgtgttgactgttgacgttgttattggccatccagagtttggaaaacctcatcgtggaacacgcaagtcccctacctggcgtgccaactgtcggtgtttcaaacctcgttctgacaagtaaatttattgtgcgcgtttcgggctccggacagtgtgcgcaagatttataatggttcggtccctacatccaatcatcgatggcttgctctagtgacaccattgatgatcaaagctcgtagtagtgttacaagcaaggcgagagagggaaaagaagctcccaactctcttattcatggtggaggtggttacaaggtgaaggctaagtcttggcttggcaacatggctctagcctccaggtcttcctcctgttcatgggtcttctaggtg

SEQ ID NO: 58255 - DNA, 534 bp, Zea Mays
cttaccaatcatggggtcgaggctggagaaccatttggagcttctagtcatgtggtgcaaacagatagaatccatgagccacgtgttctctaggcctctatcctacatcaatagaaagacatgaggtgagcaaatggcacaacactggggttacaggttaggatactaagaataataatagtcatgtgacatttgccctaaaaagggttagggaaaacaccaaatatccctagtcccgaaggggaaagtgatcaccacgagaaggaaattgtggttcgctggggaagtaagaaccaaagccactaccacaaggtccttggccatatgacacatgactagcacctcgctaggcacgaccaccctgtggcctcactacatgatgcctagcagcaagaggcaaagcacctctaggcctcacaggacatctctgagcaggacaatcatgaacaccatgagagggacgattcatgttccttctgctcgactcagaaccccccactcatctctcttactcctaaagcaaaaggcaaccaa

SEQ ID NO: 58256 - DNA, 1445 bp, Zea Mays
cacaccccgtcaatggcgttctccgccgcctcgtcggcggcggccgcggcagcgtaccccagaactacgcttccactgcggcggcggccgggcctcttggccctcctcctccttctcctttgcttcctctccttccaggtctgtaccccccaagtgctcactgcaacggcgaaatgatagattcatcgcgttccaaccctcagaaccagggctccttccttctcattgctccctccgctcctccttcgcaggtcgtgatccatgtgccctccgccagatcagcggtgtcgctgtggctcttctcgggtcaccgagcgtaagaaccattgccatccatccatcctccctctcttccttcctcattactacgcgattcagtaaaggctctgacttcggtgttgcggtgtgattttggattgtcagcgaacgcgggactcgcgagaactgccctggctgcagcaagttacaggttgctctttatttatctgagtttggctgctcaggtcgcgcaattgcgttgtgctgcttcgctcgccacgctaatgtttgcacggtgaatggttagcaggatgtggataaagctgaaaagactatcgcgtacactgaccagcatggtcggatcaagctattcaaagttaccgccagagaattcggttcgtcctctatctgggagaacccgtggttgcccagagatagccagccggtagccagaacagtatgttctgaaaaaaaattatctgtgttgtttgcgaagacaagttggtaggtttgttctattttgtagctctaagggtgttccttcttctgttgtgtcagcaagaggttgccggggatcatctactcgccagtggatcagaaaccaccaatctttcaagtgctgaaactctggcaactacaattgtcgatccgattaaattacggcgacaggtcgattccatcctccttctgttctagtgactatggaatacattgcaatggttacttgtgtttcgagatttttttgtttggcttactatgagatgtgttaatcgtgcccatctgagtgtttgtgtgctgctattgctccctgcaggtatttcgccgtagaagaaaggagcggagggttcaggagctgcttcagatggataagaagattgaacttcagatgcggaatgcagcaataaatagctcaaggaactttaacaataaagttagaggaagctacaacatatggaggcaggagttccgccttgttaatacagactcaacactaaggctcatgaaagatcagataataatggccaagttgtatgccactattgcactctcccagaaagaaccagacatgtacgcgttgctcatgaagcgcataaaagaaagccaaacatctatcggagatgcacttatcgacagtgaactcgattctaggtacttcatttcccttctaaagattaatcagtttggct

SEQ ID NO: 58257 - DNA, 325 bp, Zea Mays
tagcttgtcgtgtaaaaagaaatcctccttcagctccatccacattgtccgatgatgatttcatggatgctccatctttgaagcgccaatttagatcagcctcaccttccccttcagaaaaaaccgtgcaaagaagataaaagtcccttccccacaagttccgattgtgacaagcagttcaaagtttgatatagatgtcaagtcaaatatcattacaaaaacaagctctcctaaacagaagactcctagaaaatcacaggtactatgtatatatttatgtttatttatgtgttaattttggtgcacaatcaattttgtatttccc

SEQ ID NO: 58258 - DNA, 1638 bp, Zea Mays
aaaaatcatgaaactatttttattaaattctatggaaaataagaagtctaggaaaattagtttcacaattttaccatttttttatcattttctataattgttttggctctggaataaaaagaaaaggaaaaaccagtgaatagtactgggctgatttcagcccagcagcccagttcagaggggaaaaggcgcccgcgcgcgcccgcgctggcggtcttgcggaaaggccctcggtgctttcactaactggggatgggtccttccactgtttaacacagtcgctgacatattgcagaaatgccctcaggtttctatttcttcaccgtgttcggtcctcgacgaagctccacacaggaagccgaaatccggcgagctataccggccggagagggcgaagaccgacgctaatctttggttcacacctgattctacccctaaggagtatttcccctcactcaatttctaaattggagctctatcataatctgcccacggggacagcggaaaaacttaaaggaaccgcatgttccaagcgattcacggtggtataatccaattggataggttggggagcatcacggttacctgggaatacttaaacggggaagtagaagacgtgagctaactcgaatcgcgctggtcacggaaggattcttgcggcggggctaagaacagggaggaaaggactcgtgggttcgtcagtggaattgagccaattgaatgattgcttgagcgcgtgatgcaacgacgaagcaacgctagggcccaatttatagtcggctggccgaggatggatgagatccccgagctgtgactgcgctggcgagcacacccgcgcggcggattccggtgacagcgcggtgatcgccgtttaaccggagcctgccacctcagtgacactttgacacgtcgccggtaacttttgccgtggctgccgacgtcttacccgagccacggcgacatccttatcgccggcgagccaatccttatccacggcgcgattttactgaaaaccgatgaacagtgcaccggattcagtggaaagcttaactgacagaccaagttggagccctattttctcctactttccgatgacaacacaagtccaactctgcagcaaacttgtagagcactataccaactacaactttgctatatggtgttgtcacaaaaagtcattgaatcatgtctgaaattgggcttgaagttggtagtagttcaccgttagtctgaaaattcagaccaaatcagcctgacagcaagtttgagcatgattatctctaaatttctcacaagaacatggcttgcccacttcagcaaaattgttctcctttgtttgctttacaacattgatgtggtgacctagggcaaagatcctacattttaaaagttacaaggctccaaagttgagccctcaacactgaatttcagacttagtatagaactcaaatgaggtccattttgcaattaagtccaaaatccagtatttggcttacaagtccacacatttgtaaaccaaatgacttaagataccttactttgatagtttttgcactttagtccaaaagtggactaattttgcacataggcccctagggtttggatttagagttttccagggtttcaattagggttttt

SEQ ID NO: 58259 - DNA, 325 bp, Zea Mays
gctatcccaaatcttagttcagtctagcttcatgattgtctttgtgatctgatacctttttgcaagctttttccccctttgtgattgtctttgtgattctgattctgacgtagtttctttctttctacagaagtgtccgtgagaccgtgacgtgctctcttgtagagagtgtactgccacagtggacgaggtgacatgaggcgatgtactgcacagtggacgaggtgacatgaggcgctgttgttgtactatatagctagccgcgcaatcccaattccaattccatagctgcgctccgcgtctggctcagatgcacggaccctcg

SEQ ID NO: 58260 - DNA, 633 bp, Zea Mays
agacaacctgggcctgagcgctgcgtgaatgaagagagtgaagccgccgcgaccatccatggttggctccgccgagctgtgctctgggggccttggcttggtccgtggcgtacctcgatggacaacccccctgcacgctgggatttcttcatcaggacagcaaccctgtcgtctgcaatggttagagatctacgctgcacgattcatggtgagtcctccctgccaccccctttgcgtgacattagtctatatggagtttcgttggagcacctgaatttctgggatcctggccgccgggcttcatggctggtatgaaggtagacgagagaacagagtgagagatgggagagagaaagagacgcaggagcgcagccatcctggtgttcatcggatggggaagacgccttgagcatcgttggatctccgaccgacgaaggagatttgatcccagggcctctcttcgtcagatgaatacggaccgttgatcgtcgatcggtgggtggcgagcagtttagagctcataaaatcctgatggtcggattttgatccgatggacgcaattccgtaccgattcggggtccgatccgggccgttggatctaatccgagcggcttagaattcaccatacccctt

SEQ ID NO: 58261 - DNA, 672 bp, Zea Mays
cacccttgaccacggcgcgctcggtccggccaaaaacttcggtggctacccaaaccagttgctaggtaagcagcaccgacccgaggcaaccatagaacaggttccaatttgactaacccagaccaggataagcttgaccatggcgatggtggacactgagcatcgatcagtacattccggttgcatacgtaaggtaaagctcccggggttgcatggataacaatcccgagcacatgagggtgctaaaacacgaacaatgagggcgaggacggacctggaatcggctagccgcgagcaggtgattcacggcggcgcagtcgaccgaattgggggaagaggggaattctctggctacggtggttaattgagggggagaacgggtgcgttggcttcacgatgacctagcgcagcaggcccaaccatcaatttatagggatagcgagcggtggccgcgaatttgaagaaggacgcgcggcgatcagaggaggggaagagcactcgtgcagcgacttggtgtccaacaccgtggcagtttctccggcgagccacgaagagtcacaaaggttcacggtgacatggtggaaacacttaggtacgtggcacaaggacggaagatggcggttcaccggcgagcttatctgctcaagccgcaaagcagggggggtacggcgg

SEQ ID NO: 58262 - DNA, 773 bp, Zea Mays
ctttaacgaattatccaggccgaaccggtatgggatgctcaccgccttcagatcagatccgacggcccacgtgagatcgcgacctccacgaatcggtacgcaagatcagctgtcggattaacaattaatgcgccagatcagaatatcctacgttgattctcatccatcgatcgagatcggacgacgcacccgcatccacgctgaatcaatgtgctaggaaagatctaagccatccaccccacgatcaacgacctaggcgccttgatccaaccggtacaccgacacggcggtgccgacggccgaagcggtgacgccatcgccggaatacggtcccccgacattctactgccccaaccagagcgtaccctaaaccgtaaggaagaggggaagaaggtgaatttaattgaatgctccataccaaggattatcgcttgggtgatactagccgcggtgttaggcggaaccgcggtggtgcgatgtcgacggcgagcaattggtgaagcctcgagtcatgcccttgcccgtagaggtcacgcgcacaactctagcacccaggggaatcaccccggctgtccccaaggctctcggtcggcgagggtgtgagatgtggcgacggtggatctcggccctcggttatggcgacactggcggtgtggtttcagcgcgtaaggggagaagacccgttcggcaggtatgtcccgcacattatagttggcgcggggcacgaacctagcgaggaattcggcaaggcggttattgccgcaagattctag

SEQ ID NO: 58263 - DNA, 414 bp, Zea Mays
gtggagattaggacgggaggggaggatgcgccggtggagaaaggtcagagtgtgtagaggaaccccgagctatcacactgggcgagggggtcctggtggtcagatccttcatagagaaaccaaaagggtcaaactcaatggaacaagaattgtcggtggtgaaacgaggatcagaaagaagatcgaggagggatgggaggaatggggggtgaggagcgggataacgtgcccgcggtggaggtggtgtggtaggacgcaccggaatcgaccacccagtcggagggaggtggtgtcatcgccatggtgctgaaagtggaggcgagggaggttggatcccatcctcaagccagcggggttcaaggtgtcgggtggggatccccggaggcgggagatggggcggagccggagtcgtcg

SEQ ID NO: 58264 - DNA, 276 bp, Zea Mays
gctccctctacgcatgcgtcggctccataggcgtgtgcctattataagtcatttcccttctgtttcagacattctagcgtacattaagtcattctgtcacttttttatgtatctcagacattccttgttattgtttcagtcattctaggcaatattaaggcattctagcgtcctgacaacattaagtcatttcagagtccaagcaaagtcattcagccatttagacaacgttaagtcattccaatcaacattaagtcactctagtaaatattaatt

SEQ ID NO: 58265 - DNA, 494 bp, Zea Mays
tacgtagcgcagaccaccggatcagagatctacggtctgaattctaaataaccgagatcgactcgcacccatcggattttagatctactgccctaaatgatcacacgaataggtgcatgattatctaatcttggtcgtccccgctacatccgagggccaggggacaccactcttaccgatggcgactagagtagtggcgctcacccatcccggcggtgccatggccggcgaggtcgagaactccgattcccggacgagcaccaaagcggacaacgctacatgctacaaaaacgatgacgaaactgaggagaggagtctcaccatgtttccccagtgcggcgcccagttccctgaggaggagcaatccacaacgatggttctttgtcgttgatggcctttacttgccgggacggccacccagcccaccaacgcgacacgccagccacccggaaagacgtagagcacatgtgacgcgcttcgcagaccaatctttt

SEQ ID NO: 58266 - DNA, 624 bp, Zea Mays
gtgcaatttgtctaatggatttaataaaagttattgatgcgggtgatttgattgggtgggtttgtaaaatttaaactggatcatagtggtattccgcatcctcggcaaccggtacttacggcaatacttcttgccgtctctcactctctcttgttcccggcgaactggtgagctagtgtgattcaccgcggtcggttatctgaaactttatcttgattacttacacacactcattattatttgttggtttcttctccgtgtggtcgtccataagctagctcatctgaaattttatctttaatttgcaagcaatctagtaacgaactgctgcagcagaaatcacacttctgcgcgcactcaactcatgcaagaggaacaagtctcagttaccagctggcagcaacaccatatacgtttcagccttttagtgcagccctagcagcaagaaatgcactgtgcaaggaacgttgttgaattttgtcaatttatgcagaggcacacacaaagtttctccaacaacaaaaaaaatgcactcttcatatactacttgcaacaacaccttaatttggtatcttatccaagtatatgtgcacaataccctatattatattagtataattctgt

SEQ ID NO: 58267 - DNA, 829 bp, Zea Mays
cgggtttgcccggccacggaaacgcgaagatgagtgcgctctgcggggtacgatgaggggaaatgggcgtcacaatgaattctggtggaaacggacagtcacgctggggctatacggccataagggactactaattcaccatgcactaccaattttggcttctactaatcacaccggaatacagtgaagacttcatggttcatggcgcaatttaaaggggtggcgacctggctagctatccatggtcacaaggctcgacgttagtgcatggcgaccatgcaacaaaggagcacagtgtggtagaatttaggcgtgagtgacaccgcgatggaagtactgagccacgatggtcgccggtgagatattcttgccccgaccccatcctaatacgcaagatggtgaattggctcgaagttatcccgccctgaccgtctctatctccagttcgcttggacacatctgaatcccacagtaccgcagatcttttcttcagatatttccttgagccattgatcttccttactcaactgaaccgtcttccttcaatccccttttctcttgattcttgttaagaacaggttaatatctattaacaagaattgttcaccagacaatggtctttgaacttactataggattcttggacctaaactaattaaattctcagatctggtgctctcaaatcggccacatttcactggaaccactactgttctgaatccaattttcagtgtcacccaaatcgtgcaactcacttctgacagagcaactttgtgccactgtttctttgatttttatgcaacaacccatgaagacgactgtaccaaag

SEQ ID NO: 58268 - DNA, 1106 bp, Zea Mays
gttttcagtgacaattctccaactttgaagctaaattgtggttgatctagtgaggttaagaccatggtcattatggcaaagatgaagactatatatatgagtacaactttgctaaagccgagcaggtatgttgctgtttggaacaaagagtaaaagtgacccaaacttgctcggtcaggcggttttgatggggcattcagaataaacagtaattgaaaaagatcttcggttctgagaacccaacgccgacgatcttatgccgtaatccgagctcgcctagaagattcgtgctcagtaagaagcggataacactgggagaggtgaaaagatctacggaggggtggatttggtcactggccggctcgaccaccgtatccacttgcccgcgcggtcggacgagttgtcgctgccggaggctgccatttctccttacacatcacgcaagtgcatgcttaccacgtcactgtaaatgtggccgacggtgaaacacatcccagagccctttgtttactcgcgcgccacgacacatgaacaccagagagttatcaggtcgtctagtgaactcgacctcggccaaattcacggaactagaagtcgacttctttaaattgagtgtcatgccagcttagcccatccatcgcgaacccagtccaccgcgcactactctgtttcgtccatcagagcgtgagttcacaggagttccctgaaatcggtcgtcagcgccaccgtgataccctccgccgtggccagagctgttcaggtcagttcatgctcctctggtccatgttttagcatcttctggtgctagtgaagctcattgagcttcccgattgaactctaccatagtagatcagccagaatagatcatcgtcattactgaacaccgccggaaccagccttcacgtcgactagctcttctgcgcttcctccgttcaacttcgcgcgagtactgcaactctggtgagccaatgctgcttttcaagtcggtgaattaaacgctaccgcatggagccgctaggaacaagctcgccggagctttagctccgccgttgtcgtgaacaaacatggattttgggcagaccagtcaaattagcttcggtattatg

SEQ ID NO: 58269 - DNA, 853 bp, Zea Mays
ccccggcctgcctgcggtgaggcagacgggtggtgcggccgtgtaggagcaggagcaggacagtgcgatgctgacgctcccttgctccctttccaggtaagaggcagaggtacccccgaatcgggatgttgttgatgcaaacaattgtagtagagtactagagtaccctacccccggcgccgcggcgcgggtacagttacagtcccacggggctttctgctccattccaactgctgcccagtgccccccctgctttcagctgctgctgctagctaactaatccatcgcaccttatctgcctatcgtctcttatctcccggataaaaagcggccagcaccatccattccatctccatctccatctcccgccgccgccaccaccaccaccctccgactcaggtgtccgactccgatcctcgtcacgtggccggccccctcctccccctctgccactcaaatccatcgcccctgctttttctcttcttggtatacctgaggatgttgagcaaaagtacacccagctttttatctatctagttggaacactgttcctttactcgacaaccaaccagccttcttttttttttatcatcatcatctgtcaatctaggctagctacctatatatccacttctactttatgtcaagcatgtttgatctgccgactcttctagtacgtagcgtaccttgccgaagcagagctccgtctcgcactgtgcattttgctgctcacgacacgtgctagggccgagcgagtgctttgcgtgctctctccacttttcacctccatcgtatcggtccagcggctgctggtgccatgccaataacgagtctcatggcacttgcagattat

SEQ ID NO: 58270 - DNA, 382 bp, Zea Mays
gtgaactataagaaatgccttgtcttgtgttgttatgatagttttgattaggttgtgttatgtgttcctcttgccttgctatctaggggatgtgtgttcaacccgttttgcctctaactggcaaaaaacttgttgtttgttctactcataaaaagaccacctcaaaatagccttgtgattagcaggtgaaaccccttaaaaaatcacatgcttgtgttagtgttttctatcccttgtgtgtttcacccttgaatttacacttgcatagcttgcggcttgtaaatctctatagcttgactgccagatcgacccaaacttccttgtacacatgtttatgtcacaaaaaatcgtttggtgtctagttgcgcaaaccatgtccaag

SEQ ID NO: 58271 - DNA, 651 bp, Zea Mays
cacaaaacaagatggaaagcgcgatcgtagaacaacaccccctgaaaaacataaaccgtgcctacagtcgagagaccccccgaatgaacccatggttcctctggaggctcgggggctagactcatcgagtccttgcacgtcctcgattagagcaagatacgccgtcaccaggtcaacctctaaaggagcgtgatgctccttcaaagacttataggtatgatgtgggctagattaacaaacaatgatgaaaagtcgaaataactgaacacgtccggaccttataggaccaaccacattttgtccaaccctcgaccctcacaagtctaggagacaagctacctcgtcttactataccgtctcgaccgacccctaaccctaaagggccaaggggagggtgactcgtccttgggtccccgtttctcctgaccctaaccctcgaccatcaagacgaacggaagaggaaacttggtcccaaagtaacgcctcgcccaagccgtgggttggacctagtgccttaccttgcgagtccaggattcgtggaaccgtaccacgatggccatttcgggcgtggagatgtgcgagtcaagccctggcacaggtgtgtagggatggcgacagggcaggttcaggacgagtggagtagccgcagac

SEQ ID NO: 58272 - DNA, 411 bp, Zea Mays
tggagatgttgcacttaatgtttggaaggttgggaggggtcttgtgtactcaatgtgctagttgggggaatttatagcccctaaccagtcaaatagtcgttggagaaaagctgccaaaactgcacaatcgggtgatgcaccagaccgtgaacagtacctatccggtgcaccattggatagtgaatagtgcatgtgcaagttaccgttctgattctacaagtagccgttggtcccttgtcaggcgatctggtgcaccaccggatggtccgatgcgccaagacaaagaaatcccgaagttggcatgtttgctataattcacgtgggatggcctagtgcaccaccgaatagtccggtgagcccccggtgcgttggtttgatattggctgagtctgagtccttggaccggatggt

SEQ ID NO: 58273 - DNA, 776 bp, Zea Mays
ctgggcagtgagcctctatcgtgggtgcctgtgcggtggctcgttgtcgtgtatccatggtcgtcaccgtggatggtggttcctacgacgctaggattggggaatggatactggggaagcaggaggctcagggctggcggctgcgagtctacgaggggaacaggagtaggtgattcaggttaggtcaccgctacagtcagggaggaagatcgagcctgtgttctaagattataaatgttactgtactagcaacacatattgttgtcgagtcctaattaatcaatacattcccatagcaacacatattaagtgttgtcgcatcctatttaaacaatggatggtgcttgcaacatatattaaatgttgccaccaccctaataacttaacagatgatgcttgcaacgcatatgaagcgttgcccgctaatttcttacaacacataaaaccatgtgttgttgtggatgcgttgctataggggagtttgtgttgtagtggtcgagcatctcgcgtgagcacttcctcgcgagcgacggcctcggtgacgcagaaacctcgacgacgcggcactctggctcctcgtgagcaatggccgccgcacggtgacaaggaggacccgttcggcgactgggcgctagcgtgaagctgaaggcgctgaagaggaggggacatggattagggtttctctggacggaggtgcgatcgactttggaaaccaaatccccttgtatcccctcatgtctcagggtgagtaatccttggatacatttgaataagat

SEQ ID NO: 58274 - DNA, 383 bp, Zea Mays
tagagtagtggacacaagaaccgtattatgagatagaaaaagtggggaagagatgttgttggcgagtgattttcactatagacggaaacaccccctttccgcgaggatgacacacggattcgtctagtacacttgtgggttgctatgcgagaacctagagcccagttcctcgtgttgtgatgagaacgtatgactaaaaagtcatagacgtagacattttgagcaatgggatttgctccccactaagcaaagtcatcattgagatttgcttcctactctatcttttttctggtttcagtcgtcgtcctctttgcaaaaaaagtccttatacttctttctgatctaacatgcggtccatcgtcgtcgtgcgtcattaagtaacg

SEQ ID NO: 58275 - DNA, 565 bp, Zea Mays
ataggatccgaatcctacggtgcagatcatatctctacccggagtcatccgatccatccgatcggatctgaacggagccggttactccacccaaatcgttcgcctggttcgatctcggccgcagacatagatctaacggttcccagcctttcttcctcccagcagagccgcgcggtggcgctaccctgatacacggtgagccatgcgccggcgacagtcttcgccacccaccggagctaaactcaaaccccacctaatgctacgcgaaggggaaactagggcgagcacagatgcggcccaaaatcggtgaacccgtgagttgccgctgctatccatgttagtacccggagccaccgtagatggttaatccggtgagaaattcccagtgctcaattaccccaactcgaatcctagtgcgctaattgcgattaccgggatgagatgaacagatgacgaggacacataccggtgccaaagctctagaagcgattgtccacggcggcgctgtttttctcctccccttcggattctccccaatggcggcgaggctactggtgtgtgcaaa

SEQ ID NO: 58276 - DNA, 716 bp, Zea Mays
gacgaagtcgacgtcatgagcacgcagtgccgttcgcgaccgaagacgaagaggggtcacatccgcttccgccgaggttcgtcgcgtccgattcgttggcttccgtctccgaccatcaacggcgccatcagatccagacgcatccccttcgattcgacttggtgggcactaaatctcccgttcttaaggtattttgctttacaactccacggtaaatcattgtttatgttccgattgatttacaactcaagtcgtattgtgcttgattcgccgtcttgcggcccagatccatccctactagaggtatagcatcttctaccccgtcaaacgaaaacatcagtgaagataaatgtacattaccactgcagctgtgttaaaaattcgtattttttgttgccaagcccataggagtttagcagacgcagacaactgttctaggtatgaagttaggtagtttttcatcctctgatttatgcgcctggtataccatactttatgttccacggcatccagtggtgttgattggactgttcttcatgtttttaaactgaagacaatgtatttgtggcttttatgtgcaatgttaccctttcgcactatatgagtatgcaccaatataagcgaaaagactgaatcacttaatttctgtgccacgatatgtaatgtttcagacttaaacttgtctttctctgaggacattacctctaacatttgtc

SEQ ID NO: 58277 - DNA, 705 bp, Zea Mays
caaactcagcatgctgaagatatgaacgccagtgttccactgccattaggatagctagatactccttttcgtaagcggaaagaccccttgtttttggacccaatgccttactaacaaatgcgagtgggtggcccgcttgcatcaagaccactccaatgcccgctgcacaagcgtctgtttctaagataaattgcttagaaaaatcagggagagcaagcactggcgcctgactaagagtagttttgagacactggaatgtcgtgtcatgctcttgtgtccaacagaatgtgatgttctttttgagcaagttagtaagtggcttggatatgatgccgaaatgtttgacaaacttccggtaatagcctgccaacccaagaaagctgcacaattccttcgtgttttttggtgtaggccaagtgaccacagcagacaccttttgagggtcagtctgaactccctccgaactgataacgtggccgagatatgaaatggacctggcagcaaatgtacacttgaacattttgaccttccactggtcttgacgcagtaagccaagcactgcgtccaaatgggcagcatggtcgtccaaggaagaactgtataccaggatgtcatcgaagaaaacaagagcaaacttccgtagcacaggtcgcagagtgttgttcattgcactttgaaaggtggccggtgcaccagtcaagccaa

SEQ ID NO: 58278 - DNA, 561 bp, Zea Mays
taatttcctagttttcactgtcctctcgactgcgcgccaattcccagagagttcagggactatggcgcaaaatatgctaaaactcaggctaagtcctaagtggacagcgggtggaatactcaattttgcagggactcattagtaaaatgatgagcggactgatcgcgccacacacccgagccgtccgatttgatcggatggtgtagattaaatctcgaaccggcacgcaacaggattcgctcgatcatagatctacggtggtgattttaacgtacgcgctatcccttttcctccacccatccgcggatctgcggttcggatagctttgcagttaatcgttatcttcaccctaatccgagccatccaatcctagatcaacagcccgcacctcttcctcccccgacggctgcgaacggcgatgccagcgtgctaacacggcggcgccattgccggagtagcgcagccacgcgattctagtcgtcaacctcaaatcaaatgtgctctaccttatgctcgcggagttacaaatcaacgaaggggcacttaccaacaaacgacgac

SEQ ID NO: 58279 - DNA, 687 bp, Zea Mays
ccgtcgacgatgggacgggtatagggagtcatggcgacgcggtggaaagttaaagccacgcggcgcaaggctaggaggcggcggtcaccggcgttcttatcgatctccgccgcggtgatgcatgtacggtggccgaacttgtttatggccggagttatccacggcgaggatatttacgtgacccaaagtgctatccaaccaagccgagctcagatcacggcaaccgcagcacgaatcgcgacggtaggtcaccggcggtgagaactgttgcgctggcgatctgatccggtgcttttactgtaccatggcgaacacctattcagagaacgtgacagccagagttgagggtcgattttcttccaaatttctgtggcaacacaaaccaaattctgcagcaaagttatagatctactaaccagctacaagtttgtcatagatgccatgggcagattcatgctggatcatagaggaatctttgctcaaagtctctgtggttgcactatttctctaaaatttcagactcagtgacctgacagtccaactttgggcttaattatctctaaattcttcttaacaactgagctcaaattcttaagcaaagttgttctcctttgatagatcttcaaatttggtgtggtgacctagggcaaaatctcctttgtttagaagttacaaggtcacaaagat

SEQ ID NO: 58280 - DNA, 2169 bp, Zea Mays
gccttgtcgtgaggcattgagaggatagtctctttgatttcttcttgggagaaaggagcttccagggaggaaagatcaatgtgttggtagcctagcgaattccagtcgaatgtccttgctctaggggccgttgtgcccaaatgctgcttgaagtggtcagtgatgaccttctcctttccttcctgtgtgacgaccaagccagtctcagtttgcaaggcttggatgaagttcttccttgccctagagcatgcccggagatggaaaaatcttgagttggcgtccccaaggcggatggcagtcaagcgggacctttgtctgattcgtgatttctcaacgagtgctagtcccaaggatttagctttcaatcttctgaggaggttcagttcgacgagagatagagtgcgcacttcctgagcagtttctaagcgaagaatcacttccttgactatggccagttgaagtttcgtgtctcctactttcactctcctccaagctttgatggccttggctgttcgcgctagtttgatgtgcaggcgcaagagtggttgctggacagagggtaacggcttattccaggccgagtatactgcttctttgaatccgtcaatgtgtgtccagaagttctcgaagcggaaggaggtgtttgttttgcgcattatctccccctgtaagagcagaggggtgtggtccgacatgagggagggtagggagtggatgtagcaggttgggaagaggagctcccaatcgggcgtgcagaagaatctatcaattcttgtcatggttggttcagcctgcccattgctccaggtgaattggcggccattcagacgaagttccttaaggtggatgtcatctatggtggatttgaatgaacccatgaggcgcctatttaggtttagattgttcttgtctgaagcctggtaaatgagattaaaatccccaaggactagccacctctcgtgcccctgggaggcaagggccctcaattcctgaagaaacaggagcttgtctgcatcgggttggggcccgtagaccactgtaatccaccactctgtgtcgtccgctttcatggtgatcatggctgtgatggcgttgtcggaagtagatacgttagagagtgtgaagaagtcttccgacacagcaagcaaaatgccccctctggtttggtttgctggccgagcaacatagttagtaaggaattttgaccctaaagtgtgtgcgatgacatggtggtctaccattgacagctttgtttcttggagacatacgattgtgctacctgtatcacgaacaagatcatgcatagtgtcccttctcgccccttcattgaggcctctcacattccagctcaggatttggcagtggcgttgagtcattcctgtaccagagaaaacccaacagcaactgcaacgcccgtcatacggactggcgtgcaggttctggaactgaaggtaaacatcacaaacacagcgagcgttgacggcatagaagaagtggagcaacccgctggatatattgaagtagggtacatgcagacaacaatggacgactgaagtttgtggccgcccagccggacacgcgaaacacacttgaaggcgcatatgtagacaaagcttgcgaaggtaatccgtagctgtaggcctctggctgctacctcatgccccaacgagctaacaataactaatgtagtgatacaagtggcagatcgcatcccctgaaacaagcagaagtgtgcacactttccacagacaaagcagatgacaataaacatacctaacatggcaaagttgtttcccacaacaacattccacagctcaagatgactgcagtccagcctcattagggtcatccaatccgcatagggcgaccaaagccttggtggctaggtgggtcagcgggccattgaacaggctgaagtagcgcttgagctcctcgtcagttgcccggttctgcctctgattagagcccgactctggtaggattcccagtcgcttcatgagcacttggcgcgcgcggctctgaatgtctccacgcggccaagcgatggccgctagcctcgcgctcttgcgggtagaagttcttgcacgtcccatgaaacttctttgtgtcttcttggggagctcataccgctgatcttgcgggcgcaatataggttgggcgacaggggcg

SEQ ID NO: 58281 - DNA, 317 bp, Zea Mays
tgaaccgaccatagagcctgaatttggtgaagtggcctcttcgactgccgaagcaagacaagttgctccggttgtgtagagcgttgaagagccaactgtagtactgaagatgcctacagtcaggccagtcgaagctaaggatgataaggccgaagagccaaaggtggaagaaacaatgaaaatgtaagaaatcctgagccctccagtagaggcaaaactgccgaaggtgcaaaaggctcctgccgcaacttccaagaggaggagaatggccagcatgctggatgctttgctggagaccacaaaggccttgagccccg

SEQ ID NO: 58282 - DNA, 676 bp, Zea Mays
gtcgagcaatactcaacgacaacgtcgttccacttccttgactgtctcgcatcaccctcttccacctttcttttatagtaagcatcttctacttcatctgcagcctaggagaatagctagtcctcgacctccgcttcatcacacttctgcttgtaataagcgacctatgcttcatcggcgatctgagacataaacttgtcctcctcctcttgcgtaggtaatcctgcctcagcgagtgcgatgagctcactcaaccttgatacgtcctcctcctcttccccatgtaatcctgcctcagcgagcgtgatgagctcactcaaccttgatgagtcctcctcctcctccatcagctccacccctccattttttgctgaacttatcttgcacgagcctcgtctgcgatatagttcccggcgcatccaatctctgcaaatatattgatataaataagttagcaaagacaagataaatacaatgtacgagcaaaacaacacatctttttctcactcacttgcactcagatgactatcaagattccccaacatctgtttctcggctctagccgcctccatttcccttgcctcctgtgctctcatttgccgccttcaatcttctccgctcaacatgcatcgggctgtcataaccccgtgattccgtgaacctacgcatctatcta

SEQ ID NO: 58283 - DNA, 437 bp, Zea Mays
gtccgaggggttcataggtcatgagtgggaggcagaccgacacccccgctgtggctcgatgccagacgtagttaatgccgatgatcatttatgatgggtcaggcttaggcaaggtgcgagatccacttgagtggccaccccacatgctcgacccccttgtcaggttctaccacgcccgaccccgggctccgtgcatggggtttgtcaggggcgggtgcctccagtgtagatgttatccatctcctccgactgaccaacaggcctagtggccagattctttctctcagtatgttccttgactgatgggacctagggacgggggatcatatgcccgacacattgtgactaagcaagtaacatagggtgcaagatgtgtatcagtcttctgagttgatgcatgcacatgtgcaacttgcatgtcgtggagtgtagcaact

SEQ ID NO: 58284 - DNA, 330 bp, Zea Mays
cagtgatatagcaatgttcagtccatgaatcagagcttcatactcggctgcattattagaggccggaaataacagctggagggcatatctgaagtgctcgcctccaggtgcggtaaagaggatccccgcgcctgctccctgcagttttaacgagccatcaaaatacattcgccatacttctacagtttctgggttatctggtatttgttgttcagtccattctgatacgaaatcaaccaatgcttgagttttgatgacagtgcgaggtcgaaattcaatgtcatgagatcccagctcgcagacccacttggttattcggccaatggcttc

SEQ ID NO: 58285 - DNA, 439 bp, Zea Mays
tgaacaaatcaatgtttgctttcactctcctattactgtgcaggagcatcctcgcgaggaaccttatctacaggatcaccagaagtagaaggattactcgaagtagccgacacatcaagtacatcagctacaatatcattaggcatcacaaagtcaggcctctttattaggatccggccagcccgaatggccttatccatcgctttgtcacaccacgccttcatgatagaacggtcaacctctaagaccttgatatcactacgggcagcctgcgcatcgcgacgagcaacctctagctcctgcgaaacaagtttcttcgaggcatgaagctctttgatgatggaatcttttgaagacaatgacctgacaagtcgtgatacctcgttctgggagattttcaactcatctctatggcgctcgagctctgacttagtaaagc

SEQ ID NO: 58286 - DNA, 517 bp, Zea Mays
gatttttcaccattgttatcaccgccgccgcggaccgcgcttcgccgtggactgctcgcctgcgcgcacgattctcggtatggaacccttgcccgtattcgctttaagttccacaacgagaagaacagttagattcaaagttagtgcgcctttgttgagttgtcatttcgccggcaatggcgtcgccgtcaccgttgggcgcgccgttctcagctggggaagggtgatgagcgagggggaaaggcgggttttggacggttgatgggtagatcaatggtcctgagcgcgccaccacatagatgaacctgggcccttgatttctaatccggtggcagaaaagttgggcggccttcaatctaatcggatgcgtaggagttagatcggacggctgtggatcgtgcgtaccccttcgttgagcccgtttgtcaaatcagcccttatgtttatagtgaatcaacccgccgtccagtgggtgttattcactgtgtcttgaaaattttacctaggcgcccctgaa

SEQ ID NO: 58287 - DNA, 1058 bp, Zea Mays
ctttgcttaagtgattaaaccttgaggtcatacaaaaattgaagataaatgggtctgaagtctggctgtcagataatgcagagcctgaatattgactaacagtgaagacagatggactttgtggtcgaattagagtaagatccagtgatggattgggaatagtcactataacaaaattgaagttggattataggataagaactttgttacagatgaattagcaagttcttatacaaaaatccgagatctaggcattacaattctgtctgtcagacgctctgaatccgaattctgatggtacagtgttcagatcagatcgccaaaatcagctcatctcaccgccgacgaccacacgctcggattcgtgctcaacggagtactgctagttgctcgaggtagtaaatatcgccttgtggatgaacttgagccgctgtttcactccggccgccgtgcccgcctgattcacgaccgattcagatgagctcaccagagttagccacctatcgaccatgcgccacgtgccttggtgtcttaccacgtcgtagtagctcgtattacacacatccggtgatcgccgatgagctcgccacagtgaaagccaccaatctcttgcgacagtgctctcctctctctccgaccaccaccgcgccatctcaaattcatgggccaccgctcggggatcctataaattgagcatgctgtcggttccacaaggtagtcaagcaaccaatacaccaactcgtgcctcaaatcgtccaccagagctcgccaattcgagattttccccaaatcggtccgtagcaccacgtgaagtgacctcgccgtggccagcgtgctacaggtccgatcatgtcctctgctctcttgtttcagtacccttatgtgcccctgatgcttctcgacccgaccgattaagctagaacccattggatcaccgggaacacttcgtgttatccgttgatcgtgcggtcaccgtgagcagagaggttgggagctcgaaccgtgcaattgattgagggcaaacgtttgttagatgttgaattaggtatcagccaagt

SEQ ID NO: 58288 - DNA, 482 bp, Zea Mays
tgtgtctactattagccgagaacacaggggcttaagcgaaaagttactcagactcagtaaactcccccagggcacgactggtttattctagtaaaatataaggtctctttagcaaatcgtgcgtggtgaagaggtatcacggtttctgggccgatggattcgatctgaacggcacagattaaatctggcgcccgccaaccctactagtaaccccggccgcccgatctccatctaatggaccggatcactcacgcaaagggatacatgtattctattcacagccgcatgataccggatcaatggcccagggatcttcttctctccccgacccagcactacggcggaagcgccccctgcccatggcggcaagtttcgccggagcgcaccaaagccccaccaggcgccccaaatctcgattccttaaggtaatacgcgaagaaggacagcgcgaactcagggggaggcttcctcaccgtgattag

SEQ ID NO: 58289 - DNA, 895 bp, Zea Mays
agcttttcccactagagtccttgatgcagcatgcacaccacactgccctgcatgaatctcatctaacatttgtctcccgatagccgagtggatgcacttcatgaggacacctcttgtgcctcttctgtatagtaggccccctatgatggtatagtgggctgactgtcttgcaatgcgctctgctgcggccttgtcatccgattcttctttgttttttatgtaccagatgatcggctctctccagccattgggatctgtctctggctgactcagggcattacattcttccatctgatctacgacaatgcttggttgctgtatctcttggacgaagatccatgtggaacttggggccgactggaccccagttttgacaatgcatcagtcgctgcattgtgatccctttccacgtgatggaactctaatccttcaaacttgtcttccagtttccgcacggctgcacaatattttcccattgagtcggtcgagcagtcccaatctttgtttatttgacttatgactactagtgaatcaccgtacaccatcagcttcttgatgccgagtgatatcgtgatgctcagcccatggaccagttcttcgaactctgccgcgttattggataccggaaacaaaagctggagtgtatacttgagttgttcacctttggaagcaataaagagaatccctgcccccgctccttgcagcttcaatgagccatcgaagtacgttctccatacttcagcagcctctaggctttcctagacctggctcagtccattctgatatgaagtcaaccagtgtctgagtctttatcgctgtgcggggtcgaaactctatgtcatgagccccgagctcgcatgcccacttggctattcttccaatagcttctttgttg

SEQ ID NO: 58290 - DNA, 633 bp, Zea Mays
caaatatcataaatcaatgaattcaatcacaggatccataaagcggtgaggcactaggtagtcaccactgctgctggtgcaccgacccaccactcgcagaggcgcgatgtggagggcggagcgacgaccatcagtggagctcgcatgtggggaatgaggcagaggggtggcaaagccaccacaacctctagagcatcgcaagcagtatcctggaccctccttcaggccagcgtgggcactaagagtagagggaccgagccggcaccagtagaccaacacctacagcggtgaggcactagcattataccacaacaccaaattagtgtctgacgactgtcgctataaatagagaattagcatcgaattgttagtcggtatacattgccacagatggtgagtcggcatatgtctatattccaactgagtgttattcgttatatttatatgtgaatagtgtcactttgtcagtcgacaattcatacctatagcatcgcactgtcagtcgccataaaaggcattgtgcaatttgcggcatcggtgtcctgtactggcgcgcaaaattggtggcccaaataccagctgctgccgtccaaaaccctatctctcctttcccgtaataccagccgccgccgc

SEQ ID NO: 58291 - DNA, 1079 bp, Zea Mays
ctggctacctcactaaccacctccgccgcgtcgtccgccgcgaatcagtccagtcgtgcggccaccagggaccgggttggcgctcccaacggcgtataaaggatcccagaaacctatctctgcctcccgtgttgccgctaaccatccacctcgcctccaccgctggaattttgtgccgccgtggggggaaacgggccgctaccgtcgacatcgatctacattgccgtttggccctctgtgtccaggcctggggcatctcgggggtctgctattgcttttcatgcgactaattgggggtgtggttggccggcgaccacttaattcctcgtcggagccaggtgggtacgcggatccgccgtagggctcttacacaaattccccctccgttctcggtgagttctcgatttctcaccctcgacttgttccttaccttagttaatgttgcgctgtcgccaattgcgtgtggattggggagaattcggcctcttaggttgggaatttgccctagcgccacctgtatcgtgggcagtagggttaggtcgtgtggtgatgggcgcagtcatcccccgtgggttctccatagtcttagcttcgtgtggagcagacttcctccggagttggtgtagctgagcctcgccgggatttctccagccacagcgccaccgtgagagggcgggcattgtcgtgtctgagcaccttactcgtgcattgagtagtgaccatggatgcgtggatgaagggttgagattagatcccacgtaccctttggccacattcgttctggttcgttgatctagatcagacggcatcggttagatcggagagaataaaatatgggtcgtagattttaaatccggtggacgacgatgtgtactggttcacgcagggaagtgtctaatcctatgcgcatactttagatcggacgacccaagtctattcataccctttcgcgttggcacttttgttaaagagcccctcggtaattagggttttgacccgcagtccaaccagttgttccctatgtcttagtaatgttaccccgagacccctggactttccaggaattgtgtcccagtcca

SEQ ID NO: 58292 - DNA, 1440 bp, Zea Mays
gctactcgattcgaggtaccttgcttgtagcaaattttgtactgcaaaccaagcagtttagtcaaagctttttgctgccatggtgttgttagtctttggtcatcaagatgggtaagactttctgatcagtgtgtatcacaaactgtccacaaatcaagtaagatcgccagtgatcaacagccatgagaattgctagacattccttttcatatgttgataaggtttgatgtctaggacccaatgtcttgctaacaaaagcgatagggtggccagcttggtggagaacagccccaatgcctgaatcgcaagcgtcagtttcaatctcaaatgttttagcgaaatccggcagggcaagcacaggagccgagactaaagcggttttcagagcttgaaaagcctgatcatggtcctcggtccaaacaaacaattggcctttttttaggagagaggtgagagggcgactcataatgccaaagttttttacaaatttatgatagtatccggcaagtcccaaaaaacttcgaatgtccttgactgaacgagatgtaggccaagatttaactgctgatattttctccgggtcagtggccacaccttcttgactgattatgtgaccgaggtaatgcaggctggtttgagcaaattaacattttgatagatttactttgaactggtgcttgtccaagatattaaagacaacgcgaatatgttccaaatgatcccgccaattggtgctataaaccaatatatcatcgataaaaaccactacacatttccgaagcaaaggagcaagtatggaattcatcgtaagctggaaagtcgcagggccaccagtcactccatatggcataacccgatactcatagtgaccattatgtgtctgaaaggcagttttgggaatatccaaaggttccatttgaatttggtggtatccagagctcaaatctaagcttgtaaaccacattgcaccctgtaactcatccaataattcatcaataatgggcagagggtatttgttcttcactgtcaaagcattcagacgacggtaatccacacaaagtcgccaatctccagttttcttgcgagctaaaataacaggagaggcgaagggactactgctaggctgaatcataccattctgaaggagttctttaacttgacgttcaatctcatctttttgtgctgggttatatctataaggacgcagacgaaaagatgtagcccctggcactaaaggtatggaatgacagtgggagcgagcgagaggcagccctgttggtttatcaaagagtgaagcaaactcagtgatcaagttttgaatgtccacctgaatagtttgtgtattgtcatcatccgagatatgttgcaattccaaaagacaccaaacttcatccagggataagaggtgattcaactgtgatgctgaaatggtgtcacatg

SEQ ID NO: 58293 - DNA, 313 bp, Zea Mays
ctggattccggtagtgagacatattagacattgatttcacacgcaactggtttttcttatattaatccattataccgtccatttcaaaaaatatgttcgcataacatatgatacaccatttgtgccacatactactcactgggcgactcactgttgtcgatatcaactatgtgtttttttgaagttgtcgtctcattccaatgaggagcgttagttccaaccttgttcctagatccaggcggtcgtcctctcttacgtccagcaaggctagccaatcaaaccctattctcctccaatgacaaacatgtttgac

SEQ ID NO: 58294 - DNA, 1899 bp, Zea Mays
ggcgtgtgcaaccccgtcagcggccaccgccacgtcctcccacctctcgagtggaacctcgccggtggcggactgaacggctacgcgatcatcacgaccgttgacatgcgatcgtcacgtgttataactaactattacctctatagcattcaaacacaccttaagactttgtcgagtaaaaaaggttgataaagaagataaggccgatagtgaatagtgaaaacctcaattgggtgaagggttctaccactcttggtggccacaggttacgtgtttatatagcgcaattagctggacgaacagtaggtacaagagatgaggattagatggagagaagatcagatctatagttatctagttagcagagtattagcatcccgaacaatagcgtaacaacctgctacaattccgtctaacaccccccctcaatcacacccgatcaaggttgagattgtttctaaatttagagagtcattgctgagagatcagtttggtgaagccattctccacctgatcatttgtagagataaaacgtatatctagcaattgacgtataacttcatcacgaacaaagtgataatccacctcaatatgtttcatgcggccatggaaaaccgggttggaagcaaggtactttgcacccatgttatcacaccgccatagacgtgcagtttttggacttaagatgtgtaattccttgattaaattacgtagtcatattaattcaacagtagcatttgccattgctttgtattctgcttcagtgttggaccgtgacacagtcggttacttcttagcacaccaagagatgagatttgagccaaagaaaactgcaaagcccccgattgacttacgatcatcagtacacccggcccagtccacaacatagttgaggtggacttgtgaatcttgagaccaatggtcaaggtaccttgtacataccacatgatgcgttttacagctgtcatgtgtgtagacgttggtgactatagatactgacatgctttgttgatagcaaaagaaagatctggccaggtgagagctagatattgaagtcctccaaccatgcttctatacagtgtaacaacctcatgatcaagtggagtgccaacatgtgctgataacttctcaaaggttgacattggtgttgccattggcttgcaatgagacatctcaaacttctgaagcaagtcaataccatatttatgctgctggagtaaaagcgcatcaatacctaagaagtaatgaaggtcaccaaggtctttaagagcaaagtcctgcttcaaatcgtcaagcaaagcatcaatagcgcctggtgacgagcttgtaactatgatatcattcacatacacgagcacatacatagtgaattttccacgatcataaataaacaaagatatatctgcctgagagggaacaaagccaagatcctgtaattttatgtggaggcgagagtaccatgcacgtgatgcttgtttaaggccataaagagctttgtccaacttgcagtgatatgatgggaacagaggatcctcaaacctaggagatttgcttcatgaacacttcttcctctagaacaccatgaagaaacatgttctgcacatccaattgacgaagaatccatcctttggataccgcaacagaaaaaacaagtctgatagtaacaaacttgactacatgattgaacatgtcgtcatagtcaataccatatcactatttaaaacctttggcaaccaattttgccttatatcgatcaatagaaccatcaggtttccttttgattgtatacacccacttgcaatcaattaagtttctttgcttgtcaggcaggactaagtgccatgtcttgtttcgttggagggcagatatttcagattccatagcatttttccaattttg

SEQ ID NO: 58295 - DNA, 398 bp, Zea Mays
gaggtaggtgcctataaataggaccctacgtctaactggttggtgtgctcattccaattcttcgaaactagagatatcagcctaatttataggatgtctaggcgtggtaaatctgctaaacaaaggtaagttttggatccgcctcttattttgtgagtctattatatttgtgattgttatagagcttatggaaatttaggaagggtcctttgaccggaactgccttcgacccgctgcctttgccaagtggtgttccagtgcctatgtgttttgtggtgatccttgtaaggttgataagtctgaggatcatgagacttatcgacagaggtattggatgtgtgctaactttgcatttgagccaactattgttcaacgtcggatgaatttaatggtgagaa

SEQ ID NO: 58296 - DNA, 383 bp, Zea Mays
ccaactgaattaaaaatgcttctctaccgagtggtgcattggcttgcaaactcgaagcatctctccttcagagccctcatcgcctctctaagcttcgtatttttctcagtctcaaccttaagtgttgctttcaaagcatcgttttcctggttgaatcgattcgagttttccttcaaaagtgcctgagcatctgccagttctttatccaacttcttgttttgagcttgcgcttcggcaagggacccttcggctgaacatagcatttcgtctttttccttcaaagagtcttcgagttctttgaccttatcttctaaacatttgataataatttcgttcttcctgtccttgtcatcttgttgcatctttaaagcttagcttagtaa

SEQ ID NO: 58297 - DNA, 349 bp, Zea Mays
cgaccatgccgccaccgttgacttgtgggcggcggcgttggtgctgtcagaggaagaaggtgaacctagggccgtttgatccactggtggcgataggattagatctgggggtgtgtcatcgtttgccattgatgctaatatggtcggccacgattatatcctggcataccgattcggtatgtgggtactggccatccggtggggatcggaggaacgtagttcgatcccgcgtgagttaaatctggaccgctggtcgctaatccgttggtagaaatcacacaccggttgggttaaagtgtagatctaatccgcgccactgattttggatcgggtggctggggtaagctgg

SEQ ID NO: 58298 - DNA, 738 bp, Zea Mays
ttaaggttcacttgcttgtcatcaaccctcactgtggcaagtccaaactagtggtccacatgctaattggcatcacaagccaagcccacaatcatggtgtcgtaagaaccaaactagagaagcactctagctcgtacgatattactagagttgctcttcgtgaatcttccatgtgaaatgagcacaaccctttacgatgatgatcagacccaattaaaatatataatactacttccttgcatcttcttaagtgtgctaaatctcaaatactttgccaaacatgtacatatgattcgaacacctagtggtactagatggccgagacatctaattaaactcccctcttaataatacatccatctattctaaatctatcatgcatcctattgtgtcttgattgatgaaacaaaatactttaacttatatatttaccttgagtacttgcattttgtttttctccttcctctaccatgttgaacactttatcatactttgttgcccatcaccattgttttcatggtttccaatcttccttaacctcttatgtggactcagacctatcttattcacaacacttaagagtataggttagtccactagttgtcttaattaccaaaaccaggcatgaagctttcactaccctagtcataatagttagtcgtgccccgcctgccctgaccggacctctctctcgctcactctccatcacctgcccgaccctggccagctaccgatctc

SEQ ID NO: 58299 - DNA, 540 bp, Zea Mays
ccgaaactaggtagctgcttagcctagttttgtaacataagcctacaccctccatcaccctagaatagttgtcctagtaccttggactgggtcccaaaaggtccgaacctcgaccaaactttagggctggttcataaaattcttcccatcaagctctagctacatgattcgaaagtttgagcacaacaaagtaggagctccaagggtacaatactaagcgtttatcttgatttgtgtttaggattgatttctggcttgatcacggcttcagaagtgcatcaatgtagggcgtacaccagtaataggtaagaaggttaaccatcctatcacgccacatgtgcacgatacggtgaatgggtcgtttcacatcccatcaagccacccgcgtcgaacgacgtcatgatggccacctcttttaccgtgatggccacctcttttatcgtgccgctatagtaactacctaatatcaaccaggttaaaaacctgaaactcacccacaacttctcacgtagagcgagggatggatcgagcaagttccta

SEQ ID NO: 58300 - DNA, 579 bp, Zea Mays
gcctgacaaaggaaaagaagttgttgatgcttcttcgggagaaaaaggttttgaccttcggcacctgggtggtcaggaattgtctgaggtagataaagaggagctaagagaatatggaatatcttgtggttatcagccgggatctatgctcttcggtggggttgacgaagaaattttgggatgtatcagcgaccgcgccagggcaaaaataatcggcactctgtctaagagtgttggtttctcgaagctagaatctaacattagcggttactgacggcaacacattgtcggtagcttatttgactccaatttcaaggtgaaatatgtgtctagattcttgttatcctcgtgatggattaaaatattctaaccttaacttgttttcacagagcatgctgctaagcaaggcgctaagaatgcagtaagattttgaagataagaagaatgaaataataattgaaggcttggagaacaaaattaaagaatttgaagcctcgcttgaaaagaaagattttttgcttcaagcaaccaaaggttctctcgtggaagctcaagctgagaatgctaaattgagcgaag

SEQ ID NO: 58301 - DNA, 392 bp, Zea Mays
aagtcatcggcttttcaacatggagatcattcaataaagcaccaatgtataaaggccgtttcagattgtatccttctcggccatgaccatttggtcaatggatcaaaaggaatagaatggcggtgcccccaatctggatagacaaagggactatacatgtaccatggattcatcattataccatttcatgtttgaacaggataatataacgatgatgagtaaacgggtggaaagtaccctggcctcataggatgaataggcgatgcttgtagtgtcgcctttcgggtcgttttgtttactcgtttcgtcttagcaagtgaccgaggtttcttcgttgaccgatcacgtagaacggtcttcttgctagtatccttggagagcaactgatcaaa

SEQ ID NO: 58302 - DNA, 939 bp, Zea Mays
gcggaggcgatcccgcatgaacgtccacggaagtacaggagggagaccccgctcagacaccctcgggggctgggtcatagtttgcactgcccacttgagccggatcatccccggcagcaccctcgggggctgggcagtggcttacacttcccacccaaaccaagtcatccccggcgacatcctcgggggctgggcatgtgtcaacaccatccttggggtccaagttctctacggtagccacttctaaggctgatgggccctcagttacttccatgggaccaggacgatccaagacagtctcctgaccctcgagatcgcgctctaaggttgacgaggcacgagatgacctcaacccaacatcaagcacatcagaacaaacctccatcacaccatcatctgctggctccgataacaaatcctctagaaccatatcctcaagagtctgatcaaaattcgccagggacaattcctgtagaccaatgagagcagacaaagcaggagaaggaactccactactttcaccactagcgatgaattgccgactgtttttccgagtcaaaggaacttcatcctcttcctccccgtcgtcttcattagcaacacaggcagcaccccattgggatcagcaacagatggagcacccacattgggatcagcagcagatcgggcacacccattgggttcagcgtcaataaattcagtcacagacatttcttcagcagcaggaaccgaaataccaacatcccgatccaaactggatactcgccggaggcgtctctttttctttttctgctcatcagcagaaggatcaggttgattggctcggcaagggcgcctcgggcgagtactagcaggcttctgaatatccaaggtcgtatcagcctctgggaggggtgccaccaccgatgtcccagcaggagcagcatcagaagagtcctc

SEQ ID NO: 58303 - DNA, 461 bp, Zea Mays
ccgcgcgcttccagcgcgacactactgatgtcgagtaggtcatacctgtagacataaggctagggtcccgcttgaaggcggatgtaataaccttgcttttgtatggtacttttgagtactacttatcgagcaatattagcacttatctgcattttatttgtccctgttgtgtgtggcgccgccgacttctccctggtacctggcccccctgggatgtaggctcgacgtgtcgaggctggataccagcatacctaaaagagttggcaacggcccctaggaggcagcctcgactgggacctggacctgaacatagctttggctagggagcgttagtagcacgcccatatggcccatcgcctgatactagccatcctttgacacaggcacgggacatgcaggatttagtctgggaagccaagttgtgtgtccggaccccctagaccgcggttctagatactagg

SEQ ID NO: 58304 - DNA, 661 bp, Zea Mays
ggaaaacttgcatgagtcattattttcatacaattgatgcaaaattgtggtggatcataagtgtaggcttttataaaccctttgatgagaacacaaaagatctcacccaagaaaaatagaaatgcttacatcttgaacaccaagctactaacattttatatcaatggataagtgataaggtgtttaaggaaattatgtatatggagaccgcccatgatatttggacatatcttgatggtgtatatgggaggatctctatcgaggatgtggagcacatcctcaacatggtggttgtggaagattgctccacctcatggtcaagtgataatgatgaaaggcatatcacaagttcacttgataatcatgatggtgctggctcaaactcaagtgatgcaaatgattgttctatctcaaccatacttgatgattatggtgattgttcatgctcggatgatgatatcgctactacaagcccatccattacaccacattgcttgatgtcacaaggtaatacaaaggtatataacgctaatgtgactaatcattcatattcatatgatgagcttgttgacagacttgctagcatgaacattgatttagaaaatgagaaagataaaacaagaaatttggaaagtgaaaacttatttctaaagaattcatg

SEQ ID NO: 58305 - DNA, 718 bp, Zea Mays
gaagcttaaaagattggcacgaaggttacagtcttgggggcataaggcggttggaaatgtcaattctcagctggggctggctcgcgaggtgctgcacaggttggaggtggcgcaggacagcaggctgctgtctactgaagaagtatggctgctgcagaaattgaagcagcactgccttgtccttgcttctttggaaaggacagttgctcgtttgcgttcccggttgcattacttgagagaaggagatgccaacacaaaattttttcatttacaggctcgcctccgcaaaaagaggaattttatttcctatttggagtgtgagggaagaactgtcgccagtcatgaagaaatacaggaggtcctggatgattttttctataaccttttgggttccaatgttcagagaccgttctctcttaatctgattgcttgtcacagagatgctattgatttaagctcactggaagctcctttctcagagaaggaggttcgtgacactattggtgttctcccgtctgataaggctccgggtcccgatgggttcactggaaaattttacaaatgttgttggcatattataaagtcagatatgattgcagccttgaattccctccatcaaggaaatgctcacaagttggggatgctgaattcagcttatttagctctcctccctaagagtgatgttgctttgtctgcaagagatttaagaccaattagc

SEQ ID NO: 58306 - DNA, 324 bp, Zea Mays
gcgggggccaaggcagtttcccccttgcccactctataggatcggccctgcatttgacgacattgattttgtagagaatttttacaaggattatgcacatgacattggcttttctgtccatatatatggacaacaaaaaacatatgacaatggtgtggtcgaatagaaacgatacttatgctcaagacaagaatatagataaaaaatagtgtcggtgtgaatccatctaaaaaggtacgacacggtagagaaactagatgtggatgtgatgctcatatttatgttaagtgcaatattgaaggcaactacatgatatcaaaagtg

SEQ ID NO: 58307 - DNA, 328 bp, Zea Mays
gcgtgatctcacccatccacatcactaatcctgaagagaatcacaaacaaaagatcaatggaagacattaaataaaaatcaaggactattagtgaacagtaatagacgcctattcccaatctctcttgcacatgtaaactccccaaggaaagccattgccagtctgttcccctgtacaaatacgtacaccatccatcaataaaaagttaacattgttttcttaacaccaaaatcatcatcttaaacaaccgcgatttcaacacattatcagcacgctccaaaactgaattccacgacaatcaacgaaacaataacaaagagacgtcaa

SEQ ID NO: 58308 - DNA, 397 bp, Zea Mays
atggtcaccctgagttaagtaagcgtgagcatgtcacaccgccttaagtcgttgccgacttaagtcgattgctccgttagtagggtataatggtcaccctgagttaagtaagcgtgagcatgtcacaccgccttaagttgttgccgacttaagtcgattgctccgttagtagggtatagtggtcaccctgagttaagtaagcatgcaggttgatagtaaacaatttgagcgcctttgagaatgaagtctttttattgatgatatattccccagtttacagaatacaaggccgtcccaatagcttttgaaatatagctaggggtaaaacttcctgagatgttctatattccatgagttcccaatttccgtgtcatccatttgagtaagacgatacgat

SEQ ID NO: 58309 - DNA, 305 bp, Zea Mays
acaataataatagacaaaaccctgcagaaaagcagcaaaaccccactggactgaatgatgagctgcgaaaattccgtccgaccgcaaccacgtgatcgagatctagctttacaactcgtctgcaatgcaaagctggaacttgtggacacgattcagcggggccggccctgtgtggaagtgatcactgaacaccacagcaacgctagctagctgttgtgtcttggcagggctgaaataatcacccgagacgtcgtccatacaaagccaatgtatttcctgcgcttagagtcgtacgtagcagtatg

SEQ ID NO: 58310 - DNA, 283 bp, Zea Mays
ccccaacgtgaccccgaaccggtacgctctatcaatcgttggatcaaaatccgttggcctaaatttaaagtgccgcgatcagtttaacgcgtgcgatctcgatccaacggccacgcgcccatcgcccttagactcaatcgtgaccgttgcggattaatccaatggctagggtagacgctaccttccttctaatttcaaccattctcatccgatccaacggatgaccgacatctccttcctccggtgtccgtacggtggtgcgctgcctggcgcggtggcgcca

SEQ ID NO: 58311 - DNA, 480 bp, Zea Mays
catctacgtgggacggctgggggtgaattgctcgccggagcgacaaccaagcggaggagccactcgagcgcgtgaactggctactgtgttgtcgccatgttggtatgtgaccctctcccatgtccgttatggtctactatacgtccagctaggcccggattgaagtttggcgcactggagagtggttttgggtgaggacggcaatgtcgccgccgcgatttggggccgtccgtcggtgccgttggagttgtgtgggggtgatgccccgggaccgtctgattcgggatagacggtgaggattagagataaggtactgtttcggcctaatgttatcctggccgtcggatcgtcaacgcagggacaagatcggatcgagcctattttaaatcgtcacccttggtcgttgatccgatggaccagattgcgtaccggttcgcgatgttgtgcgatctaatctaggcccttgattctagatcgagc

SEQ ID NO: 58312 - DNA, 562 bp, Zea Mays
cagaaagcgaacatatctaaatatgtgcatcatgccaattaagaataaaacttgaacggtcagaaccatgtataaactgattagacaaaacagtacgaaagacatgatgagaggtagatggttgtacatttgtttcttactaacgatggggtggagaagacgacgccaatgctctgcacattctcattcttgatgactatacgaaatatccacacggtgagcatgcagacaagttgtgatgacgaggaagcgatctagcagtcgcgtggaacgctttccaaaaactttatgcgccctctcctagtgcaggatcgctgagggcgactctagaaacctgctctcttgttcactggtgcacactaacatgacatggatgatgtagcgcacgtggcggcacaacaggcgggaagagaggagagacttgatgtgttatatattttatggcaacatctgtaggcaggtatttatatgagaaaaaccatgtttggtactaaaaaatctgtaaccgatgggatccaattagaaaaggagtctagaataagtgtaacagataaggcgtgtg

SEQ ID NO: 58313 - DNA, 1522 bp, Zea Mays
catctttaggtttcatatgtgatgggcgttaaaaaatcctatgaatttatggttgacttgctgcttatagttagcacggatgcagcctcgccgcctcttgaacgatcatatgtcgagttgcttaaaggtgcttatgttccacctgcctagattattttatctacgtattcctaaagtaatccatgcatcctggacccatctttgcatgtagagacctacaaagttcactcatactatggtggcccatcagacgagtgcccacattgtggcgccgttttctggtttcaggaacgggtcaaaagcgtgtctgctgttgcgcagcgtaggcttgtgtacaatctttgttgcagaggaggtaagattgttctggagccttacaaatgtccaccgtctcccttatgtgacctactgcgattcgatggtgataatcgtgccagaaggttccttaggcaaatccgctcatacaattcccttttcgcgtttacctcactgggtgccatcattgatagatcgataaataacggtacaacaccttatgttttcaaaatcaatggtgtcgtacaccatcgcattggcttgctgctacccagccatggattgcgaccacagtttgcgcagctttacatatacgacactgaacacgaggtacaaaataggttgggcatgtttgagaatgaggctggcgtccatgatcatctggacccagaggtggcccgtttattgcttaacatgctagatgagcataacaagctggtcgtagcatttcgctttgctaaagaacgtttagacgaagaaggcaaccaaaaggtaacgttacaattgttaggctgcaacacacgacatgacgcacagtacaacttaccagccaatggtgaggttactgctataatagtgggtgattgctcaccttcatagttcaagtatgatgtcctcgtgcatgctagagaggatagcctcaaacatgtttttgtgcttgcacccgtcctacatggccttgtagtacccgcttcttttcccttatagtgatcgtggataccaccttggaataaaatattctgacgtgggaggaggcgatgtctcatgccgcaagtatgttacaatgcttgaatttgttaggcatcgttcccattacaggctcaatgaaccgaacccattcacttgctacggcaggctgagcaaccagctagcggttgatgcatattctacgattgaagcgtctcgattgcagttcatagcggaccaccaaaaggaattgcattttgaatccattcaggggataaccgatgccattggcaagggtctcactagtgcagattcggttggtggaagagttattgtcccgacgtcttttacaggcggtcgaaggtaccatgtaatgaactaccaggacgcgatggccatctacagagtatacaacccaccagatctctttgtcacgttcacatgcaaccctaaatggaaggagatagtcgatgcgctgcgcttcgagcctggtcagcagccatgtgatcgttctgatatc

SEQ ID NO: 58314 - DNA, 608 bp, Zea Mays
taggggagcgagacgaagagcgtgttataagttgtagagtaaaaacatagcctgacaatacttaaaatcaattttcatcctcaacctcgacgatgatcacaacgaggatcgaggaggatgatgggttcaactacgacatcccacgatcactgtagtagagccttctggtgaaggacgccaagctgctagacagaaacaaatttctataatttgcttgactagacagaagcaaggtagcttaacgtgcttgctgatcgatctgtatgtgtgcatttaaggtgcatcccaacatcaggggtggagcggtatcagttatgcaagttgatgcagccacacggcatcgaacgagtgactctcagatgacagtgtaggtgctctacttcgagcagcacgtcagcgctttgagttcagtcgcacgatcctcatccaactgccacaaatatactaagatttgtttaatatatatcatgtatatgatacataattgttgctatattcctatatattaaatcggggggcaaagctccgcatctgtgcgtccacgtcattattttttcttcagtcgcatgatgtgcgtgcctttgatggtcataaacgcgtctcaacca

SEQ ID NO: 58315 - DNA, 356 bp, Zea Mays
gtcaatgagtcgtcactctcgtttctggtcgttgttgcgggttggggagacgaattcgaaggagttgtcgctagagtttggtttggttgtctgtacgaggggtgggtatgcacgtgccgttgtgcgtgggttcctgatcggtggagcggcgagtagccggggggttctcgttgggttagttggagcttggacgaagcaatgacctaaccatggcaacgaatcactgtggttgagctgttcatgcaatcgtgcttctccagagctgctacagaaatggaggagctgagatacctcagttgaagttgaaccccggcaattgttccggaaagaagacaaaatagaaaacacagttgggg

SEQ ID NO: 58316 - DNA, 315 bp, Zea Mays
aaagagtacaaaaatgcgaaaggtaataaatattgtttttaatttcaaggaaataaaataagaaatcagattaccctgctatatactactagtatacattcctaataataagaggtcgagtaggcagcgaacttgagcgccacaacaaaggactgtctatttgacaaggccaggtatggaacaacatgcatcatatatcactgctcgtcactgtttcatcgattgcctccaggctctctatacgaatactttctctattctgaattataagatgtcttatgttttctaatatattgcttttatcatatatctaga

SEQ ID NO: 58317 - DNA, 445 bp, Zea Mays
caccaattgcctaacacgaatgagttcatcctgggactcttgcagcttgtaacgatggttatccaagtctgccatgttaaagcgatgactcctctccaagatagtcaaagaattgttggcgtcgcgatacaacctatcaaggttatcacaagaagctgcaagggcacatttttcttcctgcagacaagaatcagctctcaaatacccagagggtagtaagaacacagcagataaagtcaaagcaaacttacctcgttagccaccctttcagagtcaagctgagcactaagagaggaattcaataagttggcatcgtctaaagaagcagaaactcgagccaggtccatctgaccttgagagtacttctcctcgagctcagagtaccaccggaccatatctagcaagaaatagttgaaggatattcagtaaaaagcagattaatcaa

SEQ ID NO: 58318 - DNA, 530 bp, Zea Mays
atgccccagaggaagtggatacagatgagaagcgccaagagtgtttcttggaaggactgattggacctctgaactatcagctgcagagtcatactttccccaatttccagactctgctgaataaggcaattggccttgaaagtaaacgaagggaattgtctgaccataaaaggaagttccaaggtcagtccagcaggaacacccgcccgaacaacgttcaaggttctcagttccgctctggaaatcagggtggaaataattatcaagtgcaacactctggacaacaaggtcagaggaataatcaaagtcagaaccagcagaggaacaactctcagaccaaccaaaggtctggtggtagttcgcagactcgacaaggtggcgccgtgaacacgcaggccagaagcaacaatgcaccagtccaacccaatggttgtttcaagtgcggtgagcttggccattatgctaacaactgccctaggcacaaccagtagacacctcagaagagcaacaatcggaggaatgaccagaac

SEQ ID NO: 58319 - DNA, 339 bp, Zea Mays
gggggggggtaaagatctggcgggggatggattcggtcgcgggcaggggcttatcggatgcacctcatgaccgtgcgacgtggccgaacggccgatgtcgtcgtgggtcgctggtgagctcaattgcgccacgctgagatcctttaccatgtagtcataattgtggcacacttaaaattaatatccctgcgtttgtatgttgttgagcgccacgatggaccctccagtacaatgtcttgtcacagtcgtgctccgctctcctcccgaattcggagccaccgcttcgagctgctataaattgataccccggcctgcttcgccaacttattacaaactcaa

SEQ ID NO: 58320 - DNA, 702 bp, Zea Mays
ttgtttacgttccttttctcatccacggccttgctcttcccatttctcccttcttctgtggtctccttgacttttacaatctaaacctgacccatctgaatcctaattccatcttgcaaatttctatcttcgtacatctgtgtgaggcctacctcggaattcttcttcacttcggtttgtggaagtatttgtatcactgtcgacctgagatggctggggggcagcaccagctcgtgggtggtgcaagtctggagatgcgccgcggaaggaaaacagaatacctcgacattcccctcaaggatagcattaaagggtggcgccttgagtggtttattgtggaaaaccacgacaagtcactcccccctcggtcggggagacagccagatgtgcgcactccgagttgggttgagtctcctactgccttggaggtaacagaagctagggttctgcttactgaaatctgtctgctgaaggagagaggtttaaccgccgaagctgtggttgctgactttgtttttaagaatatccagcccttgaaggacagagcatacccaacttatttgtacagtggtgttactgactcgactcgggttactaataggagaattcctactgaggatctagtgagccgactagacatgatcttgagaggcaaagtgtcaaatgttggtgctcttgttgcctactctgcttggaatctgc

SEQ ID NO: 58321 - DNA, 397 bp, Zea Mays
cgttctgggatcggagtggttggtcgagtcgagcaccttccggagcatcgaccgagacgccctcggacgaatcaaaaatgcgctgctcgtgtctgcgtccctgtctgaggttggctcggacgagtcgtgacttaggtccctcgggtcttgataaagttgagagcgtgtttgcttataacctctttttattcaagcgtctagacttttgaagctggtgatccgaatgactctaattatagtacccgacactcttgtacatgtactccttgctatggtcgctactcgctagtgatcttaatatctggcgtcgtcgtttccgtgtctgcgaactatcaggcgatggtgtaacttctgactgctttgtatcccgttttgcattctactcgagtgattcgac

SEQ ID NO: 58322 - DNA, 356 bp, Zea Mays
cgcagacctgcaaagagagagaagaggtgaggaactaaaggcagagaggatccatgcggctagcggagggacaactctagtttccatgttgacggcgatggtggccatctccatccctagcacccactctgctactcccggtgatctggttcaccgttgtgcacctcgccgtattccccctgtgcttccagggatcgtccaggtgtgcgttgacatccacgggtccgtggagaaccatcacgcgtgcggccgaaccgtccccaacaacaggagaaggaaaggcgaggtgcgcacgtgaagagctcctgcgccgagcgcagtggatccatggaggagggcgacgtgcgtgaagagct

SEQ ID NO: 58323 - DNA, 867 bp, Zea Mays
gtaaatttctaactacatctgtaaagagcctacaagaaataaaagtgcaaacataagtacataatcatgaatcataatattgaagactgcatatctcaatacattttcttccttgtatacttggaacatgaaattggaaactatgaaaacatgcattcactgatgtttgtaaaattggagactatgaaatcggggctcaccagagacgcgacattagggttcatcggtggaggacagaccacgatagaaggcacaacgcagaggagtggcagcttgggcagcagtgacatggtgatgtgcaggtgtgatggcaagcaggcgtggtggcggagaagcggcaccgacggctaggtcacaggagaaaggccgacgggagagaaaaaagagaagaagggaagtcgggcgcgtgtttcttaaatcaattaagaacgtcgacctccttctggctgacgttcttaacattaggtatctcggctatagcgcgattcgatgttcttaaccttaagaacatcgggctgtagaaaccgacgttcttaacctctttaagaacgcggggccaacatttttagttaggctgacaggttttttcaatttttctatagtgaatctagttgtcatgaaaatctggatatcgcaggacttgtatgtggaggaaggtaaaggggtatgtatggtttagggtttagaaaacggcaaattcctcacgttgcgacaactcaacagcttctacgttcacattgatttgcataattttcatgcaagcgattctaatgaaaacgagctgagaagcacgacatttagctgtcaaaagccgattttgacgcccagaaaccgaaacaaacatggctcgagtagtttaatcacgac

SEQ ID NO: 58324 - DNA, 496 bp, Zea Mays
accctgaaggaagagaggtccaggcgagcagcagtgtcaggatgaagctccagtgccgtgcagtgcgctcgcaacaaacttcttgcagtttccagactccatgcgtgcaacgggactccctcgaagctgattgacacgaaggaaggcaaggaaaccgcttcagcgtgtgcaagctttgaccacttgatgaacttgaaagaaccagaaggggagttgagaacaactccgttgttgaagacatccaacgccgcttgctcattttgcatgataataacgaaatcttcaggcgttgaacggtggactgaaaaacttgcatgatctaaatcatactccgctgcaacttctgccgccaaaagctcagctgtcaccggcggccgcgaaccagtgaccacgacgaacagagcacaacgccgaagattgttctccaccagagttaaatcccttgcacgctcaaggacgcaaaccggccgtgccgccgaacctgcagtcttcacca

SEQ ID NO: 58325 - DNA, 771 bp, Zea Mays
gccccttccgcggtctgggtggcaacctgggcgcgctaccttgtggctcatgctccggtgggcaatcgtacacgtatggtggcggtctgcaggcaattgctcgtcgtagggctggcgggcatttgagtcgtggtcggttgtgtcgtcaaactgcaccgtgggcaagcgtgtccagtgttctagcgccggtaagaagtccatgtaccgctcgttcgtccctttctttgcctttgacacatgaagaatcgggatggggtcatggtacaccgggaattcctcgccacggtgtgcttccgccgctctgggtgcacgccgccgtgtcgggtgtcgcagggaggaagacaccgatagcaccgtagattaggaagctagcggctaggattgtctggcgtactcgtataacaggaaatcaatcctgtccgttgatcaaacgacctaggcgtgggatgtgattccgggctggcgagctctcgtccattagtttttgatcggacgaccaccagtgcgcgcttgtcttgtagttgaggatgtaatctggatcgttaaattataatcgggtgacccgtgtggagcgataccccttcggctgatgaatttgcataagagaccttggaaattctagtaataaacccacagtctgttctgatgataacctgagtcttagttacttttgcgccaaggcccctgcacttcttgagaattgacgtgcaatccaggaaatagagaaaacagggaaataattatagaaattgaattttagtgcaaaaataa

SEQ ID NO: 58326 - DNA, 673 bp, Zea Mays
ccaccatggtcgccacggctcaattgaaattagtcgtagtatgtggcatggtggtgttcgtcgctgcacggggactgtgaacggagttgattcacgcagcgggcgatcatggtcaggcaacgattcttcatcgccgtgcatcggccgccggggaaccacgaggcgtcgggggtagcccgccttgactatcgattggaggtgagctacttaccatagggttcgcctagttctcctcttcacgtaggggcgtctggtgtgcggtttcggggctcgattggtcgtatggctcatcgccggccatgggcaccgccgggggaaaactatgtgccgccgactttggaccatgggaggaggacggctcctggccgtctgatccctatcgggtggttgcgattggcgatgaagtgagaagaatcggaaccgtccacttgggcctgggtggctcagattaaaccctgctgtaccggttcggggtcgcattggggccattggatctgaatccgtgggctaggatcggtctgggcttcataaaatctagagcgctgatcgctgatccaatgggtacgattgcgtaccagttcgataaagtgaagatctaatctatgccatcgattgcggatccaacggctgatcttcgctgatacctcttcagctgtgtcgattagcataagag

SEQ ID NO: 58327 - DNA, 346 bp, Zea Mays
ctcctggcaacaaatcaatatgatgatcacatcacgtggcggaggcaagccaattggtaaggcaaatacaaattgaaaccttgtgacgagtgattgtaactcaatcgacaattgtgcaaatactgactgatccttgtcaggcagatccaccatttgacacaactcaatcacagaacaatgtgctgtctataacccacatagcttcacctgggatccattgtagggaatgattaaccaattttctatccatgaaccatcatatgactaaacatttgtaaccaatccatgccaactatcatgtcgtaggtacgaagagacagaatctataagttggactaaaattcat

SEQ ID NO: 58328 - DNA, 773 bp, Zea Mays
gtgaacaaaattcggttgtgctgcgcacgaatccgctggaggcctctgggtataaagcttggttgcggtggctgtttcggtcgttccgccatgcctatctcggtgtccactttgatcctgagcagagaaagaaccgagggagtgagcgactgcgttgagctgggaatagagaaagaagggtggcgccgcacgtggagcttactggcgccggtgattagaggccaatttgtgatgggggcatgtgcaggatcactcgggtccaatcccttaccatctagaactgggtgatgcatcggatggcaggaattgctcgtcggcgtacgcaggcataggtggtcgtcgttgctcaccatggtcggggaactatgtggccgatagccggtaatagctctctctcctgtctcatatagcctcttcttcgctattcgcatgtatgcatgtgaaaccagacgcgtgaacaccggcgattgctcgccgttgccactgtgtcgccgtggaaggaaataacgctgccgtgtacgatctgcggtaaggagaggtgggaggaagacgcggcgacagccgttaatccaggattgggcggtcacgattaggcaatagaataccccttcggcgtgttaaatctgagccgttggtttggatcacacgtatgagatgaaacctaaacctaataaaatatggaccgtcgttctcgaatccaatggttggagttcaatattggaccctcagggatccgatctaatcgtgaccgtagccaggtgatccaacggtcg

SEQ ID NO: 58329 - DNA, 619 bp, Zea Mays
gttgagacttgtatgtgaatgtgaatgaacaatcgtgttttaagacttatgtgttgtgtgttataatttaagagtggacatggatgagtgtatgaccaattatatgtggacaagattgtgttttgtgtacttttgtgaatgagacttgtatgtggatgtgaatgaacatctgtgtggttaggatttgtgtattgtgagcttttccgattacagttaccgtttcccgatcaatttcgagctattttgctcggatttatccgttttcgatataccggaatttaccggccgttatccgtttccgactttcccgtttaccgattccgaccgaacaaaaatttatgcgggtgaaaacggtgagaggttttttccgaccgttaccggccgttttcatccttattcacaccgctacatacctccttaatcggctacccaccaaaacccttgcttatggcaccccccattttgccctcttcggctctcaccctacctatgaccacctccgcgtcttcggttgtgcgtgttaccccaacatgtccgccaccgctcctcacaagcttgccccccgatctagccttttcgtctttcttagctattctagcaatcacaaaagctatcgctg

SEQ ID NO: 58330 - DNA, 472 bp, Zea Mays
caaaagtcggtttacatgcacttgatgacctgggcaataacggtacaagtcgctgtcttggagcgcatttgagaatcaccattcccagcccagattcccagcgcatgcagcatgagagggccgttaattaaaaaaacgagatattttagcaaggacgagccactgattagatgctctggaatcatatgctaatcctcgctccttcagatggaggacgccttagaagaatctgacgagatgttttggcagcaaaaaggaaatgcgttgtggggcgatgatgatataggtggtcggtatcccaaaacccaaaagcaaaggccggcacgcacaccgcgtcatcgtggcagggaaaaagacgatggggaaaaaaacgtattgttgttgggtaaaaagaaagaggctcagcattatatatgattgcgctcctaattaaaaaaaaaggcccacgtacgtacgtacgagggatgttctt

SEQ ID NO: 58331 - DNA, 711 bp, Zea Mays
aaattttttgggtccacttatgtattttccaagtttatgtagatttaaaatgaaatattaaatcaaagggaaaagaaaaaccacttcgtgttcgggtccttggctagatctattcttttctattacaaatgagtcctccaagcactattcactagggtcacaggttcttcacttaactcctgaactttctaggcttttaacccgctctccctttctccttttcatagtggccagtggcgagttcagggtggcatgacttaccagtgacggtagagcttcggtgaagtggtcacgttgagggtcaattcgtcgtcggaatagctcgggctacatgcgtaggcagcggggctcgtcaacggcgaggggcctggccaacagaggagtagagcttaaattgaagggtcaaggagtttcaatgaagcacggtggagctactggtgcaaggaattggacgacgatgcgccggtttgctcggaccgtgctcaccggtggagctatgaactctggtgagtggaattaccttgttctagcgaggtagagctttggctcaagcttttgggagcctcatgtggtctagggtatggtggttttgggctcaggttgggctgggggctactagaaatggttggccacggcggtcggctcctgtagacaatggcagtgagcgtggagttcgccggagtggagtgttggctcggggagttgggcaac

SEQ ID NO: 58332 - DNA, 376 bp, Zea Mays
aagaaaatgagatttgggcactcggctcggaaacgatcgctcgaaacggggaatttggtgaaattaaagcctggaatatcggattggtgtgaaatttggcgaatatgttactggaggtattgtgaaggtgcctgaaaattttgggttcaatttgagcatttttggctggtttgggcatttcacggagcatgtggtgtgcgagcatttagggttacggagaaatggctattagaggctgtgaaaccctccctaaggagctagaaacctgtagggatacacaatgggcacatatgaacacattgcaccacttggattcactggaattcataggattttgaatttaggcacaaagggtgaaaagagaggaacttctctg

SEQ ID NO: 58333 - DNA, 1898 bp, Zea Mays
gaaacaaatatatattgggatggaaaaatcagatagataaatttgaaaaagccagctgaaaacaccatgcagcagctgttgttgcataatgcattagtcttgttttccccccctctccaatgcataatcacataatgtataagtcctgatatcagatttgcttcttcctttcgacatatgaggtcaggcttgattgtatagttaaacaattaccttatgggaaaaaaatccaggaacgaatgctatgttccattgccatcctcatcaagttgttgtgcaaatagtattgcaggaaagcacaaagtcaccaaaaacccccacaggaaccttttccactcctaaagtgatggaacctgttggtatctctaacagatatctccctctcctcaaggaaagcacacataaagtcaccaaaaatccccacaggaacattttccaccactgaagtgatggaacctgttggtatctctaacagatatctccctcccctcaaaagatgatataaatttcattgcctcatggcagtcgccacaaattcggaggttctttatcacccgaagggttgttcctgggctagtgcttatgagtcccaaagcgacagctagcttctcactgtgaacagcaagaatatcatctttctcttgttcctccacatcatgtaggacaaaatctgtgcttggtacaaagcctagcttcctcatctgaatattaagctggtttattttctcaattatcgcagtcatcatagggtgtgaatcatcaccagccaacaacatatgcaccttgttcttgatctcaatccagctacagcctttttccttcttcaagcctacatccttcatcatctctctaaccctattaacccgatcccacattttcttagaagcataaatgttagagagaaggacataattaccagcattttctggctctagatgaaagagcttttctgctgcaacctcagccagatccacgttgccatgaacccggcaagagcctaataatgaaccccaaatataagcatctggctcaaagggcatgtcacttatgagatcatatgcctcatcaagcttgccagcacgtcctagaagagtaaccatacatgcataatgttccatcctcggagaaacaccatactcattatgcatttctttgaaataatgacgcccttcctctgtgaggccagcttgcgtgcaagcagcaagcaagcaggtgaaggtgaccatgtcaggcttttgtttgcacttcagcattgagtgaaacatccaaactgcattcacagcctctccatacatagcatagccaccgatcatcgcattccatgacaccacattccgagataccattgtatcgaatattattctcgcatccttaaccctgccacactttgcatacatgtccaccaaagcactgctcacataaacatcatggagaaagcccttcctgagagcaaaacagtgcgctgacctcccatgcatcagagctgcaacattggcaaacgctggcagcacacaagggatcgtgacagagtttggttcagtcccttgtgcctgcatctccctgaaaaactcgacagcttccaaatccttaccattctgcacacaacaagcaacaatcgaggtccaggacacgacattcagctcaactccccggtcaacaaactctttgaacaaccttagtgcctcgcagacttgcgcgttccgagatagtcccgcaataagggcattgcaagaagcaacatccatgtggctggactcatcaaacacccgaacaacctctgcagcctggccgcacttcccgtacatgtcgatgagggcggtgaccacgcaggcgtccgccctgcaacctgccttcacagcgtatccgtgcagctgttggcccaccgaaaccaaaccgac

SEQ ID NO: 58334 - DNA, 562 bp, Zea Mays
tgcaggagtaggtctcaagaaaaaacttgacttcaactccccttaaacttgggactctatgattgattgggtcttcaccatatagttgatatccatgtactcatcacatctaatggccacatgttgttcacgaagttgcttcgcctcaatgcacccatcatgatgacgctgcatgtaacgtctgattcctgcccggaccacaccactgggtgtgaggcccaaacctagccaaaaatcggtgaattgaaaaagtgggtggttttgaggctcaatgaccgaaaatgtcacgagtagcgcaccgcatgcacatcccccatctcttttggacacgtgtcgtgctagtccgtggcctcgtcggcaacacgatctactccaccatgtccttgcatcgatgcatgttgcaagtgtcagtcagcatggctagtcacccggcttctctagtccctcgatcaagaaccagtgctcgtccttcgtgcttctcggcccatcggtatgaaccgcatgatcttcaccttcgccgttgaccatcgtccctgtgctgcactctaacacccaaaatcct

SEQ ID NO: 58335 - DNA, 439 bp, Zea Mays
cagcgcatccgtagtccgcgcttcttctccaactccggtcgacggcctataaattgagctcggactccgcttcttctccccattacgcatctcagtgcttaagcaatcgactcaatttcgccagagaacttacgcagccccaattccctctctcctccgttcttgctccgccgtgaagaacttcttcgtagccagcgttcctctggtcagtaactctcaacttactccctgttttagttagtccttgatctcctattgctcctagatgtggcaatttatagtttggccgaagctcatcacaggaacgcacccgtgcgctgtcaaacaccgccgtgaccccccccccaccgtcgacccgctcttcgggtcttgttctgcccaaaccgaagcatgtccatggatcctagtgaacccgtaaacctttacccagcctcaattt

SEQ ID NO: 58336 - DNA, 700 bp, Zea Mays
caccttcggtcacaccactagctaaagtaaagaaacgacatttggtttatgtacctagtgtgtgcttgagatgtcatggtggatatgtgttcatgccatggatgatgtgtaactctcaaagcgaggtgatgaaggtttggtagagttggtttaatgtgatttgcacaaagtcggtgtgtgtattttgcaacgtatatcttggcttgcaattgtgcatgtgtttagtacatcaaaatagactatgacaacagagaaggtcaaacaagaggtttagatcgataaaccatgaacaacttagagcaaagaaaccaaggtgacagtggatggacaaaggatggctagcatcaagattgttacaatacatgttggatggtggtaaaaatagcattcatcagagtcaaagccgtgactgaaaaacaaggagagccatttttaccccttggtggactcttagaggaaacatgcatcaatatcggagagattgcgataggctttgatagttttgacctttgtgtttgggcctcataatctgacaaggatctcagggcgacatgtggcagcatcaatgaccttgcattggggcaaagttgcatggcgacattgctagagggttttacaatgttagctcgtttaattttaaggacctaacaataatatttattatacagtgtgtactatcgtgtatattaccagtattatt

SEQ ID NO: 58337 - DNA, 547 bp, Zea Mays
ttctgatgttcactaacgacgttgagagggagagaaacggtagcttcgttttcaaaatagaggtgtaaaatcacaaagttgaaaatgacaattgcatggccaacgaagggtataatcacaattattccaacatttattcgtttacttgctaggcataaaggactaactaagaaatagtaattgttagttgccaggacaaaacatctgtagatttccttgctagggtccaattaagaattattgtccagactaagcttctctagatttgcttatctaagttagaaatttatttctaggacctgttgtcattaaattcaatgcattgtttgtcactaattaaattccattagttattgaagtaactccatgatgcattagcttcttaaaagcaattggattaatctctgaccacaccatttgtaactatgtatggcatagtatagcaaatacaaattacaaaaaaattatgtataggaagtgtgaaagaaagctcaataaaagcgccaatttaaaagcaacactacaaataaatatgaatccttatccc

SEQ ID NO: 58338 - DNA, 272 bp, Zea Mays
caataatatgctgccatcttagggtcgcagcactttgagtacttcatcacttgttctacgacaagttgggagtcccgtcggacgtctaagcgtcggacacctagctccatggcgatgtataggctattaataagggcttcatacttggtcacaatgttagaggcttgaaatagagtcgcacgatgtattgcagctacttccctgatgatgacgtgaagacgaggccaccgtcgacccctcctttgttagcgacccatcaaaatgcatgatct

SEQ ID NO: 58339 - DNA, 298 bp, Zea Mays
ttcttggtgcgtgattcagtgatccattgtatatgtgtccctcttattttagtacaccctctgtaaaccgatcgaccattttgtattgtcggcaggctctttgatcaatactactgttttgtcaggctcaggcagaaccaaacgtgttcgtttggcaaccaataaccatccacttaattgaagtcgatcttgcggagggttattaacttgtttggctgaacaaaaacaggagccctattggcggagaaggtcgaacgggatcttgattttggaacgaactctccgtcaattaagttga

SEQ ID NO: 58340 - DNA, 302 bp, Zea Mays
attgaagcaacgactttcctttttctcccttgcttttggacggggaagcggtaatctgggtaaacaaacccaataacattgagcaccctattcagcctctttttcccacgagcaccgaaggcaattgttatagcttcgtcttccaccctcgagtacgctccaagtagttcatcgctcgttgcctctatagcatctagccaatcatcatttagctcatcaaattgacttctgtaccgaaaagtgtactttagataaaccaagccactctggctggagccagcggtggcttccttcgacatttc

SEQ ID NO: 58341 - DNA, 296 bp, Zea Mays
acaattttgatgtagagtgttggtctggtcactacacaaaatttggcacaaattgccctcaaaagagctctgtcagtcgttctgaaggttaatcgcgatggtacagtgccctgaacaagatcgctggtgcagcgcacgttaccgccggtgaccgtgagcccagatccacgtcgccgttgtgattcgtgctcaccgttgaccggataacgctcctaggtaaaagatcttcgcttagggataaccccggtggctggccgtcgtacccccttgccttgcggccggcgcagataagctca

SEQ ID NO: 58342 - DNA, 497 bp, Zea Mays
gcgaagggggtatctgttggttctggccatgcgatctgagatggagggttcagattagatctactcttgacccgaaccggtatgaagacagaaccgttggatcagagatccacggcccagagacattcttggcgaaagggtacgcacgatatgattccagccgcacgtgaccgatccaatggtccccgctagccccccttcttccatacctaggccacaacagcgacggtaagcccaccatggaagcgctaaggccaaggttgccaaccatgccctggtgaaccaactctaaccgaaatgatgccatgcaaggcatagatcaaggtgcaaccaaagagcggagtcttaccttgttactggacgacggtggctctagccacaagccatagtggttccatggcgaccttcaccgcagtgcaattccgcccgcctagcccagtaatcgggcctataaaggcaatgaacacccctcacagctgctccctgatacgtccatg

SEQ ID NO: 58343 - DNA, 544 bp, Zea Mays
acattcaaccttgatgtgaaaaactctggttttaacatgtttgttgaatattatgttgcagccatgtggactttatgcatgtctattaacgagtcttgtcggagagaaaatcctatgtcacggtggcggagtgcacccactctgattctaagatgaggaggggcatagggatttgcttgattacctggaagaacacgagaacacaagaggtaaagtgattcggggtgccggagtgtaataccctacatccactgtgagttttattgcttgggagtttttgagggagtctatctgaatttgttatggaactcatctcagaccttgttcgagttgtccactaccgtgtgtgccttcccttttatagcccaagggaggcacatacatggtgaatgagccctgacaagtggtcacagtaatctattagctagatatggagtaagtagagcgtcggtcgtgtagatatcttgtttttgctatgtccttccctcatctaatcggagcaaagcgcaggagtaggttgtggcgtatgctgacgcgctaccac

SEQ ID NO: 58344 - DNA, 653 bp, Zea Mays
aaaatagtcatgtgaccaataaataaataaaatttaccttgcatctcatgctggagttttatttgcttgagcatttcaaattgtgtgtgtgcaaatttcaaaccaaaaattaggaatataaatttaggagatggaaaaggaagaaaatagaaagctagaaaatataaaaaagctctactattaacattgggcccctttccctatcctcggcccagccaaacccctgggcgtcggcccagtgtgttacccgcctggcccatgactgtgagcgccagggtatttcacttacgtgtgggtcccatgtggcagaagcttcttctagaacggtcgctggaatcctccggttctcttgttgcctacccccgagctccgcccgtgcaacaaaatccctagcacggtggagttcagctcctcgatctgcgccgggtcggactcttcttgtgtataaaacgaggtcgtgacccccctttttggaccatcgcctcatcgccttcaacaaggaaaaccgggcaccctatccgtgcgaccgccatggatccaccgcgggtgctcctgcgtggggtagccctgctcctactcctctgcccaacgccgatgttctcctcggctcgggcccctcacctcacctgccatggcgcttggcgctcgccaag

SEQ ID NO: 58345 - DNA, 1181 bp, Zea Mays
cattaacagcccctggcacccagccaaggcatgcgaaggagccggtcctcctcccatttatagcctatgcaccctaggccagagccccacttatgacctatgagacctaggctcgtggctcacttatggttaatttggttatcatcagatggagtctgaccaacccgccatgtccttcatcatcccatttggagcatactgttttgtaaccatgtcttttggtttgaagattgtcatggccacgtatcagcggtgcatgatcaagtgttttggcgacctcatcggaggggtcctgaggcctactttgatgacatcgttgtcaagaccaagcgggccggtggcctcatgttcgacctagggaaggcattcgataaactgaagacaaatggtattaaaattaaccctaaaaagtgtgtctttggcgtcccgggaggtagttgttggatttcctggtctctaagcgggtcatcgaggctaacctcgagtagattaccgccattgcaaacatggggctaatcaatgatctcaaggggatacaacgagtcacagtgtcgggtatcataattaggggtacccggattatgcccctaagcatacctaatacctaagtaccaggaaatcatataccaaaaaacgcactcctcgaggtcacacagggtcaaatcacgatttgttcgagaccctgctcaatggttgctcaaaactacacctcgcttgagcccatcctagaatgaaggttgcgcccgcttggatcctcgactcactcaagggacccccattacaggaagcaaaaatctgcctcgcccaagggcatctcggatgaaggttggcctcgagcccgacctcggccaaagttctcgagaaccgcaagacgtgcgcattaaatgcaaccaatatgaatacctgctccaccaatgacaccacaatcaacagaaggtgatgggaccgcgatcccatctactttcaccatctacaatgagcacgcccgcgaataccaggcacaactctcttgctccagtcactgttctcaacaactccggatgggacatgcgacatctaggcatagcctcagccttgggagagaactctgcctcgcccgaaggcagccttggcctcaagaggaaactctgcctcgctcgagctcattctcggccaaatgcgctggaagtagcacattaaat

SEQ ID NO: 58346 - DNA, 437 bp, Zea Mays
tgtgtggaaactgaaaatgaaacgactgagacaaatgcttaaagggtggaatattaatgttgtaggccactacaagaagttgaaaaaaaaccttatttcaaaaattgacatccttgacaaagccagtgaaatctcaggtttatcagaggtagatagattggagaaacttgacttggaatcgaacctcagaaaaatagttgatgaggaaatattagcctcaagcagaaggctcgggataagttcatgttggatggtgatgagaattcaaaatactttcatttgctagccaagcataaaaaaaggaaactcaaaatcttgactctttcacatggtgatagtatggctcaagatgaaaatggaattaaccagcttgcgacctccttttataaaaacctctttggcccttctcaggattcaagtatttcgttggataattt

SEQ ID NO: 58347 - DNA, 272 bp, Zea Mays
gtggaaggcaaaggtttctaacaaatctgaaggtgctagctccagtactcctcacaaggtcaaattgacatcacaaggaacacccagaagaaaaaggagatgcagaaagtgtggcatctatggtcattgggcagaagactgtaaaagaccaaaaagagataagaaggatcacaaacagcaggaggcaaatgttgcagttggagatgtggagaatgcaacactactcttcgctgaggtgcaagactcattaggtggaacttctcaggaaatac

SEQ ID NO: 58348 - DNA, 532 bp, Zea Mays
aattactattgaaataatttgaattattcccatatctgttattatttttgagaatattcaaatcactatttaaatgatgaaagggtatacttgtcgttttatcaagattaacaatgttaaatgcaactaaccgactaggggcgtacaatagtttcgttttaaaaaatctggggtgaacacgcaatgcctaaaaaacaagggcaaagctacagttacactaaaaacaaggggcactgacgcaattgccccataaatgattatgcatgaacacataatcatatcaacaccatttaagtggcaccaaaaatttcttcttcatgcataagtccaattttgtccatctagaaagtttgtctagcacctaaactttcatatttcatcgtttaaagggtcgttgaaccacatattttagtgtttacatgtctctaaccacaattttatatcatcattgaaactgtttttaccagtttgattgtttagatatgtttagtgtttagtttaataactatggcttaaactacacgtgtaccca

SEQ ID NO: 58349 - DNA, 466 bp, Zea Mays
caactctggtccggatattctgtaagctctcttaaagatgggggcagttccaggaagaagctctatggcaaattcaacattccgctctggtggcatacctggtaagtcctttggaaacacatctaggaattcggacacaaccctgatactctcacttgggtctgcttcactgtttttgatagccatctgataacaacttcctttcttcggctcaggcgggactaactcggtcaccacttcctctcctagtggggacaccaacttgattgtcctcttatcacaactgataactgcttgatacttatctagccaattcatccctaggatgacatctattccctgagtacccattactatgaggttagcgggaaacgctatccccctatttccacacttacattcaaacaaatgctatcggctcgaattctaccaccggttgagtcaatttgaatgggggttgacatgg

SEQ ID NO: 58350 - DNA, 688 bp, Zea Mays
acatgtggctggctggcgtcgacttggctgcctcgctctccgagtgtcatgtcatgtggcgatcgagacctggacgggacgggacggctactgccttgtttcacgacctcgcctagctagtcagtgaccagaaaagtttacgcgacgaataaaaaagaacgcagggagggaataacaaaaaggagggcgggggacccatctcgatgcaaatcattgcgctgccaggctccaatcattcggaaccgagtttggagcactgcttgctgtcttctgtcgacaccatgttgcaatgctgctctctggcatggcatgaaagggtgcacccatgctgttagtctgtgcgctatatttgctcttaagcacatgatggaacgcccatgagatagatcctgacttttcctttaaacacgtgctcgattgaggagggccatctaaagaacagtttagcggggagtccgatccttgacgtaagacatgcatgaacccaacttgtaactgtcagtttcattgtcattcacatggcagctaaactgttttttttggtgattaattccagctgagccaccaagaccatgtctgctgtttttgtcaaacttgccagcaactcatttccattcttctgtattcttatatcccctgtcgacggtctcacatatttttttaaaaaaaattccaaacctgacagcaa

SEQ ID NO: 58351 - DNA, 490 bp, Zea Mays
agaaacaaatgctcttgattgaagagtagccactgagcacgcaacaataaggtgcgagcatggaacaaggaaacatgcaactgtgatggtttcttgcaagagcaaaacacttgtctgtcatgtatgagcaaaactgtgatgcttaatcaatatttcttgttgcacatgctcactaaatactcctgtcttagcttcgtccgagtagtaaatcacaaatcgtagctctcttgtccccattgttttgacactatgtgtatgggccttctctactttctctgtcatgtatgttgtgatcctagagcagaactcaacaacagggacattcatatggagacttgtagccatgtaatgctccctgaagtaccttacacgtccatataagatgaactcaactatgcccatagtgggagggaacgtacatgacgcatgaccatgttgtaacactctgcatggttcgtagtcttgatgtcatatagacaatgaaagtcgc

SEQ ID NO: 58352 - DNA, 304 bp, Zea Mays
gatggcgtcagggcttcaatgagaagatgaacagagtgaaaacttgagcagtgtagaggttccactctttgaagcatatatttataaggggaagagtattttgtactagttgtacgaaagaaacaaaactaaatggtctttagtaccgattatttacaacgaccgatactaaatctactttttcagttcccacctagggggtgttgggggtggataacctgggtgtaatctggaccttgaatgacatgtcttacctaactcccgactcacgtgaacagtcctaccttgtgtttctgcctcgttc

SEQ ID NO: 58353 - DNA, 2407 bp, Zea Mays
gtttgtactgtcatggtaatgcagtaatgctattgcttaactagaagacgttcacgtgtgagcctagcaaaaaaaaacagtttttttttcgtctttacgaatgaccttcattttgcgtgtaaattattcaccaactaacttaactgcagagctggctttagccgcctatccgtccgtccccacccccccgccatctcccattccccctcatccgtcagtctcctggttccacgccgcctcctcttgactgactccgcccgccgcaggtttccctcgccatgcctccgaatctctcccctccttggcctcaacatcctctcttttagtgtagtactaaatccgaggcaaccaagttcgccgcaagcgcaaagccgccgcctttttgtgtgccccgaccgagcctctgtttcttggttcccgttccgttaccgcacaggtcgtcctcttcagtcttcgcctcggaggtgtcctcgttttcctaggattttttcccggagttctacgcgcattttgttctgggtttgctttccggttgggagaggaatcgggtgcggcgcaggaagacactggttttatcccacatgtccaatcagtagcagctaggaacagtaggcgtgcgccagtgcgtgtgatgcgaagcgaggagaggatgaaagtggaggaagccggcggcggcgagattggagaaatggagccccccgcggtcagcacggtggcggtggcggtcagcgggggcaggagtagcaggcacgcgctcaagtgggccctcgacaagttcgtccccgaagggagggtcctcttccggatcctgcacgtccgcccggcgatcaccatggtccctactccaagtgagtaatcggcttcccccttctctctctctctctctctctctctgaatggccttaattctatttacgcctgtttgcgtatgcagtagcacttctagtagtcttcagataaacttcctcgtgtttactgtactagtctgaaatctgaaacgcctagtttctgatgatttctctttttctggcctaaaaagtgggagcaattgagagaatatatgtagttcattactttattgttaaggaggttctaacaggaggaggtggaggttagcgatctgatgcatccaagatgtgaattaactgaaatgctttacaaggtccttgcacattagtgacattacactgaatggtgagttctgctccccagtgttagataaagcagcagtataaaccagatttggtatcactgactctatgaaatgacactttgcaaattgggatgtcagaaacccagaattttagttctggaggacagccttttgaagctagcaatttgtcaacgatactcttatgaacctcaaaagtatctttttgtttctgccattttctgttaggacttaggactcttcccaagttatctgccagctatcttttcatgcatggtactagatactactccttaagtcataacttagaataaaacagtagtgctagacctaacactttgttcgtgaccaagatgccacaccaaatgtgtacccagctactgaattcagtgtactaagcttattagatcgtaagaattctgggacctctggtgtaggtgcaaatttttttgaaattattagtgtacctgctacttgcaagttgcaacaacaccaaatcatttgagcaccaaccggttcttttttctcttttgttagtgggaaattttataccaatctcacaagtacgcgaggacgtggcatctgcctacagaaaagaagaagaatggcgagcgagtaatatgctagttcctttccagaagatgtgtgctcagagaaaggttaggattagcctgcataattgtctaatcgttccacctgcagttagtcttttgttttcagaaccatttgaacttagtatggctgacgaaccatagcgtctttaccctacatcttattaacaggtagaggccgaagctgttttacttgaatcagatgatgttgcttctgctataagcgaagagatagggaaattcaatatttgcaagttagttttaggttcttcatcaaagagcatatttcgaaggtaatttcttaattaccagtatttgtttgaacaaatttttatattactgcatatcattgactagtctgtgcatgagcatatgtatgctgaccagtcctatagtcatactacattattttgattaagtgaactagaagagattgcaagtatgaataagatcaatattgtgaggccagtactaaaattagccacgttatactctacccatactaatttgtagtctataaaacagaactggtcatagtctgttacattaatttacccctgggaccttcttgcttactacgtcctaaccatttatgaagtttaaacagtacttcatgtgtattaat

SEQ ID NO: 58354 - DNA, 652 bp, Zea Mays
gctcaaaagaccccctacaaccagaaatggaggtactactagagagcttggccatcacatcatgcccggggtggccgagacgatgatgccaagtcacagaggaggcagccgctgcaagaacaggtagagcagaggtcgatgtaggggaagcaggtaggcgaagcatttagaggggcccggggctgtcacaccgagcaaaaagggtcctggtggcaagatccttcacagacagaccaaacaggtcaaacttcatagaacaagagttgtcagtagtgaattgacggacggaaagaagattttgaatgatgttgggggtgacaaggacgttggttaaacgaaaaggaccagaaaggaccgtgtcacctactgaggtgacgggtagggcggatccgtttccaacaatgatggaagaaggaagggaagtgtggggggagaggtggaagatagaatacctgcgtccggggtggtgtggtaggaggtgccggagtcagccacccagttagagaccaaggtgggtggggccagcatcatcatggaaaaggagctggcgagagactgcgtgtcccacccattagtccagggccccacactggctgggttggaggccccgggagtggaaggagcccctgctgaggctggagaagagccgagg

SEQ ID NO: 58355 - DNA, 445 bp, Zea Mays
caaatgcttaagggttgtgctcaaatggagtctcccatttttcatacatgcctttctcaaatatagattaacagcagtatcaaatatttgttcagataattttgagcaggtgaatgagggaagataaaaataaattacatggaagatttcagaccaggctaagcttttcacatgttcaaaatagtgttctagaagagcatgttggcggcaactaacacaccttggtaaataaacgtggaaggtctagttagacccaattagtctctgctatttcggaagactaacttttatcaccaaaaatccgtcaagagctctaggtctctgttgatggaggaaaatgttaaaaatatacgtaaggtactaatattagtgtctttggttgtttgcaactttctaaattcattcatgatgataattgtttacttctttgtgtgaaggagtggga

SEQ ID NO: 58356 - DNA, 608 bp, Zea Mays
agagattttcccccatacagttctccctatttggcttctctacgtacatcacttgctctgcatgatcgggtgttgggggcgtcggaatttcgccttctggcgatggagccgccgttgggttcctgagcgccgctgtgtggttcgtcggggagagagaaaatgagagtgaaggttgccgtgaccgttggatcgattgcggatggccaggattagatcgtcaccctatagtaggtctgaacgccgtggatcgttgattcgtgaatctagggctcggattagattagggatacccttcggtgggatcatctcggatcgtccgatcgggatcgcgtggcacagactcgatctcgactgttttaaatcggatccgttgtttcctgatcgtgtggctcctgttgattgatacccattcgttgtagtgtattaatatatgaacccttgggcttttgggaaataaacccgcagtactactcggggttgttgtgtctagggaatctttcgagttagccctcggcctttcatatattcatgcgcgcaatccaggaaatgggaaaattaatattagaaattgaatttaataaaaaaacaaatctagaaacttgtataat

SEQ ID NO: 58357 - DNA, 735 bp, Zea Mays
gtttttcagattgtagagcagctcatggttaaataacacatccaaatcgaggccgacaccccattcacaatcatcatcgtgttcgctgctcgtgacgatcaccgttctcttcaatcgcttcacgtagtgagttctctacttcaaactaaatggttattaaagattacatagctcatttatggttgcatagctcaggtaattttacatagcttatttatggttgcatgtgaattgtaaggttgccttttttaatattagatattgacagagctcatttatcaatagacattgtcaccatgccttattttcagcaatatctttctctacataaatcaagtgcatgctgactattgttgtgaatgaggatagtatggttgttaggtgtatgaaaaatgctaagaaactattctatgtttaactatatgaatatgtttagttaggtgtgtatgaatatttttaactatacaacacggcaagaaacacataatgatgacgaatgcatgtagctccacaaccacatcagtgggagcagagtgggtaggggtggaatcgtaccatgggaggtgcaggtgctgcgtcaattcaagaatctagcttgcttatatgctatactatgtttgctattttttcatcattcgtgaatagtgttcacttgagctgaaaagtatagctaatctaaccaatgggttacatctttcttttggatttggactttatccgactattaattggtct

SEQ ID NO: 58358 - DNA, 633 bp, Zea Mays
cgaaaacaatgcgtgcagcccagaacagcaatcaataaattctagcttctatataattcaagaattaccgcattctagagacttgaatcattctagcactttaccacttcttagagttaaattaattaaatgaggactagcaagtaggcttacaaattttatccaaatcatttagtgcactaaaattactacaaccaattaacaacgcattattcacgacaatcactcaacaatttgcgttttaaattagacatcgcatgagcactactacttttcatccgcgaccataaacatacgcatttagactacaataagcaattcaccgtgattatgagcttaaccaagtcatctaacaattcggttaactagagcaacgacatagccgctaaataacatatacgtcaacttgcccattattgccgcaatccaggacacaacatatactacaacattttcataaacacacagattcaaaagtatattcgcacaccgaccgactcatatgaattgtaaaccacaaatctctaaatcgcaatcaccacgcatttacttcctaaatcatgaacgcatacatgtttatcctacgaaccgagtatttcaataattatcctaaaacaactaactccattacac

SEQ ID NO: 58359 - DNA, 959 bp, Zea Mays
gcacccatatcagaagtaatgaagcgatcaggtctagtgctaggggaagttactgacgaaggtacttccaatgccgaagttgtacaaactgtggttgaggtgagagtgataatgaaagcgaagaggataacaacattctaaacccagcaaagccttgtcatattgaatttgtaaaatccactgtaacagaagatgacatgactatgacgaaaaaactgggctatttcggggagtctgagagcaagcttgtttgatttgctggggaggagataactccggagccgagggaggacgaagttatcgtctttaagagctcttcagagtagggcttcggtttcccctaaatgacatgataggggaggttctaaagaactttgaaatataccttcattagctgacccccaacgctattgttagacttaacgtcttcatatgggctcttcgaagccaaggaatggatgctaacgccgaagctttttatcgagtgcacgagctacactactagacgaaggctagaacaaatggccttcataagaactttggctgttataactttgcatatcggaaggatacgaaggccccgtttattggctatcgcaccaagtggccaaccgggtggactaatgaatggttttatatgaaagttgatgagaagaagagggaaaaactcatgagtatggtaatgagtcccttgaagctgaacttcggcatgactcgacccttgtgcaacatgcagttaggggccccttgccaatttggccgaagtagaatttagagtggtggctgggcacatcaatactagggacttagtgcaagagtacctatcaaacagaacatatccaacttctagtggttggggaataccgaagagaaaagaagtgggaaagaagcatgaacttgtacggctcccctaccgctttaagtttgagaaacaattcaaaaaaccttgcaaagaatgg

SEQ ID NO: 58360 - DNA, 705 bp, Zea Mays
gaccatacagtcttcttcaagcacaaggggtcatgtatcactatattatctgtttatgttgatgatattgtgataattagagatgatgtggaggagatcaggtgtttgaaggagaagctagggaaagcttttgagctaaaggatattggaaatcttcgatatttccttgggatctaaattgctcgatcatcaaagggaattgttctttctcaaaggaagtatgtccttgacctattgaaggaaacaagaatgcttggatgtcgcccatgtagttcacctattgagaaaaatcaccaaacacatgctgatttaggaaatcctgttaatagagagaaatatcaaagattggttggacgattgatctacctgtgccaaataagacatgatatatcttatacagtgagtgtggtgagtaggtatatccatgaccctaggacgatacatatggatgttgtttatggcattctgagatacttgaagggaacccccgggaaaggattgtggtttaaaaagaacaagcacatggacttggaagggaattgtgatgccgattgggcaagtagcagagatgaccgaaaatctacgtctagatattgtgtgtttgttggaggaaatcttgtctcatggcgaagaaagaagcaggcagtggtggctaaatcaaccacagaagctgaatatagggcactggcattaagcctatgtgag

SEQ ID NO: 58361 - DNA, 344 bp, Zea Mays
ctaaaatgaaagttgtaggtcgtgaaaagttatttacctttatagttgacaacttttgcctctgcctaggtgacaacggtggcgctaaacatgtcttatacttaccgggatctctggctccgccatgtcttaccctctgtctttcctacgtccgtaaaggagacgacgacgacattgcatggttgacaatggacttaataaccttagtaagcttattatgggcatggaaaatgacctccttattcttgttcagtgaatctgtgatttgcttctatatcacttcaatattggtcaatgccaccctgattgaattgtcatgctctatcaatgcttttctaaatgcc

SEQ ID NO: 58362 - DNA, 634 bp, Zea Mays
cgccttaacggtcgcggactctgctttggcggcagcttcttcctctcgggccctcgccaagggggttagcacgtcgacgacagcaacaagctaagaaaagcacattgtcagccaaagagcgacgaagatagcaagctaagtttaaaaacactcaccgagggaaggcgcgaagcggtctcattcagggccccttcggtgatcacagaggcgtccacctcccccgtgccacgatagcaaaggttgtgcgagcacgactaacccctcctcgcgttaccaaagcaaacagttgcgcggcagtaccacgtacaaaggcttgtacaatacgctctctaacaccatgccacgtggatgtgtcttggcgtcttgcgcgaggacaacactatcatgatagtcgctggtttggatagcacgtgcactctcatctcattaactcctgagcgcgtcagcctgcccaacccttacatacatcagcatacaagtacacaccgagacaagcacaaaccgacaatttgggacacaagacacgtccgaacaggttatccgcataatgaatgaagagatctctgtgcgccattgcgtttgttgctccatgtagtgtatatttaataccagatcgcctagccccacatgtcgg

SEQ ID NO: 58363 - DNA, 400 bp, Zea Mays
tataaattggataataggtgggtagtgccatataatgagattctgttgaagacttatcaagctcacatcaatattgaatggtgcaataaaactatctttgtaaaataccttttcaagtatgtaacgaaaggtccagattatagcaaagtatatttgcagagaataagaaatggcgaagacacaccttacgacgaagaaactaatacaagaaacgaggtcaaagaatatttggatactcgctatctatgtgataaggattcctgttggcgtgtgcttggatatgagatacacagacactatcctgcagtagaacaaatgctagtacatttacctaatgaaaattacataacatataatgcagcaagtaatatatcaagtatattaactgaatcttttcttc

SEQ ID NO: 58364 - DNA, 356 bp, Zea Mays
gcgtgattggtgtcccggttatggcatcttcgtcgtggccctgtacagcgccaccgtggtccggtgctggagataggagaggctacatgggctgtggatcctatatctaacggctcgcacgacgtagcggatcgatccctggtaaagctgatcgtagccatagatatagaatccgacggctattgtgccgtaccggttcggcaaggggccgatctaatcggtgtcactcgtcctcaatccaacggccagatttggccagtaccccttcgcgatggcaatttcactaaagatcccctgcatttatcttaaataggacccgccgtccagggtagagatacctgtgtctcggtttcttt

SEQ ID NO: 58365 - DNA, 482 bp, Zea Mays
aaactagtagcatgcgctaatcaggaccctagattcaaccatccatggcccatagaggtacgccatcactcctttcccccatgataaccaacagcggcgcaagcacccagcacagcggaggcccatcggtgacatacaatctcatcaccgctgcatgccaaacacgacaaaaactggtgctacacctaaaggattctatggcagacaacatggtaagggtcttatctgtggcacaacagcggtgatgcccacccacggtggcaagagatttggcggggaagctctaacctcggtgagcaaatcctgatccccaaacgtgtgctcctctatgattccagatatggtgcagcgtggagacgaaggcgaaggttcagagggagtcttaccggagttatacaagcacagaggcctgcacccgcgtcgagggtggatcttcgatggaggaattggtatgacaaacaatcctcgttgctctggtcgat

SEQ ID NO: 58366 - DNA, 350 bp, Zea Mays
gttttactgcattttttatttatcagtgagttcatgtagcatctgaattttgaggtttagcatccgaccataagacatgtccctcaaaccgatctattctcatgcaccggtgggaaaccatacaaaaatatgtgaacaagttttgtcgatgtttatcgcggattaagttaaggcgtcaaagtggtactacaatgcaaggcaaggtacttcctatctttgaaccagtaggatttgtttaaactttcttacatttttataacatacacgaatttccctttgatgttgttgtatgcaggttgtggaggcatgtgctttgtcaaggctgaaagaagcattcgaaaacttttcaa

SEQ ID NO: 58367 - DNA, 516 bp, Zea Mays
aggccagctggactactgcatccgctagagatacccgagtggaagtgggaagaaattggcatggatttcattaccggactgcctcgcacccccgaaaggatatgattctatatgggtgattgtggatagattgactaaagtagcccacttcattcctgtcaagactacttataaaggctcacaactggcagagttatatatggctcggattgtgtgtttacatggagtaccaaagaaaatcgtgtttgatcgaggttcacagtttacctcaagattctagagaagctttcatgataatatgaatacaaagttgaactttagtatagcttatcaccctcagactgatggatagactgaaggactaatcaggtgttggaagacatgttgagagcttgtgcccttcagcgtggaggaagttgggataaaagtctaccatatgctgagttctcatataataatagttatcaggccagtctgaagatgtcaccattcgaggctttgtatggcaggaagtgc

SEQ ID NO: 58368 - DNA, 846 bp, Zea Mays
gcttgaacgaacctggaaaaagctggccgcggtgaaggtgtctctacggtggcggaaactcagtttgggggaaatccaaaattagagctctcgggtatacgattggaggcaatacttggtggcttggtgcgtgattatcttacggaccagacgatgtgcacaatttatagaagacaagagcggtggccagtgaatttgggagagacgcgcgacagccggagaaaacagaaagttactagcgtagtggatttgtgtctttcgttgtggcgaactcaccggcgatgagcaaatatcgcaagccgagccactgcgacgtggtaaagtgctttagcacgtgtcgcacggcggcaatcggccaacggaggtgaggtcttatcccgatcgatcgatgagcaaggggtacggtgagcttagccgcggccggactcaagttgatccaggcgccaagatctttacccacccacagttatccacaattcacagtgcacgaatcccggcgatcgacgtgaatcacggcgtgacggtcatcggcggtgaagttcactgaacctgatccgatcaggctacagtaccatgagagtcatcttcaaagtgcctgacagaggatgtttagggtagattatctctaaattttctatggcaatatcatcacccttctgcaccaaagttgtagtcctataaaccatcttcatctttgttatagcatccctagtcaaattctcactggatcatgcttaaattcgagccccaagttcggccaacaacactgacgaccacttctgctatcagattcagattcagttgttcaataccagtctgacagcgcaattttgggcagcattttct

SEQ ID NO: 58369 - DNA, 417 bp, Zea Mays
catcatctcttgaccttcagacttggataatcatttgagtaatagcgagcaaacaccttccttgtacaattccccttctatgatcctataaggttttgttctgccttccattctttttacccaatcttcattatcaattgtataattacccttaaaaatgatataatcactgtcctccaatcctcactttgtgttgtggagactatcaaaacaacacattctagaaggtccaccgaaggtgccttcaatacttcgaagaagacatcgggtggcaagggcatcccctgggcaacgaacttggcaagcatatcagcatgttcattgtctgactttggtatattctttatgaaaaacccttcaaaggaatcctccattcttcgaacagtatcaagatatttatctaatgctagcttcttg

SEQ ID NO: 58370 - DNA, 503 bp, Zea Mays
aaaactggtgtcaaaccgtgtcaaacggttctagtttgggttcaaacttttcagaggcgtgccttgtgtaatttagctcctttttgtcaattggaccttatggatttggcgccagcaactaagtgaacatctccaatctttggaagtgggctaatttttgacttagagaaaatgtgagttactctatagtgctttccacttgggggctgaatttgtgggttttgtgggacctttttggaataaatacctgactctttcttgtagattgataaatgtacttcaactttggtaaagtgtttaagtcctgaaatggtcatttgcttatccttcccactaatccaatgtttgggggtttaatggctcaaaaaggggggtgctagggtttgagcatctttctccaaggtgaaaatacatgaaaagctagtgtatcccttctatcacgatcattacttaattaagccatggtttccaaggttttggtgcccctttctcgccacttaaac

SEQ ID NO: 58371 - DNA, 841 bp, Zea Mays
ggactagcacaacaagggcgcaaaatcgaagtcctcttcaaaagactatccgcgcaaaagccacctaagggtgcagccggaccctccgtgcaaaaactgactactggtgcagccagaccaacacaacaaacacgctagatcaagtgcacaagtcctctacaggcacggccggatcagcgaaggcacacaacctcatcatacaaactatggttacatacatacagcgagggcatcacaccttacattggctcaaccttcgggatgatacccatctccctgtagttaaacagcattatcctcagctcctcaccctcaaaaagatttcacaactccccctcacctacactcgccccaaccggcgaggacaacaattcccgcttgccagccccatccacacgaagacgaccaccctccacctcactcactctacgcttcgccgctgcccttcgccgcctacgcccagcactcggaccaggaacgacttcagcatccatcacacgtggagaagcctccgccgcagccacatccaaagtcgcaaaataatccaaatcctcatccgaagactcctccatccacacaaccgaactcccagaatcatcagactcaaaaaacttagacacggaatcatccgaatcatttccagcaaccacggtcgaagccgccacaaaattagcattgtcagtagcggttgtgtgcgcaggcccaaaaccctgaacctgcgtagcaaccgagtttcagtaacatgtaggcaaaatttacaaactcccctgcacctatttcactacttagccacctgcgagggcacggccgcagccgtggggtcttcgactgccggcttcgc

SEQ ID NO: 58372 - DNA, 331 bp, Zea Mays
cctagtccaacaatgtttctggaagtttttattttatttagggtataattaaaaatgtggaaatataagtaaaaaatagtaggacttttgcaccatggctagaaaaaatatggtagatgtgggggacaaatatcccctaggtccactagaaggctagaaggcctcgcaaaaggctttgggcccattatttcgtaaggccatcccttcgtgggccagtggaggaatggattgacgcatgattggatagactcgagcccagaagacacattggatttaagcattatccatagcattgatccgactctcccgcgcagcgccctcaaacatcgga

SEQ ID NO: 58373 - DNA, 376 bp, Zea Mays
attttactagttctagggaccaatttgtaaatttccatggcctaaactgaattacttttacactcacctagatggcgggttgattttgataaaacagaggggctctttagcaaattaccgaggtcgaaggggtatccatcaccaggggtcgttcgatctgtttttaacacccgagattagatccacaaagtcgtgaaccagaatccagtgtcagcagtcagatcccgatccaacgctcgagattaaatgatcccgcgatctaatctcggccaacagatccgagatccacggctatgattttcgatcacgatgtagtatttgagattcaatcgtgagcgttcatcaccggatcgacggccagagccgtttctccccc

SEQ ID NO: 58374 - DNA, 435 bp, Zea Mays
gtcaaacccgagattttctctcggtgttcggcagtgagacaaacccaacttcacccctccatatctcttgatccagtcagcgaaacccataagcctccacacacaaacgacaaaggaatgtcaggggaagagatctctcagtgggatcatggccataatctcaaagattttgagccaatcctcgcttgaacatgacctctctctgcgcagcctcgtgctcgacaccgtgccgagacgccagagcgcgcactggcagtcgccagcgcacaccctgagcgcatgtcagagccacccctcggccgtacccgcccgcgcctttaagaccacccccggacgcgcctcacctcgctccgcgctcaccctcgctggccagacacccctcccttagctccagcaagccctgcgccacccgcccgagccacccgagcgccgacc

SEQ ID NO: 58375 - DNA, 668 bp, Zea Mays
tgaaaattttgaagttgtgaaggcaaagcaagagataagtgaatggacaagttcaaggctacaaaagaatgttgaagagcttcgtgattccatggaaaggtgttatgaaaaatccttggattacgcgaagaagctaaaagatagctttacgaaggtgggggcgtattcctcagaacaaaaatttattcgcggcgaccccgaaggggttatccaatggataggtgaagaagccgaagctttcaatgagaaccttagcgattgcagagatttttgtgctttttccggtgcccgagggattgcagcaatcttagaaaaggctgggtgtgaacatgtcaaggcccacggcctagccagaatctattctctctgctgacaatactaaggacccttcggttgaggcttctaccctgggcggcaaattctactccgatgtgtgatgaagggtggtcgtgagatggctgacgaagccattaaaaagaatgagaaagaatctcacaccgcatgcgaggaagctaagcaagctgaggaagctgccgaacgcgccatgattataggtacttttatttgaaactttttgccttgttgctcgtttttaccttcgtaattcaccatcatatatttattacagccgacctctctcccccaccggagccatacaaccccgaagc

SEQ ID NO: 58376 - DNA, 686 bp, Zea Mays
tttgtgacatcccaccaacacttagcttcgataccacctttcgccgacagtggtctttggctatcgccccaaccgggggagcagactcttcacgcactttaggttgtggcaaggactccgctgtggccaaatccaacacagcaaaataatctaaatcttcatcagaagactcctcaatccacgaaaacgggctcccaaaatcatccccgttcgatgaccacgactcagttttagaaccataagcatttccattaacgggcattgcattcgcaaccgccacaaaattagtatcaacgccagagggggttgcttgcgtaggctcggtcgtcggaacctgcgcagcaaccaacctttagtatgacaaaaagaaaccttaaacacaataaccctaacatgaccccgccacctgtgaaggagcagccgtcgctatagggtcttcgtcaaatggagcagccaccgctgcagggtcttcgccagccggggcagccgccgctgcagggtctttgctagagtcggcttgaggcgctgattgctctttagccctcgtcctcgcgtcttctgtctgggtcattaagctttcaaggccgtcgaagtcctcaacttcttcattgttcagcatctacaaaaatagcaaaaaattttaaaaaacctacgctaatgcttggtcggccctctcccagatagtg

SEQ ID NO: 58377 - DNA, 460 bp, Zea Mays
ctttccaaaccacaagtcagtagcggtacctagaagtacatactaactcccggatgtacataaatatcatatcgaccgaaccttgatacattcacgtactaatccctttgtcgcacgatatcagtcaaactcaaggcaagatatgtaccatcattgttacaacttagccattcacttgatcaaatagtggattcaattcatggctaacatttagtcattgtgattaactctttaaccatattggcatggctatgctctttacaatccaactgtctcgaggggcctagagatatctctcatattatctaagaggggcaaatcccattttgatccgcacatatcacattccatacttcatggtacacccgaagactcctttaatgaatacccagttatagcgtagcaattgggagtcccaaaatgcacaattacacatagtgagaaacaatggtgatctcag

SEQ ID NO: 58378 - DNA, 364 bp, Zea Mays
cacagagctccaggccaagctgagtgccttcaacgaaatcctggaggagcagcgcgtttagcagaccgcgactgtggagaggatccaaaaatgggagcgggagctagaggacaaggccagcaacattgccctggccgaggagaacctcaaggagaaggatgcttccttggataagcgggcgacggatctcgcctggcgggagaaggacctcaccttcagggaggaaatgtttgaaaggcgagataagttgctagccgagcatgagctcgaggcggaggagaaggagaaaaagctagaagagcgggtcagccagttccaggcagcgcaggcagcaccgggcctctaggcggtggaggccaccagg

SEQ ID NO: 58379 - DNA, 1155 bp, Zea Mays
caaaataaaggcttaaaacatggtccatcacaaaaaaaagggcctaaacggtatgacccgaatgtgcctcaaacttaggctactcacgttgtctctgtgggccggccatggctgtagttttagagcattgaatagtaagggttttttttttctggtcaacaaatcagttctaacggtggacctcacacgtgggcaaacagatggtggcttgttggctacattagtgcggggaaaattgtcttgctttttttttctagcactgtcatagttccaaaggagtataggtgacaagacggatcaggctataacacgactattttgctacgacacgagcgggacacttcaatctagcctattaataactacgacacgagcgggacacttcaatctagcctaccatatatataattaataactatgaccaactcgactctcacttttaagttaattttgagctttattaaaaaaatgagaaaatgaacaataaaaatagaaaaaaataagttattttcaagctctgttacaagacagccctagaccacgtacctagaccgcgtggtacggtagcacgccatggtacgatagcccgatatgacctttaaaactagtgaggagatcgtgtttgggctgagacttcgacccatagaccgtgcacacaattatttgtgtcatatctcggcctgattagatcaacccgacatggcccattagccatgtaataaccaggagcacaaagcacaacccaacacaaagtttaatagatcaggctagcatagtctaaaggcaggatttggtcgggccttattatttttgtgtgcttataatgctccccactggctggcctagcccgataaagcccatagtgtttattttttaaaaaattttagtaagatgtggactttatatccactggcctggcctagcctaataaagcctatagtgtttacttttttaattttagtaagatgtgaactttatatggttgtagtatttgaatttatgtgattcaaatatgtggatcatgctttggcaagtatgatttgataaaggctaacgtattttagcgttatgatgaaccactgtatctactatttatgctggtacggtccaaaagttctttttgggccttatcgtcttaagcctgtttggcttaaa

SEQ ID NO: 58380 - DNA, 532 bp, Zea Mays
ccaaattttatccatagtagccggtggtataggaccgaaccccaaaacatgaagctcagatggtcgggcattgttatgatgggtatctatatgagggtggtctatggtgcatggtagtgggaacccttctacttccttgtacgccgggtggtactccatcctaggtgctggaatgctttagctttgatgggccaaaggtgggggatagtgctcctatggtgcagagtatgacttcgtgttgtaaacatggtgccattctctgtactagacatcaaacaatccttgatgtctcactggacggtccggtagggtaccggacggtacgcggtgggctaccggatggtccggtatagagttggacgatcctagattatactcacatggtctggtcgtgcctagatacgttgttgcatccattatgtgttatggaggcagcgactggcctagggatgagttcaccgatatattatataatggctgggactgtacaggtgaaagtttcctttgcctgagaacatggtctggatctcgc

SEQ ID NO: 58381 - DNA, 346 bp, Zea Mays
taaacaaaattatttacgaaggttgcgttatgatgtaacttcaggggcttgaacaacccaccacaatccacgcgagtacaagctctattgtatctggtgtcaacgcgtgtgcgtccatcagggctacgacaacacaacaagccttcgtaataagcgcaacagacacaattatggcttagtaatcggggtacacgataagtccacgcaacgtgcgcaacaggcacaattgtggctcaatgatcacggcagacagacagtgcctacagggcatgcgaaaaatacgcgactcagtgatggcggttcgactcaatgggagctgtccaaataaacgagagtgctacatagc

SEQ ID NO: 58382 - DNA, 340 bp, Zea Mays
gttgaggagcttcatgattccagggaaaggtgttatgaaaaatccttggactgcgcaaagaagctaaaggatagctttgcgaaggtgggggcatattcctcagaacaaaaatttattcgcggggatcccgaagggtttatccaatggataggtgaagaagccgaagctttcgatgagatccttggcgatcgcggggacttttgtgctttttccaatgcccgagggattatggtaatcttataaaaggctaggtgtgaacatgtcaaggccgcggcccagctagaatccattctttgtactgaaaatactaaggacccttcagttgaggcttctaccctgg

SEQ ID NO: 58383 - DNA, 635 bp, Zea Mays
atgcaatagtcacccaaatagccccagacacatgatacaccatgcaataattcacacatttgtccaaccaaattttgggttccaacccctcgaacttaggaaacgacaacttatgcggtggtgtctgctgaaactctcgatcccccatacacttgaattcaccctcccgaaagcccaaaggcagaggatcatgatacattcattgtggttcaggcggctcctatggtgcagcaccaccacggcctcgggatccaatgatcgactctgataactctaagcgccatctgctccagtcgtaactcagcaacctccttgcccatctgctccagttgttatgccatgcacactcgatctttcgccacattctaagccacagtggtagccaacctctcctggacgagaagctgttgttgtacttcttccacctcaacaaaattctccatcaattgatctaactttaccatcatacactcccatcgattgacttcctccttctcgcggtttgccatctctaggatgaatcgggtttgcaccgacgccttgggaacatgcgttgtggtggacacactattgaggatcagcaaatctgatactagttgtgatacccttggctgccaacaaggtgagctcatcag

SEQ ID NO: 58384 - DNA, 865 bp, Zea Mays
gccacgacaagttcctgtctacccagtggtagtcgaggaaatctctatgaatctcccttgcattcgtgtggagaatggagttattcttgaggacagctcggaggagtttctacctacgcccaccccattggtagaatcactagccttcgcagctggatcgtcatctttgacaccaccagcaccagcagtccaagcccctgctctcggaggcgacgacccatacgactctagtgacgatgatgaagacaacgaagaagaaagagaggaggaggagaacatctacaaggaagccaacggtgaatagcaggaccactttgtggggatatgacctatcaccgaacattatacatcaatgttcgagacagggcacttccctaacctgttgtaggatattctgcatgcgttgggaacctacgtccgacccctgtatgagaccaggcgagtgtacgagccccctcgagcttgctactacatcactcgcattcatgtcagggtgaaggatgcaggtgatagagggttcaggactttattagctcatgagtctctaacaccgctatccacctacactgcttcggtcagcgatgctgctaggcgaactctgtggtccctcagccacacttaccagtagctgctgcataacatgaagtacagacatcttcctctgtgtcttcgtggagaaagccataccagcattgttccaggtggagctgaagaagatcgcctcaacatcctagttggtgtggtggcaggtcttaagatcgacctagacagtgctaccctggacctctctagggcacatttggagctggaggatgcacacgcaaggattgcagccctggaagctcaactagaaggaagggatccc

SEQ ID NO: 58385 - DNA, 853 bp, Zea Mays
catggatgtggtttagccttggcggattggggaattgccattgaattaggaaaggcaaacgagtttgaaatccacggatacagggtttacaaacccgtatccgcgagggtgatgttaaacctatatctacatctgttacctacgacaggtacaatatactacccgtacccgctacctgcaggtgccataaactcacgagcacataactacacatatatacacacatatacatatacatataaaatatacgtacatacatataatacgagtacacatacgagtacatgggttcacgggcacgggtaggactttcatacccatgataaaacatctgtcgggttaagaattaaactcacacccttatccacgggtacaaattcacacctaaatttatattctatcgggttttgcccacgggcaaaatgtatccatccctgtgctgaatggagaattggaggtggtctggttgtggggctgaattgggagaaggccgaaggggtgcgcaggcgtgtggcctaagtgggccttaggggtcggcctgggtccaaacaaggggagtccagattcagtggctccttggctgcatttttttagttggaaaaacagagaacaagtcttaacactttttgtgcatatgagtatacatacatatgtatactgtatgtaacgttgcaaaaaaaaatgttgggtatgtctgggaatacccaggaagcactgtagagctccgcccatgcttgatgttatgccatccgtggtgccactaccatgcacgaagtagtgacaaaaaatatgcatagcgaaacaacaattctaagctggcgaaaatcttggtccagtggctcttaccttcatt

SEQ ID NO: 58386 - DNA, 519 bp, Zea Mays
cgttgcaaccagtgggggaaggacgaggtgaggcaaagcagctgttgcaggacgcgcggtgggcacgaaggcaagcgtccaagtgtggcacgggagggaatcgagggaaccatgagggaggtcgaatgagctcgacggtagatctcaccagctccccacggtgattcgggcggcccatatagggagcaggaaagtccgagcggagggtaagcggaagatcacgagtttgttaagatttccagggtgcttgttatggggcggtcggtggcccccgacttgttgtgcaacagccgatcccggtttggatggaaggtaggggatgagcctaacggtgagggcccataggtaagtgacccagagcgaggggataagcccgacctgcggggtccacatgctagtggcaaccaggcgcgcgagtgacgactctgagtgggccagtgcgggagtggaagagaagagtaattgggccgactagggaattaggcccaaacgtgttttcctttcccttttatctttttc

SEQ ID NO: 58387 - DNA, 656 bp, Zea Mays
atcccaggcatctgcgatggctcctatgcgaacacgtcggtatttgcctggaggaaggcaacgagcgcgagttcctatttctcatccagatcacccgcaatgcgagtggtctgggtggaatccgtagcgagccggatggctttgatggggacaccatccgctctggatggttgtacttttggcgccttagggagcgctttggtaccgaaggttgaggggttcctccctccgtcgtctgggtgagcagtctctgccgccagggcgtgcagcttctctacgaccgcaggtgcggcggcacggtcaccccacacggtgaggaccctagtcggggatggcatcttgaggaccaaatacccgtaatgggcaatggccatgaaccggtacagggtcggcctgccaatgatggcgttaaaggggaggttgacctccgcgacgtcgaacacgatgttctctatgcggaagttctcctcagtcccgaatgtaaccggaagtgcgatgctcccaaggggatacaccggctgtggacccactccggagaatggacgtgagggtcccagatgggaccccaggatttgcagctgcttgaacgcaacatggctgatgacgttgaggcctgccccgtcgtcaatcaacacatggtgcagccgcatgttggc

SEQ ID NO: 58388 - DNA, 426 bp, Zea Mays
gtgaactcatatagcccatacatggtaatgaatgtcgtctttggaatgtctgaaggtcgaatcctgagctggtgataacctgacctcagatctatctttgaaaacacgctgactcctctcagctggtcgaacagatcttctattctaggcaaggggtacttgttcttgattgtgacctcattcagagctcgataattgatgcacatcctcctggtgtcatctttcttctccacgaacaggacaggggcagcccaaggcgaggtgcttggcctaatgtaacctttctctgacagctcatcgatctgcttcttgagttaaaccaactctggtccagataccctgcatactcttttagaaatggaggcggtgccaggaagaagctctatggcaaactcaactttccactcaagtggcatacctggtaaa

SEQ ID NO: 58389 - DNA, 714 bp, Zea Mays
ggagctaacacgttgcaaccgatgattggtaccgatcggttcttcagcaaatgagtcagtaccgacttattcgactccaacatatcgataccaactagatcaatcagtcggtaggttcatcgatcggtggatctaagcgaaaggtgatgaggctagatcgatgataccaactacccttgttgtcatgtaaacgtttggtatttgttgagcacgaaattcggcacctagatggctggatggtttggccttgtgccccagatggttcgtgccatggatagttcgtaggagtagtcaggacggtatgtgattagattagtttaggttggagtccttatcacgtgtgtggttatcctaacaaactcgagtgaagcagttggatctcacctaggaacgggtccagaccacccctatacatatgaaggggctcaaccgattgagaacacacacaatccattcgaaccaatctattgacattatcttgccttaggagtagacgcaacataggtctagttatagttttgcaatcctaatcttcacctctctttcactctatgtcatctagaggcgctttcgttggcatgttactatctgtcctcctcgatagggtatctcccgagaggcaatatctaggtttaacgtgaagccctctctagacactcctcttcctgcatgtgaactgtccaccccatagagaagagtgtaattatctgctcg

SEQ ID NO: 58390 - DNA, 530 bp, Zea Mays
cagcaccgaagcctccacagtagttggtatgtcagaagcgacaagacaagacgtcataccgaatggacgaatccatgcgcacggaaggacaacgtagggcccacgatggcaggagaaaactatgttgtatccaccgagccctaaggcagaatcatgggacccgccacacatcatcgcaaggacgttagccatgaacccgccactagaatgggagtgatgagcggcgccataccggaagcactactttgcacaaccaggggaggggggcccaccacgacaaccaaaggactctctctttctaagagagacaacaatgtaaggcatgtcctttgagatataaaagggaaggtccctcttcctttcgcacacaagcacaccagttgtaagcaatactacgatcaacactacactggagtagggtgcgaacccgaacctgtataaaccatgtgtcccaagttcattgttcgagtcctagagaatcaccattcagagcaagtctgcactagcaccccttccaaacacaaatctat

SEQ ID NO: 58391 - DNA, 486 bp, Zea Mays
aggaaccatgcaaacatcctactaatagctaaactttagctagctgaggtagaatcaaacatggccttatatatgtttctgtgaacgaaatcatcacacatttggatttggaaatcaaccgcatgctagcttcatccgtttttttatatataaagaagtaataaccgcacacacacagcacatgcaaagagtactgtttcctccgagaacaaatatgagaggatcacatttttgttggaacctcgattacactatgtcgactagcgaaattggctcttcaacatgtttgaattcatagttagtatggtatccgttatcttcttagtgaggtatgctagtgtagaaatccttgttctattctccatatttgaatttatgattatatagtatgatgtttgttatctagttagcaaaaagatcacacgatacacatgtatgatgccacacgcatgctgttatctatttctgaattaaattggtactgaa

SEQ ID NO: 58392 - DNA, 471 bp, Zea Mays
ccctaggaggcctagggcccgttccctctctcgctcagcttgtaccccctactgcaagcacccccggtgcaagataatataagcctcatccctccacttgtgttccatcttgcattaacccatctggacaggggcacgcggcacaaaattcactagtcggtccggttgagggtcccccgggtccgaaacaccgacatgtagattgtagcggaaaacgtgaaccagaacagcgtaaatggctatgaattttagcttaaaccgtcgatttgtttcgtaatgacctatgggactcgaactacatcataaaaatcacgcgcctggtcgtgcgcgagttctggctcgagtggatttaagtgtaaaacatggactaaaacattataaatgagtatgaattttagtgtaaatcatcaatcagtttcgtagcagcgaatacggcccaatttatggcatgaaaatcgcatacgtttagcg

SEQ ID NO: 58393 - DNA, 649 bp, Zea Mays
attttatttttctgtggctttctattgggcttttctttctccctccccccgaaccgaatggactggaccacattgtggtagtagctgtttccggcaacaaaacggtgcatttgcactgtgtcctgcagatgggaccggctcacagtctatgctactgccgctcgtatttcgagagcgatgaaacccccatcttgagcctagtgctcgtgtgtgccagcactagtagcggattattctgcacttgttgtcacgatccacgccttaataacattcctgacaccacggagcgagctatcggccaaccacacgaacatgcgcctacgccttttcaatagaaaaatccccatccacccccatggaaagcaccatccgaagccactgtctcgtgcgtgccccgagctcgttttgctcggcttttttttttaccggccgcgccccatcaccatgccatggcggctgccactagtggagctccagcacaatccccgcttctccgacgcctgccacctttggtaaaaacaggaggattcaatttcaatggctgtcgctgccatgtgttttcacaggccctgacctaggctctgagagaggagagagagagagaggaatttaccactcggccgcccccgttcctgtgtcgcccgcgccg

SEQ ID NO: 58394 - DNA, 313 bp, Zea Mays
tgttaaccctaggcaatttcctaatatttttagaactacagagctccaaagtcagccttcttcaactgttttcagacttagccacatgagaggaattgagtggctttttgcaaataagtcccttccacatcttttgacttggaaatcctcaaatgtgtgaaccatgtgctttggggtgccctaataccatgatttttgtacttgggtccgaaagtgggcaacatttgcatataaccccctagggtttctatttggggttttcagtggtcctttttagggtttttggcacttctagagtttggatgctatcaat

SEQ ID NO: 58395 - DNA, 857 bp, Zea Mays
agagggaggggtggctagggtatggaggggtgaggggcctccaatgcccttgatgtaaaatcaatggcccacaacccgttctcccatccgagctcccggtcccagcgaatgtataccaaaatgctacccttcaactgagacattcacctacatggactccaaacctccaatggcatagagcacgaaagaagagagaaaattatttaacttcttttcataaaattgggtatcacactctgcccccccttaaaaataattcgacctcgaattccaccacttctaacaaaacgacacatgaaagatcagctaagacaaaaactcaccaataacgaaaagttcaggggtatttcttccgcatttgctcctcaagctcctaggattctaagatacgcagtagacgacactctagagtcaggtcttgctatatggggatcgactctagctcgatttgatgatctggattccgcaaatactttctcaacatagagacacgaaatacatggtgcactcctatcatagattccggcaattgcaaaagataagccaagctgccaactcggctcagatagtagacggtccaatgtacctcggacaaagctttcctaacactaaatcatcattgacatatgcaagtacttcaacgaatatatatgaatgcaatgcatatggtgttcctatagcctaaaccaaaatcccatgaaaatatccctaaatagaaaattgacaatcaacgacacaaatgttcattttgtttcaacctctctcactataaaagcaatgataacaaagaaatattgtaaaatcatctaaactttacgatctacaacttttgtattcaaaggataaacaaattttac

SEQ ID NO: 58396 - DNA, 542 bp, Zea Mays
gctcactcgcctcgtctcgtacagggggcgggcgtaggctcctagctcgtgcagcacctcctgcagcaggttggggaagtgccccgtttcgaacattgatgtgtaatgttcgacaactggaccaatccccatgaagtggtcctgttgggcgtagtcagcttcctggttgacgtgctcgtcttctccatcgtcttcgtcgtcgtcatcctcgtcatcgccgtctccggagtcgtcggggtcgtcgcctccaggtgcaggtgcttggaaggctggtgcagacagtgctgacgtcgatgacccagctgcgaaggctagggactcggccaacggggtgggggtcggtagctgctcctccgagctgtcctccaggttgattacattctccactcggacgggagggagattcgctggagcttcctcgattaccactgggtagaccgggatctgccggggctgaggagcgtagctggtgttgacgcgggtagtttggagggtgcgaaccatctacaagagaagtgtcaactcagttgaatttcaaagag

SEQ ID NO: 58397 - DNA, 332 bp, Zea Mays
attcaggagttacgtttcttgaatctggtgttacctttgtgtatatatgtcatgactaacatgatttctggtattactgtgaaactatttttattattccttgcaagttatggctgtatgttgtatgtactggagttctgctccagtaaacagttttagaagtaacccgctgaaaaatttacttcagctatttttatgtcaagttatgcttcaagaaaattttttgtgtaatgtcactggccgcaaaattcccatgggaatcattccattgttcttttgtatcactgccattcattggctgctccggtgtgctacattaatcaatatagctg

SEQ ID NO: 58398 - DNA, 1289 bp, Zea Mays
cttgggataccaaaaactctaattggaaccctggaaaaccctaaatctaaaccctaggggtctatgtgcaaaaacagtgcatatttggactaaagtgtaaaaaaactacaatgttaaagcatataaagttattggttcacaaatgtgtgaacttgtaagccaaatcttggattttggacttaattgcaaaatggacctcatttgagttctatactaagtctgaatttcagggtataagctcaattttcaagctttataactttcaaattatagggtttttgccttaggtcaccacatcaaacttgtagacctaacaaaggagaacaactttgcttaagagtgtaagcatagttgttaagaagaaattggagataatcaagcccaaagttggagtgtcagactagttaaagtctgaaatcagactaacagtgaaatgtcatgaacttcaagctcaatttcaagcaagatccattaactttttgtgggagcacaatatagcaaagttatagttggtttatagcactacaatattactgcagagatctggatgtgttgccacagaaatttggaagaaatctggccctaaactatggctgtcaggcttactgatgaagcactcgccatggtacagtgtcgtgtatggatcagaccaccagcgcagtataccttgccgccgatggtctctacgccgtgatttacgctgccgtcatgattcgtgctcactggtgggtggataaccacggcaaagaaaagatctcgcgacggggattggataggatcgcgagtgggaatttatcgccgtgattatagccgctgcgacgtggccggactaccggagtcgtcgtggaagcaccggtgaccttggttgtgccacgaccgaagcttgttactgcgtgttagcaagcgtggcacccttaggagtattctccttgcgccgttacaccggcgactgccacggttacagccaccgtgttcttctctgtctccggccgcccgtactgcccgatgaaatcacgcgccaccgcctaagccctctataaattgatggctgaacctgctgcgctaggtcattgcaaagccatagcagccactcccgtccccgattagccaccccagccggagaatcgttgtttgcccccaaatcgatccgccgcaccgcaagaaccgagctcgtcgtggccagcaccgttcaggtcagttcatgccgccttctccctcgtttgagtgctctcatatacccatgatgcccattgacccactcaattgcactgggtagccttagatcaccg

SEQ ID NO: 58399 - DNA, 512 bp, Zea Mays
cttgactacccaaactctggcacgtagctacgcatcggatccggtccaacgccacgactgcttccaacggttgctgtcatgccctgctgccaaccaccaacactcatcgtctccagcgagcgagctgcactatgcactgcactgcatgggaaaccatataactgcaccccagcaatccgtccatggcacgcacgtactaggtcagccctagctagctgcctttctgactctttcaaatggtccagtgctatggtatgcatggtacggtgtgtggtgcatgaatggtccagtgcattacccgcattaacttgctgatgttctatgggtcggaattcgatcgagagagaaaaagaaacgtactgaaaggtcattaggccctttttctctacttttgaagaatctttatctaaaatttggcacacgtgcaatcaaacagtactactacttcaaagtctgttttaatttgtctaaaaagaacgcagtggttttaaggttcggctgtggtgcctgcc

SEQ ID NO: 58400 - DNA, 759 bp, Zea Mays
gtgggtgtatatgtatttggaaccaacaactatggttagaatatctctattatgcttgagtataaagtataaaacataaatacatgtatgttctattagttaggtgggtgtgaatatggatttagagccaacaatcatggatcaaatcttcatttgtccataactttaacttttttaccatttaaacatgggcagaagaggtgaacaacaggtaagaggtgatgcacaaagaaagaaagtcctgatttatattcgataaaataacactagtacaatatttgtgtgtcgcgaaggcacataaatattcgataaaataatagcattgtatgaaaacaaatagtgtatatattatcatcgacatcaatatcttacaagctctttgccaataacaaatataaactttccagagcgccaacacatttaatatgcatgtattattatttaatttaataaaaaatatgtcatatccctattaaatttaacataaaagcacaaactttctgtgtcctatgtcacttgtacttagatctatttttctctctcatatcttgcgtaagataagataagacttacctctacatacgcaatcaaccactcccaacttctcatctcttttccgtctctgcctctctctcttttccttatctgtgtctcccttatcacccagattctttcacaccaccaaagattggaggacatcgagcaggccatcctgctagcttccgaatcaccagtcgtcgtcgacgcaccccacgtgtg

SEQ ID NO: 58401 - DNA, 540 bp, Zea Mays
ggcgaacacgactctgaatttccctgggtagtcaaaatgagacatgaatacatgattagtatagaaaacataagtattcacattctaaattttcatagcaatgccaaactaagatgacacaactgctatacaaagatgacactttatttatttgactatattacatttaaaaagtactcctatatcagagctacattaagacgcgcataactaaaatccgcctacaagctatgttatcaacacaaagccaagtttatattatatgcagaataatctaaatggcaaggatgaattagcagaattatttaggaaaaaagtggttggtcatatataacatcacaaggccacccaaaccacagggtcacttttgggtcaaacaattagcaaagaccgaagagagtgggagtcatatcatgaaacaaagaaaaatggtgaaatggtttggtgcaaaatataagtatcataggactgaaacatactgcattagctttaaatttctaccatgatataccatttggagtacacttgaacatagcaaat

SEQ ID NO: 58402 - DNA, 295 bp, Zea Mays
gaaaacaaaaggttcgtgctttatagttgtagtaaattaatggaggaaattaatggaggcatggagcgtccactgtcctaatggacatgatttggcttagctttatccttcaggtggtggtttcggcacactacgttccactcataagcatatggatatgcattgatcctacctgcaacacgtatgcagaagagggtctgatgagctcgctagttcctctacacgtacctaggccaaagaaagtgtaaaagcctacatacaggggccttcgttcgtactagtagctaccctggca

SEQ ID NO: 58403 - DNA, 673 bp, Zea Mays
gcggcttcgaccgtggctgctgatgatgattcgtttggctctgtgtctaagtgttttgagtctgatgattctgggagttcgattgcatggacagaggagttttcagatgaggatttggattattttgcggcattggatgtggctgcagcagagccttcgccgcgcgcggagggtccgaggaactcccgggacgaatctctagatcgtcagtgcgagtactgggtataggcggcagagggcggtggtgaagcggagagtgagtgaattgtcgcgaagtggtaggcgttatcgtagcgaggtggagagaggtcgtcttcgcgtggatgggactggtaagcgagaattgttgtcctcgccgattggggtgagtgtaggtgagggggagctgcgaaatctgtttgagggtgaggaactgatgataatgctgttcaactacagggagatgggtatcatcccgaaggttgagccagtgtaatatgtgatgccctcgttgtgtgtatgtaaccataattttgtgtgatgaagctgtgcgctttcgttgatcaggccgctcccgtaggcgacttctgtacggagtcttttggaaaagactttgattttgcgtacctattattccggctgcacccgtaggcgacttttgcgcggagacttttgaaaaagacttcgattttgc

SEQ ID NO: 58404 - DNA, 533 bp, Zea Mays
cccattgggtgtgtcgcccagaattttcaagattttctaaaggagcgatatccacaaaatatacgcaatgaatgtaccgcgacaaaaagaggagatcggttgaaacaggaggaaacacaatagtggttactgaagcgcaagtccaatcaacagaagcattgaagcacagagcagggtgatgtctagccgaaggccatctgtctcaactagccagatgtccaacctgtcgccgatcaaattgatttcagacctaacaaggcatgaacagatggcaacgcttggttattcataaaatgttgatttcaaatgcataaaatgaagacctttgaatggattagttctaaaatccactcaaagctcgggggctacacccaatagatctacagtaccttgaagccaaaatcctgatttcaaaagcataaaatgaagacatttgaatggattatttttaaaatccactcaaagctcaggggctacacccactacagtaccttgaagccaaaatgctgatttcaaaagcataaaatgaagac

SEQ ID NO: 58405 - DNA, 1041 bp, Zea Mays
tatggggtgagcatttccgaccccaggcgactcgagaacagcctttaattttggtttgtacactaagagaacgttctacccatgcgcacggcagaaaccgtgacgtcgagcccgcgttcccattcactcacgcccgaattggtcaaatggctgctacgatgagcttcatgggtatacagagctgctaaaacaacactcgagaggtgtagagccctaacagagtggtccggccacggagcgcggagaacttgtgcttcccagtgacagaaaaaggggaaaatggcaccgcgacaactctgggtggaattgggaggtgagattggggctacacggccgtaaggaactatagtttaaccgtgcacactcaatttgggaagaggtggcagaggcagtgtgaattttgggcttcaatcaactcactggtggagatgtgaatacctcgtcgtggttcatagcgctatttatagccacggcggtccggctaacgatcagcgaccacggaaggctttgcttacgcatggtaaccacgtatagaagaggtacagtaagggaggagcaaggcatgggtgacaccgcggcggaaagcactgagtgacggcgaccgccgatgaatatctccggccacgcacgactgagctcgcgggatgatgccacgtccaaagttaccctcccccggatcgacccccccactggatcactcgagctcatctgattcaacagtgccatagatcttttccatgtgttcttcagatatttcagtgcactggatcttcagagtttgtctgaaccgacccccttccatccactcaatctcttgattcttgttaaggacagagcaaacttcattaatagagtttgttcacctatcaaccatcttcaaacttactataggatatttgggtcaaaatcgagtgaatccaaagatatggcgcgtccaaattggctccattccactgtgaccatttctgttttcaaattcagtttcagttattcaacaccactctgacagagtgactttgggctgccatttctttaattttt

SEQ ID NO: 58406 - DNA, 1111 bp, Zea Mays
gtagtaacggttggaatggtcggccatgcccgacgtagtttttgaaatccctacagttccgtagggtgtgccgcatgtccttgtggtacgggcactgggagtcgaggatctcatctagtgttcttacccttccgcgcggtgcgctgcgggctcgagctacaggtggcccgacggtgtgtacctcctcccatagcctcttctcctagcgtttgtttggttgctggttcatgtcccttcgcgatgctagtggtataggcttagcccctccaatgaggtcttgagcccgctcatctgcggtgatgtagacgtcttcctccttgaatagttgtttagaggtggcgggtgctttttgaagtatggcttgaacgaaaactggatcgttggatccctgatagaagtcttcgatcacagctacctcagcaacctcggggatacagtttctcattgtttgaaatcttctgaggaatgaacaaagagtttcatcattctatcgcttgatggatttgagatcccacggctgccccggtttatcggagaggggccgtaagtttgcaataaaccggtggctgaaatctccccaatcgttgatgtagtgtcgaggcagataccggagccattgtagcgcatcctgcactagaacgatgggtaggtacgttgtcatgacatcctccattgccccagcagaccgagcagcggttgtgtagatggtcagccaaccccccaggtcctgcttgggtttctattttttgacgttaaagactttgaaattgggggtcattggatgtcccggaggtgaggggtgagtgcggagaccccgcacgtatcctcctgtcgatgatcatgtcgtcaatcctagggaggggagcgagtattaggtcgtctcgatcgtccccagactggactgttagtagaggctgctgctgactcgatcctggttgtgcggctgtgtgctggtacaccatgatctctatcgtattcctctcggcgccttatttcattttcgtgtcgacgatcgcgcaaagcattgatgttgttccgcgcgtctcgtcggctgttgatggcatgacgcagatcgttcagtggatgggcgagaagtagaagatgattggtc

SEQ ID NO: 58407 - DNA, 731 bp, Zea Mays
tttggctagtgatggggtaatttggagagctagatggcttggctagttagatggctagtatgttggaatatccaaattttaatttaacgagtgatttggctagtctcctgaagatgctcttagtgagttatgctttaatgtgcctaggccgtgtcgtgttcgtccaatccggatgtacatgcatgcataggatatcctccctggtcgtgttagtactgcatcagcaagcaacaacatgccacgatcaagctcagctgctgctgctgccgccattcagatgatgaccaacatgatggcaggagcggatctaaacaaaacatccattggtgtcatctccattaaattataaaatcatcaattcatttatgtgctaacaaacatacattctaatggagattactaaaattcattggtgtcacaggacaccacaaaaagggcctggatccgcccctgcatgatggtagagtggtagaacttttggttgggtggtgaactggtgatgtggttggcttcttatatttggcctaaaaagaagcatttgtgctggttgcaattatggtaccacatgccttcaccgttcataactaactcttttctgaaacttgtggttaagtgacaatatacttgttgccacatgaattatttggtcacttgtaatgcaacaagttttgctctgaggtttaagagaatttagattatgatatgtgtaacttagtagtgttggactttca

SEQ ID NO: 58408 - DNA, 441 bp, Zea Mays
ctgaacatacctttatggctttgtgcctttgtctaaggaggtagacgacgcttgtgcagctatggacgaatcggccggtgtgtaagcaactttatcagttttgctttaaactgtgattttagctgtttgaggaggtagatgatgcttctgctttaaactccaaatgacgtccgtctccagaacagcatctcgtccccgtggacggttctagctccagcacggcacatcatctcagctcatcctccaaactactggtggctgctatatctggggcccatggagcacccacgggtggtcgaaaaactcgccccgaacccgccgttatttgggactcctaacccaccgacccatgtgtaaaattcaaacctgtcctgccccgcttctgccggattcaaaacccacggagatccgccccactgccatccctggtagagagactaa

SEQ ID NO: 58409 - DNA, 696 bp, Zea Mays
ggaaaccccggggcccatgggcgcacgtggcttcactggggtagaacgctaggttttaccatcgcccgatgactcctttatgaggaagccaccactggtcgccccctccttggcctacaaaaagaggaggtcggtccccatatgaaagtgatgcgaagacggatacccaagcgcaaagacgatggaccgacaggaggaaggaggacgcaccgatgatgacagagaggccagagccccaccgccaagccaagacttagttagaactccagtatgtagtgcttagctccacctcctccacaacaagatacttggtagaatctccattgtctcccgtccgcttgtaacccctactaagagcattaatcatcataggtgttggtagtgcattccaccgaagactggatgtagggacgttctgcccgaactagtataaatcttgcgcccactgtgtacaccgtccattgcccagaacacacacacaaagttacttgtcgaagctaggttcgaaacaccgacacttcggcattattttcagctttataacatcatcgtatcttcatcatagcctttgaaagatatcataaaaaatagagaagctactgagtaaattagataatgggccactgaactcaatgaatttgtcattgatttcgtccatagatcatctatccaatctcaagtattagcagatttcat

SEQ ID NO: 58410 - DNA, 463 bp, Zea Mays
cagattggggaattgatttccatgatgcggctggctacatcaagcactacttggtgtctggtcatccaattagctcccagaataatatccacattttccaaacccaaaacaagaagggtggttttgataatgtggctccccagttgaataggcacactttcatttaatttattagttgcaattttacccccaggtgtggctatcatgaatgacccttttgtgtgatagaaaggcagttgacatttagcactaaacttttggctaatgaaactatgagatgcaccagaatcaaacagaattaaagcaggttgattataaactgaaaagatacaagtcatgatgggggttccctcaggtaactcctcgagagtagtgaagttgagcttcccttgcatgacttgtaccttctgctttcttcccttgtcttgatttgctgctggcatctgcctctgctgatttcttg

SEQ ID NO: 58411 - DNA, 785 bp, Zea Mays
agacatcaaataaatcatgcatcaaattttgactaacaaactaattctaataatatgcatcaaagaaagaagaaaaataccttcatggagattgtcaaggtggttatggtcgaggagacgtgggccgacccgtagttagactggagagagagaccggagactagagtcaaatgggcctacaattagatggaaacacgactttaggtttcataaaaaatgcaacagtcatcatcagttgaagaacttccagtcatacatggtgttaatgcacccaatatcatagtcgaagctttgcaaaggggacgtgttttgttattcctactgtaatttatctgtgatccctaggtttaaatggtacaagtcccatagatagatcttctgtacaacatgtgggttctcaacaacgggaaatacaactcaaggatactgtatggtgtttacgtggaacggcagaagaacaaacactaaggtatgcagcacaaatttcagatcaatcgaaaagtgatacaagacaacactacttagatatgtagcctaatatgctcttgcaagaaaaataaaacatactaaatacacctcgatgtttacaccactacagttgactgcactaaagcttccagcaatcaacatcagctatgttttacaggcttgcatagacccatggatggatggatgcagtgcaaggacgaccctagctcactacgaatattccgcccactgattactactatatatacaacacatgcaaattaaaataaagcaaatcttcgatagagtctagatat

SEQ ID NO: 58412 - DNA, 519 bp, Zea Mays
aaacaatgttactaataagaatgtgacgttgttacagagttgacgcgaccgaaacaagttgaaacaggtttacgacacatgatttattgaataaataacaattcatgaattataaacgatgcaacatacgagaactgctaaacccctatcacgattaaactaggcgaatgtggaatcaaaatatttgtgttgatattaatcacattaacctgcatttttaaaagctcaacttataaactaagttctattttagctaaccatcgaacaaacaaataattaattagtcaattgaaacatgagttacgaccaaattatatgtttaatgtgtacacgacttaattataaaactaacatgactggaacgatacaaaatggatttcttacaacacaagaggtattatgatcgtatatcgtgaattaacggtgacgaacgacgaagaggctgcggggctgttccgggtgcgcgacgcggacgcacgttcgacgacggcgtgccgcgagaacgacacgataatgcac

SEQ ID NO: 58413 - DNA, 645 bp, Zea Mays
tacatagtggtgttgtacttaccaaagataatttactcaagcgtaattggaagggaaatgcaaaatgttctttttgtacccagaatgagacaattgaccatctttttttttccactgccaacttgctaaatttatttggcgtttagttcgaatcagatgtggtgttcgtccaccaaacaatattagacatatctttgattcttggttaactggtctggttaatagaaagagaagtcactttattctagtagcttcggctatatgttgggcaatctagttgagcaggaatgatgcagtgtttgataacgctccaataaaatcttctttgcaggtggtttttcgggctacgcattggcttcacttctgggctcaactacaacttagacatgatgatcaagaactaataatcaaggcatgtcgtagattggaggagttggtgatgaagatttttagacatcatggatggggatatgcatttagactatctttaatcttgtctcaccgcactatgttttgcttttctctgagttttcagatagtgctgttcctatctgagtctgcaataattcggctatagtctctttgagacaaaggccgggaactttgaattcccattatctaaaaaattagaattagggaccgatt

SEQ ID NO: 58414 - DNA, 491 bp, Zea Mays
ttaggattaagggttagtgtttagtgtttggattagggttagggttaagggttagggtttagggtaaagggttatggtttagtgttatggatatggttagggttaagtgttaggggttaaggttaagggttagtgtttagtgtttggattagagttaggattaagggttatggttagggttaggctttagggttagggtttagggtgttggaacttgctaactcgtggtcagccaatttcaaacggtgggagaatagaaagcggtttgatgccaatagacgtaaggtaatagggcaactgtgtttttctccgtcccccataatggtacagtatgggggtatttataggtaaccgagggtcggtcctgccttgctaaggacaattggggggttatggcgggtaattatagcgtatcaattacagacatgggccaaccctctatcagccccgtcagcgtggcggcctatggtcgggaccctgtgacatgggcc

SEQ ID NO: 58415 - DNA, 361 bp, Zea Mays
ataccttgctgcgttaggccttcgactggcacacttggtccatcgagtaccattgtgtagtctactagcaacatcgtgggttatacccggaccagtgggaggctacttgcttggtgcgccgtccagacgatgatcttcggggtgcagaggccttctcacagcattattctattactaagagggttactgccgaggtagccatgcaagatgcagcacgatgggcactttttcagtattgctcgttgttcagcggggtagctgatggcctcgacctgaagtactatcctcgccgttcgaccggcagtgctggaggtgtgattgtctcgccagtgggtgagggcaaacccaggctaaacaacat

SEQ ID NO: 58416 - DNA, 716 bp, Zea Mays
ttttcgatagactgatttaggcttgttaaatttgcaggtggatattgtggttctggaagggtacaacatcgcggagctactggtgagatatgaggcggagtccggcgtccgtagcctcgtgctcggatccacctccctcttatactcattgtttttaacctgtacaacttaagtgcctcaatcaagaaatggtaaaaatttggccatttgttaatgaggtgctaacttttacaaggtcttttagtatttcacacttctcattttagccccgctctcttagattactcttgtgtgtggttggttatcaacagccaaagtaatacgagggtcaaatgtggtgtttgtaggccgcataggagctaatagagaaacactacaacaagctgattgtgatattcaggttaattccatttctttttctttccattctccttgaaccattgggtttgtgcactagtcaatggcatggcctttaagacagttatccatgcccctgaaagatgtttaatagtcaacagtaaagcatctgacaacaaacaagaaacctcaccaaataacttagcaccttacttcttaagaataggtataactaacaccctttggcatgtacagtaaaatccaggagatggagaagcaaaatatgatacagatacaggaatggtatatgaactgaccaagtctaggaagccatataagagcaaaggaagacattccca

SEQ ID NO: 58417 - DNA, 429 bp, Zea Mays
ggacgggggagattagatcagtacttgaggcatcccttaggccgttgattgacggatccatgggtaagattaaaaccagggtagctatgggctcagactattctgggccgatgagattgaatcggacggcctaaaactctctgtaccccttcaccgaggcaaattcacaaaagagtccctcggtttttccaaaactaacccgccgtccaccgcgggttaaagctgtatctgggaaaatttatatcttggcccctgacctttctagaatttgacacccggcccagtgaaccatgaaaatagttaaaataatgtagtaaatactttttagtacataaataaacctagaaactcaataaattcatagaaaattcatattaaatcctttttggtccattccggtggcattaattttgtattaacattgtctac

SEQ ID NO: 58418 - DNA, 541 bp, Zea Mays
cccgccctcctccctcacgatcgccctctctctggcaggcgggcccccgcctgtcagctctctctctctcgcccgtgatcagctatcgacgcgatcaccgccagccaccactccgccacatcccctcgccattactcgcccaccagctgaattggcaccttgtgcctgcctcgagccatcccgtcaccccgtctgcccgagccatcccgtcgccaccactatgcaccatcatcgccgatgcggcaagcgtcgccggtgctcgccacctctcctctcccccctctcaccagtcggctataaaatggaccgcccaagctccagcttccttcacaccagcttcggccacctctcttcccttcccgagctcaatcgagccagcacgccgccctcttcctccgctccggtgagccctccatttcttctctggtagcctagagttcaattggtttggctcgcaaggttgaccgctccatcacgaacacggcacaccctttcccttcacctattacactagtcggcatcaccggcgacctcaccgccg

SEQ ID NO: 58419 - DNA, 442 bp, Zea Mays
gtgtctgtgtctgccttacttcccgttacacagggctggctgatgctaattttccttatttatgacctgtttaactgaaggtgtgaatcattctcgacatacccgcgcacctacgacctccttcatgcctggctcctgttttctgagatagagaagcagggatgtagcctggaggatcttctgatcaagatggaccgcatcctaaggccttatggttacgccatcatcagagacaaagttgatgtcggtacctacatcaagaaacttttaccagcgctaaggtgggacgattggacgtttgagatgaggcctaagaaagatgcgctcacgacaggtgacgaaacagtcttgatcgtgaggaaaaagctctggaatcactcggtgcaagatctgtcgtagcagccgtttctcttgttttgatcctaactgtagctaactctac

SEQ ID NO: 58420 - DNA, 544 bp, Zea Mays
gtagacctgagcaaagtgtacagactagtgggagatgtctaaaaatcccttaaataaaactcatgctttaaaggagtaaagataaataaagcttcaagtttggacaaaaactgatgcagaatgcacgagtttggacataaactgatgcagaatgcatgccgcaacgcaacggaaatacctactatcattgtctacctacactagaaacctgatgaacgaaatgcaactcagatattaacgaaatgaaatgcaaatgcctcactgtacttttcatgaaattctaccatatttttcgcgaatttgttagctagtgatgctgagtcaatggcacaccagcactaatgatggaagatgatgacacttgcttgtcgtcattgacttgggctgggcaagtttagatgttgggtaggtttaagtccatatgcgcttggattcatccaaactaaacaaaccacgtgcaactgaaactagaaattaaggatcaaataggcgaccagagggggtgaatgggagcatgtataatttttgcgcttacacaactttg

SEQ ID NO: 58421 - DNA, 325 bp, Zea Mays
ttacagaagaagaaggagccctcggcagcgaagaagtctgctgggccgaaaaaacgaaggattattactgtgactgaagctattgaagaaacaccaccgccagcttcggcgtcatgtcgagagcgctacagctaccgaagctgcacctactgaagctgcaactgccgaagctgcaacggccgaagatgcaaatctagaaagcacactctctaatattgataaaatacttctggatatggtcgcagaagaagctgctacagccgccgaagagaccatggccacagcgcctgggaaagagaaggagatagccgaagatacttcagaa

SEQ ID NO: 58422 - DNA, 426 bp, Zea Mays
ctctatatgttcaataggcatggatgatcaattggtggacatatttacaatgcctttggatgaatcaaggttttgcaaactcatgagtgaaatgaatgtgatagatttctccaatgtggcttgaacatgagagcatatgtagcataacacgaatttggggcctagtgcatgccatttggtcattttattgcttatttttcattctcatatggttcaaatgcttttgtatgaaaagcttgtacacttatgtaaaatatatgtgcttgcatgcattctaacaattgttgcaaccaaaatgtccataaatgagcaatgatccctgttggaatttcgaagtcggaaaatggggagagaaacagaatatggttgttaggtcctagaccgtccggtccccaaccgaggaccgtcaagcccagcaaaatttgg

SEQ ID NO: 58423 - DNA, 328 bp, Zea Mays
cccatagccactcgctctttgagacggagggagtagtttataaatcatagcaaatagcatccactacctaggataaagagattttccaaataaagatcaaattatttggttcattttagtagcccatgtcggctctgtcaactctggcctccgcatagaagtctatattgttttacttccaactagcccggcgccgacgcctcctcaactgcctcctacaaaagcgtttacagtgtaacagattgatcgatcgcccccagcacggcggtctcgccatcctcgcttctgccgtctcctcacaccggcaccgcttgcgcctcctctaagc

SEQ ID NO: 58424 - DNA, 284 bp, Zea Mays
cttggagcaattaaaacaaagtttatcatccttgttaataatcaagtcatttttaatatagggacatgacctaatagagtgccccttttcaaagcattcactacacttcttacttctcttagtgtgaagtgtgacttgatttttaccttggatgttaccttttatggaggcgtggttgaggcttttggaagaggttttggttctcttcttttgttccctcctcttggcaattctcaagtccttgacattttcttcaagggatttagtacatgccacagttgttc

SEQ ID NO: 58425 - DNA, 359 bp, Zea Mays
atattctagattggtatgcatattgacaaaagaatctatttctaataaaaaatctttttgaaacccaactatttacctcatcctagtctccgagctgcgtatatatattcatgttgatgtttggattccttaatttgagcaattgtaaattttctccctacacaacaagaattaggtaagcatatcaatgaagtgaactaataattcacaaaagaaatttatttctaataaaaaagctttccaaaacccaactatttaccttttaggttcaagtctggattctcaaaatttgagagagcaagtccaactccaaccctctcagctttaggcagctcctctaactaaatccttggtccctc

SEQ ID NO: 58426 - DNA, 364 bp, Zea Mays
cttccagcatggggaggaagaagacaggcttggggcaaagggcagcgcgacagcaaacagggctaggcgaagagcggcacagcgagaatagtgcagggcagcaaggcggggtgtggtgccggtagggggcgatgtagtgaacttgtgatggatgcggtgggtgtcggcgcggggagggaaagaacacagtgtggtgtgagtagtgatgggtattgggccgggccggccagatctaagcccatcatgctttgggtcaattgagctcgaatcgagaaggcctaaaaaataggtcatgctatattagtccaaagattagaaacaatgacatagcctggctctaaagcatgatgtgtctttgtcaaac

SEQ ID NO: 58427 - DNA, 410 bp, Zea Mays
ttcttctgatgctgctcctgctggggcactggtagtggcgcccctcccagaggctgatacaactttggatactcagaaacctgccagtactcgcccgaggcgcccttgccgagccaatcatcctgatccttctgctgatgagcagaaaaagaaaagaagacgcctccggcgagtatccagtttggatcgggacgctggtacttcggttcctgctgctgaagaaatgcctgtgactgaatttactgatgctgaccccaatgggtgtacccaatccgctgctgatcccaatgtgggtgctccatctgttgctgatcccaatgggggtgctgcttgtgttgccaatgtggacgaggagaaggaggaagatgaagttcctttgactcggaaaaacagtcggcagttcatcgcaa

SEQ ID NO: 58428 - DNA, 447 bp, Zea Mays
atgcttttgtctgggcttggtatttgtttagagcttgtagggcgaagactcggtctccatcgatgagatcctttgaagtgggctcgtccacgtcggggactgctgaaggaactgttcgcggggacccatgttttatttcttgaggggtcatggcctccgatccgtatagaaggcggaaaggagtgaacccggtcgccctgcattcagtcgtgtttagtgcccagaccgcctcgggtaacaaatcggcccacttgcccttttttcgtcgaggagcatctttttgacagctgtgaagatttttccattggcgcgttccacaactccgttggactgcgggtggtagactgaggcgaaggcaagcttggtgccgatggagaagcaaaagtccttgaagtcttggctgtcaaactgtttgtcgttgtcgactgttagttcggacggtactcc

SEQ ID NO: 58429 - DNA, 380 bp, Zea Mays
ctagaatgtaaattctagagaccctcaagtaatatccgtgcgctatggttggatggcgggttgattagtaaagttcccgaggactcttcagagaaaaggccacgaagaatgggtatgcaacaggaactattcgattctaaatcgagggctcagatcgcatcggtcggaggggtaagttacacctaatctagaccgctcatctatcaaacgatggttccgatttcataacaccaggatccaatctacgcccttcatcggctgattgacggcgcacgatcaatcttgaaggggtatgcctaggatccgatctcagtcgcacactccacatcctatggctcacacgtcctcacctgcgcaccgatgcaagcacggcggagcac

SEQ ID NO: 58430 - DNA, 681 bp, Zea Mays
tcaaatgttcgtgtcccctccgaggaaaaacgtgttgagcaccattttgcatcctgcctcgaacggtacgctttctaccctcgacttctctgtcctttatcctctcggcaatcaaaccagaaggaagtgtcttctgccttaggcaacctacctcagaaagggagcagtgaactagaagaagtcgtcttctgcctcggcatattatttcgggaggaaagaaaaggcaaggaagaatactgttcagaagtttgaaggttcagccctcggcagggttcagacgaaccacctcatgacttcagggctccgagcccaatactgattaggggttcgaaggttggcccctcggaagggctccaaaaccgccctagagcacagagtcagggatgactataggtacgcccgtacatggccttagcttgggttgcaacccgaggtaccttaagacatatctgagacccccaggagcgattcgtgacagtatcccatcatagggaggcatcgagccctcggaccccatcgaacgggtttgggaccaggcgaatcacccgcaagtatcttttggggcatgtctccggaccacaagctgactctaatcaaaaggagcttggaccccactcaaatcactcgttaacagctaaatggaaacgtcctgctcgtcgcctgtcgagggtagcatgacgc

SEQ ID NO: 58431 - DNA, 793 bp, Zea Mays
gtgagatgggcctgtgtgcggcctgttagtctgcttaatggcctgttaataggcttgtaataggaagatagacttctataaatactagatctggtggttgagaagacagttacgatttgaataacagaaatccagagattggaatcattcctgtgtcttgcttacctggagagttcctcctcggttgtcaccgtggtggcctcgtccgtagcaaggagagctcacgttagagtagatctgctaccctcggtcacgggtcatcacaactggtatcaaagccttcggagtcggcgttggaaagaggaggcgccacggctccaccagcgaaaccatcggtacaaactcgtttcctgcttgaggcgatggatgagagagatcggttggtgcagggaaattgggaccgcatgttcgagtcaatggaggcgatgactggaagactgaaggaagttgagcgggtgcagcaacaattgttgatgcagtctgagttggcggctgtggttgctgaacaagctgcaaccgagaggaatgatttgcaccacaaattggaagagactggtcgggaggtgtctcaattaaggctggaacagatgggaagagaattgggagaatcttcgacctctaatcaggatcatggtgctaatgatcgtggtccacgacatgatcaacagatgccccggggtggccatcaacggggattgagaaatgatcctcgtcaacctgtggattcaggtaatcaagctattcctaaactgccatttccaaaattctcagagggagatcctgttgtttggtt

SEQ ID NO: 58432 - DNA, 952 bp, Zea Mays
gatttcatgagggcaatgatcatgtgaagaccaggcagtttgagacgtaccggcgagagtacgagaacttcacacaattagctagagagaccattgattctatgttctccaggttccagtcaattgtgaacaagatgcgtgccaacaaggcacagttaccctatagtgatcatgagagagcgctaaaatgactacatgcttagatcggagggtttgagaggtgaaggtctcggcgatcatcgagtcgcccaacttcgagactctcaccgtggacaagctcttcagcaagctcaagtccacaaagattgaccaccagactcgggccaagattgacaaccctggtgcacccaccatggccctggtctctggaggtggttctacttctaactcctcacctgctatgtttgctctatcttctttgttgtctattatagaggagcaggtggagagccttggcgatgaggagttggcaattgtggccagccggttcacgtggttccacaacaactgtatgagtcggtggcgtggtaggtccaaggacgaatgctacaattgtggcaatcccgaccacttcgttgccagctgccccaagaagggcaaataagagtctggcccgcgctaccatcactctggtcggtgcaagggcaagtactcctccggcaagtacaagtccaagggaggattcgacaaggaggcgctcaagaataagtacctttagaaggtaaatgtcaaggagtgtgccttcctcgcctccctcagcgacctcgaccatgaccccgacgatgttgtatcttacttgagcgacgaggagactgagagacgggtcgaggacaagctgaacaagctgtgcttcatcgccgacaccgcaggaggcttctgcaccatggcacttggtgaggacgcggtcagcaccagcgatgacaaagacatcagcgacgacactacttctgag

SEQ ID NO: 58433 - DNA, 372 bp, Zea Mays
aaaaaagaaaagattaaatagggtttttgacgctattggatttgtgtaccttgactatcggtatcctccgtgggggcagaaaagaaaggatgcaacttatgggaaggatgttgcttcaactgctccaagcgagcccgcgccgaagaggaaaaaggtgaatgttcttactcaccgatcgcgctacattgaaccggccacaatgcctaaatttggcggtgagacctcttcggctactgaagccaaaggacctgctcttacgcagaggattgaaaagctagctacaatgccgaaggctgacaaaattgaagaaccaagaaccgaagagacgaaaacatcagaaattctaagcccttcggtaggagtggaggcgcc

SEQ ID NO: 58434 - DNA, 676 bp, Zea Mays
cgggagggtattaagaactgcaaaataatggttgtggtgagaagttgcagaactggactgttggtacttccgtacttgaggtactttgagcatgtagatcttcactcaaagatttgattgatccttttatggggtgttctgtttgaggaatgagttaatccatcatccgcacattcctcacttgtttctatcattctatggtttgtgtgttggaatcactccactcggcaagtgctaatcacaagcacttgaaaaactagtttgctttctggtgaacacacacacgcacgagacaagctaacaggagagagttttctggccgaacagactcactgccttgcctttttttcattgatttatagacccaaagtacatgcaaatgcccagccgacccagccaaaagactcggccaacactcaagccatgatcctaaactcatgccatgatcctaagcagacgccaccactaatgaccatgcacactaatcaggaaactaactgctgcacaacatggttggttcatcgttgctgtccaccgtggctaaaattcaaaaacatgattaaacatgcaaatactaatgacaagattatttctaacattcaccccctaatcttggcatgcctcacaacaaggttggttcatcgtcgctgtccaccgtggcaagcagcgatgtctc

SEQ ID NO: 58435 - DNA, 385 bp, Zea Mays
agatgactctatctagtggtgcactgaccggttcggtgcaacaaccaagaatagatctgggcagtttcttctcaacgacacgttaggggcttgaggctttaaatagacctcgtaactagcctcctagagtcaccaagtcacctaagagcaagtttattcactcctaagcattagagaagcacaccaaagtgatccaagcacccatattcgtgagagtagtccagagagagttgtgctacaattttgcgcttatgttcttgattctttggtgttgttgttgtgctcttatgtgtgttcttcctctctattgctttccttggagctctcgctctcattcgttgtgtatggctagcaagagtctataatctctatggggtactttgtg

SEQ ID NO: 58436 - DNA, 440 bp, Zea Mays
ttcttagcagccttctgccaatcggtctcgggagctcaaggtcttcagcttcatcgactatagggttgatactgtccatctccttccttttattactgtggtcattataagagaaccactttgcctcattacgcaccatgttccaaacatccataaacacaaaatgaacccctttattttcttcttcatagaacttgtgagctttatcgatccacatttggtccaaatacccactagtgtatatattcctagctttcaaccaacaatcattgaataggtttgtccatctatttaacttgtgccacctctcctttacctgagtttttgtcctccatcggattttcttagtagtaagattgtaatcgttcgccacatcctcccaatacttatctccttttttattgtttccactcaatgaatcaatggaatgcttcagccaa

SEQ ID NO: 58437 - DNA, 637 bp, Zea Mays
gctgacttccaaggcaccacagaatgtttctgagtggccattcaggtggccctcaccactaaaccatcggcgatttcttctgcgcaggcgaactcaaagcttgaggaagacctcgcggtacccgcgaatgaagctcaagctgtgacctctagacggccaactgaagaaaccaagagaatcaatcttgggttcgccgacgaacgcaaaacagctatcatcagttctagcctggatgacaaataggaaggcgcgctcgtccagtttttgcaagataaccgagacgtattcgcatggcaacctgcagatatgtcgggagtcccgagagaactggccgagcacaaattgaaggtctacccccaggcgaggccgatccgacaaaaattacgtcgcttcacgcccgacaagagagaagccatccgtgctgagctggctcgcttggtcgcggccggattcattagagaagtgttacatcctgagtggttagccaaccctgttcttgtactcaaaaacaataaagtggattggcgcatgtgcgtcgactatacggatctcaacaaacattgcccgaaggatcccttcagacttcctaggatagactaggtggtggactcaaccgctggatgttctatgttgtctt

SEQ ID NO: 58438 - DNA, 356 bp, Zea Mays
gcggtcctaattagaagtcatgtaccctttcgcagaattgaatccgggccgctggctctgggtcgagtggtgagatcatatcgggctttaatagaatctgtggcgtagatgttggatcgtgcgggcctaggtcgcgtaccggttcgtgcgcggaaagatctaattgtgaccttaggttttaatccgacggccgagatccatgcataccccttcggccaagcgtttttacataagaaaccctatgttttcacaaaataaacctgccatccactctgtgtgtaaaataattacaaccatgcccaggcttttacatagtgaaccctaggctctatggtaattatgttcgtggtccagag

SEQ ID NO: 58439 - DNA, 577 bp, Zea Mays
atcatgtttgtagatcttgcgaagattaatccgtatcagtggcatgagccccgggtggtcatcattacggggttttgtccatatcttcccctacgtcgagcttccttcttcatagctcttaggtcatatttcccatacgggggtcgcagagcccccaggtaggtttagacctaaggggcatatgccatcattaaagggacgagttctacctgcaccatactgtatcggccgacgtgataatggaatgtatgtaaagttggtggtgtagtcagcctgagttcgtcggatccactcgagtggatcttgatcggctcgtctaacccctctgttggttttccgtctcgcgtgaccctcgatgttcgccctatgggtggagcagaggttaatggcccataaatggtttgcccaaaatgtctctcctcgctgactcgtggcccagaacccggggttttgtttcccacagttttaatcttactttttttaatgcagcgagtcacctctaaaatattttacgaatttttagatgtggtactttgtgtgttctaccttttaaagtagactatttttataggacttc

SEQ ID NO: 58440 - DNA, 576 bp, Zea Mays
cttaaaatgcatacttcctactagagcctagcccacacaaacaataactccagatccactacagctggtagtactatgccacagcccacagttgtgcttgttggttaataacaaaccttatctagtagtattgcagtacttacaaaggacaagcctattgattgacggcttagaggtattcgttgaaacacatccgggtgttgtgctctaatctcttagatctctatgatggctttaattcaccaaggtactcaaggtatgtgactaaatcaacttctagagttattttaagtcaaaaagacttttaaacattggtgattgaatttgataggaaaataacaatttatgataaaaaatagtatgattagatacaatatgaaatatatttttcatactatttggtgaatagatactcagatttttatatgattagtcaaacttaagaagtttaatatagaattagttgacttatctaggatacagggagtatatgacaaccactcatatgttgatacgacatgtggtacactagctataattggcatttatattagagcacatttggttgccggtagg

SEQ ID NO: 58441 - DNA, 428 bp, Zea Mays
ctcgtcatgccagcgaaacaaatggtcattatcatgtaagttcattcccatattcaaaaacagattcttttatgcaatttatgcacacaattttttgttttgttactattgattagtaattacgtgtgtttgttactgtttgattagttccgtagtaggacaggcacatgctacgttgctgctcctgaacgaccagcaaatgacatgttccatattcatgtttctcgcatgaaagacttgatctctagcaaggttatttgccttccaccaccataccgttgtagtttagactctttgttgaaagatcatgacaaagaggttgacaagtactgtgcaacgcttgaacgggctcaccgcaaattagtatcaaaacagctccagctacctgagaccttcgcagacatgattgatgattcattcgactcggg

SEQ ID NO: 58442 - DNA, 1194 bp, Zea Mays
gtctgggtctaagttataatcttcaccgtttggaacaagtaattgatcgtgcggtgataccttatacacaacatctcaacccttaagatgttctttcgtttggcacgcatgtgggagataatacacttttgtggcttgttgggtcacgatattgacatcgtgtcctagtaaggtggaatccagtcgaatttcgaatatcccaagattagaatgtgtccatctcgtcacttcagggtcaaaccaatgacattggaatatcactggagtaagaggtttggaagcatgaaaattgagttcatatatttcttcgattcatccaaaatactcgacctcgtcaaggccggacgtaaagactcctgaacacattgtttttcgattgggccgactttggtcatagcttgttgggagaaaacagtatccattgatgtcatacctagaatatttcctgaccctataagcaaagccaatagctacttgtctcaactcggcacacatagatagatctctttggccctacaagtattcacaagttaaaagacgctaaattgagttcataaacagatctctttgacaaactaagcacgtaccttatgtttgaaccaggaaatgaaatcaggcaatccatttcccgcaccctttctaagaagtctatcatattcctgtggagttgggtcccttgatcgacactagaatttatgaagaaattgttccatgtatggcgtcacctcttcaaggttggtcaatacatatagcatgatatggcaccacttttcatgtctaagggtcttgctggtctaaccacttgcgcttccgagttggcctcgaaatatgatgaggttcgattcattgccgccatcattgtaattagggagtgaattatgcatgctcggcagtttgtcatcatagtaagttattgtgaagttagacacatcctctagaatgtaagcctctgtaatggaagcctcgattttgcatctatttctacatttctttcgaatagtctttagacatctctcaattggatagcacccacgtccctacatttctttcgaatactctcataatattcgtgccacatatgggagatggagtatcaaatgttgcttggattaaagaagccgggtggaaatatcttctcaagattacacagtaacatgggtgttaatcattccaagtctacaatcatggtccgag

SEQ ID NO: 58443 - DNA, 363 bp, Zea Mays
gcgaggcaagcatatctagaattgttccttcctcttgaaataaagacattctttgttggtgagttagacaagacaaagcaaaagaagagggaaaggttcaacagaggcaacaaatagatgaagcaacaagaacaaattatggtgaagaacaagatgattatggtgttgaacttcaggctattctacatcaatctcgagaggagcacgaattcagataaagagctggtgcacgatatgataggggtggtggaactgggtcaagtcaggggcaccataaggatttggcccactgcctaagatgtttgcaaggacccggtcacaagtttcagagcaggttagagactactatcttggtgtaagctt

SEQ ID NO: 58444 - DNA, 492 bp, Zea Mays
cacgattgtccttgttaccaaggaagaagtttgcgatcttggtccaaaacaccatgtgcggtgatatcatcatccactatcatgtcgaggagggtgtaggcgaacggtgaggtcctcctggatctagagaggattagtgggctacgtaggagtgccatcaacatggtgacaaaagattgaagcgcccaagaacgacgtggaagaggtgacaccaccatcggtatgggtggagagcatgtcgagcttgatgttgacgaggctagtgatgttgacggattgtgtcatgctagacatggaggccatgagaacgctgaagttggacgagagctggtgaggcgaacaacctaggagctcatggtggaggaggacatggcatttggcgatctgcgaactcatggttgaggaaggcagagaagctgcggtcgagcttgcgatagaggatgcggtgtccaacatcgggtgggagggatgggtttgagaggtgcgggctgt

SEQ ID NO: 58445 - DNA, 1788 bp, Zea Mays
gttctgccagaagaatttttgtgctatcttggacgttcttgtcgatgcggctctggcctcaatccacttggtgaagtattcaacggcaatgaaggtgaattttaggttgccttgtgcggtgggcagtggcccgatgatgtctagtccccaacgttgtagtgttcaggtatgtggaatgcgctttgtgagctgtgaagggtcgcccgtttgaggcaagaatttctggcatgcttcgcacgaacgggtcacccggttggctgtgcacacaattgtcggccaatagaaaccttggcatatgactttggcagacagggcccttggtcctgaatgtgatccgcatatacccctatggacttcgtggagaagttctatgccttcggcttcagttatgcatttcaacatgggttggcttatccccttcttatagagatgtctgttgactatagtgaagtctctgcttctatgttttaatcttttggcttcgctttggtcggaggaatggtagtggccttagagataagggtgattggtgcccaccagttttcggccattatcagattgactatccggtgcccgtcagcatcttgtgttatttgcagaccctcggggtttcttacggctagtgtgctgactatatgaaaaaatacatcggatggcaagggtttgcctgtcgctgctgctttggctagtgtgtcggcttcttcgatcttgttccactcaatatgttgtcatgtgaaacctttgaattgtttttctaggcttcgaatagaagcaagatactgcgttagtaatggctctttggtggagtagtctttttcgatctggccagtgacgaccttggagccagttttgataatgcaggtgctcactctgagggctcgcagtttgcgaagtcctaagatgactgcttcgtattcagcgatgttgtttgtgcaccttctgattctagtgcaaagcggagatgtgcaacatatctgtatttgagtcctgcgggtgatgtgatgattgctgcaacgctggtgcctgcatgacaccatgccccatcatagtggatggtccagagggtttctgcacgacattgcggtggttccaaaggccctgtccagtctatgatgaaatcggccaaaacatatgatttaattgttgttgtgggctcgaaggtgatgttgtaaccggagagttttgctgcccatttggctattctggcggatgcctccggattcctgagcaactctccaagaccccgatcggaagtgactagtacttcgtgtgtctcgaaatagtgtctcagcttgcgtgaagccatgatgactgtgtatgctattttttctagctctatcatgttgcacttggagcttgtaagtacttcagagacaaaatatactgggcattggtgagtcttgccctctctggtcttctcttggaccaaggctgcgctgaccatgctgggtgaagctgcgatgtagagtagcaggggtagccctgggtctggacttgttaatgttgcaatgtcagacagatattgcttcagagactcgaaggcggcagcttgtcctgggccccaagtgaagtcctttgcaccgcgtaacgttttgaggaaaggaaggcttcgctcggtggatcgcgagataaatctattcagtgcagccaatcttcctgttagtctttggatgtcttttgtggattgtggttgtgtcatgtccatgatagcctaaattttgctcagattggcttcaattcctctgtgcgttacgaggtaaccgagtattttgccttggcgtacaccaa

SEQ ID NO: 58446 - DNA, 587 bp, Zea Mays
gtggttcctgattcgtgtggagcttagtgtgaattttggtgtcgattaatttaattggcttgcaaaacgactgaatttgctaaccattacctagcggatttgtttttgtaggagtctaattgttgtttttttcttgctactcatgtgcaggatgcgagcggtcgtagacctcaccacctacaagtaaggggaaggttcttatcatcattaacattgcatcccactggtatgaatcatctgaagcagaaccttacctaaccttcttactattgtcatttactcatcgtttggcccattggaataatgtatcaataaggccgttggtgtcttctactacctggaatcatttgttcctgcttgatataaaataatgcttttatttgtgtttacttatttcactgtcagacatagacatcttttgtttacactatatagaaaaacattattttgtatactgctaattgttgcactgtgaccgattatttcagtggcttaaacaactccaactacactgagctggataagctctttgagagtatatggaccaaggtgtgtccttagtcttgtaatgcttatctgtgttctca

SEQ ID NO: 58447 - DNA, 480 bp, Zea Mays
cgactctgctggcgtcgggtagtttatacctgcagagtagagatggaactaggattccgcttgaaggcagatgtaatacttttgctttttgtaaggtacttttgagcactatttatcaagcagtgttagcacttatctgtgtaccgcttgttcctgctgtgtgtgatgttatgttgttgactcctccctggtacttggccccccacctgggatgtaggcttgatgtgtcgaggttggatactagcatatctgaaagggttgtcaacaactctcgggaggcagcctcgccgggatctggatctgtacacagcttcacctagggagctttagtagtatacccatagggtctcctgtctgatattagccatcctttgatacatgctcgggactcgcagggtttagtccgggtggccaagttgtgtgtccggaccccctcgggtcgcgactctagatactaggactcccgtcgcagggtggtgg

SEQ ID NO: 58448 - DNA, 686 bp, Zea Mays
caacagctgaagcttagaaaggttgccaagggaagctggtacttctccaactaaaagattgtcctctaaatctaagcttgtcaagctagatagattgccaaactcctcaggtatggtaccagtaatcctgttaccagccaatgacctgcaacatcatatgctatacagtttcatagtagtccgagaagtatcaccaagcttgaacagtagttcatgtatgacaaatatctaaaggtctggaataaaatatgttagcatatgtgacactggtataatgcaatccatatcatcctagtttacttgcacagatggctagcccactatgatcttgtttcagtacatatcagtttgccccaaaacatgaagagaagcagaagcaatagagtcatagaacagtaagattcaatagagaaaccgattcctaatttctgacatgcaaagtgtctggaatgtattcattataaatttattgcatgtactcattctataatcttactttgaatatcatgatgtaattctctggaaaaatatattaactattgctatagtgtaagggtaaaccatccccttttgatgtttataaaagtgataatgtcaaaggcatatataatctacagaataatacaacgtactcacaggacactcaaattttggagttcgccaattcttggtgacaaaacaccagt

SEQ ID NO: 58449 - DNA, 342 bp, Zea Mays
tactttacgaagaggacaaatcagaattgaaagagtttgctatatcctgcggttaccagcccagatccatactctttggcgaggtcgacgaagagattttgggatgcattcgcgaccgcgccgggggtaaaatcataagtactttatctaagggtgttggattttagaagctagaaaaggacattagtttctatagacgacaacatattattggaagcttgttctactcaaacttcaaagtaagacttctctacagctccctatcggtaccttcgtagtgatttgggtattctaactttgatttgttttacagagtttgctactgagcaaggccttaaagat

SEQ ID NO: 58450 - DNA, 521 bp, Zea Mays
caggcatggagatataaacacccattggatagtcaagtattattatcgaaacacgcaacattgtccatagtccttgtaggagtccctcacaagaatactcacataagggtcaaactcgtgatcagataactatgtggatagtcccaaacttttctcatgtgtaagtgaatctccagcgtagcctcttttagatgctcctcatcgttttcgctatcgagttttctgatgcacagtggtggccacactataaatgtagttggtgtgatctcgcaagacaagaacaaaaggtaagagtcattctaatgtgagaacgtatggtttgatgctctgcttgaacgcgaacattgtggccatatggtttgacgcctctccactacgggttcgaccacatggtctgacaccttgccacttggtcttatgcctgcaaaatcctaatcttgctttgtttattcgtgatctttatatctggattgttttcatattgtgtcttgaactcttgcatgttcttttagggtatcaat

SEQ ID NO: 58451 - DNA, 587 bp, Zea Mays
cgctacgctccggtctaagtcttccggcaacgggtctctgtttcgctcgtcaacttgactgtttttttttaaaatttggatcacaaactcaacatacaaattggacggtataaattctaccgccggtatatagttatagatataaaaacacgtgacggtcttcaataactatgatatgatgctactccatgcggagagtagtgcgctaaagcggcggaggaacaagaaaggcgtctcggctatacgagcatgccgtacgcctccgccgagcaggcgaggaagaaactcgtctcgacggacgccgctggctttcgtagtttcgtgaaccggtgatcggattcatcagtttgtttggtgacacgtgcctttcgagcagtctctagctagctactctcacatcacggtcagcaagcacggcacgctactgatcgaaagacgcccgatccagcactcattaacactgtgccgcgaaggagacgctgaatcatcatggacctccgtcctctgctcgttgattcccgggcgcgctagcatagtaagagttgttgttgttgttattttattttactatatgtcttttggtcaag

SEQ ID NO: 58452 - DNA, 712 bp, Zea Mays
aaaatcaagtttagaggagcgcatggttaggggaaaaaatggataactgatccaattttggactattttatgcagtcattggagttgttcttggctaatatagttattttttaatatctcgttattgtgtgatttgcataagcatggcactggaggcattttttagtatgaagtgcgtaaggctataactatgtttggtatttgtgatggattatgtaaccccttatacattttaaaatttatatgctgaatggaaccatgaagtagttatccctttcttaaatagcataaatgcagcgatgtttcaacatatttacaggcataatgacagtagaatgtagtcagtttcagtagatctcacgggtagatttgttggttgaataaattctggatggtatactaatttcagtctgatggacttcattttcgcctatgttaactatcatatgtcgatttattaataattcggtgacaacagataacccaatttaatacagatattggagaaatatatagtacctgtgaattcatatgttttgatgccctgactgtattttcatgctgaagggaccgatgtggtattaaacttttttggtgttgattcgcaacaacaaccatagctgttgagatttttcaagagaatactaatcaagttcatgttgtaaattattgtttgtgttgcatattgtatgtgacataccgacaagtttct

SEQ ID NO: 58453 - DNA, 454 bp, Zea Mays
atgtggtggctgatgcccttagcaggtccggggttccaaaggtggccttgccgttgatcgctgatctggaccgtttggggatcgctttgtgtcatgtcagcaccgctagcaaggagactcagatgcttattcaatcctctctcatggagagagtgcgtgcggctcagcagcaggatcgtctactgcaggaagctcgaaagagggcgggtgatggtaaaccgcgggagttcaccattgatgagaatgatttggttcgtttcaggggccgcctctgtgtgcctcagaaatcagaggtgaagatggatatcttgagagaagctcataaaacgccttacaccgtccatcctggcgaaaccaaaatgtaccgagatttgaagcaaagcttctggtggaagtggatgaaggttggcgtttctaagtatgtggccgcctgtgaagtatgtcagcgcgtgaa

SEQ ID NO: 58454 - DNA, 1423 bp, Zea Mays
gggggctgggtaaaggctagcaccgtcattgtgggccgagttctctgcagcagccacttctaaggttgagggtccctcggtcacttccatgggagcaggggaatccaaaccaacctcctgaccctcaagactgtgctccaaggtcgatgaggcgcgggacgctacccaggaggaccccaacctggtgtcgggcacatcaacacaaacatccatggcgccaccatctgccggttctgatagcagatcttctggaatcatgtcctcaagagcctgatcaaagttagccagagataattcttgtagtccaatgagggcagacaaggcaggggagggaacaccgctactttccccattagcagtgtaacgacaggtgtttttccgaatcaggggaatttcatcttcttcttccccatcggcaagacggacagtacacccattggggtcagcgtcagacgggctacacacattgggttcagcttcagtaaattcaggcactggcacttccttagcaacaggagcagaaggattggcaccttgatccaagctaaacacctgacgaaggcgtctcttcttctttttctctccctcagcaggaaaagaggcttggtcaactcggcgagaacgttttggacgaacattgacaggcttctgaacgtccaaggctttatcagcttcagggatgggaaccaccaccaatgtttcagtaggagcagcatcagaagaatccccagccaacatatccagcatggcgcttatctctgcatcactaggatccaaaggcacttcaaagtggacctgccgttcatcatcaggaatttctccaagcgaagcaaccaaagcactaacttcttcgacagagggtcacactctaaggcccaaaccgccatcagcagaaggaggatttgacacgaaatgagtaaaggctttggaaggaggcaggctctaggccgagtaagcaacaggggcgccaatatttgataccttgcctctaagtatcatttcaagccggttcgccaaatccacaacaggaatccttctgttggtgacccgggttgagtcggctagacctcgatacagataggccggatatgccctgtctttcaacggctgaatattcttgaagacaaagtcagctaccacagcctcggcagtcagacccctccccttcatcaatccaacttcagctagcaaagcccctgcttcagccacctcctggtttgtgggggactcagtctaactcagagtacgaacatccggctgtctccctgaacggggtgggagggaattcccatgattttccacgataaaccactccaagcgtcatcctttgatgctgtctttgagtgggatgtcaagataatcggttttcctcccgcgccgcatctccaagctcgcgccccctaccagttggtgctgacctccg

SEQ ID NO: 58455 - DNA, 453 bp, Zea Mays
ggcaattaaaaaggaagaaagtgaggatgaaggaaatggaagtggaagtgatgaggaattgtctctctttgtgaagaaatttaacaaattcatgaggaaaaaaagggtcaacttagaaggggacaaacatcaagaagaaatgctttcaatgataggaaatattttgagtgtggggaacccggtcacattgccatgaattgtccaagcaagaaaaacaagggcaaggatggagatgataaaaataaaaagaagttctatcacaagaaggatggcaaagcctatctagttgaatgggattcagatgcaagctcggatgatgatgatgattcttcatccaaactaaatgccagaattgctatcaaggaggctccctcacttttctcatctcctcattgtctcatggcaaaaggtgatgctaaggtaaaaattataaccgatttaaatgatatagat

SEQ ID NO: 58456 - DNA, 556 bp, Zea Mays
aaaggagcccccgataatgaagaaggcagctgggccaaagaaacgaagaattattatagtgacagaagttattgaagggacaccaccagcagcttcggcttcgaaggcaccagctgttgagagcgcaacatctaccgaagctgcacctactgaagctgtagctgccgaagctaccacaaccgaagatgtacatttagaaagcacactttctaacattgataagatacttctggatatggccacagaagaagctgctgcagccgctgaagaaaccatggctacagtacctaagaaggagaaggaaatagctgaagatgcttcagaagtggaaaactttaactttcaaaacttaattggacaagagttgacaaaggctgagaaagatgagttaaaagaatatgccatatcctgcggatatcaaccaggggcactgctcttcggtggtgttgacgatgaaaagttaggctgcgtccgagatcaaactggagcgaagattatcggcactctatcaaagagtattggtttcccgaagcttgagactgacataagccgctat

SEQ ID NO: 58457 - DNA, 597 bp, Zea Mays
gaaagacgaggcatgccagagggcttttagcaacgcctatgccttcattggcacaagggatatagttcaagagcacatagtgtacagaatatggccactcgtagaatactgggatatgccgaaggatactactgcctagtcaactgaaggtgggttggttcaattgaaatataccttcaggtttagagaccggtttgatgagacaaatgatgattggctaaaaagtattgaggctatcagcaacgaactgcttggagcatatagcagggccgaagatgatgccttgtccgcagccttcgggggccaagggaagaaaagattaaacagagtatttgatgccattggcttcgtataccctgattatcactacccactgcaaaggcaggggaagaaaagaaaaactatcgcttcggccattactgttgtgccgaagggcaagaagatgaaggtcctgacccaccggccgcgatacattgaaccagccatggtgcctgaatttggcgagggaacttcttctactgccgaagtaaaacaagctgctccgaatgtgcagagcgccgaagaggccattgtagtgccgaaggtgcctacagtcgg

SEQ ID NO: 58458 - DNA, 653 bp, Zea Mays
cccagctacccttccaagacagaacacaagcatgcaacatatcttccaaggtttggatagttcgctccgactgaccatcagtttgagggtgaaaagcaacactaagagagagcttggtacccaatgcactgtgaagactctcccagaatttggatacaaatttggagtctcgatctgaaacaatggacttaggcaccccgaaagcctgattacttctttcatatacaagggaaccaactctgaagttgaatttgtggtcttcatgggaataaagtgcgcagacttagtcaagcgatccactaccacccatatagcatccctgccccgaggagaacgaggtaagccaaccacaaaatccatggtgatatgctcccacttccactccgaaatttccaatggtttcaataaacctacaagcctcttatgctcggccttcacgcgctgacatacttcacaggcgacgacatacttaggaacgtcaaccttcatcctcttccaccagaagttttgcttcaaatctctgtacattttggtttcaccagggtgaacggtgtaaggtgttttacgagcttctctcaagatatccatcttcacctctgatttctaaggcacacaaagacgacccctgaaacgaaccaaatcattctcatcaa

SEQ ID NO: 58459 - DNA, 540 bp, Zea Mays
gggtgagaggaattaaaagcactggatgtcgggtcttggtgatccttgtcatcgccttgtcggcgatcattctggatctgcctcgaccatgaacagcgtggtcaccacagtggatacagatcaaaccctcccaggcctccctcctgtaagattcgcgttggccgtcgcatagtctagggttggtcggattgggttaccatggtgtcgccgcgtacagggaggcctggtggggaagaaggccttggtgccgttagatcttctttagatggctcagatttgatgccgtgtatcgcttcggatagagctaataggaacccttagattatgatcggacggatccagccgaacgtactcgtttaaaatctccaccgtcgatgggggatccatcgaccgccgtttcagatctaatccgaggcacacattttagatccaatgggcgaagacccgccataccccttcgggctagaaatctttctaaagagcccctgtccttttgtcatatcaacccgtagtcctctcgggtaggaatctgagtctagg

SEQ ID NO: 58460 - DNA, 734 bp, Zea Mays
taactatttcaaaatttgccactatatttatctctatacctcattcatgatattttcaacacttgaaacaacaatacaccgttgcactttcatatgacctaagatatcactcctaccacccctctctcctcaaatgacatgcgggctccatggtcatccccttcctcagcttcttccctgaatctaggtgagtagaaactcgtgcaacaaccgtggttgtgtggtcatagtggtccacaagggctcacatctccatgctccatcaagaggtgctcagctccttcaatacgcagtcgtgtcgtcatgcactgcaccctctcatactccacatacaatgctatcgctatggatgactcgatgtcatgatgtgccctccctcacgcagaggcccgtcggcaagaggccccaacaagtcgcatgttgttgctcatggtcgtgctagttctgtcgcgttgtctatcgtccaacattggggttgttatcgtatagacgtcacttagactgttgttgtcatccatgcaaccaccactgctcatggcgagattcgtgtagctaccctgacggtaatgcaacatcaaagtcgtcatcacatagttgtcgccatgactaccatcgtcttcgccctcacatccatccttgtggcaccaaccccatgcgcgtctattatatgattcatatgtagttttggttattgagacaaataagtggactaatctctatctagtgttatattt

SEQ ID NO: 58461 - DNA, 490 bp, Zea Mays
ggacacagtcctgtcagcaggccgggggaacacctatccgtagcctcaccctggcccatacccgaaaacatgtccagcccaaccggcccatgctcagccacaccaactgggccaatatcaggggaccccgaagcaagcatcacaacaacagggtgctgcatgggaacggacgtgtcgcccccaatcaaagcattaggagcaacacatgcagacgccgccgccatctcttcagaagccgaaactgtcgggtagaaattactagctagggcacaaaccaaagcaccctcctcagctcccacgccctagaaggacgagcatgcgggcgcatcaaccaaagtgggaccacgctgaaccatcacaggaatgggagactccccagaacccgcgacctctgcctcgactccaccagacaacaacgccgagcatgccagcagggaagaggaaccagcccagcccggacccggttcccgaagcgttccacccacgacag

SEQ ID NO: 58462 - DNA, 534 bp, Zea Mays
gtcattctaccagcctcagttgatggagaggatttcactcaaggattataataccatcaacattcatcttctagtagagatagtgggaccagacattgaggagcacctcaccaacttttaaggcttacaacaacttattataggtgtagggctatatgttgattagtgggttagagttttatatgctacagtctagattgacccagatcatgagtggatccagttcaagtttgagggacatgactacatgatatatcctagagcaggggcggaccaagaggggcaagtggtccatgcccccctcaattgtatatacccaatgtttatatctactatttagtatagaaaatattgaagatttgaatgagctaaaacggtcttatcctaggtcctctccttagatcggtacagtcctctcgactcccatcctatttattagaccagccctcacatatgttcacaactacaacaacacaacggcctgaccacgtcatctaggctcatgtcgtccacgatctaactaacaggactgtg

SEQ ID NO: 58463 - DNA, 684 bp, Zea Mays
gggatatgaggggctagacatagggatggaaagctcactcgttgcttggttcatagggaagaagggggaaagggaaatttggacctcttgtcccaccaattctatcctgtcaggagggtggatcatgctgaggtctgaactaaggtacctaacacaaaaagatcaatatctgaaacttgaaaggaccataggatggcaatacacactctgttcctgccaaatcatttgtggaactattagctattgagacaatgcaaacagacctgactactgataaagtcactattatgcaccccaacattatttgtttgtaattggcctaagaaaacatgtacctaaattatcttcattaatgcataacctcgaattaatgtttaatagtttagaaatcccaaagttattaacgtgccaaaataggtgaaatgcatgtaagtgtaaaggtatgtaatcccatccaacacaagcatcagaacttagccctcaatccctcatgatgtagacgaccaaacatggagccgcttcagtaagatgctcctcatgctaacattaataggaacagctgaaaccccattccagcctctgcacacgaacgaaccaacgatagcaaggggagcaaataacatggcagacagtaagacaagcaaggagcgagagaatgccgttgtacgtactgcaaagtggcca

SEQ ID NO: 58464 - DNA, 495 bp, Zea Mays
tgcatttatttctacatttctttcaaatagtcttttgacatctctcgattggatagcaccaacatccctgcacgccccccattcatgactcataggggagatgaagaatcaaatgctgcattggattgaagaagccaggtgaaaatatcttctcaagcttacacagtaacacgggtgtcaatctttctaagtcttcaatgacggtccgagataactcttttgcacgaagctggcggaagaaatagctcaactctgaaagcgctagccagacatgctcagggacatagcctcgaaccatcgtatgaagaatccttttagtccatatgtggaagtcatgactcttcatccctaagactggcagagtagataagttcaccccctactcaggttagctgcatacccatcagggaacatcaacatcttgatgcactaaattactcccttcctctgggccctgctgaggacgaaatcgaccttaggccttctctatgtctt

SEQ ID NO: 58465 - DNA, 445 bp, Zea Mays
gagggagagaagaaaataaaaagggaaagactaaaacctagtttgggctgacttctccaattcggcccactctttctctcttctaccccacggcagcccatttcctcgttccctttttcttttctgtgaagtcactgacgtgcgggcctgggtcctcggtgtctcacgccacgcgtacacccttgaccgcggacgctgccgtgtgggacccttgtgtcggatgtatcttctccgcatcgtgcggccagaaaaaggaatcgcgcgcaaacaactcgcctcgaccacctccgcacccaccagccgggtttaccgggtccgcgtggcgcaccgctcggggatcctggtgatgtgggcgggagagaagcctccgccgcgtccacagtttccgcccaagctcgccgtccatggaactcgggttccgattccacattccgtcgcaagccgt

SEQ ID NO: 58466 - DNA, 655 bp, Zea Mays
tcaacacctaattctacccttaacgaccatttcccctccatcaattgcagagttctaactctaaatcgtgttgtccacggtgatggcgcaaactgaggataacccgaggcgttcccggcgatctagcacggtctaattcaattggccaggtcgagaagcatcaagagcatataagagagctgaaacaagagtgaggagggcatgatcggacctgtggagagctggccacgacgagctcacacactacggtgttcttgacagatttgggggaaattcaaaattggagtgctctggtggataatctgaggcatgggctgttgcgttgggtgtgtgattacctaggggagctgatggcacgcttaatttatagggaccaagggcggtggctcctaatttgggcatggcgtgctggcggccagagagagggaagagcacttgcgcaaaggactcgtggctttcaccgtggcaaggtcaccggcgatgactggacatgcttcagtggtttactacgacgtggtaacgccttaaggcacgtggcgcacggtcggtaggcggccaactccggcaaggaccactttgcccgatagcagcccaagtgggtacgacgagctcaccgtcgaccgggtccgagcttatcaagtgccacaatttttac

SEQ ID NO: 58467 - DNA, 404 bp, Zea Mays
catccttcgacatagccgaaaggccttcttcaagcttcggaaatcccatacttttagctatctccccgcaaacagaaatctttttgttgtctgggagacagtataggaagtcatcttcgtcagtgccattaaacactaaggcccccttcggatattttagcttctgggcgtagtgtctggcttctaagatttcttctttggataattttttccccgaagcatgtcgaataatgtaatcaacatcttcggtcaaagcttcgggggcaggagattttgcttcttttatcataccttgccccgccgccatgccggtatctgaagtttgttgctcggctttatcctcaggcacaacagcctttatctcaatgggcattgaagacccagctttggctccgccctagact

SEQ ID NO: 58468 - DNA, 569 bp, Zea Mays
ttggaacgtacgaggcctaaactctagagctcggcaagattctgttcgtaatttggtaaactcctttaatgctaatgtggtgtgtatccaagaaaccaagatggctgaaatttctatgcatacctccctgtctgcacttgggagtaattttgtgcacaagttgtttcttccctcggttggaaatagtggtgggattctcgtggcctggaggaatgaaattggtccagccagcgcatctcgggtggatcagcatagcgtgtcaattcagttcagtccaagtgatcctcctccttggtggttgacttgcgtgtatgggcctcaaggcgacagtaacaaaattcagtttatgcaagaacttcgggatgtgagatctgcttgtcctggcccctggatccttatgggggattttaacctcatctacagagatgaagacaagagctctggcaattttaacaggcagcttatggagagattcagaaggttcattaatgatctgggtttaaaagaattggctctgcatggtcggaaattcacttggtctaatcgccaagatacgcctactctcgtca

SEQ ID NO: 58469 - DNA, 439 bp, Zea Mays
ctttcaggctgaggaagagctcaatctggtgcgtggcctgcttgggtggagcgcgctagggctcgccggaaggatccgtgccggtgctgtcccccttggcgatctcgccgccggggagtttgtgttgttcacctcatacatttcttgcaggttggcgctgccgatttcgcccttcttcctgctactgctggaggagttcgagtgtcatcttcaacacctcacaccccactccatcctccaggcagtgatcttcgcccacctcagcgagatgtttgtaggtgtgcccccctgcacttccctcttccgctattttttgtgctggccaggtgcgggaaggctagggaccacatcagtgcctactactttcagacgaggctagatccggccatagtctacatccccacctttggtggtgcgaggtgggaaaactggcgcagtg

SEQ ID NO: 58470 - DNA, 307 bp, Zea Mays
ccgcgattgtctctatgacaatcgaggccttgccatctccaccgaccatgctcaccgtcaggatgcttgccactggcggctctagtgcccatactggtgcctttgtgggggtgcctttcttggctctctcgtaccccatgtcatcaccacccactcctactctcatcgattcggttgctgactctcgcgcctcgtaccacataactcatgacctacgtactgtttctttaccacatccccgcaacctcacctccttttcttccatcattgtcggtaatgggtcgactctgcctatcacctctatcgg

SEQ ID NO: 58471 - DNA, 448 bp, Zea Mays
taggtccgggacactgtggccacgctgtccctcgaccacttcaccgacgacgtggccttatggccgtcaccggaatctgcattgttcaccgcgattgcgccacgcatcaggcccttaaccacgtcacaatagcatgggtcatctatatccggtgattgccggagagccaccacggtagatgccaccaatcacttgcattagtgatcccctctttctccgaccgccaccgtgcgagaccaaattcactggccaccgcttagcgcccttataaattgatgacacggtctactgcgctaagttatcaccaagccaaagcatccatccctgcccttgattagccaccatagccggagaatttccttcttcccccaaattggtcgactgcgccaccgtgaatcacctcatcgtggctagctgctcccagatccgcagccaccctccgtgttcg

SEQ ID NO: 58472 - DNA, 567 bp, Zea Mays
cccatatgctacaagattatttctttccctatccttcgtatttcttccaattatatcacgagtgcaccgaatccgtcaccttttttccccctcgtatgtttcctcgattctctctttccgtcgcgttccaaattttttggccactcgcggcgatttctctctctctctctatgcgttgtgagctccgcacttggtggtagcttttatttttgtttgctagtcatttccttattatgaaagcggaacagaaacgcgcccaaccagggtatccacgtcgtctcatttcaccttcatcgttggatcatagatgagcggtccacggtgaactccgttcgcctgcaaaactacgtcctctacgcgctgctaggtagcttctagaaacatcacgatgcgtcccgtccattccttttgcccctaaatccagcttgcccaagagcctcacgcctctgtcgatccctcatctcacactcctctggcgctccctccagtctgcaggacctccagcggcgctagcaccttccatccgttcaccagggcagcacgcatcttgcaagctgctcgacgtca

SEQ ID NO: 58473 - DNA, 576 bp, Zea Mays
agactctagaacaagagaagtttggatgtaaatcagagcccgtagcggatgagtcactacttgaaaaccaagctaggcacctaagcatcttgaacgcgtatccttaatcaaaattgctatatatatgttatttcttgcacatcagcttatctctatatagattaatgcttgatttggatactaattcatgcatgtgttggcttatttatcataatctttaaagtatgcttgtatagagttcacgcataattacttgtctatgcttagatactagcataactttagaagtggcaaggccaccatttacttgtgaacttttaaaaatgacatgttaattaattacaacatgtaatttatgatgagataaaatatgaccaacaataaatgttgagttgaggccttgtgcgggtgtcagggccaagttgggagtggaatccaaatgacattgacccacttaagttgattaaggaatgatgtgttattgcattgggtttgggcaacttttttgtacaaaccacatgtcacctatcggaatggtgagccgagtagtatgctatgaccagttcacttggtata

SEQ ID NO: 58474 - DNA, 578 bp, Zea Mays
gcagaagtcgcctaagggtgcagccggacttagcacaacaagtgcgtaaaaaccaaagtctatcgcgaagactatccgcgcagaagtcgcctaagggtgcagccggactaagcacaacaagtgcgcaaaagccgaagtctatcgcgaagaccatccgcgcagaggtcgcctacgggtgcagccggacttagcacaacaagtgcgcaaaaaccgaagtctatcgcgaagactatccgcgcagaagtcgcctaagggtgcagccggactaagcacaacaagtgcgcaaaaaccgaagtctatcgcgaagaccatccgcgcagaagtcgcctaaaaggtgcagccggactaagcacaaacgcgcaaaaatccgaagtctatcgcaggagccgcctaagggcgcagccaacccagtataacaaaagcagaaacgacagcaagaccaattataatcatactggcacaacacaatcaatcacaccagacaaagtacacagcgccctcgcaggcacaggcacgcgagggcacacaactccattttacaagcccttacacatacacaagcgagggcaccacgccct

SEQ ID NO: 58475 - DNA, 669 bp, Zea Mays
gtggggaagaaaagctacataccattattatcattatatattgtcgggggaatgatctctggactctaagtgagcgcgctgaggaaatagccatatatatagatcgttggagcatgcgtcaaccttgaaaggacccgtggtgccgagcctagggtcgggcatgaaccggacgtgtcggaaggaaaccactcgagtggatactgcctctggccacatactgacccgccataaatgattgactgtattgtccacgtttagcaccgagccacaacgtggacgcggttcggttcccattcatgacttacgaatcccttaaatcatatagcgctcatgacctataaaccctccgactgcaacatattaatggtctgcacgctctagcagtgacgaggtgacaccactagctagtagcttacgagaggaagaggatcggaggtagctttaatttgggcacaacagccagcatcgatcgctgatagcatagcatatagcataccgaggatcggataggtggccgcgatgagcagatccaccaccaacagcgccgtgcgccgcccttttgcattgctagccaccaacccaggtagctgtgtaccttctcgtctttgtcgtagcatgcatgtatgcatatgcatgcacttgctgcaagtgcaatgtggtgtggcgctg

SEQ ID NO: 58476 - DNA, 727 bp, Zea Mays
gctcctgtgtccctgtcggttcgatttctaggcggggtggtgatgcttacgatcgggtttggggtttggttcggggaaattagtttctctttctctctctccgtctccaggcttggattgagggtttccgcccgtgtgatgtgttgtcgaagcaaggaacgaactttgctttcacgaagcttagtttcgagctggattttacatttgtttctaggttgcggaggagactttcccatctgtgtatactttcacgaagcataatttcgagctggagatgaacttttacatttgtttctaggttgtggaggagactatcccgtatgtatagcacgtcggtaacctcatgggttgtggcagtgacacagtttgttacaaattaccctcgtcattatgtgcttttctaaaatccgagtaagaagcgtgacactctggcaaggctgactaacaggttgcactgagtgtggtacttcctgcttctgcccacacacacagcatgggttttgattgcaacttctgccttgaaattccgattgtactgtttctacatgcgaaattgcaaactgaccccctagatatgtttttaacactgactacaactgaatgagactgtggcattgacgcaaggctaattggatatagctggatgttcagagctattgagtttttaacctagagagtttgtagtgccgttccagtaatccataatttgttcttcctagacgttgca

SEQ ID NO: 58477 - DNA, 488 bp, Zea Mays
ctagcatcaaagattaaactcttactctagagtcacaacatcttggtcgttctacccaatttgtggtagagaacgtggaaaggctcataatggtcatttcattcttgccaaacctcgatgactacttatttgaatcatgacatatgtgcccaaaagttttcaaatctaaaggatttagggcgtctaggaccgctttggttgggtagtagtgggtggtggtatgaaagtaaaacggtcagggcgtgcaacacataagagctaaaagtcacatcccactcagcattgtagatgacttgatctattttagctaatgtgaggtttgatctctgattgctccaagtgaaccttcgattttgtaacgaaatttttgtgagatcacgagtgttgagcatgtcctagaattgttgcataagtttaaggtcaagctttgcatttttttcttcagtttttctttaaattgaaatctcccaacaataaccaattggtgc

SEQ ID NO: 58478 - DNA, 490 bp, Zea Mays
tttgcttctttattggtacgagagatttggtacgagagcacatagcatacagagtatggccgcttatagagagctgggaaatgccgaaggaaaccatcaccaaatctagtgaaggtgaactggtccggctgaagtacacattcagatacggagataaattcgatgaaccaaacgatgactggctaaaatgcattgaagttaccagtgatgagctgcttggatcgtattccaaggcagaagataatgcactatccacagccttcggaggccagggaaagaagaggttgaacagagtttttgacgctattggatttgtttacccggactaccgttatccactgcgaggctagggaaagaagaggaaacctgttgcttcggccactctagacgagcctgcaccaaagggaaaaaaattgaaggtccttacccaccggccacgctatattgagccggtcgtggtgcctgagtttggcggggaggcttcttcagc

SEQ ID NO: 58479 - DNA, 399 bp, Zea Mays
tgcagatcgaccacaaggggagtcaggaagccagcagccatacgatccagctaaagatcctaaaagaaaggcaaaatcgaaggatccagcatggaactattgttattgaatggatttgaacaaaaaagatgtggtgaagtgcatactttgtggcaaaatcgttcatgcaggtgttagaaggttgaagcagcaccttgttggtggtcatggtgatgttgctaagtgctcgaaaacaacatcggcaattagcaaagagatgagtgattatttgaagaagaatgctagacagaagcctattaacttggatgatgataaagatgatgaagttgaagtacttggagaaggggaaagtagagcatcccattcagttgttcaacccagttccggaacagcctatat

SEQ ID NO: 58480 - DNA, 1683 bp, Zea Mays
ccatgaagctcatccaaaaattcatcaatgatgggaacaggatacttgcgcttactggtcatagcattaacatggcgaaaatctacacagaagcgccaagagttgtccttcttccgcaccaataacactgggctggaaaaggggcttgtactatgttgaataatgcctgattggagcatatccgctacctatgtttcaatttcatctttaacagctggggcatatctgtatggtcgaatgaatactggttgagctcctggaatcaggggtattgtgtgatcacaagaatgggagggtggcaggcccttaggttcttcaaatactgtttgatgtttgtgcaacactgaagaaattatgggatccaggtcagctgagaagggagcactattatccaactgaaggagacacaccacgtgcagcatatccaattgatctgataggggcaacacaccttgcagcacaatgtgtttcccttggtatggcatagaaatccatttgtccttctagtggatcttcatagggctgtaagcttccaactagtccattccgagcaccacatcatacgcagccaatggaaaaattcgtaaatccgtcttgaatgaatacccctggactgtccattcagcagaaggaaacatgtgtgtacaagaaactcgactattgtctgcaaccttcaccgagaccggagataataaacgagatgcacccttgagatgagcagtagctgaatcactaacaaaagagtgtgtgatgcctgagtctatcagaatagagatggattggccctgacagatgccttgtaaccttactgtgtaaggagcagaggttccagaagttgctgacagggaaatagccataaattcttaaggacgtgttgtattatcagcctctgaaactgcacgctctgcatctggttcatggaacaaatcccacatttcttccaatgcatgcaactggattgttgaagagcatcggtggccatgagaccatttttcagcacacttgtcacagagtccacgagcgcaccgatatgcttttaacgaagccaatttatcctccccaggtcgcggacgaggcgtctgtggacgtttacccccatcagtaggaagcctgtctgatggtgggggtcgaggtaatggtaatggttgctggatagaggagccccgagcgtaaaatgatttccgagcatccgaacgggatggttccatctcctcttcctgtaattgggcaacagcacaagcagaatcgagagtagccggtcgatgtaaaagtacagaagatttaatggtatcatttaatccatctataaacctcatcgtatagaatagtggatttgttttggtttcataagcagaaagttggtctatgatatcaaagaattgctctatgtatactgctatggtggtggtctttctaatgtggaacaattggcaaataaggtgttcatgcttgtctcgcccaaaacgttctaataggcatgtactaaattcacgccagttagcacccctaaggcgtctctcaacagactgccaccaacgagctgcagagcctgtgaaatgcatgtgtgacacccggatccacacactggggtcaacattatatagatcaaaatattcttcagctctactgatccagagacgtggattatccccatcaaatgaaggaaaatgtagcttcggcagc

SEQ ID NO: 58481 - DNA, 491 bp, Zea Mays
gcaaccggagcacggagaagatcctgcgtgaacatccatggaagtacaagaaggagaccctgctcggacaccctcgggggctgggctatagtttgcgctacccacttgagccggatcatctccggcagtaccctcgggggctgggcagtggcttgtgtttcccacccgagccgagtcatctctggcaacatcctcgggggctgggcaagtgtcaacaccatccttgaggaccaagttctccgcagtagccgcctctaaggctgagggtccctcaattacttccatgggagcaagacgatccaagtcagtttcctgacccccgagaccgcgctctaaggtcgacgaggcgcggggcgctgctcgggatgatcccaacccggcgtcgagcacatcagcacaaacctccatcacaccatcatccgctggctctgacagcaggtcttctggaaccatatcttcaagagtctgatcaaagtttgccagggacaact

SEQ ID NO: 58482 - DNA, 507 bp, Zea Mays
cgaaagcatagctgaagcagaaactatcatactagagtatattgatgtgctggaggaagagcgattgaacacagtaatttagtcagccagataccagcagaccttaaggcgctatcatgataaagccgtacgacaccgatcctttgtagtgggagacttggtccttcactgaattctaatgggggaaggacgtcacaagttgtcgccactatgggaagggccattcattgtatcagtggtcactcgaccgggatcatactgacttactcaaatggatggcacggaagtggggaactcatggaacatagagcatcttagaaagttttacctagcaaggcctcaaaagctatcgaagcaacattgtactctgtaattggagaatccatcatcaataaagttttcattttcaaaggcattcaaactcttgactatcaactgacttcgattcgattggacttgaaatcaacacacttactcgacttagggtgaccactataccctactgac

SEQ ID NO: 58483 - DNA, 657 bp, Zea Mays
gtggatcgttttgcaggtatttgttgggtttggatttcctttagaccggagatggataaattcgtggagcaaagcccttctccgagggcctctctctctctctataagatcttttgaccctatccatgataataaaatagtccgaatgatattcgccacatccattatacttgtcccgcatcattactttatcaagttcattaatcatctgattggtaccgtcacattctagatcacccacttacattgactctatctaagattttatttggttgcttgcacgtggaatatgcagtctggctgagccaatgcaaaaaacaatatattgtgagaccatttgttgcatcttgatacgcacgtgtagaacgagcctatcccgtcgctcaggctcgtgggagcctaactttgtgcaagctggtaaccaatcaagcgataagggattgtttgggagtggagtatttcctatgtttttagataatactatggtatctggaatactatggtattgttttttttttgcaatatgatgtttgataacatcttcaaaaactatatatacaaaactatgattttagctataccgcagtttctcacgatattgaaaacttaggtctggaagaaagtttctgcttgcgcacatctaaattgtggttttcc

SEQ ID NO: 58484 - DNA, 821 bp, Zea Mays
atgacggccccatccgcacctttgcagacctccatggcttccatgagccagcaagcgatctacacgtcactgggggcggggctataaaaggaggaggtcggccactggacgaacggacgaccggtgagacgacgaaccaacaaaaggaggaaggacacatcaacgaagacccagagacctgagccttgccgccaagccaagacttagttaggactccagctctttaacccttagctccacctcctccacacaagagacttgggagcttcgcctccctctctcgctcgctagtaacccttactacgaacgttgatcagcaaaggtgccggtagcgcgagccgtcgaagactaggggtagggacatttcgctcgaatcaatataaatctcacgcccaccacgtacaccatctgaagcccaaaactcgcacacatatttacttatctgagctagattcgaaacaccgataaaatgacatattctctccgttctttttttgacgcagttgtttttttttcaaatttgaaccatttgtcttattaaaaaatgcgaatatgtaaaaatacaacatgctcaaactaatcttagcgataaaacatataataaaaagtagatgatttacaattttttgaataagacgagtaattgaagttttcaaaatcaatcatgtcaaataaaaaaagaacggattgagtagtattttgattttggtgcactaatttgatgcaccttgctggagatacttatatgataatttgataatttcaaagtgaacctaaccaacacaatgatatttatgtgcaaatcataccttcttttaaat

SEQ ID NO: 58485 - DNA, 470 bp, Zea Mays
cgagtaagttgtcttcacaggtataaagtgtgccactttagtcaacctgtctactatgacccatattgaatcatagccatctcgagtacggggtagtccaactatgacatccataccattttcctcccatttccattccggtaccttgtgaggttgtagcaatcctgctggtctttggtgttcgactttaactcgctgacacatgtcgcacaatgcaacatgcgtagcaacatatcttttcaaaccgtaccaccaatacttttcctttagatcctggtacatctttgtactcccagggtgaatagagtaggctgaatcatgagcttctctcaaaataagttggcgtaggtgttcgatttctggtacacatattctcttcttaaaccataatatgccttgatcatcttccgtgaaatctggggcttttcccaaaccaatcaaagttttaatttccttaattttctcattgg

SEQ ID NO: 58486 - DNA, 706 bp, Zea Mays
ccaagttaaataagcgcgagcatgttgcaccgtcttaagtcgttgccgacttaagccgattgctccgttagcagggcatagtggccaccctgggttaagtaagcgtgagcatgttgcaccgtcgtaagtcattgccgacttaagccgattgctccgttagcagggcatagtggccaccccgagttagtaagcgcgagcatgttgcaccgtcttaagtcattgccgacttaagtcgattgctctgttagcagggcatagtggccaccccgagttagtaagcgtgagcatgttgcaccgtcttaagtcgttgccgacttaagccgattgctccgttagcagggcatagtggccaccctgagttagtaagtgcgagcatgttgcaccgtcttaagtcattgccgacttaagccgattgctccgttagcagggcatagtggccaccccgagttagtaagcgtgagcatgttgcaccgtcttaagtcgttgccgacttaagtcgattgctccgttagcagggcatagtggccaccctgagttagtaagcgcgagcatgttgcaccgtcttaagtcgttgccgacttaagccgattgctccgttagcagggcatagtggccaccccgagttagtaagcgcgagcatgttgcaccgtcttaagtcgttgccgacttaagtcgattgctccgttagcagggcatagtggtcacc

SEQ ID NO: 58487 - DNA, 539 bp, Zea Mays
ccaaaattcgggaacagtaggggcctagatacaaaaattcctatgactcagagcgatgataagctggacggtgggttgagtcatgcaaagtgcaggggttgatttgtaatatgtgcaagccgaaagggtatccgatgatgtgggccgtccaatcggccacgtaagttccagattaaatcgcaatataaacgaagcggtacgcattgccgaccgtaagatatccaatctaccgcccagatcctacttgtgcctgattcgcccgatcgcgatccgacgatcgcgcgccacccaacccgaaacgttatccacgctccaatcccaagcgtccatgccccgatcgacggtgccgaacccctgaccatcctagggttagcccgcggcggaccatcgccggcgcatagcagaaacaccccagcggtgctcggatccgatctcgcgagaacccacacgatgcagagggcacaacgaacacaggtgcatgactcataccgtgatccgagcgcaatcgatccaaccacggtgaggctcgcgtccacggc

SEQ ID NO: 58488 - DNA, 874 bp, Zea Mays
aaaagaaatgtggttgtacccgtagctgggccaacattcccctctgtcggcccattcctctcctatttccctcttcggcggggcccacttccccttagcccgcatgtcgccctccctcaatccaaaatctatgtgctcgctagctgcttcctaagcacctaagacaatggcgtgtgggtccatgccgtcagatgtctcccccaccaaataccggatctcaacagaaagcagaacagggcggatgcgatccgtagaaatcgtaacaaacctaggcattgaactgacccggattctctatgctcggtgtataaaggcggatacctgacccctgaatcatagccatcgtaagctgcatcaggaagagatagccgaggggatcatcgccgtgggaaggttcgccgttgctggtaactcttgcctgcaccgccattaatggatcaatgggagatcgagcaggatcgccagcacacagggattgtaatcgaggtcgattcagagcacgaaaggccatggcgcgaacgaaattttcattgattgcgcagcatccgccacggtgcgtggacaacctcgtcagcatgctaatccttggtaaggacgcctccattgagttttcctctctctccgcagcgtgtagcatccgtccgaactagaaatgggcgccatagctggtagttgggaggtccgtccatgggcgccgccgcggcgagcctgtgcgccgccgctctggtgaccgggtgtggaagaagacgatccgttgccgttggatatggtgtggatgggctggattaaaggtagcttaccattcggggcacgtattggtcacagggggcagctcgattggcgccggtgagatcgccgccgcgcctggcggacg

SEQ ID NO: 58489 - DNA, 1027 bp, Zea Mays
cgatcaccggcgtgcctgtactggccgatttacgtaatgaccggcgctctccgttgactggcacctaattcacacctcaatcgaagtttcccgtaagttaatttcactaatggcgcactaaaacgccctgaccacggtgaccgtatgggcaacggatgaacacgggtgttcacgacaacccagggcggtctagttcaatcagaggggtcgtgaagcttgaggatgacttagggatgctagaaaaaacgatcaaagcgcttgaactaacccagagcaagctggccatggcgagggaaaaccgtgcggagttcttgagtgatttgggggaaatctcaaattgaagctctctggtggaggatctagggtataggtgggtgcgctagatgcgtgaatacataacgaagctgatggtgcactcgatttataggctccgggggcggtggctctcaatttgatcacggcgtgctggcggccgaagatagggaagaacacggtggctgtaaccgtggcgttcaccggtgcaacggcgcaaggataatactcctaagggtgccacgattactaccgcataataacaagctacagcgtggcgcaaccgaggtcaccggcgcttccacggcgacgccggtagtccggccacgttgcaacgactatagccacggtgataaactccaatctgcgatcctatccattcccccatgagatctttaccttctcgtagaaatcttctgcgtgcaaagcacaaatcccggcgaccagcacaaatccagacgcggatcgccggcggcgagctgaccgagctggtagtctaatcgggatactgtaccatcgcctagtttcttcagaacgactgaccgagcaccttcagggcggatttttagcaaattttatgtgacgactccatcctccctctgcaccaaagttgtagacctatcaaccatcttcacctttgttatagcatcactagtcagattcctactggatcatgcttagaattgagctttaagttcatgaaatcccattgtta

SEQ ID NO: 58490 - DNA, 784 bp, Zea Mays
ggggaaaggcctctttaaagttactaataaaggaggatagacattgtgcgatgacaggcgtacaaacaccgacggggggaatgaattgacgaagggagttcaaagggccccacaaacatagtcccgggtaggtcaaaaaaggcgatatgggaaaaataaaaaatgttttttcttcagcagcgatgggacacactacatcgtgagtcaatgagcgctgagcacgacgtcgtttgcagataattggtccacgacatggttgaccgcctcgtcataaccctctacgatgtcctttatccccttttgtccgacaaagatgagggaggcccaacgacgtcctaaagagtgcagcccgaccgaagctccataaggaatattgtccaagcgcttcacaaggatattgtccaggcccctcgactaaagctcctcgacgagcatacgtcaaagtcaacaatatcctgaacacgacacacgatattgtccaggcgctccacatgggacaaactgcgtgcccggacgcactccgcaacctgacccgcccgatgacacagcttctccagctcggcttccaaagctatggtacgaaaaaaggaaaacatgaaaatgaattaaaaaggaaataagaaataaaaaggcaacggggcacatacgaacaaacacaactttatcaaggtagaccaccctgttttaccatggcgcagtagctccttccttgcgaagctaccggtagtcgaccacacattggcctataaaaaggaggaggtcggtcagaacacatgacgatgac

SEQ ID NO: 58491 - DNA, 459 bp, Zea Mays
ctttgacttgtgtcacgaggagtaaagtgatcaaaatgtgcaatggagtcatcatggtgaggatgaagctacttgggaaagagaagaagagctacgaatagaatttccccacctcttccccagttcctcgtaatctcgaggtcgagattctttttaaggggggtaggattcgtaaaccctagtatagagtactaatgacctttgtcattgaaattaataaagaagctctttggatgaggtgatttatgcacgaggcacattttattttgaataaataccaaataaaaacacataaacctatgcatcatgttggtcttctttttggttgtgcattaaacacaaatttgtaattaagacaagtctagatttgaattcaaattagagcactaaataaaatgggagaaatagagttaaagaatggtggatagctaataattataacaataaataagtaataat

SEQ ID NO: 58492 - DNA, 643 bp, Zea Mays
tggggatgtagtcacatttgacacaacacacaagactaacagcaagcatatgccgttggccatgtttgtgggttgcagcaataatttgaagaatgtgtcctttggccaagcacttcttcaggatgaaacaattgacacattcaggtggctttttgagacctttaaaagttgcatgggtggtcagcagccttttgtgattcttacaggtatgatttgggcaaaaacacttatgctttggctgcaaaaaatgcttgtcacataattactgctgtgttgttgcaactgtatctttgaagatgattgcaacattttatactgcttggttgcaaacctattggggttttttgcagatttttatttttgacacacagatgaagatgtagtgatgaaggaagcgataaagattgtgtttaacaagacacaacaccgaaattgtcgatggcacataaccaggacatgggattacgagctcgaggagctgtacaaattgcacaaggataaaaatctaaaggagaagctgcagtccctgataaactatcctctagggcccacacagtttgtggtggagtggaataagctggtggatgaatgtggcataagagaacaccctacaattgttgcattgtggcaaaaaaggaagaga

SEQ ID NO: 58493 - DNA, 1230 bp, Zea Mays
cttcaattgtagtgcccgccgatgaaaatgtgcctggctctgtgtttgaatgttttgagtccgacggtgagtctgggagttcgtttccttggacggaggagtcctcggacgaaggcttagattattttgttgcgttggatgtggctgcggcggagacttcgccgcatgtggtgggtgctgaggatcttcctggtacgagtactgggtgtaggcgacgaagggtggtgggaaaacagtgtgtgggtggattttcgcggagcggcaggcgccgtcgcatggggatggagtgtggccgacttcgagtagacggggttggtaggcgagaattgttgtcttcgccgaatggggcgggcataggcgaaggggatcttcgggagctctttgagggtgaggagttgaggataatgctgtttaattacagggagatgggtatcattccgaaggttgagccgatgtgataggcgatgcccttgccgtgtgtatgtaattgtaatggtggtgtggccggttggtcgtatttgtacgcttgtattgttccggctgcgtatatgggcggctttgtgcggagtgtctttgtaatgatagacttcgattaacgttattccggctgcgcccttaggtaattgttgcgctgtcttttgaataaaagacttcgtttgacgcttctgttgtgttgttccggctgcacccttaggcgacttttgctcggaatgtcttgtaaagaaaagacttcgaataacgctcttgttgagctattccggctgcacccttagacgacttttgcgcggaatgtcttctgaagtaaagacttcgaataacactcttgttgagctattccggcttcacccttaggcaacttttgcgcggagtgtcttctgaaaaagacttcgaataacgctcttgttgagctattccagctgcacccttaggcgacttttgcgtggagtgtcttttgaataaaagactgattatcgcacttgttgtgctattccggctgcacccttacgtgactttttgcgcggagtgtcgcacgcgagggtagtctgcgctgcctctcgcggtgactttggagtggtcgaatgccgaagactgttgatgcggtcttttcgacatgttgcatcttagttttttgcgggggatttttgtagatatattacatggctccgcctcgccggccctggggggataatcttgacggcgaggggcctcaccggcggggtgctagttggc

SEQ ID NO: 58494 - DNA, 422 bp, Zea Mays
cagaggggttatacaactattgggtggttaaggtagttgcatatggccaggttggactaagactccaatttaggttaaaatatatttacaagagtaggatccaatcttattttaccagtattatctaacatgtttgtccattagattagatctgatctgattagatgggattagaattaaattagtgtaatcagattagactagataagatctacttaatttattttggaatagatcatgtttattacactattatgagataagcagagttgtggggataagtatgcttattaggacaagacgagtctctaagaataagctagaatctttttgattagttagatctatttggctaagataaaatcttttcgggataagatgcatctattaagataagaaagaatcttttaagataaaatgga

SEQ ID NO: 58495 - DNA, 520 bp, Zea Mays
tatcacatttgagtcccaaaggatcgggacgcttcaggtggtatcagaacctataggactggccgtagaccgcagccctgaccttaaaagttgccttaacaaagaaaacacctcttaccccccaagaaacactcttccccctttccccgatattaacaaacccctcttttcttctaccagatggaaggcccctgggttattaggacatcctattgctcagaggaggaaggctttcctcaccttcttcggagttgcgcgctacgcatggggatccgcaagaagcccgaatatgtctggaaggaataccgcgaaaatggaatagaaatgtgctctatggcagtctacctgggagaaagccgaaactacccaaaccaccctcccttccaaatcaccttcatcgggcaccgcttcccagacacctgccagaaagttgcccgaaaagccctcaaacagatgtgccaaaactacagccgggaaatctctgagaccccccttcgatattttccacccagcaacaaaa

SEQ ID NO: 58496 - DNA, 303 bp, Zea Mays
cagtatgccaatatgccaccaatacatccactctgttaaagcaagcgattctcaatgagtgttcatactttaaagcatttccctataggaatcatttggcataacccggccgtcatcagtatctactttcctaaaaactgatgaaaaatgcttcgcaactgaaaatactttcagagataacagaagtgaagaacaatgttgcgcaaattggcactggtttagatataccaaatattgagaatcaaatggaagtcatttttcacagctatcttcagtctccacaccaaactagctaacactagc

SEQ ID NO: 58497 - DNA, 441 bp, Zea Mays
aaattacatgctaaatgaaattcacagtcatataaatcctttgaagcatcacctccagatgtgttttgaggattttatgagtggttggatgcagaataatatagccaagttaatagagctcagctttaagaccatgccgttaagactttaggtgtgtgtgttttcatgaatgcatatgagcgtgtaattcattgagcggaatagaagtgcgatcacacgcacatccaagccaggaaagggcttaggcagcaccaaaaatagaagagttataggaatcaaactacaggtctgaaaattatcagctgagacgtgcatgcatctcattgttccggcagtaacaacattgatcatctatatggggggagcaaaagccttaaccagtgcatgcacgaaaggtggaagcacattaaatataccagcataatattttatttcaacaac

SEQ ID NO: 58498 - DNA, 628 bp, Zea Mays
ttttagggttaaacatttatatggtactctcccgctgaatatccttgatatttactggaacaaatggtactgcaaactattacggcctaatggtctgcagattgccatattttgtaatccctacactacggcttcacttcgaatctgccttaaactgtcatgtcttatgccaaaaatttttgctccccactgtccacaacaatagaccattttagtaaagtaccagcaagattcatcctagggtaagccaaattgtgttaccttagccgagcaagggtaatggtcattgtttattacagttcctaaaactgtcattaacatttcagagggtcctttacttccttagttactatgaatgatgttcagtaaaattgttaggtctatgtcataccttattgtattgctctacttcatcacaaattttttgtcacccttggatatgactggaggatacataatttgtttggaccttgatatacttggtttgtatattgttacaacaactacatgactttgttctgttcaccgaaatatggctgaacacacatatctttagtatgtcgtattatatttccttacattctgtacaatgtctgtaattttgttttattgaagtaatgtgtacaac

SEQ ID NO: 58499 - DNA, 444 bp, Zea Mays
aaatactctacgatcggcccaaattcatttagtcctactcctcgcctctatataatgtcgatttgtagggtgatggaaaactaggtacgtgttcacctcggttgacgagctagaagaagtcgacattggccctagcgataagccgctgtccacattcatcagcaagaggttgaacccagagttacggtagctaatgataagcctgctaaattaaaggaatattcagattgcttttcttgggattacatggaaatctagggctagataggggcactgttgaatatcgactcccgctgaagaaggggtttcggcctttttagcaacgatcatggttgatgaaggatgaagtactgcaagaggtcaagaaacaggtggagaagataatggaggcatgattcatcaagccatgctggtacgctgaatagatttcaagtgtagtgtccg

SEQ ID NO: 58500 - DNA, 898 bp, Zea Mays
ctcggaggtgctgcatctagagcactaggacgaaccgcgcgaggacgtgaaggtcgccaacgactacacaacactactcgacgtgttcgtctacatcgagacgtcttccgctgccctgcgcgtctagtggtaattccatgatctataaccgcagtagtttctagttttatggggtccaaatttttgttttgcgctaatgtacttccacataatccatcaccccggcgatgccgccgtcgtgtaagaactgtgcgccaccacgattcggtgcctgggaggagacgcttcctgggctctagatcgatggcgggtggtcgtgattaaaaggaccgcttaccccttcgtgttttaaattgaagtcgtggatgcaggatcgagcgaccagggttgtgtaccagttcggttacttaatctaggtcgttgatttcctgttggacggtcttgattaggtcgtggcatacccttttgttcgccggatttagaccgcagatcgtgcgatgggcggttttgggggctcatgcaatagatatcattgatctgtgatccgggggccatagttctataccccttcatgatttaatctgtgatcttagcttccgatccggtggctcccaatgcatcatacctctttgccaaagcaagtttgcttaagagccccttcatagtttacaaataaacccaccgtccatttcagtcgaagaagtaatatggattggtcctcaggtttgcagaacagaccatagaatttccaattaaacccctagagactatatttttagtataaaatcaatataaaactggatagaaacttgtaaaccccataactcactcattttaacttctttttaactcgttccagttgcgtaagcttcgtaatattggctacgctatagtaaca

SEQ ID NO: 58501 - DNA, 456 bp, Zea Mays
gtgcagaatataggatggtgcatgactttcactggattaggtgagacatgtccgtctatttttttttcttctcttgggagtggtaggggcagtaatatcttcaagtaaactcaacaccactctcacacttgttcaagtacgtacactaatttccttcaaggacaggccggggttcatgatgggcccttctgtttcaggtaaaataataagttaataagcatcccatgcatcatgcatggacaatgcatatcaatatatatatgtggacctgtataaacaaatactatacagcattatatgcttaattaatcaggcacagccacaaaagcatgcagcattaagcttagttagagagagagagagagagagatagaatagggggagggcgctgcatgcggctggctgatataacaggtgagacgcacacccctcacctacaccatttgtcacagcaac

SEQ ID NO: 58502 - DNA, 561 bp, Zea Mays
gttctatactttggataagttgtatacacccctagttagaaagtcactagatatatttatctaagtcataggaacatcctcaagaccagtcaaaatcatttgaaggagatgtggacaagaaagaagaatttagtctattgtccagcgcactggaccgttccggtggtgcaccgggccatgtgcgtagagacatcgagcctcggcttttctccagctagcgcgctggatcggtccgatggtgcaccagaccatctacatagagagggtaaaactggattgtgggagctagcgcaccggaccggtctggtggcgcaccggaccgtctgacaacgcccaatggtcgattgacacactccaacggctccctgctctgaccagaataggcgtaccggtggtgcaccgaaccagcactatagacgatccagcgcacccatagaatgtgctttttcatcctaataactccaatgactatttgggtggttgggggccccaaccagcacattaaagacacaagaacctcactacgccaaaaattataaacttcctatggctacataactt

SEQ ID NO: 58503 - DNA, 578 bp, Zea Mays
ttctttttaggatcttcgactacgaagcatacccccaacaccggtgatctagggcagtctagctcaatcgaacgggtcggggagcataaggagaacctaaggatgctgaaacgggagagcagagagcacgaacagacctggaacaagctagtcacggcgagggctctttcacggtggcggaaaacagatttggggagaaagagaaattagagagctatggtggctaataggaggtaggagcgggtgctctggcttcgtgattatctaacggagctagcggtgtgcttaatttatagtgttcaagagcggtggcctccaattttggaatggcgcggtggcggtcgaagtgcaagaagatcactggtggcgcaatcgtggcgttcaccggtgcagtggttcagagagggtaagcctaagtgtgccacggttactaccgcgtagtgaagagtcacggcgtggcataattgagatcgccggagtgtccacgacgacaccggcggtccggccacgtcgcaacggctacaggcacggtgataagcttcccctgcgaccacatctgcttccccgcaagatctttt

SEQ ID NO: 58504 - DNA, 464 bp, Zea Mays
ggtatacctttgttggaaaattatgcttatgcttgttttatgaatgcaccaagcttacgtgttatctattgtctagtccttgcactatttcttatcaaactgatgtgattaaatacatattgcaaaacccaatcatgagtagtggaattggtaaatgggcttatgcacttatagaatatgacttggcttatgaatcattaaaatctatgaaaagccaggttgtagctgattttattgtatagcatcggattgatgatactcatgagctagacatgtcatacgtcactattactcccaagaatctgtattttgatggatcagtttgtaatgagggacaagggattggcatacctcactattactcccaagactctgtatttgaccaaagaatgcttcttttgacttctctagccgattgaaaacttattgccctaacaatcaagccgaatatgatgccatcttat

SEQ ID NO: 58505 - DNA, 446 bp, Zea Mays
ccctaaatatgtgccttgagaggaattcagatgttggccttaaatgccaagtgcacataattaggttaatgaaaacatatctatatcatagaaactgtaaagtgcattgtgtcataataaaagtgtgatgcttatgacagactatgcacttatgaaagcatgttggaaacattttaagcaattacccttaaggatttcaaagagactcaaggaacctccacctttggaacaaaggtagcttatcctcgttacaaggttaagctttaagctctttgacaataaaatcacttcacctagttttaacaaaaatgcataaatgcaggaatgaaatttttgagaggttaaactaggtatgaagcagggatatgcatagacatgctttcttcttccttttatacaagatatgcaaggaatgttgtagcatcccaaaaattcaaatcttgcaa

SEQ ID NO: 58506 - DNA, 425 bp, Zea Mays
gcaggatctcatcctgggatacttgcagttcatggcgatgatgatccagatctgccatggtgaagcggtggctcctctccaagattgttaaagaattgcttgcgtggcgatataacctatctagattgtcacgagaagctgcaagtgctcttttctcctcctacagacaagtttcagctctcaaatatccagaaatcagtaaaagcacaacaaatccaattaagtaagcttacctcgttagccgccctttcagagtcaagctaaacattaagagaagaattcaaggaatttgcgtcgtctaaagaagcagaaacccgagccaggtcgatctgaccttgggaatacttctcctcgagctcagagtactgccgggtcaagtcggcttggtgctggagatgtttctcctcaagttcagaataccgtcg

SEQ ID NO: 58507 - DNA, 281 bp, Zea Mays
ccactacacatgtgcatattactatcatagagacaaagcagctctatttgagcaattctgtatcggttttattaatattcagcaccacatgttcagtccaagtacaaacgcctgtgcatgttcagttccaatagaaatttaggcatgcaacaacaattcagatcctgtgcatgttcagcaattctgttttctagacacaggcatgcaacgacaaatgtccaacagcacatgttctgtccaagatacaaacaacagtctcagtttcaactagcaaattcagc

SEQ ID NO: 58508 - DNA, 491 bp, Zea Mays
accatttagcgaagatggtggtgacggtcgtcttggatatgaggccgtcggcataccagaataaggttggggaaacccatttgttgccgatgtgtttggcgcaattgttttggcgcctaatttatgtgataaaaaattaggcatgtgagtttttcctaatgcatgcgccatcctttatatatcctctgtgatacttttaatccgattatcaaaagaaattttaataaatggaatatcatcggctgacctggcatcacctatcgtggggagctattgcagcacggctgacatgtactcggcgtttatctccctctcttggatggccttttggtggcaatctaccctgaagtgcgagacagcgagaggaaccacttatccgccaccttgagcacctgatctgtttgtcgctggacctcctcgtctattttcttcatgtcatcttttaatctttcacgcttagtggctgataaattagtcagccttgtgttgct

SEQ ID NO: 58509 - DNA, 370 bp, Zea Mays
ggaggagcatcggtagtaggagattcaataggaggaggagcatcgatgataggatcatcattagaagaagaataattcatggaaggctggtatggatacaaaggacgaggatatgggtatggagacagagattatagagtgagagaacagcagaaacatcctcccaacaaaaatgtatgggagcaagaccgtcgaagaagaccttcctcccccactgacgagggtgttagaaagttgtaaagattggtcattgagcaagtcagtggaagtttgaaagttcagactccacctaggatccatattgagatagagagtgagaggctacaacatgaaggaagatgagtgaaatgaaaagtaaggggtgtgaatg

SEQ ID NO: 58510 - DNA, 321 bp, Zea Mays
tagctcccggaactcatcctccttgagttgaactatcccctggggtacgtggtgctcacggaaggctgcctcaaattctgcccatgtagcatctctgacggcttcactgaaagtgtcccaccatgctaaagccattcctgaaagctgatgggctgccagctgaacgcgctgattctcaggacatgcgatggcttccaacttcctcttgatcgtgcgaagccagtcatctgcatcgaggggattgctggaccccgcgaacgtgggaggcttgagtctcagaaattctcccatcctgtcctggggccttccaccgcctgggcg

SEQ ID NO: 58511 - DNA, 350 bp, Zea Mays
gagggagcacatgggaaaaatggagaaaccttcatggacaacaatgggaaagctcagtgtagaagacggagttcgccggagccgagaagaaaatcatcgattagtggcgaaccgacggttagaccgatgaatcgaaaacatcgggacaaagctcttgacgagatggatgtagtggtactctcggattttgccaacgacgcatggattgaaagtaattgctcaccgtaattggaaccgccccgaacttcggcgagcaattccgggaattgtggatcgaatctggggaaacagttttgaaatttgaaaagggatcgatgagagggttccatccatatatattgctagggttt

SEQ ID NO: 58512 - DNA, 724 bp, Zea Mays
gggagattgcggttgatcaaaagtttgcatgtcatgaattttctgagaatgcgcatgttagagctgctactagtgagtttactgaatttgcttctgtttggtggatagaacatggtaagaagaatcctaataacatgccacaaacttgggatgcattgaaacgggtcatgcgggccagatttgttccttcttattatgcacatgatatgttaaacaagttgcaacaattgagacagtgtactaaaagtgtagaagattattatcaggaattacaaatgggtatgctgcgttgtaacatagaggatgttgaggaatctgctatggctagatttttgggcgggttaaatagggaaattcaggacatccttgcttataaagagtatgctaacgcaacccgattgtttcatcttgcttgcaaagctgaaagggaagtgcagggacgacgtgctagtgcaaggtctaatgtttctgcaggaaaatctacaccatggcagcagcgcacgactacatccatgaccgatcgtacaccaggaccaactccctcgccgagtcgaccagcaccaccgccttcctccggtgacaaaccacgtgcatcttccacaaattcaaaaaccaaatgtgcccagaaaccagcaggtagtgcctcttcagcagcctccacgggtagaacaagagatgttctatgttatcgatgcaagggctatggacacgtgcagcgtgattg

SEQ ID NO: 58513 - DNA, 1204 bp, Zea Mays
cagccggccgcggcagtctacggaaacttctcgctccacctcgcttcgcctcgagcactccgcggaagggcgaaagttggcagcgacgcggcggcggatctcccgtcggccggtggagtcggccccgggccccctcggtttcggagaagaggacgtcgtgttcgtgaccacccagtgctgttcgcgacccaagacgaagaggagtccaatccgcttccggcgaggaacgtcgcgaccgattcgttggattccgtcgacgaccatcgacggcgccctcagatccacaaggagaagcttcgattcggcgtgttgcggccgagatctccccttcttaaggtactatcttcatcaacctcggtaaatcaatacttttttctcgattcatttacaacagcacgtgtattttgcttcgattcgccgtcttgcgggcgagatcctcccttcttgaggtataccatcttgtaccccgtcaaacgaaaacttaattcaggaaagattcagattaccacaggtttttttcaacattcctattttattttggccagcccatacgagtttagcagatccacacttgtagtttcacctacgttcttcatcctccgatttagcccccttgtgcaacaaactttgtctgtaccattacagttgtaatacacagcaacagtcagtactcgtgctttcggaacaactttgaacccttctttgtgcgtcatgtttctacgataggctgacggcccctacaagtaatcagttcacccgtacatgctaatggaacaaaggttttcaaactcgtagcctaacattacccatgacaccaaatctatttccccactgatgttgattcgactgaaccagctgtttattaagtgaaccaattctatttctgccgattctgtggaatgttaccatttcgtagttatttagtcttctccaatataaggcatttcactgacacactgattgttcaatacatttcatcacatgttcatttacttttgactatgattttttgcctgatcatgtgtctgcctcaacatgtgtttgactatgattacatgtctgattatgtaatgttcaagacttgaaccatgtctttctgtcatgacaatagttgtaacatttctatctgcatgttctactttccttttctagttgtgtgccatacacttcccttacgtttaattgtgtgtataatgttattgct

SEQ ID NO: 58514 - DNA, 439 bp, Zea Mays
caacctcagacagagaagatggcttgagttgattaaagactatgatttggagatacaatatcaccccggaaaagcaaatgtagtagctgatgctttgagccgtaagggtcaagtgaacaacatcactactcatttgatgtcacaagaattgtgctgggaaatggaacgactcaaccttggatttctcaataatgtagaagcaacagtgatggaagtcgaatctactttggaagacgagattcgtaaaggacaagagtccgatgagaagattaaggaaattaaaactttgattagtttgggtaaagccccagatttcacagaagatgaacaaggcacaatatggtttaagaagagaatctgtgtaccggaaatcgagcacttacgccaacttattttgagagaagctcatgattcagcttactctattcaccctggaagt

SEQ ID NO: 58515 - DNA, 395 bp, Zea Mays
cgatttatagctggttggttgagctacaactttgttaaagacggattagtaagtattcacatgaaaatttgtgatctaggcttttcaaagtggactgtcaggatgactgaatgagaaactgatggtacagtatcgaaatatctcaggttcagttcatctcgccgccggcgaccatgtgctcggattcgcaccagacgctacgattcgtgctcaacggagtactgatagttgctcagggtagtaaatatcgccgtgtggatgaacttgagccactgtttcactctggttgtcgtgtccacctgactcatggccgattcgtatgaactcaccagagttagccacctatggaccatacgccacgtgccttggtgccttaccacgtcgcaatagctcgt

SEQ ID NO: 58516 - DNA, 305 bp, Zea Mays
gggggtgttctggtcatttctctggttattgcttttctgaggtgtctgctggttgcgccttgggcagttgttagcatagtggcccagctcaccgcacttgaaacagccattgggttggactggtgcgttgttgcttctggcctgcgtgttaatggcgccaccttgacgattctgtgaactcccaccagacctctggttggtctgagagttgctcatttgctggttctggctttgattgttcctctggccttgttgtccagagcgttgcacttgataattatttccaccctgatttccagagcgga

SEQ ID NO: 58517 - DNA, 770 bp, Zea Mays
ggttagctacccttcagaggacaagatggcttggtgctatgttcttgagttttacttttctatcttgccacctcagtgtctctgcttgatatttccttatgtgctcgacttctttgagccttgactcctctatctcatcctttgaaacttcctcatttttgtgatcctgggtcgatgttgtaactcttgtagaacccatctttatttcttcgggggtgacaacttcgtccacaaagagaagcatgaacggtgtaaagccagtggatcttgatactgatgtgttatgattccacacaacttttatgagctcttctgtccatttgcccttcgatagtccaactagaatttcgtaactcccagtaagattatgtcatttgctctttcaaccaatccattagactctggatgtctgaccgaagaaaaatgtatatttgttcccacttggccacagaatgttctgaacgcttcagaatcaaaatgagtgttcttatcaacagtgatggatttcgggactccgaagtggcaaataatgctctgctagaaaaatctttggataatagccaaagttattgttgccaaggctttagcttcgatccatttggagaagtactctacttccaccactgcatattttagatttccttgtgctgctggcattgggcctattttatccattccccatctttgtaggggccacgttggttgtatcagctgggtcaaggatgaaggttgtttttggtcccttgcacacctttgacagttatcacact

SEQ ID NO: 58518 - DNA, 634 bp, Zea Mays
gctgagcctaacaatggcgttgggggtcagttgatgaaaagaaatcctgaatttttccaagacttctacaatcattccatgcagcggaaatctcaaccctgctttgaagaagctcttaaaaactacaacttcatcatttttcggcttcgggatagtctcttccccaccaaagcgaaccaaccccttatcggcttccttgaagtagcctagcttcgtcatcatagtcatatcagcttcagacacagttgattttccaaaatccagatggctgggcttcgatggcataataacatcataatcaatctctccttcattagcatcaccctcttcaatatctgcctgctcggtttcagcagcgggtgattctttgtcagcagtgccttcagtcacaatcaatcccgaccgcctcataactttggagatcggagcagttttagcagcttcggcttcgtctccgtcacgagtaactctagctgtcgagcgtaccctggccatttgatgttgaattttttgcgttttgacgaagttgaaaatttttatctttggcgaagctctttcttgtcatgaagctagagcaagatgatctttcggttcagaatacagtgagcaagcttcggctgtggtcaaatttttt

SEQ ID NO: 58519 - DNA, 469 bp, Zea Mays
cggcggttcgcctccttgtcgcggtgaagatgaaagggcgtataaccacagggtacttgcacgctccttgtgcgacaattcgccttcttcgcgcttcgggccagcttgtatgacatgtgaggcctgacccccatgtcatagggtggaaaccctggtgcgcatcgggggagaccttgcccgtgacgcttcggggcgcgagcagggaaatctgcctttaaaaaggggttcacccctcgagtagcagccatgacttgcttctcttccactcgcggcgtcctttcgactccgagctctctacgcccctttgccttcaaggtttccacttcgcgttgccttagttttccatggccttgtgacttcatctcgagcacacccagactgagtgagtgctcgaaacggtataccgcctgcttggatggaatgtgccggtatttgccgggaggacttgtgctggggtctctcctctcgg

SEQ ID NO: 58520 - DNA, 390 bp, Zea Mays
tagcctattgcaatcgttatctatgcctaattggaaataagaggagatcagtatgcattttgttactggacatccgattactccaaagggcaatgactcaatataggtcatatggatcgactccacaaatcagctcgctttatgcctatcaagacgacaaatcgaccacccaagtatgcggatatttacattaaggaaattttttagttgcatggagttccaagaaccattgtgtttgaccgtgggacacaattcaccgatcacttttgggaacaattgcagaaaggtttgggaactaagcttgtgcatagctcggcttaccaccctcaaacatcgaggcagactgaaaggctaatcagatcctcgaagacatgctaagagcatgtgtgc

SEQ ID NO: 58521 - DNA, 294 bp, Zea Mays
attcaggtccggtcttgccctctactctcttgtttcagcactcctacataccactgatgctcctcgacccattcaattaggctagactgccctagatcaccgggaacacccgtgctcatccgctgtttgcactgcctccgtggacaaagtcatttagagctcgaactgtgaaattgatcgaggggaaatgctcgttaggtgttgaattagggttcagccaatttagggcatcggccattgcttatcttggccggtacaggttcgccgagctcggttcttcgtcgtgcgacgtcg

SEQ ID NO: 58522 - DNA, 621 bp, Zea Mays
ttgtgatctattactacccctatatgtagaataacatacaaaacgatgcccaataaacagaagaagaagaaaatcagatgtaatgaattaaggactccaatactgcatgagcaaactaaagcaggtcgggtgtcacatcgcaaggtggccctgcttgttcccattaccatgagttcctgcagttgcagcaaggcagctctcacatctctctcatgcatcagactcgctgctagctcctcatcgatcaccaaagagacgaaaccttagcatcctcgagtacgctgctgggcctgggtggccagtgttgttgacgcagctggcacaggatttcacatgattgggtgggaacagtagtgagcatgcatgtattacccagcgggcaaaggaggggatgcggcaaggcagcatggagcacacactgcaccacgcaacaccagagcactccatgcatgccgcttgcattggccagcccttaaccactctgaccgagccaccggctttctttactcctcgtgtagactcccaagactgtgcacagtgctgcaggcccagtggcaggcaggccagtgagtgctccttctgcccatggcgggccatgccattgggcgttggcttcctccc

SEQ ID NO: 58523 - DNA, 1068 bp, Zea Mays
cgaagttgaatactatatagaggagtataactttgctaaagtaaggttggcatgttgttatttggaacagaagtaaaggtgcctcgaagtggcgctgtcagtcggtctgatggggggatgcggttactgcatttggttatactgaatctgagatttagtgttattgagcaaactttggcatcgtcgtgtgcttaatccgtggagattttcggcatggttgttataccaaagtggaagagcgttgattagtgttccactttgatgaggaccgatttgcaagtcgttatacgaatcaaggcacaaagttcatccgaactcgggctggtaggcgtggtagcaatctaggttaagtgcactttgccgtgaataagaatgccaccgctgccatgttcactgctcggactcgcgtgcctgggtaaaaatcttccaagacgtggcgcatgtaaccatgaggtgtcgtcgttcgaccaaagcatttcgcctaggcgctcgttgcggccatacctgctcacaagctcgccagcgcagtgtggaaacctgaagatcttttgaaattccgtctgattccggcaacctccctataagttgagcccaagcgctacttccttgcccccttgcgcacctgagtgctagcgtgacccgaccaattctgtggagaaaccctagagaacctattatcttcctctcgtcgtcctcggctctgccatgggagacctctccgttgacaggtcagatagagcaagtattgttttaattctgcctcgctcgaactccctcgggtgctatggatgctcctcgacgcatttgattcatcgctataaccgttacctcattagaacaaccctccgacatcggaaaactccaccgtccggcatctcaacgtggaccaccctctctgttcttcgtccaagtcgtcccattgctgttctgggctcctggtgagttcttaatgcttgttgtgcctaccaattgaattctaccgcgtcgtggctccagaaccgaacccagcgaacctcgatgtccgccatggtcacgtattaccaacgtcgttagccaagataatctgat

SEQ ID NO: 58524 - DNA, 625 bp, Zea Mays
gcgggactgaaggacgaggtcgtggccgagcgcgcgaaggtgcctccgctggaggaggaggtctgccgcttgaaggcaaaggtggccctatagtaggaggagatatggctgctgaaggggaaccttcaggcggtggcggcggagcaggatgagtctcggcgtcaggttgccaaagcttccctccgcatcggctacctctgcaagcacctagaggctgagtggtctaagggtcgaaccctgagggcccggatgggaggtattttgttgaagtctcatttttatttggtctaatgtcttctttctaatctcggcacaacacttctgtcctttttctagggctcgagaaggatctggagaccgctgcccagacctcccggactctatcccagatcatagatcggagggtggccgagctgaaggagatgtccgatgtggtgttggagttttttcgggacttcgacgtggtggacgtccccctagggcgggccccacggagccgtaggcgaaccataaatggctacgtacggggtgaactctgcgaggccgttcaccttggggtgaagcgagcgttggcctcccattacgagattgatctcgagcgggtgtgcgagggctacgttctccc

SEQ ID NO: 58525 - DNA, 388 bp, Zea Mays
gaaaccgcgatgcttagcccgtggatcagtgcttcgtaatctgctgcattattgggtgccggaaacaaaagctggagtgcaaacttgagttgctctcctccaggagcaataaagagaatccctgcacctgctccttgcagcttcagcaagccgtcaaagtacattctccatattttagcaactgttgggctttttgagacctggtgctcagtccattctgatatgaagtcaaccagtgcctgagtctttatcgtcgtgcggggtcggaactctatgtcgtgagctttgagctcgcatgcccacttggctatccttacaatagcttctttgttgtgaagaatatcacctatcggaaattgtcacacccgattttggaaggtaaacctaa

SEQ ID NO: 58526 - DNA, 376 bp, Zea Mays
actttgttacatgatgtactcacaaaagatcacaggatcatacccaaaattgaacactaagttcatcaaatctcactgtccctgaacattcagacttaaaaggacctgacagcccatctttagacttaattatctctaaattcttcttaacaactgagctcacattcttaagcaatgttgttctcctatgattgggctacaattttgatgtggttacctagggcaaaatcccttttgtttagaagttacaaggtcacaaagatgagcacattacactgaaattcagacttagtcaaaagagttcaaatgtggctcttttgcaagtaagtccaaaactcagggtttagcttgcaaattcacatatttgtgaaccaaa

SEQ ID NO: 58527 - DNA, 443 bp, Zea Mays
acagtcagttcaagaggggaactggtggactagggttaggctttgttgttaaggatgtgagtgtcgcttgctttggaatggttggtgagtgcagtggcctatgaccttcagataaaccttcatccacatcgaaacttgtcaagctcactccactaaaatcttccacccctattgtgcgagatgtaataatgcctatggagcctatgagagttccacctcagaaacaactgtggtgtctgaaaacctaaccatcttaggaactcacttgacaccctgccagataccattattgttccccctccaaaagctcctcagccacccaaaaagccctaatcccacaaatagaccccatctaagagagaggtgagatttcattgtgattattgtgaaagggagggtcatttcgctgcttttggatttagaaggaagagagatgatggaac

SEQ ID NO: 58528 - DNA, 393 bp, Zea Mays
caatatgatgacctcaccctccactgcacccacctaacctcccgggtggaaagcctggagcaaaaagtcagggaactttcaagggaaaaggcgtccctccaagagagcctcgcaatagctgaaggcgaggaaaccaatacccgtgaggcctaccgcaccctaaagatggactatgacaagaaactgaagaagctcgcccctgcaagaaaaatccgcaagaagaccaaaagccaaggatgccagattgagcagaaggaagaagcccctccaaccctacgccctgccgggttaagaaactcgtccgacaccgaggagatgtccctggccagccttgatgaccttctcaaggaatttggggacactttagagaaggagttggggagtaccctagat

SEQ ID NO: 58529 - DNA, 411 bp, Zea Mays
ccagagtacccaggtatggatgtaaatgtgattatgtactcagccgattgcgctattatcggtgacgatgaacctattgtcactcaattcgattttggttctaaagaggtcgccttcagtaagccaaaagaatcggtcaaccacttaaagtcgctctttgtgcgcggtcatatcgatggaataccaattgctaaaatattggtagatggtggggcgactatgaatttaatatcttactcattgtatagaaaattagggaaacaggatgacaaactagtcaagattaacatgacgctcagtggtgttgggatcgacagtttgattaaagccaagggagtcacatccattgagttaaccatcgagacaaagacccttattgttgctttcttcgtcgccgacgtagaagggaat

SEQ ID NO: 58530 - DNA, 488 bp, Zea Mays
ctaagatctacggatcggatccaaacccaccgaagcgacatgtttctctaaaaccaagtcctttgatatccgatcgacggttgaaatccaatcccaaaccagtatgaccccggttgaatcgagcggtccacaccagatcgaccgccagggcccatctctcacctctcggctacccaacccggtgacgcccacggtcagcacgatggcgccatggccgtgcccacccacctcacacacacgggttctgagcttcgatcttaacgacacaacacgatgctgggatgacggtgattgaatgggcgggtgactcaccaacgatgatgatcggaaggaagctgcccacgtgcacacgcagttccgcggttgagagatgattctggcgagcaattcacgtgacccggtgactccctaatgctcaattctgcccaatacacaagtggtggagtgggccacaactcccagaccaaatcccaggccccgaacggagg

SEQ ID NO: 58531 - DNA, 291 bp, Zea Mays
ggtgttatcagctgcgccagcaagactgttcttctcatagatcaccaaggaaagtcagtttcctgtcaagtccaaccgcccgcaaatgatccaatgatatttaatctggcagtagaaagcatgtctgtaatcaaggagtttgaagatgtatttccagaagagttgcccgggatgccaccagagagaggattagagttttatatagatctcattcccggcactgcacccatcgcgaagagaccataccgcatggcccccactgagttggcagaattgaaactccagatttca

SEQ ID NO: 58532 - DNA, 429 bp, Zea Mays
tctagtgccatctttcttctccacgaacaggacaggggtggcccaaggcgaggtgcttggccggatgtaacctttctctgacagctcatcaatctgcttcttgagttcaactaactctggtccagatactttgtaggctcttttagaaatgggggtggtgccaggaagaagctctataccaaactcaactttccgctcaggtggcatgcctggtaagtctttcgggaacacatctgggaattctgacacaaccttgataatctcgactggatctgcttcactgctatcaacagccatctgataacaacttcctttctttggctcaggtgagattaactcggctaccacttctcctcctagtggggacatcaacttaattatcctcttatcacagctgataattgcttgatacttatctagtcaattcat

SEQ ID NO: 58533 - DNA, 446 bp, Zea Mays
tgaggcacaaaggttttggccccaagtggttgaattgggtcacaatgatcatggagacgggaacatattcggtccttttgaatggaattctaggtaaagtttttcattgcaagagaggagttagacaaggggacccctatccccctactctttgtgttaactgcagatttattccaagttgttgtgaacaaagcaaaaagataatggcctccttaatctccctctgacaaataggtgtggccaagagttctctatcattcaatatgcagacaacaccttcctggtcatggaagcatgccccaaacatcttttctttctcaaggcaatgttgaaatactttgccacatcaacaggcctacacgtaaactatcagaaatccaacatttatcccgtcaatgtctccgacgaaaaaatggacaaccatgccaaaacttttaactgcaaaa

SEQ ID NO: 58534 - DNA, 853 bp, Zea Mays
gcatgcaaaacactgttttgtactgtagactatactatttatagagtgtagtttcaaatatagagtgagataggaggtgggatatggtggatgctggagataacctaggctctcgtcgtgcttgtttgggccattttacccctctatagggttgcactttgtgagcccactgagaggtattagataaacatatcgtttgctgttgttcatggccacgactgcaatggcggtggtgtcttgcaacgttgacccgcctcctccatggccatctcctcctcctttgagtgttctgttgcggcggtggtagaggatcctcgcctccggtgcaacctccatcgtcctgctcgtgtagaggacacaccctaacaccacttccttctgcctcactccattgttatcgttcactcttccgcagcgactggtatcagatgctggtgtgtatggagtagaccttagacgtggaggttcaagccgctcgaccgctctaccttgctgatggtgtgaagccttcttgccttctccttcctagcagtagccaagcaaggagattctttctcgccttctttgtgctactggtgggtggagagctttgtgctccgccatactaattaaatgtgcttccttggcaccaactttgtttattcttcagattgtcaccaccttccccatgttaatttgaagcaagttgagtcctaggtttacacctcctatggctacacgggacatgcgatgattgacttgtttcttgtggttctttgtgattatggctacataaataatctatcagttttgcataatcatcatattgtattgcttcattttgtgttgatctatagccactaattcatatatg

SEQ ID NO: 58535 - DNA, 491 bp, Zea Mays
aggacacagaggtaactcgaacacatcatcttcttcatctgggcaggaggaggaaccaagatcgataatgaccaatgcatgaagtgtgggaaaattgggcattaggctcgtgaataatggccctggcccaagaccaagaaggagcaaatgaacgtggttcaagagtaggagacattgatgttgatgagaatcgcacataaaatttgacactccatgagtgctccaagtcgaagcataaatccattgtccagtcaacacctttcatcacaagaggtacttcgacattggtgcatttaaactcaaggatatcaggtgtctaggtacacttgcacaaagaagaggctttcgttcaacttggagcgagggaggattggaggaacgtaactcaaagctctagatccacgacaccgtggccatgaacgaccacatatcagatgaattcttttccttgccataatcttccttacctcaacctgtccaacttatatccc

SEQ ID NO: 58536 - DNA, 458 bp, Zea Mays
caagctcaaatcactgcgcgtcgatcaccagcggtgaggttcactaaacctgtgatcttgttcaactactgttcacgcctgaatttacctccttcttttgcctgacaaagcaactttgagggcaaaatacttccattttctaatagtagcatacctatctaacttcagcaaagttgttctcctttatatagtctttaactttgtcacaatgatattgatgtaaacttcactggattagtcacaatgtggctccaaagttaggccaaggccactatcagtccagattcagacttcccttcgattaacagcccgaattccagggcatttttctccaaatttcacacaattcttgggctaagtcacttcatcaaatttaatctactattgtagctctacaactttgccataatgatttatagcaaatcccttatggattaagagaaacaagagcccaaagt

SEQ ID NO: 58537 - DNA, 467 bp, Zea Mays
tgaacccttctttcatgcatttgttgggaggtggattgtagggcatgatgaaaaccggccaacaagagtatgaagttgaactgttgtcgtaaggagtgaaaccatcagtggacaagcctagacgaacactcctggcgtctcttgcaaattctaggtcaaaacgatccagagccttccaagcatcgccatctgatggatgcatcataatgtctgggtcttggatctcacgttctccttccttatgccacaacattagcttcacagtttctgggttaaaaacagacgtttaagccttggattgatgggcatatatcgaagctgtttaactaccacttttgtagcaaaagtagctccatcctcttttagtacctccgcatatcttgatttaccgcatttctgacaatgggtggccgcttcatattccttccagaacaacatgcaattatcttcgcacacatcaatcttct

SEQ ID NO: 58538 - DNA, 460 bp, Zea Mays
cgctcgggaccaacccgttttcccatcgccattcgtcgatatggtgcttactatctagtttgtcatactcttctctctctatttctcgggaccatgcacgatttagatcactgcggcggggtttggggaagaaccgcggcgagcttgtcgccgtgtggcgtgccgcgccaccgcgatgctgtgccagggaagaagatgaatgcgtggccgtggatctcgcgatggatggtgtggattagaggaaagggtggaagaagccgggaccgtaggatggtaaacgaatggattagatcagattccgcgtaccccttggcatcgcgggatccagacggttggatcgtaaacgtgtggtccggatctgagcgggatttcataaagcgcgtacctaatcggggccgatgggcagagatcggacggcctggattcatctatacaccttcgacctggccatctttcaaaa

SEQ ID NO: 58539 - DNA, 886 bp, Zea Mays
gggagttgagggggagctgttggatacaacctaagttgggcgtcgtgcaggtaggagcattccagcggggtgattaggctgggacactgggtccattgccatgcggtgtcgttcgctgtcatcgcttggggtgtggtcaattggtcggtatcaactgctacgatccagcgacagccgatatgatcgatgttatcgatactaatcacattagaattgatattgaccgtgttggtcgatactaaccgtcgtgttagacccatattgttattgaccaggtgtgatcgatatcgaccgcctgctgttaatgttgtgcctgcgcctcctaatggattgtcgtcattttaactgtttggatgataaaaaataaaaaaaaactgaattcaccttataaatagaggaggtgcttgcctgcttgggttcatttacatcccttcctcttcaattcagaagctctatccttgggttgtagctagcctttttgctctctattttttgtatgaatctcaggtggagttctaactttgatacgtttacggacttgatcaacgagcaatctctgcaacgtcttgacactcctaccagtgcagggtaggttcttctttgaccgtctttctcccatccatcatcgatgagagacattcttggtcatctccgttcattgacttcgcaaattttgttttcttatccctaccatcctcctccatacacataccaaccaaatatcgatgttcctcctactactaaacctcttacgaccgacactcttaccattgaagccccttccatgatgctcctactttacaatctttttgcttatatgtatcctccttcgtacatgtataaagatccatatggtcctccttatagagcatatgatgctcaccat

SEQ ID NO: 58540 - DNA, 616 bp, Zea Mays
atctctctatggattgagccaatgtctcctgaaggatctacatcggcgacgaggtaagctcttttggtctttttttctgcaacggtggtgagataagctctcgggttggcacagccgtacatgtctgtttcttggttggatttccaccccctttctgctaaaccgtgacttaattaggtttgggagattttctcaaatccgacaggctattggtctcgaattcatatatacagtctcctaattaagcgaggaggacaagaactttagatacttttcataaaccctcatgctcattcagattgttatgtttgtctgtactgcaccattcttttgtgttgtttgtacaaccctatttgacatttttcttgtcgggggtatatgtgaatatggcatctgatctttgttgcttgtgtgagtagtgcgtagggatttgttagagatggccagatgggaaacgagtcagagaacgtgctctcaagaagaatgatgaaagttcaaagttgatcctcttgaaggactgaggaaatataagggagggtacaacatcactgacaagcactactagagtgtaaactccctacatatctgaactgttaacatactattttctctgaac

SEQ ID NO: 58541 - DNA, 694 bp, Zea Mays
aattcaatgttgttttgccatgagtttttttctctttggcccctatgaaaggaattccgaacgagtttgggtcctttccaaaaagcaatccctagccgtttcgggacaggtttaggatcttaccggaaagtgtcccttgtcgttcatctagttcgttaagttgaggtattattcaaagggcggtctagtcggttctggctccctcgaattttgcagaatcttacatcaatcggacagatgacaaagaagaaagaggtatcagcgttgccttgcttaggcataaaagtttactggaaggacaagatttgtttagcgagagaggaggctagtagttttgcactgctctgcctattactccccctggtacccgagctctcaattgaggtcgagggcaggtaggtttggggaacgttggagtcttgatatgagtagaaccattgtagttgctagatgtttcatgcattcgcgagcatcctccccttcttgtcattcaacttgtaggtgcccagtcaaagtacctctccgatcacgaacggtccatcccatggtggggatagtttttgttgatctttgttggtctagacctgtcgtaagtctaagtctcctacttgcagggttctttttcgaacgcggtggccatgataccttcgtagcgcctgctagcaccttactgatcgtaaaagcaccacatcac

SEQ ID NO: 58542 - DNA, 625 bp, Zea Mays
gggattgggagtggcacaggagcaggcagttgtacaaggctggcacaggggagaagaggaagaggagggagggagatgagatgcccgcgaccacgagcgagcggaaaggagagggcaggctagtagcgtactactggtactgtagttgtagcagtagagctaggctagcagcactaaatagctagaatagggcggtgagggggcgggggaagaccggtgagcatgggcatccatcggcggcggtgaagtgaagtgaaacgctgctaggtatggcaggcagcaggctagatgaggaccaatgcaagaagatgatgtgagaaagagaggcgagggcggcgcgcggtgatggacgacgacagacagacgtatgtacgcacgcatgcatatcctcctccatgctcctcaagtcagcagtaataaaattaaacacgcacagagaatcagagatgtacatgtacaggccggctggtaatcagtggatcggaggaaattctaatcacccaccgccgtagacgtagacgtagaccgtacgtagtccgctccaccctcgcggtcgctaggattatttggctacagcacgtctgtgacaataatcgtagacagctcacgcatctctctctatata

SEQ ID NO: 58543 - DNA, 972 bp, Zea Mays
acatttccactattcatcgcctacaaactcagaaaaaactatcttgcttcagcttttcacccatggtgacatcaccgagtgattcctctgcttcttttgtctcccattcctctagccgtgaaccaaccctagagtgggatcctataccggcatatgagaaacaggcccatttgcactgagatggatgggactttgaggttgaattagaatatgacggtgacctcactgatggggacgacctccagttcctcgttgacggggaactagactccgacactagcacggactggtcttggacgtacgatggagaatcgttggatgtggagtccttcgacaacaatgatgacccgatgtctggacattggatgggcatcggctcctcagatgacgatgacgagaatgacaacggcagcagtgactacggcagcagtgacgaggacaacgacggcagtggcaacgatgacagcgatgatgatggcggggcctgccaatgcaatgagatgcctcctgtaacacccaaggtgttaccgtatgcttaacggcgaatatggacgaccgtccaaaatagttcgtgaagctcggactttagtgaccttcaaaaatgccgagtctggtgctgtttagattggttatgagcatgaatgcgacttcggaaaaatagctcgagtttggtgttgtattcatttccataatctaaatagttaaaaggttttttatgaacttttggattacctaatcttgtttgctggcgaatttggaaatgttcggatcacgctcgtaagtgaaaatgaaaatcagaaaacttctgattttatgtaaaatttggagccccgtgttatccaaacagaacgatgcgccagctgattaagtgaatcgttcctcttagcaagttatctttggcgtcaaatcaactaatcgatagctggtaaggatcgtaaaaattagacgggactaaatacagtctaaaaatac

SEQ ID NO: 58544 - DNA, 1179 bp, Zea Mays
agaggatttctaggggtgtagaggggatgccatgtttttccataaaactagtggctataaatgaatgggatgctcctgaatcaaaaagcacagtagcgggagtaaattcaacaaggaacgcaccgagcactactctcggagcttgctgggcctcttgagcgtcgacgtggttaactcgtgctttgccctggtactgggtcctgctctgctgactgttggaggggagtgccttggaggcaggtgccgaggtaatcttggggccattcaccgagttggagtaggtaggcccgagtgccttcaactgggggcaattattcttgaagtgactggggtctccgcagtgccaacaggcatttgctggcggttggttgcttgcaactgagggggcctaaaaggagctctgactctgctgactgtaacgtgacggagtgggtccagctggtctattgaagcttggtcccttgggtggaagcccgatggatcgagctctctggtgacggtcttgctgctgagctcggagaacctggaatttcctcttgaggtgccctttttcttcctcttttgccctttccacttggatggctttgttggagaggtgcgagaagttgagggaatcttggctggcgaggatggtcttagccattttagaaaacgggccatcttcctagtttcggtgctgacatcgtcaggagcataacgagccaactctgtgaatttgtgcacgtactcactgacagatcttccaccttgagttagttcccgaaattcatcttccttgagttgaacgatcccctggggtatatggtgctcacggaaagcagtttcgaattctgcccgagtagcgtccctgacggccgcgttgaaggtatcccaccatgctagggccatcccagaaagttgatgagcagccaattgaacacgctgattttcggggcatctgatggcttccagtttcctcttgatcgtgcgcagccaatcgttggcatcgaggggattgctggatccagcaaacgtgggaggcttgagtctcagaaattctcccgtcctgtcctgcggtcttccaccacttgggcgctggttctccagacttcaagtgaggacttcaatgagtcgggtctgattggctagaacttgggccaaatctagtggtagtttcggaggtgcggggaggtgggtctc

SEQ ID NO: 58545 - DNA, 337 bp, Zea Mays
gggatacccatttgtagctgatgtgtttggagcaagtggttccgtattggattcacgcgagggaaaactaggggcagtaggtttcttatatgaaaacacccatttttaataagtttgtctacgtattcttttaacagttcccctcgttgttccatgaaagcctcaaaagatggatctggggtacttacaataggcagtaggtttcttacagtaggagagatgtcatatcgatctccccttaacggatgatcttctagtggcaatcctctgtgaagtacgagaggtacttttctgttgccttttcacgtcgttccttgagttgtcacaacacctcctc

SEQ ID NO: 58546 - DNA, 452 bp, Zea Mays
actattttagtgaagttgtttaaagatattttgtcattactccagaaggtctttgtatacttatcaactagccacctggaggtgcatctttttagtatccattctctagaacatgtgtgctcgccactatatgtccttaccatgaaagcctttgtcctgctgtccattgaagcatacatagtccaaggacaatatgaagctcaatgtacattgatccaagtcacttgagctccactctgttcttcacaccatactcagtgatttctcacctcaatagctcaatagttgcaagcaccatcctaactttggagacatgattttttaagtccagtggtctgaatgtcctgaatctaagcatatccctttcttcacctatatctgcaacatagaggtcctcatcatcactagaggtatctgcatcgagcacactcctcaatcctcatggacctaga

SEQ ID NO: 58547 - DNA, 388 bp, Zea Mays
cctagttgtgctaggggaagcttctaacgaaggtgctcccaatgccgaagctgtacaaactgtggttgagggtgagagtgataatgaaagcgaagaggataacaacattctgaactcggcaaagcctagtcatcttgaatttggaaaatccattgtaatagaagatgacatgactatgatgaaaaaactgggttactttggggagtctgagagcaagcttgttcgatttgctagggaggagataacttcggagccgagggtggacgaagttgttgtctttaagagtttcttcagagcagggcttcggttccccctaaatgacatgataggggaggttctaaagaaatttgaaatatatcttcatcagctgactgtcggtgttttgggt

SEQ ID NO: 58548 - DNA, 713 bp, Zea Mays
ctcacatctctctatgatctgcatgttcaaagatagagattgtacaagtgcatagtctcatcgaatgtgacctcataggtctctacaatatgattagtctcaaggttaagtaaatgatatgttctagaatgtagtgcataccaagaaagatactgtcagaagaccatgacaccaatttgtccaaatttctctgtctgagcacaaatcacttgtagctaaacaccatgaaatgatttactttgggtagttgtctaaatcacaacccataagaagttatgttcaagaagactcaaagaaaaatgtgattggacatctggcaagctatgttgatcattttggcccgctagtgatgtggctcgctagtgccgctctgtgctcaatagttcgctccatgtgcatagtaatgtgcttgttctgtattctgcatttcgagatgatttttatatcatagttttatagggaggattcaaggttgttccccaaaattcaactccaaaatatcaaacttttgatactagactagaaactacaaaaccaaatttgggggggttttatattccaaactacccctatttatttggatctaaatcacttaaatagggacataatggtccaactctcaatctgatgatctgacgaccatgatcccttcacagatttgcttcaccatgatgcaacctccatgatggctccacatgccgcctctaattccc

SEQ ID NO: 58549 - DNA, 342 bp, Zea Mays
agctactggacttcttgtccaccatagctcacggctcaaccgtcggacctttcaaaaccacttttcaaaagcatttttggaaacaaaacactagttgtcataccaagacataactcatccatatccatggacgcggactatatgaataggttttgaactctgcaaagaggtgtacactttacccactagtccggtttctgcaatctcaccgtcgtgagatctgaatgccaaaactctgtcttcccttgcacgactttaccttggtggttataccaaaaggcacaaggccacctccatgcccaaactaggacaaaacattccctctccttgtcctctcgtgct

SEQ ID NO: 58550 - DNA, 337 bp, Zea Mays
acccaccaaatcaaattgtgggtgatataagtaagggtgttcaaactcgatcacgtattgcttcattttgtgaacatttctcttttgtatcttgcattgaacctaaccgtgtagatgaagttatacttgatgttgattgggtgaatgcaatgcatgaggaattaaataactttacccataatgaagtttgggagcttgttgaaagaccaaagaatcacaatgtcattggaaccaaatgggtatttcgaaacaagcatagcgaagatggtttggtggtaagaaacaaagcaagactagtggcacaaggttatactcaagtagaaggattagattttgg

SEQ ID NO: 58551 - DNA, 642 bp, Zea Mays
gtggattgcgagttgaatatataaaagagtatgatctctttaacaaatattcacgtcgaaggggtatttccccagcagagtcgtcatgatctcattctacggttgaggttagatccgaaccgatacacgatcacagctagaggattaaagatcaatggttccagagctttgcatgcgtgatctatctatgtccctccgttccgagatgaacgtgatggatttaaataggccgaatagatgacatgcttctaatctggagcatccggatatgatccaacggtcggtggctcttcttccaccctcggtgggcagacccacgacaagagcccacccacagcgacgccatgtaccccggcgacaatcgccagcgcaacggtgcccgaaaccctgaacagatcagtgctacttacagcgaagatgatagcgaattcctaggggtacacactactagtgattagacagcaggagacccatctcatggcggaacgtggctctacagtgtcgagctaatcgacacccatctaatgcacgacttcccacgcaatcggatactaatcgaatcaaagaacatggcgctttgaatggagaccttaccgtgagcaaacatcgaggtaggaagctcgaccgcgatgccatcctctt

SEQ ID NO: 58552 - DNA, 1092 bp, Zea Mays
gcagtcgccatctagtctaccccaacatcatcatgtcgtcatcgtggatcctccctttttagaccatgttgctaataccagcggatgttgttgcaaggagtaagtcaaagagaatctttgacttcaagagatgggctcgaggcagatgttatcgctgccttgcacacgaccaccaagtcagatcatgtaagaaatcccgttgcatccgatgttgtcaccctatcattacgagcgacattgtcgctttcggccttcctcacctgctcatcgagttaactcctcaatacaatgtgaccatcctcaacaaacaaggacttggaatgaggtagtggccaagccttcaccaagtacgttgtcagctgacgccgttgcgaagtctccatcacaaggacatcacaaccctccatcgacttctcaatccattggtttgtgtggtaaggatattgatcctatttgatgtagctattgttgtgcctctcttgcctcgatacctttgaaccttcagtccttgatcacacctttcaataagtcattgcgagtagtgttttaccatatgtttttagcttgtttgaaggaagtgttgtagcctgtcaaggaggaggattctatcatcaagttgtggctagcacatgtgaacaaccatttgaagcatgcataggtgcatggggagcatgcttctatctccaacttggccaagctctttggcccctgttctccaatgaagcatgattcgccatcgttgatccttgcttctctcgcagcagcctacatggttgccgacttcttggtatatcaagacacaagtgcaaactccgcagtctctgagatgcccacatggatccttggtacagagaatcatagagagatagatagatcttaccagtaatgaagtggtcgcaaggacatttgaagcagaatctcaccaaatgatgtccatcgagaagaccattgaggtgtcttcatagacctctacattgcgtcatgttgtcatctttgttgaggatgttgttttggtggaggatgcatcggtggatgaggaagctaccttggttatgcttactacttttgaggaccccatctttcttaccacca

SEQ ID NO: 58553 - DNA, 547 bp, Zea Mays
gctgggtgggccgttggatcggcaatggatgggcgaggggtcgcggaccggtgatccatcctgaacgatcgagattaaaacgtcgacaccgtttcgagttgatcgcttccacaacgttgatcttcacgtctagggtcgcgatcgagtccatgttactttgaatcgccaccctcggttccggatctatgggttcatataagcatactacggtgatctaatcggggtcgttcaattctgatcgggtggctgataataaaccatacttcttcggcctggtaatcttgctaaagagaccctgccttatttcaaaaacaacctgccatccttttctatagaatataggttaagaacagtccaggttattaatagaaactaccctgagtttagaaagatttgtggccgtcgtccataggttggagaatctccaaaattaaaatctaaaatgatttttaggctaaaaaataaatacgagaaacttagataattcatattaaatccatttcaactccaaattgacctgttctagttgcgttagcttcgtataaat

SEQ ID NO: 58554 - DNA, 410 bp, Zea Mays
cggactcctcaaccagaccgttctctatgcgagtgcaaacatacattcacatcttaaatcagaaaaggaacagtacacaatataaggtaacaaatcagttatacgcgtacatgacatcaagctcgcgcttacgaccatgcgaaactagcgtccgcgaaacaacacaggcgactcgcaagaaccactaacttgacaacacatttatgtctaacgaatattaaacataaacacctgaaaaggtctagttacactcacgtatgctcatcaagcgtagctccagattgtaaactaatcctcgctaaagcactactttaatagttattgggtcaacaactaattgaataattatcgaaagcatatactgcgataagctatacttctagtatgtggatgatattgtcaatttatca

SEQ ID NO: 58555 - DNA, 621 bp, Zea Mays
tttgcaagagacgctaggagtgttcgtctaggcttgtccactgatggtttcactccttacgacaacagttccacttcatactcttgttggccggttttcatcatgccctacaacccccctcccaacaaatgcatgaaagaagggttcatatttcttgcccttattattctagggcctaaacatcctggaaagaagatcaatgtattcatgtaaccgttgattgaagagttcaaagagctatgggtaggggtaaaggcttatgatggtcatcgaaaacgtgaatttaccttacgtgctgtatatttgtggtcaattcatgatttgcctgcatatggtatttggtctggctggtgtgtccatggtcgactatgttgtcccatatgcatgggggacacacaagcatatcaattggagcatggtaaaaaggtatcattcgttgattgtcatcgacggtttcttccatccaatcacccgtttcgaaatgatacgaagtcatttagaagaggcataaaagttaaagagggtccaccaaaacgtttaatgggtgaagatatcatgatacaacatggtgcccttcaaagggctccagaaggtcatgagtttgaaggctatggtcaagat

SEQ ID NO: 58556 - DNA, 430 bp, Zea Mays
tctccaactctcctttaggatggtcaaaatgaatttttggtattcatgttattttagaacactcctcatattatcactttatcaaatggtctagtatattgatttgtctcttatggtatcgccccacctaaaattttgccctgtatctgccactactggctaaacatgatggaccacaaaatccaaccaaaacagaaaagagggggtcgagaaggaaaaacctaaaacacaacgagcaagaacttagactcagatcctagaggaatggcttctttatctccatgaccgactaggtctggttctgaggtacaaacacagtatcaatctccccatcgcggatctcaacatattgaagactacaactagctactgcttaagaaaataccctatatgtaagaaaacaaaacaagaataaattactcatttgggc

SEQ ID NO: 58557 - DNA, 478 bp, Zea Mays
ccgtgacagtttgttttccgtttttgtgtttcgatggcaggcaacgaagaagaagcaaggatccctatagacttcgatgaatgtgttagccgccaagatcttgaggcaaacaacaagctcctgaaggagcaaatgcaggagacagtccacaagtcagtgcatgctgccttcattgacatgaaccttggcaagacctacgtgaggctagatcgacgattgtcccagatcatcgacagacttgctgtgttggagacgcaacaacaagcaccaccaccaccacctcctcgtccacgtcttcccgatgatgcggtgtttgatgaagaaggtaattatgatgaagcggccaccagagatttgcgcctacatcgttgtcttcatcaaaacacagaaggtatgccacaccgccaacaaggtaataacaatcgtgctcctgacgacccttatgctaaaattaaattttctataccttctttttcgg

SEQ ID NO: 58558 - DNA, 432 bp, Zea Mays
tctaatcttaagttgagctaacctaaggtcagtcacttaaccaattaatagtgggaaaaaatagattagaccctgcccctataaacaagtttgagatcttagataaactcggccatacacaacaacatgacccatataatatgttacataacctatccaaccaatctatgggcaaacaacccaaccaatagagtcatgatggattgcataatctgcctatccccacctaacatcaaacaaacttttgacctacatcatgtagtctatctcattcatatctatcttaaccatattccctaaccgatgatatacactaaccacgaatcaatgagaccaggactggagaagaaaagatcaacctcgtcaaagaaggagagaagtcaaactcgatcttcaagatgcattaccacccaacacagaattcttcctcac

SEQ ID NO: 58559 - DNA, 605 bp, Zea Mays
aaaaaatatccaacatctcaagcgggggtagaatactccggttttgtttcattctactttcggccagaatcacttccatggtgtcagctaaaaatatcagaatacttcccgtaaatgtggctacatttgtagatccaagcagccaggttggaaagaaaaccaccaatcatgcctgtgtagacgagtttccctccacacgttattgcctgccttatgtctgtagtgtgaatgccatatttacctccgtaattttagccgaggtggatcccttcctatattttctctgctttgtttccttgaatgtgtggttctctttcctttccaactttccccattgatggaaggtggaaatcggctatatgtcctcaccggctataaatgtagccacacccctcggtttctatctgctctccctcctttcgcgccaccagaatttgtcacctgtcacaacagcttctcaggtaattgtgttgaatttgtgatctattttatgtttcttgtgatttttattcccttgactatgtgagacaccatttttattccgctgaacatctagatctgtaattgagcttgcgcgcgcgtttcatgatttcattataatatgt

SEQ ID NO: 58560 - DNA, 574 bp, Zea Mays
cgcatgtaaaaattaaccccaccgcaggctttgagctcttttctactagtataacttggctcgtcaaattatcataattctccttatttaccagagcttgagacttgctatattgagataataaggatatagggagagacgtataagtcgactatgcattaggcaatgaccaatagaccgtacatatggacatataaatcactgctttgtattatggactgtattatttatagagtgaagtttgaatagaaactgagataaagtaaagccgccacagatagcctttccacatatgacgagcaccagccagcagcgcatatttgaggcactgaccatatagtgagagagattgaagcacatatgcacaagaacacggtgttcaaatgacatcatcgccctaaagaagataaactgtaggtgctggtgatcgatctactctttggcggcacatcttggcaggtaaccgtcggtagtagacagccgtgatgtggtggacaaatcctgacgtgcacttatttactactccatagatgtttgtgcgagtttaataattgtataaatcgtctctaagtac

SEQ ID NO: 58561 - DNA, 650 bp, Zea Mays
agttcagttccgatgggaatcgaaggaggcatgtggcgtcatcgcgaagagtgcgtcaagacaaagcaactttgtgaagagcacgtgaccatcagatgaaaaatccaggagttggtccattttgccctggttgagtggataggctctatgtatatagaggtagtttaatctagtgaaataacccccctataaataggtggtagggctagttgttttagccatctcttttggctatcacattagacacttatttagaaaaccctattctctagtctctaagttgcagtatttttagccctgagatccgcagatgttttgaactccacatctatgctcttgtgattttgtgaggaagtgtggctatatccacatgtggtatagggtgcttctgaaatcaattcgaatctgatttgagtttgcacttgattgtgttcttcctctcctctcctcccttctctctttggattttggaagaatcttcaagttcttgagttgtgggttgatttggagattgtcttgggatgagatataatctttgggccactgcagtcatctggcttgagcagtttattatcgtgatttgatctaaacttgttttgaaaaccccaacaaaacctcaactaaaccacaagtctagtttgtgttttcta

SEQ ID NO: 58562 - DNA, 774 bp, Zea Mays
gcagccccaaccttaaaagtttgccttaaaaagaaaagaccccttaacctctaaaagaatcttctctcctttccccgatattaacaaacccttctcctcttgctaccagatggaaggatcctttgtcattaggacatcctactgctcggaggtggaaggattccctcaccttctgcggagttgcgcgcttcgcatggggatccgcaagaagccggagtacgtctggaaagaataccgtgagaacggaattgagaaatgctctatggcagtctacctgggagaaagccgaaactacccaaatcaccctcccttccaagtcaccgccactggacaccgcttcccagacacatgccagaatgctgcccaaagagccctccgccagctatgccaaaactatagcagggaagtctctgagacactccttcgctactttacacccagcaacaaaaatactcctacctggaggaaaagacttcaggccttgtcagggagagatcctaatgaagatgaccctgccatagtctacatggccggatatctccatacccttgacaaccactatgacgaccttttctcccactatacccacctaaattcccgggtggaaagcctagagcaacaaatcaaggaattgaaggaagaaaaggcgtccctccaagaaagtctcgagatggcggaaggcaaagaagccaacacccgtgaagcataccggactctgaagatggactatgctaagaagttaaagaagctcggccccgctaagaagatctggaa

SEQ ID NO: 58563 - DNA, 793 bp, Zea Mays
cgttttttagccaatcaacaaacaaactctagggctggcgtcacacgatgcagggggcgttagagtcctctctgtgtgagtgtggactgttcgcgactgcgtagagagtttcggtcttctgcgcatagaccgttcacgtatgagcgacggaaagtacgcgaggcgcgcagagggcttcttggatcttttgcacctgaatctcgctatccggaagggatccattagggagaaaatatcatagggttgtcctgtggtcggcaggtcacccaaaacatatctaaacgacgtaaagtcgaggagatgtgaagactgcagatgagaaagactaatctaattaggtggtgcctcaatcggtcgtacctctttatatttataggggaggtctggacccgttcctaggtgcatcccaaccgattcccacgcgatgagttgaataagcacgcgcgaggaaaaggactctcgcccgaattaatctaatcgcggaccgtctggggctagctcgtctagccgtgccaaatgtcaaatatggtgctcaacacatgcctcctaccttttggataagcttaagcgaaccaaaagcacctagtacaagttgtaaacaactcgatgtgaatctatcggttctctaagcatcttaccatatactaggatgatatcactttagaaagcgatcattcaatgcattgggcaacttatctccttgcaccgtttgtaatgtgttaccagagatcacctgtgtaactttataaggcccttcccaacatggggaccatttgccaaacttccagtccat

SEQ ID NO: 58564 - DNA, 589 bp, Zea Mays
cggatcttctggagtcatgtcactgttttggggataacagctgagtgattactggcgacgtcggtgttttagaagtaacaaccgagtgataatggaccacgttggccgctttgaaagtagtggttgagtgaagtcagataacgccagcgtttttagaaacaacagctgagtcaatttgggccgcgtcggccgttttggaaataacgaccgagtgatgacatggcacgccagcgttttagaaacaacagttgggtgatgacatggcgcgctagcattttagaaataacgactgggtgatgacatggcacgccagcgttttagaaataacgactgtgtgatgacttggcacgccagtgttttagaaataatggctgggtgatgactaggcactttttagaaatggcatctggcccgggaaaaccccatatgtactgcactgtcgcacgcctccgtgctccgtgccctagtttctgcttttctgcatccaggctttctctgctttcctgcaatattgcttccgctccgctcgctagcgaggttgagatggcgcccaagcggaaagcttcgagttcgtctgtcgcaatcattc

SEQ ID NO: 58565 - DNA, 417 bp, Zea Mays
tggaagtgtcgatggagtcttagtcctcactagtggcagcaaagaactccattgggagcggcatatttgagcagggagcgatggatttgagcagggagtggcttgggggaagcggaagggaagcacaggaagggaagtggtcgggcaggctctcggaagtcagaaattggatttgaagaccggcgtgtgaggcgcgagaaccacctggatgctgggtggaggagacgagaaacacggaggtgctacaaagttgaattttcagggccattcccaccttttcactgtctaccgggctacagaatccccctttagcccacccaaacgtggatagtatattctaggctggattacatactatagctataaaaatctgtcccatttgaatgcgtatgagattttttgcattggatttttata

SEQ ID NO: 58566 - DNA, 1314 bp, Zea Mays
cctgtgtattcaagactaaaaatctcacagatcgtctaccacatgaccaaacgataagtattatgttggagcaaaataataccctaagttgcttgattgtattcactgcagcacaataatacatgcatcctctaagttgcttgattgtattggttggagcaaaaaatggctaagtgcatgtgtctgagagcccaaaacttgtgttctgttgtggagtgtgtgtctattccgagttagcctcccctttataaaaggttctgctcctcccttttatagtccacatgaccccacctattgtactattgaagctgtaaatgtgcattcctagtcatgtagcatcatcgcctgcacgctgtgagtggtcaaagtcactcgtacgccgtggacggtcaaggttatcaccggaagtggcagacaccgtccatgcgtgcacccactgtgtcacattggtgccacacctgagatgtccaggcctgtcaaccagcgtgacgcagggcacaagcatgcttgtccgtcgtaaaggcataacaactctctaactccgatccaccaaatcctgaccaactgtgacataggcggccatacatgcggtatggccggagcccactaggggcaccggggatccaagggcacgtggcacacttggaccccattgtaatcaacagagctggtggacgtaggaggcctcccagggggcgctggctccggtggaagcgccaggacatgtgatgcatctagaccccgtcagggacaaggccaccagctacacgtgtcgcaaccggaccccatcaacgaattgacgggggcttccgcgggatgcgagcttggttaagacgtagatggcggggaacctccaacgcaaccatattgcagggtcttggttgcacattcttctcctcgtaaatgggtcttcttaatatgacccatcatgatagtggggtccttagcctgtactctgtgatggtcggttatgttgtagtacatagggtatgtgtatccaggggtgctgatagtgccccctagggccactgtagactctagagtttgtgtgtgggtctagaatcagaaaacgtcatttgcgctgacaatgatgcgccggaagatgaactatcgctcgtttttcaatttcttaggtcccgtgcgctgtcttcgagtctttgtgtggttagatgtatcataatataggcattggagcgttcggggtaaacctacacgcccgctacattagttggatcgaattttttcggacggatcgagtcgggttggtcgaatcgagcggcccatgctcaagtatatgtacgggtcctaggtttg

SEQ ID NO: 58567 - DNA, 500 bp, Zea Mays
cgccaacgggaggaagaagaaggaagcaatcgtcagacggatgtaacgttcccctgcatctgcatctgtagccgccacagtaaggggaggggatggtcgcgggaaccgttgaggagagcctaggggagaagagatacatgctatttccacatgtaaaatgtggatgctaatcatgtacgttttgtgcagtgttgtcggtgaacggggagacgcatcgagcagcctaggaacatatggcaggatgttgtgagaaggatgttcagtaagcgcgagcgtagcaatcttgacatctacaaagatttcaaccaacttaccaagcgcggattcatggcatggccataatcagattaatgttggggcctctgaccaaagtgggaggatcagcaagaagaggaaggaaagtatagcaacggtggggagaatgattttcaagaagatgacgaaccctaggcaactaagaagccaagagttgtttggtcagtcgaactggtcggaaattt

SEQ ID NO: 58568 - DNA, 613 bp, Zea Mays
tggatgcgcaccgcatgactcaggggcggaaggaggccccccccgtgtagagctggactcgctggatctcgtcaagtcgaccggcgcggggaaggagggcttggaaccgattggagtactcctccaccgtcccggtatgccagcattccgagagctcgaagaggggagccgatcggagaggagggccaaaccgtaaatggagaagttccttgaaccgtccccagcgcggagtgccttcatcctcctggagctggatgtaccatagctgggccacgtcttcgagattgaatgaggccatccagaccttctcttccggcatgatgcgttgttggtggaagtatgactcgcacctgttgatgaagatcagcggatcggacctgccgtcgaagcgtgggaagtccatcttctggaaccgcggcggccggtcattgtgatggttgccgtcggtgttcccggtacctgccgacgaagagctcgacttgtccttcacggccgccatgtcggctttcatggttgccatatccgcggacagggccatgatcatcttggtgaggtcggcaatggcctgctcccccatggttggctgggcagcgtcggacgcgatggaggggga

SEQ ID NO: 58569 - DNA, 553 bp, Zea Mays
ggaggcttcatcctaggcatgtctggtccattcataactccaatgccaatgatgaaagggccagcaatgctcagcatagtcatcaaaattctcagtcttcaagcatgacttctttcagaccaccggctccgaggggcagaggaggaagaagtttcagtggaggaaggtttggcaaccaaccgaggaaattgtactgcgttttttgtggcgaggacaagggccacacaacaaggacatgccaagtcacaattcaaaagcagaaggaaattgctgaagctgaggcaaggcagagtcagccgaagcaggtcctccgtactgcttcgtgttactccccatatatcccagaatatgtggccaatcaacaacccacgacttctcttgcttcggcaagccattcccgagcttcatggccccagttaccaccgccgccaccactgatccacaaccaacagctagaagggcgcaatcatactcagcaacaacgcgatctttgggaggaatccgaagctcgcacagtcaacaacactatgcctgagtcgaagcatatttactg

SEQ ID NO: 58570 - DNA, 451 bp, Zea Mays
gtcggtgcgttctcgtcttcttcgacgatatcctagtctacagcacggattaccaatcacatctgctcaacttgcatcaagtcctgtccttgctagcagctgaacactggaaaatcaaattaagcaaatgctcctttgctcaacggcagacaacgtacctggaacatttaatcagctctaacagtattgccaccgacccaaccaagatttctaccatcgtatcatggccagttcccagctccgtcaaggaacttcgcagtttcctcggtctcgcagggtactaccgaaagttcgtccgtaatttcggagttattagccgtcccctcacagatctgctcaagaaatctgcagtttttctctggactcaagtgcatacctcggccttcaacacgctgaagactgccctccagtcatcaccggtgctggctctcccgaatttttctcaaccgtt

SEQ ID NO: 58571 - DNA, 1732 bp, Zea Mays
gaattccgacgcttctataggaacgacaaaagaaagattagtgaagacaaagaaactcacccataacgaaaagttcggcgtacttctgccgcatcagctcctcaagttcccaagtagcctcgcgctcagactgattagtccacaagaccttaacatacttaattgatctccttctcatgacacgctccgaggactccaagatacgcaccgggcgacactccagagtcagatcctgctgcacagcaatcggttccaattcgatttgatggtccggatcctgcaaaaacttcctcaacatagagacatgaaataccgggtgtacccctgccatggaatccggcaattgcaagcgataagccaagctaccaacccgggccaagatagagaacataccaatgtatctcgggctaagcttcctggagacaccgaacctaacaactcctttagtaggtgataccctgagaaggacttgatcacccactgcaaattccaagtcccgcctcctcacatcagcataactcttctgacggctctgagcggccaaaatattctaacgaatttctcgaaccttctcagatgtctgctgaacccattcaggaccatccagagatctctctcccaaagtctcctagcacaaaggcgagatacaccgcctgccatataaggcctcatatggtgccatcttgatgctagcctggtagctgttgttataagcgaactcagccaaggcgagatgatcctcccagctacccttccaagacagaacacaagcacacaacatatcttccaaggtttggatagttcgctccgacggaccatcagtctgagggtgaaaagcaacactaagagagagcttggtacccaaagcactgtgaagactctcccagaatttggatacaaatttggagtctcgatctaaaacaatggacttaggcaccctgtgaagcctgattacttctttcatatacaagggaaccaactttgaagctgaatttgtggtcttcatgagaataaagtgcgcagacttagttaagtgatccactaccacccatatagcatccctgccctgaggagaatgaggtaagccaaccacaaaatccatggtgatatgctcccacttcaactccggaatttccaatggcttcaataaacctgcaggcctattatgttcgcccttcacgcgctgacatacctcacaggcggccacatacttagaaacatcaaccttcatcctcttccaccagaagttttgcttcaaatctctgtacattttggtttcgccagggtgaacggtgtaaggcgttttatgtgcttctctcaagatatccatcttcacgtctgatttctgaggcacacataggcggcccctgaaatgaaccaaatcattctcatcaatggtgaactcacggggtttaccatcgccgaccctctttcgagcttcctgcaacaaacgatcctgctgctgagccacgcgcactctctccagaagggaggattgaatgagcatctgagtctcctctctagcagtgccgacataacacaaagcgacccccatacggtccggatctgcaatcaatgacatggccacttttggaaccccggacctgctaagggcatcaaccaccacatttgccttccccaggtgataatgaatggatagatcataatcctttatcaactcaagccaccgatgctgcctcaaattcagctctttctgagtgaaaatatactt

SEQ ID NO: 58572 - DNA, 455 bp, Zea Mays
ggcttcgctttggtcggagggatggtaatggccttggagataaagggtgatgggtgcccgccagtcttcggccattattagatttactattcggtgctcgttgacgtcttgtgttatttgcagaccctcggggtttattatggctggtgtgccgactatgtgaaaaatatgtcggatgacaagggtttgccctacgttgctgctttggctagcatgttagcttctttgttcttgttccgctcaatgtgttgtaaggtgaatcctttgaattgcttttctagacttcggatagcagcgagatattgtattagtactggctctttagcggaatagtctttttcgatttggtcggcgactaccttggaatcagttatgactatgcttgtggtcactccgagggctcgcagcttacgaaggcctacaataattgcttcatattcagcgatgttatttgt

SEQ ID NO: 58573 - DNA, 452 bp, Zea Mays
aagtggtacctgaatgtttacttatgttaacagtgctgagtgtctatgccattcttgtccagattgtcagattgttaatcattccagaccaattgttggcatatgtctactttcatattttccgtaatgtccaagttttatgcaacatattatagtttcatatattagatacatttatgttcatttttcctacttcccatggtacttatgtttactgtggccagtgtttatgctacttcatatcagtcttatatcaagtgtgtaaaaccgaagtggtacctgaatgtttagttatgttaacggtgctgagtgtctatgccattcatgtccagattgtcagattgttaatcgttccagaccaattgttggcatatatctagtttcatattttccgtaatgttccagttttatgcaacatattatagttttatatcaaagcattatataaccca

SEQ ID NO: 58574 - DNA, 808 bp, Zea Mays
tcggttcaaaggaaacaccgatattttctctagcaacatcaagccgactacgaatgacctgtaggttgaaaaatatcataggctggaaaacgccaggaaaaagatgcagacataactcgaagagttgttcttgactgatttcaaggtcgactgaagccagaagctcatccgacagagagaatataaccctggtgaatcttcgtcctgctacaatcagacccagcgctgtaagtaaatacgatgacatccaatctcttcgatcttacgtagaggaacagtggggatagatgcaacaaatcttaggggcatacaagaggattatacgaggctaaacatgtgtttgataaatctgttattactagtttttcatcacacgatgcacaaactaaagaaaacctacagtacccatcggctgcaaaatgggcatgcccagtcccaacccttttatgagatgccgatgaactcctataacggctagccacatcctccaccaccctatatgggaacaacccttgcccctgtgcatagacgaatagtccaggcctgaggccgaacggtcgggtccaacagtagttggtaccgtccctcacgacgagccactgaaagctacacaagggacaatagagatgctcggaccatgcggatatacgatcggaccgtccgggcacgtcaccggaccgtctggatattacaccagatcgtccgcaatagggtatgaggagcagaacatagaatattaccagcaaccctactaccagcccccaactaacgtctttctagcacccacggcccctcaagaacgtagaat

SEQ ID NO: 58575 - DNA, 744 bp, Zea Mays
cgtacatgtacatatgtatggggctcgtgtgcgcacatgcatatatgcatctgcatatggaatgcagcgagactgagggaagaagaacaggcggggggaaagaggaaaacaaaatctgcacattgtaaattgaagaccagggtggtacagaatgcataatctattgtccgaagagaatgcggcgaggttttctacttttgcttttccttggcagacatcagacagatcacacatgcctgcatttcagtcgccagaatcgtagaccagagaagaaccatctttgtaggttttatttagcccagaaactcatcaccgtccagctaaaaaaccaaggcaaactcagttgaagaattggtattctgctccaaaaaaggaaagttgtgtttcatttgctgctcagctatgtttccttcatcacttaggagcctttagttagctgctcaaacaaaatctgcaaaatcctaggactttgtagaagtattctaaacatacttccacttaaaaatagtgtatatctaatttgatcccaaaaaggtagcacactagacattaaaactcagtccgcgcgatgccaagaaagcacaaactgcaattgataggaagtcatcaaacaaatccataatgatcgtttgccatcggtagacatcctcaaaaaatgaggctgtgtaacaatgtgagcgcccacccaaaaaccaatgtgacaaacacccattgaaaaagtccgaggaataacagaaaagcccc

SEQ ID NO: 58576 - DNA, 465 bp, Zea Mays
aaagcacctatgcctagttactaagttattccataaacacttgagtgtctagagattattgtattcgagtatcaactcaatggctaccttccttagctctaacacatcttaaatgactgattttagggttctattcatatccctaagtaaagatatatttgtaacaccctcaacaaccaactctatgcaccattggaccatccaacagtaacaccatcaaatcattgagtacggtcagatgcctcggctattgtgttagtactagctgttgccgaccgttaggtatacttgtaccatctagtgcctaccatcatattagttcgacaccctattatctttttataacctttgtacataaccgccagactttgtcaatcgatatagttagatgctcgctgagcagttaatgtccaaccccattatgagatgaacaatttgaccatatggttcgatgatgggtagata

SEQ ID NO: 58577 - DNA, 465 bp, Zea Mays
ggacgtctgcacaattaaacctcttatagttatagatttactattcattttaggcgtggtattggattaataggctgtttgaatgccattttttaagcgtgaaaatgctggtgtaaatatccagcattgagtttcaaaaaaaagaattagcattatggccaaaaaaattgcggtgcctaatgaagaaatagaggttatcatggaatactgcagggaaaggaatataataatatctttttttcaaatataacattgcagtaagttgaaacacaagaactacaaccatgaatttgttcatatgaagtgcaagcagagagtaagaaactacaaaagtttgcacatagtatatgtcactctgtactttctatagtcataaaagaacataccgtttaggagttagaacaaacttttgtagtcaagccataagatgtcttctagcttttgttggtaaggtcagaatccaaa

SEQ ID NO: 58578 - DNA, 1083 bp, Zea Mays
gtacattgtcggctcggtgcgggagcagggcagtggatccaccaaggcacgtcactgatagtcatgcatgggttggtcatagcggcgagcagtcggcgcagacaagggcaccagagagcccaagagacatgagcgacaaagtggaagaggccatcggtttcgagggtgatgccattccctagaggcagagcaggtggcaaaggagcagccgaggagtctgggcacatgaggcatccggggcacctaggggagagagcctgcagggggaagaacaaacaatgactaaccaggaagcgccacagagtcaggagtattgagaaaatccaagtcatggagagagatggtggtgggtaggaggtaggcgagaaggggaaatctatctcatcgaaagtgacgtgacgagagatctggagacgatgagtagaggtcaaggcaccagtaccctttttgatcatgagagtacccgaggaagaaacaacgaacaaaatgaggagcaagcttatgaggagatgtgacatgaatgttggggtagcatccacacccaaaaatacgaagatggtcataggagggagtggtgccaaagagagtaaagtggggaatggggacacgagtcgccatagtaggaagacgattaataaggtaggtagcagtgtggaggctctcagcctagtagcaagcatgaacagaagcctgaaagagcaacacatgacattgttagtggtgcaaatcatgcgctcagccttaccattctgagggaaagtgtagggacaagacatccagagctagactccatgggaggaggaccgggaggagttataaaactcgtggccattgtcacagtggacaaccttaatgatgcaacgaactgagtggaaacccaaccgaataagtggagaagagtcgcaaaagtgttagacttcaaacacaagggaaaagtccagggtaatgagcagtcatccaaagtcaccagacaatatttgtaaccagatacactagtaacaggagaggttcaaagatcagtgtatgacatcaaaattctgcacagcctgagaggagctagagaaagaaagtcgaacatgatga

SEQ ID NO: 58579 - DNA, 304 bp, Zea Mays
gctgatcggagaagtcttcttgttttggtgcttgggggtgatttgagtggtggatgtttggctgatgcgggtgcggaggcggaagagggggtggtacgacttgtacctcctggtggtgctggtatgcgtggtaaggtggatgttgggcggggccgtggttgtatggttgtgggagatggtgttgatatgtgtgggcgacaactcttgggttgtcggcgggttgtgcccgggacatcctgtccctggtggccttcgtttccgggcagtccctcgtcgggtgcgcgcagtcttcgctgtgaaacag

SEQ ID NO: 58580 - DNA, 1059 bp, Zea Mays
aggtagagaactagcatgcaggccaaaattagtcagctgatccaggaagaggaggaaaaaatcaagggcaccgcaacaggaaattgtagatttgtaggacgaagaccctactgtcagcaggcacctggaatagtttactatcagaatgctgatcagtctttcaggacaatccaaatgataggcgctttccaaggtctcaactttcttgatgagtgaagtcccctccctatgcaacttcaagccacgccatggccacacaattacagggcgggcgcatatcccaagtataacagcagtatagacccatcacaataaataatgaattatcatattgccatcgcatcctcaggggggatgatcacaccatggccaagtcgttcatcatcaaaggtcaatctcttacatggtactcaagactgccttcactctcaattgactcctcgaagacccttcgcgataaaattttgctaaacttccaaggctacaggctcgaaacggctgcactcgctaagttgtccctctgcaagcagttagagagagagagcctttgcaactactataaaagatttttctcctgtcgaaatcccagctaccaacggtcaaagaacagatcgcaatctactatgtaatcaacgaccttcgcaccgatcagctctactgtcattgcataagagaccccacaccaaacctccaagtgttgtaccaattgttcaagaagtatgcattattggaggaacttcattttaggaaactagagacctagctcacacctaaagagactttgcaatccagtaagccaagggctagaggtcaacacaacgactgcccaaatcaagatccatcttagcagctacaagtacacaacattaccaaccagcaacaagcaagcgaagtgcccctcacggtcaatatagcccccacaacatggacggggaggatgcgtaggaagaggttgtggccaaggtagaggcccccggtaatagagaaaactctattgtgttttccatggcgaagacatcaatcattccacaaaggattgtcgagtaaccaaggaggcca

SEQ ID NO: 58581 - DNA, 707 bp, Zea Mays
gagctacataagcaattaagcatataaacttcacgagggaagcaatatattagtaacagaatattcgaaacagtgcagtgcatatgaaacgccagtatctctggaactgaaacacccagcaccccaaaaactatgaaaaacctaagttgcgattgcaagttgctcgattccgaaaacaccaaaacatctcttatgacaccacgaaatacaatatattaccaaaataccttatgatacaacgaaatacaatatactgtcttaagacccgtggaacagaagtatttcatcgaacaaggcagccaaataaaaaagagaaggaaaatcaatatctccaaaagacatcagcaaatgttgttaaaatgatcgagaaaatgcggaactaacatgtgccgttattagatcaaatggatcgagaagagtgcaaagcggcataaaccctagaaatgccacgccaaattaaactgaagcaattgaattgatcaacacatttccctgtacgggtgtaccacaactcatggcaaattcctacgcgtggcgtggccccctcctacgagaaccaaagcgacgaacctaccggaacggatccatcagataaaccttacgctccgatcgtgcgagcgcgcaatgagtagccgtaccgcatcggacgcagaattcgccgcgccggacccccagctgccgcggaagacgttagtgaggttcccgag

SEQ ID NO: 58582 - DNA, 346 bp, Zea Mays
gcacggtgtgtgttcgtttcagctcatgtaactgatgggcccgttcactgtatatacgaggcatgcagctagaagcctagaatgttttcaattacaaccgtgtttcggagtccttaaccaaactatgggcccgtttggaatggggttttctggatccagttgctagtatgttgtacaaatttgaactaaaatcctaaaatctgttggaacaacctgtctaaaacgctaaaagggcatggtcaaggattcaggatagtagatgcactagttccagaatccagagctactaaacatttgacattgtggaccgtgctgtgtttccttgggttcacttccttacagaatg

SEQ ID NO: 58583 - DNA, 917 bp, Zea Mays
tttccaattacagaatacaatgctgccctgatagcttttgaaatcttgctaagggtagaatttcctgagatgctctatattccatgaattccctatttctatgccatccatttgagtaagccgatatgatcttggccctacaaatggtccttcccatagtggtgacaatttgtgtcgtccttcccccgttaaaattcagtgaaggaccaagtctcccactacaaaggatcgatgtcgtaaagccttatcatgatagagcctcagggtttgctggtatctggctgactgaattactgtattcaatcgctctttctccaatacgtcaatatcctctagtctggtagcctctgcctcagctatgttttcgaagaccagccttggtgccccaaacctgaggtcggcgggtagcactgcctccgaaccatagaccatgaagaaagggttatttccgtgcagagctcgactaggttgagttcttaagctccaaactacgtacgacaactctctgatccattttctcgcgaacttttcgttcttgtcaaagactttcttcctgagtgcttccagtatcatcccattagccctttccacctgaccattggctcttgggtgtgctactgacgcatatttgatctgaatgctccgttgttcgcagaaatcaaagaattcagagctagtgaaattggatcccaggtcggttatgatgctatttggtatcccaaacctgaatattatatcttgtatgaattccactgccttggctgaagttagagaagcaatgggtttgtattctatccatttggttaatttgtcaatggcgaccaacacgtgagtgtatcctccctgagctttcttgaagggtccaatcatgtccagtccccagcacgcaaatggccatgttacgggtatggtctgca

SEQ ID NO: 58584 - DNA, 369 bp, Zea Mays
gccgtggggaaggatgacgcgactgccatggatcctctgatcgacggctagaaactgatacgcacttaccccttcgttggttgaataggtgtcgttggatggaaagagaacgctcaggattacatcaagtatttagtaactctcgagcgtcgatccctgttccaacggtggtgtttacgtatcgtttcggctgagatctgatctaatccatacgctcggctgttgatccaacggctgtgaatggccgataccccttcgacccgtcacttttgctaaagagaccctatccttttctcgaatgaacccgccgtcccccgcgggatacttctgagtctaaggaatttttatgaaatagcccctgtgtttctc

SEQ ID NO: 58585 - DNA, 309 bp, Zea Mays
tctacagctgctgtgctggtagatgttgttgctttgacaagtactggcaagcttcgcacttctgaactaactcggccgcatcacttttcgccgttggccaatagaatcccgacctgaagaccttccctactagtgtcctggatgttgcgtgtactccacattgcccagcatggacctcatctagaagttgcctccccgtagatgagagaatgcatttcatgaggacacccgatgcgcctcttctgtacagtgtctccccgatgagtgtgtagtgagccgactgtctagcgatgcgctcggctgcgtttt

SEQ ID NO: 58586 - DNA, 557 bp, Zea Mays
gcagaattcaaatctcagagcatccgtgtcggttggcatgatggatgaacattaagttgcagaggatttcactgccgaattgatttgaaagcaaaccccgtgaccatgcttcaagtaccagatttaaaaattagagaccaaacacgacaggcaagcatcattaccctaccatacggcctgtctgcataagtaggcagtttttttctttctagccagctaatcacctagcgtttggccaaggcagcatgtgcgtgttggtgcagaaaactcgtgatggaggtgccctaataatctaaacattgctcacgaggataacattacgacaaccaacacaaccgacgatactcgggataaatgactgcaccgtttgggtcacgcagtcaacaagacgatatgccacatttcccctaccccacccacaaattgtacatgtaaatatcacatctttgcacagaacgcagcatctaggattaactatcaatatgcacctcacttttgtaaacttatcaaacttgattgaaatccggtttgcaaaaaaaaaaaaaaaaaaaaaaaaa

SEQ ID NO: 58587 - DNA, 351 bp, Zea Mays
gcacaaggaacaggagaagcaagcaacggtccgtaaagcagctgcacatcattggtttggccaccacaccacatcacccacccctcaaactccagtggcgtctgggcagttaaccgcacaagaagggcagtagtaggcccacagccgctttccggcgtttctagaagaaggtcgcgcaggcccgcccaagcacaccgcactctcccgtagcttgaggcctcagtgttctctcatgtcaccccttgtcttccctgaggtcgccgtcaagggcgaaagagattttgatttggtgaatcggcggtcactgatcgagcgagcggagatgagggtataataaagcttgccccccca

SEQ ID NO: 58588 - DNA, 334 bp, Zea Mays
ctttctatttatttagtataaaggtgacacctatttagttttctcacatgtcgcgcaggttgttccgcacgtggtggcgtgctcgttcgcgctggtcgcggtcacgttgtttctacgtatttcgtcccgcttagagtcgttgatgttatttaaattacttatttaactaagaattgttagtgtggtcagctaattaagactgtgcgatagctctagtttcattttaaataaatatcgattaatataatcagatcaaactaaatgttatggttaatactcgtttagtgtagacgtgatagcttctcgaccgtagttccgactgtcacgtttcttc

SEQ ID NO: 58589 - DNA, 376 bp, Zea Mays
tacaaaccaattctcacaatctccaccatccccgaccccatcatcaattgctacttcctattgcttgtttgcaccaaatagtgtgacttctaaccaaaccaaagcagacgtcaaatttaaagcatgtgtatatatgcccacctagccacctttgctattgattatataacatgtacatatttgttttctttctttgctagatttccatccacacacgcctagcttacttccttgtcaccatctaactctgaggttgtctttgggccgccaccttcccagaacatgtcaccaagattcaacctttagtcttggtctgctaagccttgtgcctctttcctgccttgaccaacacactcaactggcactatgaagtttg

SEQ ID NO: 58590 - DNA, 363 bp, Zea Mays
taattatgggaattctctcccttcccgctcagggagacaggcagacgttcgtactccgagttggactgaatctcccacggaccaagaagtagccgaggcgggcgtgttgcttactgaagttggattactgaaagagagaggtctgactgccgaagccgtggtcacagattttgttttcaaaaacattcagccactgaaggacagggcctatccggcatatctttaccgagggctggccgactcaacccgagttactaataggagaattccttctgttgatttggtgagccgactcgagatgatcctcaggggtaaagtttcaaacgttggagctccagtggcatactcggcttggaacctgcc

SEQ ID NO: 58591 - DNA, 1152 bp, Zea Mays
gccctgaggactaggatcctgcgtttgaacatagtgcagatttagtattggtccatgaaataaaaaacttgtaatcaattcatgaacaatgtaccccttcctgggtcccccagtacgaatcatctgatgctatatcactagtccttggttcaaggccaagcccagtatggttctgcaagtattgccactgctggaaagaccttcggagcaagttcaatttgttttgcagttttttgttgtcataatcaagaccagtctgctctatgaagctacgatacacttgttgccatccatatttagttaaccacatgctattgaagttattaaggtccttctgattgatgcataggtcaatgaatatttagttgtcatcggatcacaactggcacggtccgacgaactcatctgtgggcaagttgcacatacacataactatttggaacagaggacatgtagtaaatgaaacaagaacttgccatggtcaaagaaacaagataagaacttgttgtaggtcaatgaatacaaaggcgcatttaacaatttctgaaacagaggacataagaaacaagataagttatgcacaaaagaacttaaagtggaagtggttttggcacgcttcttgcataggttgtactgaataggtgcagttctcttttcacacgcaggtttgtccggggaacaagaatcagtgaatgaatgtgccagattgggcaaacttatgcaggaactgcgccgaaaaagaagagtaatttaatacattaaaatggaggcacgagggcagatagcaacagtaaaatggaggaactaagcagttcacctagatctggtgtcttgcacgcggtgtgcagagtcgacggccaagcccaacgcctacttcactttggctaggatgacggagggagggcggatccggcaacgacaacgaaggagaggggcgtcggtggctggagcgactacagtggctagagcgacaacggcggctagagcggctgggatatactaggacatctggagcggcgaaaaccattgagtcgcatatatgtcccaaccacatcattatcactggtagttttctttagttgcccgcctgtgtaaataatattagcactggcggtttgcttaaaaaaccgcatgtggaatttcacaggcggc

SEQ ID NO: 58592 - DNA, 454 bp, Zea Mays
atttagcggctgagtcattgctctagttagccaaatttttagatggtttggttaagtgcgtaatctcaataaattgcttgttgtagtctaaatgtgtatggttatggtcgcgggtaaaaatttgtagtgttcatgtgttgtctaagtgaaaatgcaaattagtgtgtgaagggcgcaatcgatatagttgttgatggtgtatggtaattctagcgcacaaaataacttgtataaaattagtaaatctacttgttggtcctaatttgattgttttaactctaacaaactgtaaagtgttagaataattcaagtctatagaacatggcaatccttgaattatataggagttgacatttaattattgctgttttagactgcacacgctgttttcgccgtgctgtctgtttaatgaactaaatcatgttttctgtagaaaagccatatagaaaagttg

SEQ ID NO: 58593 - DNA, 547 bp, Zea Mays
ttgaaagcaccagtttcatgcatcgtgtgtcacatgcgaagcgcgtaggtctgcccctctcctacgcttctcgtttaacaatgggccattacaccaaagatacactatgataaacgtaccagcattgtgatggcatgtcatcgcaacacaccgacattgtgacgagtcaagttccttaaaaagatgaccctgattcactcgctctccgtgctacacagggttttcgtttatcgtcgatgctcgaacataacaaacccgaacattttatcaaattagggtttccttaaaaaatgcactatcataacaaactcaaacattttatcaattcgggttgagtccgctcactccgacccttctctccctcccaaacccccgtcgtgtgccaccaactcttgtcgtagctcacgtgccagccaccgattcacatgccctagcccactcaatctattctccactgccgcgttgtctagatattgcctctcattgtcactcccttcgctgaatgctcggtcgctctctcaattgttcttcttgtcgctcaactcgc

SEQ ID NO: 58594 - DNA, 324 bp, Zea Mays
gtgcctcgagcttcgtgccattgttttctcggagagaccgagaacctggtgttctgctggtactttcactgttaacccgccattgctgacgcacatgcccaaaggagattgtcccgaagctctaattggctggagcaggggcatgggagcacggctgcacgggcatggactgacggacgtgatggtccaacggtttcctctttctcgaattgaaagatgcccccggcctgccaagagcaccactgcttcgctggaaaagggcacaatttcagacccctcgtggatgcagtttgacaggttagcaacaccacagggatgcccgcg

SEQ ID NO: 58595 - DNA, 508 bp, Zea Mays
gtggaagatctttggcaagagatgaagatggggcactgtggtcgctctgtcaccgtgcccacttgcgccgcgacgtggccgcgcgaccatcgtcgtcgtgctgccgttcctcacggtcatgccacaccatcagtcgttttaccacatcgcaacagactgcagtagacagccagtctatcgcctaagtcattacctcagtgaaagccacgacagcttgcgccagtgctccctccctcctcggccaccagcgcttcccttccaaattcggagccgccgctcaatgcctctataaattaatgccccagcctgttccgctaggttgttatgcgcctagtgcaccagccctcacctccgattagccaccgtagcgcctcaatttgcgttttcctccaattcggttctccgcgccgccgtgaaccactgcgccgtggaccaccgtctctaggtccgttcacgtcctccttaccctcgtttctgctcccttgcatcctaaggatgcttatcggcc

SEQ ID NO: 58596 - DNA, 322 bp, Zea Mays
ccggcgacgagcaggggggtggaatcgggatcttattcagtttaacattcactgtaccatggcaattgcaggcagccggtctaacagagcactttggagcccgattttctcttaatttcaaatggcaacataagtcaagctctgcaacaaaccggtagagcattataccatctacaatgttgccatatgattctgccacaaaaacccattggagcatgcttaaatttaggcttaaagttgatgtcagttcactgctagtctgaaaattcagaccttagcagcctgacagcctgattttgagcatgattatcttcaatttgtt

SEQ ID NO: 58597 - DNA, 296 bp, Zea Mays
gacggcacatgacagcgttagtggccagtgtgatggcacatcgccggagcagagctctctggttgttccggtgcgctagacatctcccgatcggtgcttcataaatgaagcgtatgacaaggcgaacaacaaggaggagttattaccggtgatggagttagtgatgtcctcctgccacgctttgggcggatccgcggtgaacctgaaactccattgacaaattgtttgtgacccatggcttcccgcgcacgataacccaccagagcatgtccctcaaggtagtgcgcaccctcctg

SEQ ID NO: 58598 - DNA, 557 bp, Zea Mays
tagcacatctttgaaatcagcatcgaaaacatattgttgtttaattgtttccaagccaaaaatcttaaaatcaagttgagacagcatggtataatggcgagacaaggcatctgtaatgacattatattttcctttcttatgtttgatgacatagggaaaatattcaataaatttgacgtacttggcatgcctacagttcagatttatttggcttcttagatgctttaaagactcatgatcagaatgtataacaaattctttaggccataagtagtgttgccatgtttctaaagtttgaactaaggcatataattctttatcataactgtaatagttcagactagctctatttagtttctcactaaaataagcaatatgcttcccttcttgcaacaagacaccaccaaaaccaatatcactagcatcacattccaattcaaaagtcttactgaaattaggtaattggagaaggggtgtatgagttaacctatctttcaaagtctcaaatgcaacctcttgcgccttgtccccagaaaatgaagcacccttcttcgtaa

SEQ ID NO: 58599 - DNA, 1127 bp, Zea Mays
ccccaccggtcagccttgggtcggagtcttcttcttccccgcgtgactcgctcatccgcacaccggtcagccatacatgccctcgcccggccggactctcatgcgcgcgctcgcctgtggacccgttgcccaccttgccacggaccacgcatcgtctgaccgtctcctccccgcgcgcgctcgaaatctacggaactcggagtgcatgcgccaatcgcggaggtagttgcgggcgccatggacgaactccccggggctataaagccataggcctaggaccggttctcctctattcctcgtaacccaccaccattgccgtagaaccaggtggattacgccgtcgtcatcacgcacgggtggtccgccgcggtagaaacccacacaccgcccacaatcggaactcacggctggttgtagagcttcgctagaacgcagggaagctgctcagtttttctgcgggcgaagcttggagccggggctctgccaatcgctcgtcggcgtctggcttctatcaccgggccgcgccacatcgcgagacgtgttctactggcagagttcctccccggtaagctttcaatcgggttcgcctcctccttccctttagaacggtataggattcgctaggtttgatccggttggtggccggattggtcgaattccggcgaggtctcggcctcggatcggcggcgccgtgatagtgctgcgttggggcgctgttggtagaagtgggcttgcgaaccatacgtctcgcgttggacggcttagatttggattggcggtaccctttcggtagttgtgatcctagccgtcgatctagaacccaagggctcccgataggtccaggcgtggtgtagtttgggccgtgggatcgggatcccgtggctgaggttggatcccggttcactaaagtgctaggtttaatcttgaccgtgggtgcacgatccagcggccctggtgggcggataccctttcaatcagacggattttcaaatacaaccctgagttcttcataaataaactcacggtcctcgtagctgggctctaggtcttaggaggtttttcaccagagcccctgcacttcacagattttggcgcccgatccagaaaaggattaaaatagggaaata

SEQ ID NO: 58600 - DNA, 310 bp, Zea Mays
ttggcaaaaagggttgaataattacaataccacttagatagcaagacaagagaaataacgggcacgacctaacaagacttaccaatctgacacgaggtaaggcatttctaacatagcagtacatcacattattcacaagttcttattattggaataaaggtgagagaagcatttgatgcacaagagacaatgatgcgacaatcaggatgcatgctcattctagtcgtcttctcagacctaactactttttcgggtgcttgctatagcatcctttctaatagtagtagtagcctttatggcctatataaat

SEQ ID NO: 58601 - DNA, 538 bp, Zea Mays
ggaggatttgagaaggcaaaatactaaggacaagccaaagctgaaattttatggtccttcagcgtcctacattgtttagatacatggactattgaaagagacaaacatcaaaccaactgaaattttaaggtatataattaaggcaacatatctagtgtaaacacgattagggtggtaacatgctaacaacaaatcttgaccattgaatctaccatctacgactgagtgcaattccacctagctaaggatgacacaccctattccatgaaaatataggggttctttagaaaatagtctgagaccaggcgagattgcactcaaccatagatgatggatctgatggaaaaaattattttagcatgttagtaccctaatagtgtttacactaagtcacgaccacttctcatcttagaagcgaggtgaagggcatcttcggtcacatctcctttcttcagtttaaactgcggaaaggcaatgtagcaatgcgagcacagtatggacggaggcagcccttgtacgccttcggcatctttcaagg

SEQ ID NO: 58602 - DNA, 535 bp, Zea Mays
ctgagcttcgtattacctgggtcccaagtgattcttgtagctgctcccaaaagcgtgccacaaacagtgctcctctgtcagatacaatggtctttggaataccatgcaaacacactatttgatcaacatagatttctgcatatttctctgtcttgtgggtggtatgcactggtaagaaatgagtggtcttggtcaatctgtctacaataacccaaatggaatcatggtgtctggaggtcttgggcaatcccacgataaaatccatgcagatgtcctcccatttccaagatggtatgggaaggagttgcaaagggcctgctgccttcaaatgactggctttgattctctggcaggtatcgcactcggatatgtacttggcaatttccctcttcattctggtccaccagtataaggatctgagatcatgatacatcttgttactgccggggtgcatggagaattttgaaaggcgggcttcatccaatatcttctttctgagctcagggtcctggggaacaaccaatcgatctccaaa

SEQ ID NO: 58603 - DNA, 774 bp, Zea Mays
tacccctatcccgagccgagtcttcgggggataagtagggataccccctcttcccctcccttacctccacttcctccctgcgtgtccaccgtgacaaaatcgccgccgtctgtgccgggtccaaggacgccgccatcgaccgcgtgccacgcagtagctgtggcctaggaataccgcgctgggggctcgcctggttgtatcgctcatgtgcaaccacctcaggagggcagggatcaaccgtttgtgccgcaattcttcgcctgtgaccacattttgtcgcggctccgctgtacaccgtggccagcgtcctcgagtcatcaattcgcggtaataaatctacccccattctcattaggcctttcgcattgagtagctaagccgaattagaaatcgggtgcgtgaatgcgtggtttggctccgccggtcatggcgcaccgccgtgggagcttcgccccaccaccggtgtccggcgagttggggcgatcggatctcgggcgctggcttgtagttgaacggctcagattaaatcgtgtgtactgattcgcggaggaaattgtgggtcgtacgatttagatcagaccatcgacaaatgattctaggatagttgaatctggtacgtagagttttgatcgtgcggtgatcgtcgcgtaccgcttcacaaaatgctaggtgtaatccggacggtcgatcagtgatcagacggaaccgattaaacgtaccccttcggccgcacatttcacaaaagagaccccgtgctattcatgaataaacccg

SEQ ID NO: 58604 - DNA, 582 bp, Zea Mays
gctatagaaaactcctttatttcttatgcagcttgggtgttacaatttccaaccccttaaaagagacttgacctcgagattaggatggagtaggaaaaagatggggaaattcagcttgcagttcatcctctctctcccaggtagctttatcttccgcatgatgactccactacaccttgcacattttgacaactttgtttctggtgactcgggtcagggtatcgatgatcttgatagggtactccgtgtagcttagatcaccctgcagtctgagttcttccattggtagtttctcttctaggacttgcagacccttttcaactgggatacatgaaacacatcatgcacatcagctaggtgactaggtaactccagctggtaagctacctacccaactcactttaggatcataaagcgaggcgacaacttccccttgattttaaatcttctcataccccgaattggtgacacttttaggtagacgttatccccttcctcaaactccaactgtcttcttcgggagtcaacataaattttctgccttgactttgctatcctcaagttctccctgattattcgaac

SEQ ID NO: 58605 - DNA, 1034 bp, Zea Mays
acttgtgatcgtgttggcgtggcacttagatgggatggggacctcttcccgcgggcgataacgaatgcttctggcgcatacccggctgcgcccttaggcggcttttgttcggccgcatcggatagtagagacttcacacccttagggtgaatcgcgcttattatgcatgtccgactgctcccttaggcggcttttgctcggacatgtcttatagtaaagacttcgcacccttagggtgatgtcgcacacttatttgtgcatgtcaggttgcgcccttaggcggcttatgcttagatttgtcttatagtaaagacttcacacccttagggtgatgtcgcacacttattgtgcatgtccagttgcgcccttatgtggcttttgcttggatttgtctaatagtaaagacttcgcacccttagggtgatgtcgcgcacttattgtgcatgtccggctgcacccttaggtggcttttgctcggatttgtcttatagtaaagacttcgcacccttagggtgatgtcgtgcacttattgtgcatgtccggctgcacccttaggcggcttttgctcggacgtgtcgcacgtgagggtagtctaggctgcctcttgcggtgactgttttgtacgtcgaatgtcgaaggccgccgatgcggtctttttcgacactcatgaccatgatgctggctggattttttgcgggggctttttggcagtatattacatggctccgcctcgttaaaaacctcaccccgggaggaaaagagtgcgggcctgagtaacattgtttgaagaattacaaaggcgcttgggccttgaatcttaaataaagaatttacggaggttatctatgttccatgaatcctctaagtcttcgccagatgatgttgttagcctgtaagcgtttggggatgcctttgtcttgactatgtatggcccttcccacttcggctctagcttgccccgggactctattctggtggtccttatgagtactaagtccccttcgttgaattctcttgggacgacattgttgtca

SEQ ID NO: 58606 - DNA, 363 bp, Zea Mays
catacaccgtatagagcaccaaacatcgcattgaatacgacactcagagatgtctatagcatggttgggaagatccataaggcaccagacatattaggagacgcacctgatgctccaccgaatagggtactcagagaggttgcaaagcaactcaaatgggtaacaacagcaccaacgactatgatgccacaccagacatcacatcggataccctgagctcaacaaatagtaatatctagttacggtggctagctaacgtggacaatcacatgactgtccgatgggtgcatcggagtgtctaatgagcatgcaaaatttctgctttgctttcctatggctagcttggacataggggctctaaat

SEQ ID NO: 58607 - DNA, 544 bp, Zea Mays
gaagtctttgctgtctagttcattaaatagtagacaaaacagatacacactccacttgtggataggtatttgcagactatggtttgatatttcatttgttgttcacccaaggtttacctcagcttgagcacaccaatgtaggacagcagcagggggaggagatcttttgtgcaacttcaaacctgatccgtattcagataactacatttccctccactatctccagaacagtccaactcctagatttctttctgtagtgggaaaccttcagcacctgagctatgtactttatccccactaacacttatacctatgacaacttaaacgcataggtggagttcagcaggataaggagattcttgttcagactaccaaatcagtatcgaactagactgaaacagccaatactggccattgcacagccccctgtttaagcccttctatctcataaatctcctcaacaacagatctatatttcttaactaacattactctccaactatagccctttctattggtataacactccagggctgaaactact

SEQ ID NO: 58608 - DNA, 528 bp, Zea Mays
ttttatcttcggcattccccatccacctaatgttggaaaaactttattggccagatactcttgagctaagtgtcgcgtgctgatgtgctcggccacaactctgaattgaacttcagctagctggcatggggagtcgagttgcatattgcacaaaggccttgtcatgccaaaactcaattttaagggacacatcaccatgctcatgagcttctccctcttcttctcattagctttcatgtaaaaccactcgcttgtccaactagtgggtcattttgtgtggtatccaattacaggagcctttgtatcttttcggtatgcaaaattgtagcatctgaagtttttgtgcagaccatctgctcttgccttggtttggtaatggagttcatggactctgcagaacccttcaacattagcactcataccttggcttcgtagagaccatatatacacgatgagtctgactatagcatttggagtcaactgatgaagatatatttcaaatttcttcaatacttcaccaatcatttc

SEQ ID NO: 58609 - DNA, 567 bp, Zea Mays
gttgccaagggctatcacacatctttcatcttcaccattcttttgcgtcctcaaagcgttgctaagaattaaaccttgcaagaagatagaatcagcacaagcatacaagacaagataatctattttgaagtccatcactttcgtaccttcagactgttgtatgcaaggttgtctgcaaggtcatcttttgacatggtggagaggccagcttggagctttggaaatcccatatttttggccatctcccggcagatggatatttctttgttatccaggagacattataggaaattgtctttgtctgtcccgttgaacactaaggcccccttcgggtatttcagttctcgggcatagtgtttggcttctacaatttcttcttcagatagtctttttcccgaagcatgtcgaataataaagtcaatatcttcggacgatgcttcgggagcaggagatttagctttttcggccacatccatctccatagccatgccaacgtctggagattcttgctcggccttatccttctccataacaggctccgtcttagtaggcactgagggcctagct

SEQ ID NO: 58610 - DNA, 1154 bp, Zea Mays
tatagctccaccttcctctctcactttcatctaggcctcatgtgttagctcttcagttaacaaccagggtttctgaatgtgacaacaaggtgtgtttgtgaggagcagtttggtagtatgtgcacgatagcactctttgatttctatttctagcttgtcattactgtttctggttgtcaacctgggataccatgtgggggtgtggcccccagatatcatcagaggggcattagaaatttgttaccgcttggacgcttggtgtgtattgcttgccagaaatttcttgggatgcttcctttgtttacctttcctagcattatctgttatgcatggtcatgttggtaactcttcccttttttttttggcaatgttgtgtacaactttgcaatctgaagcaatgttgtctccatatgtttcaagtgttgccaagtttaagcatcctaaaatcataagcatgttgatgcatttaactggaggtgggacttttggcctcctgttgtgctggctcgacccattcgtctgtgatttatgttgtttcacgcaatgacaatcaatttttttggtacaagcatgatcgatggcccatcgattcgtctttgactcttcctgttgtgctggcccaagcatagcctgtagtaatactgcaaaaatctattcggtagattatcagcttgcacattttttgtataagcggatcgcggttctccgcgcgcaatttgcgtttttgtggcaccctgttgtgttcattatgcttgagtgttgagagcagcaccgttagagtgatgtactgacatggatgatttcaatcgtgcggcacacggaactgttattggccctgtttggttttcgcttataatctgtttgttgatgcaaataaatgagaatcccaccaaacacctagccatacagggtgaaatgggttatatgagaggttttggttattgcaaaatgatttagattagtccaattcatgttctcttggacatattgatcttagatagggcaacgactgatgtgcaatcatgcaggctttagatgtaagtgtgcaagccagtcttctggtccattaaattatgatctaaccatatatcacatttaacacttaaatcctttcactagagctcgcgaagatttataaaaaaagctaacaaaca

SEQ ID NO: 58611 - DNA, 483 bp, Zea Mays
gttggattgaaatgtagtagcatacttcatgagaaacttgttctcatacatgagacaatatgagatttctaagataacgtgctagtctcaaaataatcaagatatagaaataggctccccctagagatatgcatcaagaatgaaggaaatgggtggatgcactcacttttaaaggcaaatagggagaagcactatttatctcgatcaaggcttaaaagatttgcaataaacaatttttgcctagtattctcataatgaaaagttttagaatgcttacaaccacaccattgaatgttttgaagatctcatatccaagtaggtattgttgctcttgatgtcttcctttttcatttgagtgtcctccctttattgttgactctgtttccttccaaacttattgaaaatactcaagagagatgttaatagcacaagggagtatatagtgatgatttctttagatagaaagtaaaaacaattcatcat

SEQ ID NO: 58612 - DNA, 494 bp, Zea Mays
ttcctcaaaaagactatctgtgcaaaagtcgcctaagggtgcagccggactaagcacaacaagtgcgaaaaatcgaagtcttcctcaaaaccctacaccaaactgtctgcgcaaagaccgactacaggcgcgctggaccgacataataaacacactcgaccaagtgcgcaacgcctttatgagcatagccgaatgtgcgaaggcgcacagcctcattatacaagctattacatatgtacagcgagggcatcacaccttacatcggttcaaccttcggaatgatccccatctccctatagttaaatagcattatcctcagctcctcaccctcaaaaagacttcgcagctccccctcacctacactcgcaacggccggcgaggacaacaattcctgcttgccagccctgccaacacgaagtcgaccaccgtctgcctcactcactctacgcttcgcaaccgcccttcgccgcctacgcccagcactcggaccaggc

SEQ ID NO: 58613 - DNA, 748 bp, Zea Mays
atcacatgtggtttagtttgagaaaaaggcaccaaacttgaggagcaaggtcttaaccaagtgttgatcatcctagaagtcatatcctagccctttcatgcacctccaattgggaaaaatgctcaaaccctaggactaccctccttaagccattagagcaccaagaaaggattagtggtagaactatataaatcacaaaatcatgacttgacccattcacaatagttgtagcatatttaaatacttacaagaaatagtaaggaggtttcccaaaaaggtcccccaaaatccccaaaatgatcactcaagtgggaagcataaaagaaaaatcaccttttctctaagtctatttttagccctcttctaaagatcacatgtgttcacttagttgcaaactccaaatccacatggtccaattgacaaatagtggcgccaaaataccctaggcacactctggtaaagtttgaactcaaaccaaaaccgtttgacatgaattgacatgggttttgtctcggattgaacaatctagacagacctgactttgcgccaccatatcttccaacgcagaccatatcttcacttggaactcacacaagacagagagcccttggcacagtgaagagactctacacatgatttttggcaagatttgcacgtttggtcgaccaacaggcgtttgaacaaggccaagaacaaacctccacgtgttcgacctcttctggcgcgccagagcatgcccaggcgctcg

SEQ ID NO: 58614 - DNA, 318 bp, Zea Mays
aatacagatcagatttgaacttgcagctagctactttcttagtacatagatctgatcccgatattgtgtgcgaaaggtttagatatatacacatacacatacatagcacctaaacttaccaaccgcagactgccacacatgctgaatcgataaacaaaacacgtaaataaaaagttggtagttacaatcgtgaacgacacatgcatcatgcatgcaccagatcgtggtgacgatgaccgggcaacgctttctgacgcagcccgatcgatcgaatccagtgttgttgggtgcaggtggcaattgcaacatgcatgcata

SEQ ID NO: 58615 - DNA, 1862 bp, Zea Mays
tatccgtcctaacactaggatttcatagataattaattatgggtgtcctccaatcgcttgcattagcttcattaccagccgaatcaatcaggagaactttcctggcaaccccggacggtctgaagccctcacccggacggtccgcgatgtggggaattggccctgtatcggttatcagattttcggtgttgtaaaatttccctcgctttatccgataacctgatgcatcttgtgccaaattgttagctatgtgattctcaactctagagatgtaccaaatgctgaattcgttaaaagaatgaattatgccccaacatttttcaaggtaactgtttagagtaccatcaaaacattgatattcttctaatacttgttggacaactagctgagaatcactgaatgctctcacatgttttactcccatacaacttaacaggtccaagccaaacaaaagggcctcatattcggcttgattgttagtgcaataagtttttaatcagctagagaagtcgaaagagacattacttggtgaaacaagcacgatgccaattccttgtccttcactgcaaaccgatccatcaaaatataaaatccagggagtaacattgaggtatgatatgtctaggttatgagtatcatcaatccgatgttctacaataaagtctgctacgacctgacatttcatagatttcaatggttcataagccaagtcatattctatgagtgcataagcccatttaccaattctaccactcataatcgggttttgcaacatgtgtttgatcacatcggtttgatcgaaaacggtgcaatgactagacagaaaataacttctacacttggtgcacgcataaaacgggcataagcataacttctcgatgaaagtgtaccttgtttcagcatccaccagcctccaacttaggtaggttaccatatgctcatttccttcgtctcttgcgtcaaaacagcttcaataactttatcttcggctgcaatgtataatttgtatggtactcctacctgtggcacttttaacacaggagccgaagacaaatactttctaatgagatcaaacgcttcctgctgttctgcccccaggtgaattcgacatcatttttaagccgaaggataggagtgaaggcatcaatcttctcggctaggttagaaataaacctatgtaaatattttactttgccgaggaacttttgtacttcaagcttacaggtcggaggtcccacattctgaatggatttaattcggtcagggtctatctctataccatgttcatgaatgatgaatcctaagaacttactagccgacactccaaaagcacatttacgtgggttcattttcagaccataccgacgtattttattaaaggctttgcgcaaatcagctatatgagaactaaactcagccgatttgactacaatatcatcaatgtagacttccatagtgtttcccaatagctcgtgaaagatcaaattcatagccctctaataagtagcatcagcatttttcagaccaaatgtcatgacaacccactcaaataaaccaataaagcctagacatataaaggccgttatagacgcatcttcttcggccatgaaaatctgattatatccgacattaccgtaaagaaagctaataattctatttcttgacgcattattgatcaatgtgttggctatgggcatgggatattcatctttaggagttgctctattcaaattgcgaaaatcaatgcatactctgagcttacctgattctttcttctccaacggcacaatattggagacccactctgcgtatctacaaggtctaataaaattagcttctagcagccagtgaattttgtcctt

SEQ ID NO: 58616 - DNA, 822 bp, Zea Mays
ccagagatcaccgaaatttgccccgagcacgccgcgccaccgcccgccaagctttccgagcctcagccaccgtggccaactccctctagtcgtgtccaagccgcgccaaccactcggttagcttcgccattagcccgtgaagctttccaagtcctcggacccggcagaacttcaccggaagcccgagatcgccctcgccggacttcggtcgcccgcctcgtcgcccgcctccgcgcgtggaccgagctctccggtaagccattttcaaattccttgcacccacgtcatccctagcacccagtgaagctctctgacccgttcaattgacctactgcgccgtgagtaggccggattcctcgccaccgacgagcatctccgcctacgcacgcggaccggccgactccgaccatccccgacggcgacccgcacatcgtcgtgatccaagagacctcccctacgtcctcgaccacctcaccgaagcaacctcaccgccggtaagcccctccgcccttttctccactgcgggtactatttaattggggacaggaccgcgggttcgatttccagaaaccctagggggttttctgcagagccgtagactcaaatgaatagtgccccggggacctgtctgtaattcctttaagaacttttgccagggaccccagcgcaaaactgcttttctttaaaccatttcgaattaatctttatttattcggccgaagacttaggaaattcataacttgagaaatacttaaccaaaatttgtcaaaccaattttgctgaattctaaatattatggactatcaattaaaaatactaaac

SEQ ID NO: 58617 - DNA, 432 bp, Zea Mays
ttttgtctgataatgaagctcatgtgcccggcagaagccttcggcaagcggttctgcccctggcttcggagagcccagatgtagacgctaagcctaacgatgatgttaggagttagctgatgaagataaatcaaacttctccaaaacatccgcaatcatctcattcaaaggaaatcttaatcctgatttaaagaatcttttaaagactaccacctcatccttttctcgcttcggagtaatttcctttccgccaaagcgaatcagcttctttttggcttcactgaaaatagcctaacttcatcaacttaggcgtatcatcttcggtaacagtggacctcccaaactccaggtggctgggtttagatggcagggcactgtaatcatcttcagattcaccttcctcagcaccaatctgcacagcttcagcggcag

SEQ ID NO: 58618 - DNA, 394 bp, Zea Mays
aagataataaagatatattatcttaggtcttgaatacaattttccttcacgggactccaggaaactaaggtttttggagtcagaactgaagttcctagggcaggtatcactaaaagactagggttttggagtttaggcatcaaacattgtccaaatcataccaaactttacccaaggcttctaaataacatttaaagcttatccaacaagtttaatgatttttggagttattgatcaatttctaaaattccaggagtataagttttggctattttaaatactccataattccctatttggactaaaaatcataatactatttttattgaatactatagaaaattaggaacctagaaaaattgatattgtatttttagcatttttctaccatttt

SEQ ID NO: 58619 - DNA, 742 bp, Zea Mays
cttgggccagatgggtatagattcggcccgcagaacgggggggcaggcggcgcaacgggtttcccgccgtgacccgtccgtccccctgacgtgacgagtcgaagcgagagtcaaagtgctgaagcactgcacagcagcgcaacagtgtgcgtgctgtgtgtacacacgggacaagtctctgcgtcgtctgcgtcactgacaaggaggagtatatttgcttgcaacagctacgtgacgagcgaggcgaggtcaggtatgcagtgtgctcctgtctgtctcagccgctagctaagctagcagcagccagcagcaacagctaaaaaccagacctggcatgggattgtgccgtctgaaatcgattcagacgcccctgtgggctgtggcctgcctgtcccagctcaaaagggaagaggcctcagcccctcttttctctgctgcaactgcaagctgcgctgcatggttctgtatcccgagtgtgtgatgctgatgcatgcaagcgtgtagtcaacatccctggctatggcttgcagttgcagtcgttttataccatgcatactaccagcagcctgtagaatagaccaactactcaaatacttgtagtgtcatgactcatgagagggtttgcaatggcatctcttgtcgcattttgttagcagatgttatatatgggataggacaagcagaaggggcaggtgagatgacgacgttccaatttccagttccattgttgtacataccatta

SEQ ID NO: 58620 - DNA, 1154 bp, Zea Mays
ctcaaagttcagattactcaaagcactaacagcaaattcgtgtagacctctgaacgtatagtttttgtttcatgtggccaatcatctagacatctgaacgtgtagacctctgtatgtgatttggtcatactgatccccatgtttgaacgtgtagtttttgcttcatgtgaccatttggtcatactaatccccaaagactaatgttagtgttctctatattgtctcctggaatagtgggtgcaatgcttttatgtacactgggagcacgaataaagggtactatccctggtgccaagttcccttccgtgatcatctttagtttcatccctactggccttatctgcaggaacctcatcattctcattgtggtaaatttgagagagggtaggtttaattaagagtatcattatcaacagacattgcagcacactttgtgtcaggggcagttcctaagtcagttctgatgttagatgattttttgctcacattgtgtgctttcataaactgctctggagtgctcaagttttttccagtagcacccactacattgctagcagagacagtttgtgtcagcggcagttcctaattcagttctgatgttagatgattttttgctcgcattgtgtgctttcataaactgctctggagtgctcaagtgttttccagtagtacccactacattgctagcagagacagtaggacctccactgggtgcatggatagcagagtcaacatgagattttgttctgatctctctaatgtatgtgttgagtagtttgagcatttgcaggaacggattatatatatatataataaatccaggcatcacatactgattgttttgattatgcattcatttttgaaatcctggattcgaaattgaaaagtaagaaaaaaacagaagaaaagggagaagaaaactggaaataggaggaatacaggaacaagccgaacctggactgaaaattcatgcggccacaacaggaatgtgttcacgtgtgcatgccattgatcggtgggccacgtttacctgctcaatctcctttgcggggactctgttggaacaaaatgccggattgccgtgcagtgaatagggatccttctgtcaatacatctgctacttaatgagcctgtaccagcatcttctgtttcat

SEQ ID NO: 58621 - DNA, 560 bp, Zea Mays
ctgaaaagagatgttgctgcacacgtggctaagtgtgatgtgtgtcaaagagtcaaggccgaacatcaaagaccagctagactattgcacccacttaagatacccgagtggaaatgggaagaaattggcatggatttcattgttggactactccgcacccctgttaggtatgactctatttgggtgattgtggacagattggcaaaagtggctcatttcatacctgtgaggactaattacacgggagccaagctagcataattgtatatgattcggatagtttgtctacatggggtgcctaagaagatcgtgtctgaccgaggatcacagtttacttctcgggtttggaagaagttgcatgagagcttggatacacagttgaattttagttcggcctacctcctcaaactgatgggcagaccgagaggactaaccaagtgttggaggatatgttaagagcttgtgctcttaaacatggtggtagttgggataagagcttaccatatgcggagttctcttacaataatagctaccaggccagtttgaagatgtcaccgttt

SEQ ID NO: 58622 - DNA, 642 bp, Zea Mays
cttggcagctctgcggggaagcttggcaatggtgaggaatccctaagactctgagtagtcgatgtgcgcgacgccgctatgtacaggttctcagagacccagaggaacacccacaccccacaggggaccctagctagcagcgaaggcatagggacaccgtggcggccatttccctctcatctcacctcacctccctgtgctcggtaatggcatcttcacccacggcaagctacccctacaagatcctatggccaaggaaaggtgcggccggacctatatatcctcctaggccagcaagttggaagggggcatgcactgcggagcgcggccaaagactctgggtttcggttttgctggaacggacaagagggagatggaagatctgacaggtgtggcccataagtcagcgtcagtgagagggcgacacgcagtgtgtggggcgactgacaacgcaggtccgccagtctttcacccttcttttcttttcttttgttttaatttcaattcaaaatttgaatttgctttgatatttagattttagtttaaattcaccaatcaaaagaacccagcatgatacaagtataattgtttattaatcattttattgttctatataaaataaatgcttgcatgtgtatgaaa

SEQ ID NO: 58623 - DNA, 407 bp, Zea Mays
ccaacccaatggttgtttcaagtgcggtgagcttggccattatgctaacaactgcccaagcgcaaccaacagatacctcagaagagcaacaactagagaaatgaccagaacacccccgctcgtggatctgcgcagagcaaaacgccacagaaccagaatagaggaagggtcaatcacgtcacagctgaatcagtgcctgaggatgccgacatggtgtatggtatgtttcttatcaactccatacctgcttcagttttatttcactctggagcatcgcattcatttataactgagtcattcgtggaaaaacataacataccaaagtaccatcttaagaagatgttatacattagttcaccgggaggtgacatgaaggccacacattcatgcctccatgttaatctcaa

SEQ ID NO: 58624 - DNA, 343 bp, Zea Mays
gccttctagccgtagatctttgatcctgtagtgaccgacgcatactggttcactcgctgagcgatctaatctgatctgtctgtttcggatcgaatggctcagatcgagtgcatgtaaagccgccaagaacttttactaaagagaccctatgctttgctgtaataaacccgagatccctgatagtgatagaatcatttcagaaaggccctgagttttgcaggttagaccttagagaattcagaaattgtggccaccgtccacgggtctcggaatcttagaaaataaaatctaaaatgattttcaggatgaaaataaatatgataaacttagaaacttcataact

SEQ ID NO: 58625 - DNA, 509 bp, Zea Mays
caaagcggctagcatggcagtgttgaaacatgagcgggggactagcggagatctcaggtagggtcagggctaagggtgagttgggggcaggggtggggccagaagcagtggttgtcagtgggcgtggaaccggtagtgacaggaaagattgggtctagcaacatacacgagacaacatgtgacgtgtgaggagaaaccactatgagaggggagacaaatttgagataagaggaggacggtattatagggtacctcgatgtcaagatctatagtgtcaacctcgacgccacatatcttgacttgaccttttgtgccatggcccatggcaccaaggtctcataacatgactatccctgccagcatgataccttggcgatgtataatattagtgtcacaagtagagatggcatgggtacccaaaacccgaatacccgatgggttttacccgatatgaaggcgggtacaggatgatttctctacccgcggttatgttaatgggtaaaacctct

SEQ ID NO: 58626 - DNA, 551 bp, Zea Mays
tgttcatgttaattcagtgtctattatttgtacttcaaatttcttgtcagtttaaatgtttaatgcagtgttgggtgattgttacttgtagctgatagttttgggtgaccaccacttcagtttgtgtcatattttggtgaccgtcagttttgggtgattgccactgcagttgtgtcatgttttgggtgactgccattttttgtggcagccacgacagtttgtgggtgactgtctgttttagatatctacatatggaacttacatgatacattaaacaattttagcatacacaactgcaatctattgttatgttgtctattgtgtgagattggtgagtaaaatcataaaatcacctcgccggttatgctctagagaatggcaaaggtgtttttgttgagaatatatcttctccgctttgaccccggaatctacactctttgaatgctacttagttctcttattgatctgtctaaaacatcaaaactctaattggttgcattattttatgtatgtaacaaccaaccaccagcatcaagttctttaaggtaatc

SEQ ID NO: 58627 - DNA, 405 bp, Zea Mays
gccagagtggggatgtctaggaagtgtgaattcgggatatgatgaccacaatggatggcgagagtggcccatggatgcaaggtggatggttgggagatggggggctagtgggtccagagatggaggttctagaggtgctggttctggagctggtgggtctagatggaggttctagatgtggaagagttggaggatctacatgtgtctggaagccacataggacctgttgggtctccctcctaaagaactggacgagaaagttgagataatatagattggagatgggtaagagtatatttgctttgttattatgataaattgcatttacacgattatttatgaaatttgtacttgtgttgttagagcttgggtggatacaactttcaccggcataggacataaagg

SEQ ID NO: 58628 - DNA, 953 bp, Zea Mays
tcttttaataactcactgttgattccaatctttgtcttctcgccactcgaatattctgcacagaaacaaagggagaacaaaactataaatccatcgcaggttgcacaattcacacaatatgattggttggtgggcgcaacagctgcttatgtggcacgacatggggcacctgcgtagctatcgccctcgtcagctcgatgcacctcgcacttcaattcacaagaagttatacaggctggaccagtgtctgaaactacacttacaaggctaatgaggatacaacgtcaaaagtaagcacttacaccgaagaagagttcgtgatgggtggaaggcgtagccaaagtgggctgaaccagtgctcctcacgcacagaacctacaacacatgagccaaggcgcatgagtggggccacctacaatgtgctaggaatcacacgtcgctacatcaggggtgagaacaccacaattaattaaacagaaaattaggggaaactcattattcactgcccaaatgcaactgagaacacagcgagaaccacaatttttgttgttggaaaaaaccagggaatccacctgcacgcggcacatagattggaaactcattttgtcacaatttttcttagaaagggaagagagagaaaatagaaaagaacacacaaaaatgaggagtggacatgtcagtttagctatctcgattgaaactataatggcatcactcaagatccaatataacccaaaacatagcacagactggaaaatatcagacacccaaatccaattaatttggaggcctaattagagctaaagccaagaaaaatgcacaaagatgagtgcggtgagagcttatgtggggctatagatgcgtagcttttattacatactaccgataaattatatctaaattcatatcaaaccatatatatgttaagcattcagttttctgaggacctgaat

SEQ ID NO: 58629 - DNA, 611 bp, Zea Mays
gaaattaataaatttcagctcctaaacaatttaagaattgccatgttctaaagacttgaattattctaacgctttgacaattgttagagttaaaataactaagtgagaactaacatgtagacttactaatttttatacaagttatttcgcgcactaaaagcaccatactcaattaacgatgcattctctataacaatcaatatcgaagcgcttttcaccaatagtttgcattttaatttagacatcacctgagcactactacttttcatccgtgaccataaccatacgcatatagactacattacacaattcatcgtgactacgagcttaactaaagtcatctaacaagttggttaaccagcataacacttagcaaagtattttagacttcgcaactcaaaaacataggtgggagcaggttaattagtttttcttaacaactttctcaacttaaactggacaacgcacaagtcacttaaaacaccatattttaggagacctcacatgtcgagcatcaatttataacctatgtgactcaacctctatcacgcttgacaactaccacatcacccgatttatctatttggaacaccgcttgtctagcgtactac

SEQ ID NO: 58630 - DNA, 311 bp, Zea Mays
aaagcaaagcagcacacatgatcgatcgaagctgacaaaaacgtacgacatcatttagatcaagaccaacgccaagtttatcctggacttcttcacctcacctttcggctggcctcagctctcactctcatcaggagaaggaagcgagacagtgtgcaatggatcgatcgattcgttgtaccagcaacggctggctggcctttttcatgggccggcctctaccataaagcatgcagctagcacagcacgcggtagcagacaaaaccgacatgatatagatcaagacccacatcaggtttcgaacgcgtcgc

SEQ ID NO: 58631 - DNA, 358 bp, Zea Mays
tcataacccaatcacaccaaatatcaccgaaacccttttttccatcatacaatgaagaaattgccaattaactttatcataagctttttcaaagtcaattttaagaatcaccccattttgctttttttcctcacttcatgaagaatttcattcagagaaaccacaccattcataatgtacctccctttaataaatctatactggtactcactaatcactttagtgatgcatgaagcaagtctattagtcagaactttagtaataatcttatagcagacattcaggagacatatcggtctaaaattcctcatatcaatagggttatctactttaggtaatagagtcactaaaccaaagt

SEQ ID NO: 58632 - DNA, 844 bp, Zea Mays
gccgattcaccgtcttgcggattaggccgggggagggacaagaatatctcacttgcgtgcaccgtggcttgtgtgctcctctcgcggtgtcacctgcgcccaaattctaccacactatgcttccttgttatgtggtctccatgcactagcatcgtaccttagtgattgcgggtagccagccttgtcaccatccctttaaattgagccatgaaccaccatggggcattcactgtcttccggtgtggtcagtagaagccaaaattcacggtgtcctcacttccttgccccaaattggtagtgcacggtgaacttgttgtcccttatggttgtatagctccagcgtgactgcctatttacgacggagttcaccacgacgtccatcgctcccgtcggaccctgcaatgcgtgctcacctccgcgtccccgtggccaggcaaaatcaatatggttcagcgcctttgatttaatgtttgagtgtccctaggtgttggtgaagctcaccgaagtggtcgtttggtcattactggcatagcttggttggaacgcgagctcgatgtcgcgtgctaacccataatcggcgcatgtgacgaccagccagaattctgttggtccgacactggttctcgtgagcgccatgtcttgcgtaacccactggtgctctcagttcccttaatttggactttctagggcaaatgtcgtgtgaacgagtgtcgcggatccaacaccccgtcgtggccgtggataggtctctaggggggttacgaactaaattcgtgcccgagactgttcggtttgggtcagggttaggtttagcaggtttttgtagagtgctcatgctctccgc

SEQ ID NO: 58633 - DNA, 492 bp, Zea Mays
ccccaccgatttggcgatgtgatgctcggagtggacgaaatcgcgtaccgagcttccgacgccgccgcggatccgccgtacgctggggatggggtttataggtgcacaatccacggtaagatgcccttgaccgtgttcgtttcttcctcctaattgtttttgtcggtgtacattcgccattttgtgctagtgcttggggctgggtgggccggccatggtgaccaacgcgggcgggacgttgggcgccgctgcatccgacctctggaacaagaaggcgtaatggtcgtggattcagtaatagacgacacgaattaaatctcgcgtaccctttcggctagaacaggtctgggttgtagatcatcgatcagagggcccgtactcgatctgtagcgtggcgatttcgggccattgatctttgatcctagggcagtgaacgcatatcggattataaccttccccgatctaatcatggccctagatgcaagatccaac

SEQ ID NO: 58634 - DNA, 653 bp, Zea Mays
ggagcatcaggataacctaatggcactgaaacgggagagcagagagcatgaacggacgtgtagcacgctggccacggcgagctcactccgcgtggtgttttggaccgatttggggggaaatcccaaatttggggctctctggtgagtaattggaggcacgagcgggtggattggatgcttgactaccttgcggaaccgatgacacgctcaatttataggcccctcgagcggtggcccgtgaatttgagatgtcgtggtggcggtcggagagaagggggtgcactggcgcaagcaattggtggctttcaccgtggcgagctcaccagcgatcaccagatatgcataacgcgagctactacgacatggtaagacaccagggcacatggcgcaatgtcgcaaggtggctaactctggtgaatctatccgaagcggccgtgactcaggtgggtacagcggccagagtagaatagtggccggagttcatccacggtgtggtatttcttacccttctacattatccaactgcgttgagcaagaatcaccatggcaggcgcgaatccgagcacacggtcaccggcggtgagtcatctgaacctagcattctgatccggacactataccattatgaacatgttcagagcgcctgacacaca

SEQ ID NO: 58635 - DNA, 428 bp, Zea Mays
gatcccagtcacttcaagaacaactgtccccagctaaagccatcaggacctgcttactccaactcggtgaatggccccaagaatacctcaacatccacccccaaggcgccctcctccatcagccagcagaacaagacccagtatcaaggaagggcacgagtaaatcacgtcgatgctcaggaggctcagcaagctccgagagtagtgctcggtgagttccttattgaatttactcccgctactgtactttttgattcaggagcatcccattcttttatagccactagtttcgtggaaaagcatggcattccctctacccctctaccttggtcacccgaaccccagggtcagaccttctatgccagcacaaatgctcccaagtcagaatccttttaagtggggtagtattcttggcacacttaaccgtc

SEQ ID NO: 58636 - DNA, 929 bp, Zea Mays
gtttgaattgcgtaacaccctacttactgttgtggctatgtattgatttctggagtatgaagattacaaaggagctttgggatggctcagtcgctattgataaggatggagtgagatgagatgattttgtaggggtccccctcggccttatatacacgaccagagagttatatctttacaagttgtgatcactatctacttcacttatccctttctttgtcgcagcttgcagccgaagtcttgatcaccttctcgcccgagttatcgttgaatgcttagctcctcaggtgctttcaaccgcaccacccgagatatcagtgcttcgatagtggctaactcggacgctggtctttgtttttttaatcaggctcgcccgatccggttatatcctgttggcccatcctgtaggttaaaccaataagagaactatcagacgaccaatgatacgttttagtattcataagtagccgggatatatatccccactacgcagtaatagcttaacctacaacagtaactttcttgttgtggagtgcaaaacaataatataaatcaaataagtaactgcaaaagtgttggtcgctgaatcgcaggtaggaaacagggcctgtaccactcactcaaattgcgcccctaattacgtctttcaccgtcactactgccatgccaggctgcaaataccagtgtcaccttctaaagatgcctccctgtgcttatctggttggtgttaccgtcccagcagggcagcaacgaagcaaacggatttttccagccaaagttaaattaaaaacgggaaaaaaccacacgcctgcatctttctctctctcgtctctagacgtgcggtgcagcagctgtattcgccgcaacctcctcccatcccttgcgccagcggattccttggctgcgcggaattctcctagcctcccgag

SEQ ID NO: 58637 - DNA, 305 bp, Zea Mays
ctctaagatatgtaggaagaatcgcgacaaagtgaaattcaaccccaccatggtaatggagtaaaataagatgtactccccacactaccttgaggtgtccaaggtggaatcatcattgcatgcacattgtttaaggctagcgatgtggtccactctaggagttgacatgtcttccccaacccctcctagtttaggatttgtgctctcagtagcgagtccaagggagaggtatctaccatggtgccacaaaggatcacgggatgagtcaactatggttggttggcggtggcttcgaaagcgagaag

SEQ ID NO: 58638 - DNA, 347 bp, Zea Mays
gcgcttcaatgcttctgttgattagacttgtacttcagcagctatatttggctttcctctgatctccatagatatctttcttctgtcttgatacattcattgcgtatactgtacgaatgtgactgcttgggaaaatctattgaaaattcttggacgtccccccaatgggtgtgaccgagggacgttttggtacgctgagcatttagcaaactgtccttgagtagtaacttgacgtgaccgcgaggtgtaatcatatcgtccaagcagttgaccttagtccaaatggtgtcgtgttacgcgaagcggtgtctactgcctgacttgcttccagacgatttgaattgctt

SEQ ID NO: 58639 - DNA, 708 bp, Zea Mays
ggaagttagaaatgctggcaaccatgtgcatcagggagaatgtttgatgggcttggaaaggttgggggcacttagcagcgatcaaatatcactggcaaaaacctgtttagcataggagcagttgtgacacagatagactcaaggtggcatcgctgttggaaataggtaagtacaggagcgtggagaggctacaattttaaggccaacaatgtcaacagcattaatctaaacagttgactattaatctaaacagcatagttttggttatactgcatttccctctctgtcattctttttggccagtttaagctactactgtcccatccgatctcaactaacttatatattatataatgatgatgcccattgtagctagggctgatctcaactaactcatattgtatttgcatattaaagtacaacaaataattatgttagtataaactacataccaacagcatagttttggtttcaaagcaagttggtttaggttggggatgaaaccaataagaaacaaagatattgaaaagtatgaaaagagtaaaagacagtgagctaaaattctttcttacttctataaaatatgtatgaagcaagagtggattgtaatatgtgttttttgtcgcaacaagagtagataactgtttaattgtgggaacatatgtaatgtagatgttaaaacatgtttcatttgagagtggatttttt

SEQ ID NO: 58640 - DNA, 679 bp, Zea Mays
aaagcgttactaagaattaagccctacaaaaagataggatcagcacgagaatacgagacaagataatctatttttgagtccatcacttccgtacctttagactgttgtatgcaaggctgtctgcgaggtcatcctttgacatggcggaaaggacagcttcaagcttcggaaatcccatatttttggccatctctcagtagacgaatatttccttgttgtttgggagacagtataggaaatcatcttcatccgtgccattgtacaccaaggccccctttgggtatttcagttctcgggcatagggtttggcctcctcgatttcttcttcagatagcctttttcccgaagcatgtcgaataatagtgtcaagatcttcggacagtgcttcgggaatatgagatttagctttttcgggcgcatccttctccaaagccatgccaacatctagagattcttgctcaactctctgcttagttgtagcaggctctgcctcggcgagcactgagggacctgcttcaggttcggcgcaaactgtagcagcctcgacatccttcttcacgggggtaggagttaatgctcttgtcgtctccatgatagcgtctagcacactagccattctcctcctcttaggagttgttgtgggagcctttgcaaccttcggcaattctgcctctcctgg

SEQ ID NO: 58641 - DNA, 494 bp, Zea Mays
tgaaaagccaaattacctgaagattagagaagaatgacggaaatcccaagtcacgagaagctaggtggtggcttgatgaaggaatatcaaccagggcaatctgaagaacatcactagggattaattcaacaccactaacaggcattagaactccagcatccggcgcgccgacctctaaggcgaccccctcacttgaagcatgcgctgctagtacgccaccagaatgtggtggagaaaacccgacatggacatccatggaggtatgagaaggggagcccgctcggacaccctcgggggctgggttggagcccgtactgcccatcggagccggatcaccaccgacaacaccctcgggggctgggttgcagcttgcgctacccacccaagccggatcattaccggcaacaccctcgggggctgggcaaccactggcaccacccttgagtactaggttctctgcaacagccatctctaaggctgaaggattctcagtc

SEQ ID NO: 58642 - DNA, 588 bp, Zea Mays
caagtaagcgcgagcatgttgcaccgtcttaagtcgtcgccgacttaagtcgattgctccgttagtagggtatagtggtcaccctaagtcaagtaagcgcgttgattccaagtccgatcgaatcgaagtcaagtgatagttaacaatttgaatgcccttgaaaatgaaaactttattgatgatgtattctcccattatagagtacaatgttgctctgatagctttcgaggtcttgctaagggtaaaactttctaagatgctctatgttccatgaattccccacttccgtaccatccatttgagtaagccaatatgatcctggccgagtgacctccgatgcaatgaatggcccttcccatagtggtgacaacttgtgtcgtccttccttcgttagaatttggcgaaggaccaagtcccccattagaaaggatcgatgtcgtatagctttatcatgatagcgcctcaaggtttgctagtatctggctgactgaattattgtgttcaatcgctcttcctccagcacatcaatatcctctagcctggtagcttctgcttcagctatgctttcgaagaccagccttggcgccc

SEQ ID NO: 58643 - DNA, 334 bp, Zea Mays
actgtcaccaagtctggcaaaggtgagctggttcgactaaaatacaccttcaagtacgaagataaatttgatgaaccgaatgatgacttgctgaaaagtatcgaagctataagtgatgaactgcttgggccgtattccaaagcagaagataatgcattatctgcatcctttggtggccggggaaaaaagagattgaatagagttttcgatgccattggttttgtttaccccgactactgctacccgctgtggggacggggaaagaagaggaagactgctgcttcgaccaaggctgctgcttcggccactccagatgagcctgcaccaaagagca

SEQ ID NO: 58644 - DNA, 445 bp, Zea Mays
gccaatgcttacaaccaagtacccgactaaaattttggcctagcggtaactcgtccttgtgtgtggcagaggcgccataccataagccaccttagttgtcaggattcaaatgcctatatgtagatcacaagacattggatggtctgttgattttatgtgatttctgtgtaaacatagctactacaactgcttctggggctgaccatgtttggaggaggaggcatcaacccatgccaggttagctacttaatagttattgccacttgccaccgaacctcgtttggaatagaaactttagttcttcctccagattttagactttgtcctcctccttgtcattgtagacttttgtatgtatcaatattatgagcaaagtcaaacttccccgatatactcctgtaacctcttgtgcgactgtgatgctctagtttgtttagggccaatg

SEQ ID NO: 58645 - DNA, 445 bp, Zea Mays
ctgaggcaagagggtggctgatgctgatgaggccggtccctcaaggcggcccgaggtcccggtcatgggacgcaccgcgcttttccccgacgatgaggtgagaagtggtgttgtccacgttgggagggatcccttcgaatgtggaggcccacacatttcttggttggagaaagacggcgagccaatgtacgtcctcaacaacaaggaagagcaggaaatgtggtctaagttccagctcatggctagggtaagaagatcgagcatcttgcgacatactccttttcatagggcgtgtcttgatggtgtccattttcttcttagggtctcatggtgaagttcgtggccaagtccatcttccttcgctacgagcatgacatctgggacacgctgctgcaccagaggggcttgcttgatcaattaaatgagcagcttgcctagaaaagcg

SEQ ID NO: 58646 - DNA, 490 bp, Zea Mays
acactagctcaatgattagtggaatgccattgttaccagtcacgactgtctcggaagagcatttcctgagtgcttggcctgttgttaggccgagaatgtacgttgggttgaagatgccacgcgtagacaatcaagtgttgcatggaagtcgggtgccacatcgtcacataggattttcttttagtcaccacacctggtacatgattctatcaatgagattgctacataaattctaccagtctaagcatacaccttagaacttttgcttgccacatggtggcacctttaattctcgagaccttccaggcctaatgaaagaaacaatacttcatgtggttcgcacgcacacacacataggcaaacacatcctcttcttccctctattttctctttctatccgccacaattttacaactgactcatatttatcacttacaatgtgtcacgatggtagaccattttatagcatgaaggctctaatttatttgtg

SEQ ID NO: 58647 - DNA, 453 bp, Zea Mays
cattactcgcgcgtttccaagaaaaggatcactgcctatcaatgctgcatggactgcagtcatcatgactcccgctgattactcatgtgttactaaggcggagggaatctgaacggcttcgcctatacgcctctacgcgtaacaggcgtaccaggatactccgtattctactgcaacaagccatcacccacctgcggacacggcaagacgtggcagtagccagtcggagaagcaacacaacgtccagcaaagatctttgtgtgttgtcagcattaattattcacataatgtattccttccattatgctcctaggcccgcatgtcggagctcagcatccttgtatgtacctcccttaaactataaaagggaggggacacaacgttacaagggacacggtcaatacaacttatagacagtggatgtagggtattacgctccagcgacctgaacca

SEQ ID NO: 58648 - DNA, 634 bp, Zea Mays
atttaataaacataattaagtattacttataattaatatttaaatatatgatgtgacacatggaaagagatttaattaggagaaccaaacacctccttaaagcttgttcagttgcaagtggccgggttgaagaagattaaatctcttgatatttaaaattaaatctcttgcgatccacatgcaatgaaacacggtcttattagtattggcggagctgtcactatgacagcgctcatgcaaagatgtcatgaccgcctgactcctagctttcgtgctaacgaggtcgactcgcttcatctgcagcttcgatcgtcctcacctacctccgatatccacgtccacgacccgtgcaacgcctgcttctccacgccgcttcacttccctcccggcccgcacccctatatagccaaaccctagctgcccagcttctcatcaactaaccagctctcgcctgcctcctccatcatcttcgaattcttcatttcttccactgaccgaccactacttgctcaatcgatcttaacaaagttcctaacaagctagaatgggcagcttggacaccaaccctgccgccatgtccgccttgggcgacaacgcctgctccggcttccagccgctgaacccggacgacgtc

SEQ ID NO: 58649 - DNA, 334 bp, Zea Mays
ctctaattgacacgctagtactttttaccaatctattgagaagtgtgcaagcttctccctaatacttgttggagcctctgcaaaagaattctcatgtgaggtccaagttgctggtcaggtaactccatggatagtcttgggccttctccacgtgtaagtgatgatctagttgtggcctatcatagatgttccctgctgtctccactatcgagttttcagcaaaaacatgacgagtcttgttccctcttgtacatggtggcagccacaccacaaacacaactgatgtgatttctcaacacttacatcccctcccaatacaactattataatggtg

SEQ ID NO: 58650 - DNA, 750 bp, Zea Mays
caggttctccaaagctaggctcaactcttccacccgagcctgagcagtcgcctcacaatcctaggctatggatcacaagttcacagcccagtcaatagcccgatcacgctctacaatctcccgctgtagacgttctacttcttcggacaactcagcgatgcggcgacaagctcgcacacgctccctacctccatggcgcaactccatagtcaaaagctcaactctagcctccaaatctcctatgggatcattgctcccactgctgctcctctcatgatgaggagccaactaatgacggggcacaccctgaggtccagtcgctttccgaagggtggtttttgtgtgtgccatgtctctataaaagggggaacacttagtattgtttaaacatgatgcatgcatgatcctacaatcatggaatccactacttattgatcccatactccctacatataacctatatgcactcttctacccaacttcttaaaaggtaagttgctataagaagggatcaaggtaaggatgaaagaatattcagaggtaagtagtttaaaaccttttgaagcactaagtaatgtcctaagaaatgggcaccgctccagcactagctatcatggaacctctcaagatattaggcccacctacagatgtcgttgtcctaaggaccttagacatgcaggtgcacccaatagctcgatcggatctaattcctatattgccttcacatagaatgttcatcccatatcacag

SEQ ID NO: 58651 - DNA, 345 bp, Zea Mays
tccttgagaaggttggctgcgaacatgccaaggttatggttcagtcaggattctcactctcagccaacgatattagaaacccttcagccgaagccgctgcactaaatggaaaattttataacgaagtttggctaaagggtggtcgagagataactgatgaagctatcagaaagaacgaaaaagagtctcatgatgctttgggagaagccaaaaaaaccgaagaagctgctaaacgtgcaaggcttataggtacatctatcgtgacttaggttcatgaattattctagcttcagaactaacagatacttatgctgtggtgcagctgaactctctccccctctggag

SEQ ID NO: 58652 - DNA, 678 bp, Zea Mays
agaaataccgcacccgagcatttcactggatcgggtagaggaatgcaatactctgagccaactagagtcaaattctgatgactagagggagtcgatcatcaggtacataaaaaatgaggaggaaccagatgacaaaaatgcagcaaaacgaattgcaaggtagtcagctcattatactctcattggggaaacgctatacagaaggggcgcatcaggagtcctcatgaaatgcattctctcaactacagggaagcagctactagaagaagttcatgttgggcaatgcgggaaacacgcagcgtccaggaccctggtttggaaggtcttccgatcgggtttctactggccaacagcaaagaatgatgcagccgagttagtccagaggtgcgaagcctgccagtacttgtcaaaacagcagcatctaccagcacagcaactgcaaaccatacctgtaacctggccatttgcatgctggggactggatatgattggacctttcaagaaagctcaaggaggatacactcatgtactggttgctatcgacaaattcactaaatggatagaattcaaacccattgcatctctaacttcagctaaggcagtggaattcatacaagacataatattcaggttcggagtaccaaatagcatcataaccgacctgggatccaatttcac

SEQ ID NO: 58653 - DNA, 486 bp, Zea Mays
atcattagttccagcctggatgacaaataggaaggcgcgctcgtctagtttctgcaagataaccgtgacatattcgcatggcaacctgcagatatgccaggagtcccgagagaactgaccgagcacaaattgaaggtttacccccaggcgaggctgatccgacaaaaattatgtcgtttcacgtccgacaagagagaagccatccgtacagagctggctcgcttggtcgcagcaggattcattagagaagtgttacatcccgagtggttagcaaatcctgttcttgtactcaaaaagaataaagtggattggcgcatgtgcgtcgactatacggatctcaacgaacactgtccgaaggatcccttcagactccccagaatagactaggtggtagacttgaccgctgggtgttctatgttgtctttcttagattgctattctgggtatcatcagatcaacttggcaaaagaagacgaggaaaaaaat

SEQ ID NO: 58654 - DNA, 421 bp, Zea Mays
taaaaataataaataaataaaacacgctctcaggctccttcttaccacgacccatctccaattcccttgcatggcccaatactgccaccccgtcgtgcgccttgtccacacatacagacatgtggggctgtgcaaggacgatcgcacacatggacgatcgcagcagctatcatgtgggactaggtgtcaacatctttgcctactataggatagaacaagaaaaccatcgctgtatttgtatcgagcaccgtgtctgagctatctcgtgctgcctagactctctttttcagcgcacttgttcaagtcatggacgccgaccagttggtcactattgttaggctatccctctttgcctgtacatggatcttcccaagcccgaatcagatctataaccgatcttgacacaaagtcctcgagcaaa

SEQ ID NO: 58655 - DNA, 540 bp, Zea Mays
ggtgtagcagcaacaccaatacaacaatactccctggtactaatgggcccattgatccaatcatttctcatactaatgttgcatgacatttttgtatggtacacatctaaaatataatatcaggtgccaaaacaatgtgctaatagtatggtgacatattctgttatttgtacttctattgaagagccatcatcacatgttaagctatgaagaatcctttatggcatcatgcaatgcaaaaataatttgatgccctcattaaaaacaagagctgtcatcttctcccttcccagttggcctaaatatcgttgaccccaagtgaattttcaaactcaaatacatgtatgatggatctattgagctacaaggtttgtttagtcgctaaaggtttcaaacaacaatttgtgattgataatgatgccaccttcagtctagttgtgaaatcaagcaccattcgccttttattatcgtaagcggtttctcgaggatggtcacttcaatagattgatatttaaaatacttatcttcatggatttcttg

SEQ ID NO: 58656 - DNA, 277 bp, Zea Mays
cgcaccataaaatcatcaaacaagaagagatcaaaatatcatccctcctacccccgtcaaaccctaatgtgagtaaatcaaatgacctccagtcccttagacaataggtagatctataagggaatcagttgcaacaacgcattggtggggatcaaagacatgcttaagaaactcacacgcacgatagaaaaatatgtcgtgtctaattttccatcacacggggtcgcgattgagtcaacctcactgaaagcattggttgcaaatgggtctatacaaa

SEQ ID NO: 58657 - DNA, 568 bp, Zea Mays
ccaggaccgtccgatcacgaccgatcggacgagattagaacccagcgttgtttatatgttgtaacacacccttgtcatccgatcccatatcaacggatgaggaacgcccacgccatgattcgatcccaaccatgcacccgcgatcgaacgaccaagattcaatgggatgatgaggcaagcaacttctaatctcggccgcacagatagtgatctatggtctaggtccaacacataccagatctaatcctaggcgtccttttcccatccaacggttatcggcccttcttcctctaccgagctgaccacggcggcgctcagtgcacggtggaggcctcgtcggagtaggtagatccatggctccagtgcgccacaccctaatacgcaaggcgcggaatgaaattgagatgaaggcgaacctggagagcgggtccttaccctatgtccggcattgtttcggtcagtccaaggcaaaccgcgaatgcccgacggtggaggcaaattgggcgcgctccggtcaccctcctgccccgcaatcgccaccaacgcgaaccggagacccgggcgaagc

SEQ ID NO: 58658 - DNA, 503 bp, Zea Mays
gttttatattcgttgttgtcaaatagtttgtgagatattaaggtcgataataatatatgtgataataatatatgtattgttcgttttatgtaattgttgtgcactaataaattattaaattatgtgtcgtcgcaaggtatgggcattgtactatgtccttaacatagcactggtaggggcgcccggctgatggccgattctgacaggggtagtctcgctaacggcgatgagactgtctccagcaaatcatgcatatggccgtacaaaacactgttttgcaatgtatacaacactgtttacagtgtgaagtttgaaataggaggtaagatagaagacataatatatgctggagataggaggcaaaagggcttcctatggttgaggcatatccattggtggtggaatcatgtcgggaattgtctactgtgttggttctacttgagccggtggtgaaagtttggtctaaggtcaggatggcagtatagaggagcggtgaatattct

SEQ ID NO: 58659 - DNA, 302 bp, Zea Mays
tgggaggggcgaggggagcgaccggggctttctgtaaatattggaagccataggctcccaatatatcctccctatatattcatcacctacggtattggatcgaaggtccatcatcacctgcaacaactcaaatgatcagtaacatgctaaccgcctgcatcccaatcagcttgcacaccccagaccaccgaatgtgtgaaccacgctccaatttggcatgttactagcgcacccaatcaacccaccgtttgtcgctcccgcacgccttacacttcaatcggacgtgcctcacccattaagag

SEQ ID NO: 58660 - DNA, 591 bp, Zea Mays
aaccatgtctaagtcatgaaacttaatttaatttgattctctaacttaacttctatttatctgagttaaattcatgtatatgcacacttagcaaacatgttagtccacatttgtagtgttagacattaatcaccaaaatatttatagaaatgacacacaacactttttccttttatggagagactggagaagcggggtggctagttgtggtggctgacaccttgggacaccgacatgcgcaaggacatggtggagtagaacgtgttgccgatgtgattgaggaccgacaggacacatgtcccgaatgtgggggatacgtatggagtatgctactcgtgggggtttggtggttaagcctcaaaaccacccaacaatattttgcgggtttcgttggatttgagccttaaaaccgagcaacatggttccagagcgaatcaaagacgacacatggcaacatggttctgagcgaatcaaagatgacacatggcatcatcttgaagggtgcgtcaaggcaaagaaactccacgaagagtgtgtgactgttagatcaacgcatcaagagttggttcattttgccccgcatgactggat

SEQ ID NO: 58661 - DNA, 421 bp, Zea Mays
ataatgtgctgcaggtggagtagcgtagtgctactgcgatgggtgtaaaaacggtgcatattgtgcagccactggttctgtgtacgtgtacccagacggtccgacgtaagaggtcagaaggtctgcaactgggttgtctgaggttatacccagacggtatggctatgtatggcgttacctgagtggtctgtgtgcaggcctatgtagggtcggatggtctaacaaaatatgttgaacagtccgcggtgtagccgggtgggcgatacgagatgaccctcagacgatccaactattttcagagccagtagtgtgtcacgcgacagtggatgtggtggtgctacgaacgtattcattagccaggtgcattatggaaaattaggttaatgcgatggaataggggcattatgtttttcattcaaac

SEQ ID NO: 58662 - DNA, 354 bp, Zea Mays
ccgttttaagaacttattgactattacttcacctcatccttgattctgcttcaaaatattagtcacctagtataattctatgttgtgctcctatatgtccccttgccaaaagtattttattctactatggtctatacttctctcaatctattagatctgatctcactcttgtgcttgcgacatctttgtagatgccccctgaccataactgtaacacccctggtgttacaattactaaaacctaagcataacatcataagcattgacatttcatgtgattgtcacacctacgatgcattcactagacaaaaatttcaaacaagttgtattggtatgacattttgtggataaaac

SEQ ID NO: 58663 - DNA, 1575 bp, Zea Mays
attttttggtatcacgagctaaaacaaatactattttaaaacagaggaagtactatttatcttttgatccgatgactaaatatgatgaccaacccttaatggacgacgaccaaggataatccgatagtattgctattcatcgtctgatccaacaactagatatggtgacctacatataatgacaatgcgacgagctctcgagtccaaaaaagtgaaaatccatataggttggcgttgggtgaaagatatcagatacaaatacgtatgtgccacactactcagataaattgacgatatagagtagaagcttgtttggatcgtataaacattagcacaggacacaatttagacaaaacctcgcaatcaagccacagaagtagcacaaaggcagtacattttcgcatccgtgaaatgtctgaaatgtagcggcagcaaatccgtgcactggtagaccagaagcgtctgtctcctgcccagaaattgaagggcctgaccacgacttaatcagtgcatgcattcagacgtttgggtcacatcagcagcgacattgtatattcgcctacctagtcagtacaagcagcgcctacccatgctccccaagtttcacacttcattgcggcaccatatttttttcgcagcacatacatacatacacacatctggaatatgcaagtacaatgtataatgtgtttttaaaaacttttaaactagttcacctcgccttttaaatagtctggcattactcttgaccacgaaaggaaaaactgggatgtatatacatacaaatagtaagtgtgaactttaattagagccgaattgaagaacaaaaaactagccaggttctccaccatgcgatcatgacagccatgagcaacattgaggcagagttctcaggtcactatccacagcataaaagtgagcgaataaataaacggtaacagtattaaacatggtagatgtgagaagtatttctgtatctgtccaggaccgcaaaggaagaagatgaatagtaatgaagtagcagaaacgttggtggttgacaccagtattccagcccagatgcaaagggcataattcaaaatttttgtattgattctttgcactcgcagaaaagggaaactagtttttcccagctcagttttcttttctcaacgtactattaggttaagatgatttcactattactggcatatagtggatttccatttgctagtgctagttttatccgagataggcattctgtgaatttagtgcagggtttatttatataaaacaaaataaagaagtgatgtgcgggctctactaataaggaatcatctgctcttgctctcacggaacatgtagagtggatagcaacgacaatatgcagtcacatgccaaagcagcaaagctagtagagcgtctgctaacaaacagtcgatcaacaatcatgcagcaacggagtgagagtgcaaccaaaaaataagcaaatgattgaccttatcagttcaatgctctataatgaattgaatgaagcatgactgcatgagagtaccacaagcgcagtcagctatcgatcagaaacttgcactggga

SEQ ID NO: 58664 - DNA, 598 bp, Zea Mays
tggcacaactttagcagaagcgggcaggcagagatcgtgtactaggtcgtgcgttgtaactcggcttcagtcgacaataaggctgaagaggaacacctacgaaaacacaaggcaccacaatagcgtagtcatcttccacccccataactctctgtaatattcattgatcgagcaatacacatccacaaactcataggaagtagggtattacacgctcgagcgacccaaacctatataatccattgtgttatgtcatgccatgcacgaaccatcatgatcgactttgtcgtctttccaaaagcactatatgtggtataccccgtagtgcgccatcggtactgaaccctgacagtacatgcccttaaccgtcattctaagactcaagttataatgagcacagaagatcaaaatccaaaaagaataatctatcatgagagtgttcaataaatcataaccgaagcatacatgcaaaccttttttgacatgcttagagatgattgcgaaccttttttgatgtgctcaaaggtgatttcagagaccatgaggctgtctccagcagtttacacatcttatctcctatcgcattccatgttcaaac

SEQ ID NO: 58665 - DNA, 390 bp, Zea Mays
actgtccgaaggatcccttcgggctcccgaggatagatcaggtggtggactccaccgctggatgttctgtgttgtctttcttggattgctattccggataccaccagattagtttggcgaaggaagacgaggaaaaaacgttgtttatcactccgtttggcgccttctgttatacctccatgccgttcggcctcaaaaacgctggagcgacttatcagagagccatccaaacgtgcttagccgatcactggggcaagcgtgtggaggcctacgtagatgatgtggtaatcaaaaaggagaattcaaaaaacttcatcgaagacttacagctggttttcaacattctaagacggtatagatggaagcttaatcctaaaaaatgtgttttcg

SEQ ID NO: 58666 - DNA, 724 bp, Zea Mays
aatttcctgagatgctctatgttccatgagttcccaatttctgttccgtccatctgagtaaggcgatatgatcccggccgagtgacttctgctactatgaatggtccttcccatagaggtgacaatttatgccgtccctcccccgttagaattcggcggaggacgagatctcccactgcgaaggatcgacgtcgtatggccttatcatgatagcacctcagagtttgctagtatcgcgctgattgaatcaccgtattcagtcgctcttcttcgagtacgtcaatgtcttctagcctagtggcttcagcttctgctatgtcatcaaagattaaccttggtgccccgaacttgagatcggcaggtagcactacctccgaaccgtaaaccataaataagggggtgtttccatgcagagctcggctgggttgacttctcaggctccagactacgtatggcagttctctgatccattttcctgcgaatttctcgttcttgtcaaagactttctttctgagtgcttctaatatcatcccgttagctctttccacttgcccgttggcctttggatgtgccaccgaggcatatttgatctgaatgctcttttgctcacagaaatcgaagaattctgaactggtgaagttggatcctaggtcggttatgatgctattcggtatcccgaaccaaaatattatatcttgtatgaattccactgccttagctgaag

SEQ ID NO: 58667 - DNA, 439 bp, Zea Mays
gggttaatacacaaaagctatggctatgagttttagggtattttaaggtttattttgcaataaaagcgaattccacggccccaattacaaataccagggagctcgatgtaaagattcctaacagatgaggatggcgggttaattgaggaggaacgcagggtctcttatgcaagatcttcagccaaaggggtatgggcgaatggtggctgcacgatcagagatcaagggcccagatcgacttaacgaatcgttttccctttatctaatcactacccttcatcagagaatcgacggctagaggcccatcgcgcggaagtggtgtgctggatgaaatcagagccgatgaccatgagatcaacagatcagatttaattcatgaatgggtattcacttgcctaatcataatcgtttgttcaaagatctacggtcgaccgcgttc

SEQ ID NO: 58668 - DNA, 577 bp, Zea Mays
cgtaatacatattgttatcaggttatataaacatgttaattttacaaataaatatagcgattagcgaacgggtggggattattagcttagagctcccccggccggttccgagagggatccgcagacgttcggacgccaaatagggtgagcgagcaggggagtttgagtaccgcggagggggaggacaagagtgagccgttggaggccgccttaaactggtcagtgcacggaagtcggcacggcgagagcgatgtcgcggtgcatcaccataaaatatgtgcgcgcacacacacacactgacacacatgacacaacacaattcatgcacgcacgcgacgcttttgctagcttttagccgctatccgtgccttgaagccatgcatgccgtagcagtcttggcgacgctgtacgcctaataaactgatgggcgcatgcagtgcgggcggcggctgcaacttgcgactggtgcctgccatgcatatgcgctcgatcatcatctatatacttgacctgcacgctccatataaacatgtggttttgtacattaacgtatatgctttcaactgccaaagattta

SEQ ID NO: 58669 - DNA, 746 bp, Zea Mays
aagcctgtaccggtcaaataacgcaacgatcgacgctcaggtgtggctgacaccttattctacccctaacgaccataacccctcaataaattgcaaagttctagctcctaatctctctgtccacggtgatagcgtgaactacggatgaaccgaggcgttgccggtgatcctacatgttctagctcaattggttgggtcgagaagcatcaagagcacacaagagtgctgaaacaagagcaaagagggcatgaatggaccagcagaaggctggccacgacacggcgttcgcggaggggcggaaatccgatttgggggaagagagaaattggagagctatggtgactaatcggaggcaggagcgggtgctctggcttcgtgattacctaatggagcttgtggtatgctcaatttatagagtccaagggcggtggctcctaattttggcatggcgtgctggcggccagagagaaggaaggttactagtggcccaatcgtggcgtgctggcattccacggttactactacgcagtaaagagccacagcgtggcataattgaggtcgtcggagtaccacggcgataccggcggtccggccatgtcgcactgctacaggcgcaggtgataagcttcaccccgcgaccaaatccacttctcttccaatctttccccccggtactatcctacccgagtcctgcacgaatcaccgcgatcagcgtgaatccttgcgcagaggtcaccggcgacgag

SEQ ID NO: 58670 - DNA, 576 bp, Zea Mays
gcacttctctctcaaaagtattgatggatagggggagcaagctcaatattctatactctgccatgcttgattccatgggcattggtcgggatcaccttcgaccgatagggggaccctttcatggcgtcgttttgggaggcaagcaaccccgttcaatagaatcaatctgcctgtaacctttgaggcgccgaccaactttagggccaagacactgaccttcgaagtagttgggttctagggaacctatcacgccatccttggaagaccacgctactggaagttcatggacatccccaactacacttatcctaaaacttaaaatgtcaggtcccacaagcactatcattgtggcatcatgacacgacacacgtacgagtgcgaagttgaatgctacgacttggccgaaggagctgtcaccacctaggagcttttggagatgctttggagtattgataagtaggcacctgatgcgaagaggacgaacacaaccttcaagccaacggacgacacgaaataactacccttggatcctaagcatgtcgatgggcaaatggtatgcatcgggtacaagctctc

SEQ ID NO: 58671 - DNA, 486 bp, Zea Mays
ccagattgagcatgaccctgacctggtttttgaggaacttgcccttgaatggggattcctggctctggaagaggctagggaaagaaataacataactcatgtcttatgggggccatattttccccatctgtcaatgcaagtaagtctgtttaggttcctatggactgggcacccttcttcactggaaagttcctttcaccccgagtttcttttcttgggtcacaaacttcctagggtcaaaggctaggcctttcttctccacgctaagaaatgatgacaagatcttgagttttgctctgtcaaagacatgcctttataagtcagatagcttcctcggtgatggtaaatatatggatgacgatactcctagtcatgtcctgcctttggaagactcattgcgggggaaaagaaaatcatcttacattggtggactctaatttgaggagccttaggatcaaaggattgtagtctattttaaaaggagca

SEQ ID NO: 58672 - DNA, 505 bp, Zea Mays
aggaatgaacatcacaaattaagaacaaaggtttaagtaagtatttttcatcttaagaaattctccttaatcatgccatgcacctcaaggtaagaagaactcacaaaccctaaataatcctaagtgggccatttaagcacataaagggaattggagaaaagacttgggaaaaatacaatattttgatatgaaccaaataacaaagttctagtgcactaaataacctacaaaatatagtaaggaagtttggccatttgaattttccaaaatccccaaatcagcccatgaactaaggccatatgggaaaattcagaaatcagaaatctgaatttcagaaccctttcccaagttcagatgtgttccctgtcttccagagctcgaatccataaagtccaaatatcaaagtggcgccaaatttccttcaacatgctctggtaaagtttgaactcaaacaaaaaccgtttgacacgattttggcgcagtttgttctcgggactcggctgtc

SEQ ID NO: 58673 - DNA, 961 bp, Zea Mays
ataacctcttggaagaagttaaaggacatgttgatcacaagctttcaagaattccagacgaagccattcactacccaggcccttttccaatgtacacacgatcatgatgaatattgcaagcttatgttcgaagattcctatggctttgggctcaagcaccaacaataccaaatgaaatagttaccaagaccatgatcaaggggctttgtccaggactgacgactcaatactttgctagaaaccccctcaatccttagaaaagcttctttagaagatggatgagtatatcagaggagacaatgactttcgtcagaggaaggaggagaccttgagatattctaagatgaccaggggcttcggcagacggttcaacccaggacatatcagaaccatacataatccaaatcagaacgaagacaaaaataatcacacttagggacaacaaaattaacctcaacctataggaacccaacaacaacaacaatcaaaaaataccttcacaccaccggcccaagaggtggaagaggaggaaggagttttgaaggaagattcaactttcaaccaaggaaaatgtcctgccttttctgtggagaggacaaggggcatacaacaagaacctatcaagtcacaatctagaagctggagcacgccagaatcaaccaaaacaaatctttcacactgcttcatactattcttcatacattccagaatatgttcgtaaccaatagccaagtccacaaccctcaggctcagttgcttcggctcattggattatgcctcagccatttacactagcaccttcgtcatatgagcagtagttttctgcgtaaaacacaccatagcgagatgcaagaaaacaatctgaggccagaacagtcgatagtactgtataagaatcacatctactgaaacacctgagggctggatcaaacaaccgaagctattcaaaaaatctccaaag

SEQ ID NO: 58674 - DNA, 753 bp, Zea Mays
cgagaggtcaaacgacgtgaaaacggcgtttgaacgagaaatagtgccataggaggtttggaattcgaattgaggcatgaaatgacgtggaattgagccgatacttcacgaataggtttatatgggtaaatatgagtgaagtgagtgcttggtttgaatttaggcgaagaaaacggaatttgggcactcggctcggaaacgatcgctcgaaacggggaatttggtgaaattaaagcctggtatatcggattggcgtgaaatttggcaaatatgttactggaggtgttgtgaaggtgcctgaaaaatttgggttcaatcagagcatttttggctggtttggacatttcaccgaacacttggcatgcagtgaattagattttttggagatatggccatttgaggattgaaaccctcccaaagggagctagaaacctgcagaggtattcaatgggcacaaaggaacacatccaaccagaaggaatcacaggaattcacaataatttgaatttggatcacagaggtggaggaagagttcactgatcaatagaaaacaaagagaagggagagggagccagagctactcacctgaggggggaaggggtgagcaccggggagagttcgccggagggcagccgccggtgagaaggatcgccggagaggggagagatcgccggagagcagagagagacagagagcagagaggaacagaaaagcctctggctcggcttcgggctggaggcgattttttaaaac

SEQ ID NO: 58675 - DNA, 1197 bp, Zea Mays
ctggagaccatgggagagcttaagacggttatctaaaaatgcttaagctgtcaattgttttggtgtttattgacccaaggttgaattattgtaaaacactaatcccatgttcatctcaagtgaaataaggtgtataggtcctgaaccattattggtgaatcaagtaaaggactttgatgagaatctacaacgtgctctccaaaggacggtacccgtgtattttaagtacataattgcaatttagtattgctcttaaattggcttgttgtgtttcctgtctttggagtagttatgctttatgattgcctgtgttaaatgtatcataatgatgcttgcttaatcatgactggtgttatataggatatatcttttgaatcattcatgggtagctatttcatttgttatatccacatcgattaaccctcttggtgtatatggataaacatgtaactgtgtgtaagtcatgctatgtgcaaatatgacattttgtttagtccatgttcacatgattaccctggtttggtattgtgtgaatttcaaatccatgtcgtgcccttttgagctatgagatgcgtaaggagccctgaattagtgataacaagtgctctcataaaggcaaaggtatggaaaatggaactgtgcaattttattgaatatcctgaagttccattgataatgatcatagctatgttcttgtctttcaattggtagtatcttggcttaggtgctttatgctttaaaatgttgtttcttttggtgtacctaaggaaccttcttaatcatggtgtacttagacattgcgctttatatgtatgatcttgtcgttttcaattggtatatgtggtgcaatgattatcatgtatgaagcatgcctaggttgcctgtaaaatgttatactccttgaggcatgcattgttgtattaagtcaactattcaattggtatctctttgtgatgaaattgatagagtatgccttgaccaagatatgttgtgatcccctctagttctaaggaagctagaatgtgcaaagtgcaagtcattcaaatacttgatgcacaactttagggggagcgtcttttgagactaattgtttcatgagtgatcctgtatagtctcaaggtggaaaagggaagatgagcaagaaatggagcaatcaggacttgggtacctccacaagtcgagtaattggtatctaaa

SEQ ID NO: 58676 - DNA, 688 bp, Zea Mays
gagccggccaccgttgtcgtgaggaccgtgcaagtgtgagaaagagtgagcaccacgtgaactaagaaagagaagccatcgcagccatcaattgttgtccccatcgttcggtgtgctaagggctcggtcgggagggcgcgagatcaaccggaactaggggaattcctcgccagagataggaaattgctgccatcctttgtcgctggggctctgtgtgactccacagccggtctgagatcctaccctaggtttgcactcacctttgctttacagagcaccttgcgtaataggattcaaggctccgatgcgatgcgatgcgtcgctctcctccgatgggagctccaccatgttttggtgcgcgccactgtgttcgggtggtcagagtgagaatgagagataggtgtgaaccattagccattgatttgatcaacgtgggggattagaagttggcgtacccatttattctcttgaatctgtgccattgatccagtagcggaggagcgagaacagatcggttcgtagggtactctgatcgcggattcgcgatccaatggacacaatcgtgtaccaattcatcgtttaaatccgggctgttggttaaagatcgggtggccgtgatggaataccgcttcgggttatgatctaggcctcaaatccttaattgtatggccctgcatgagcgtgcgat

SEQ ID NO: 58677 - DNA, 657 bp, Zea Mays
aggaataaagtgataaagatgtgcaaagtgcaatggagtcatcatggagaagatgaagctacttgggagagagaagaagagcttcgaatagaatttctccacctctttcctagttcctcttaatctcgaggatgatattctttttaaggggggtaggatttgtaatacctatatggtgaataataaagaaaagaagaggatatcatcatttggttcgccatctcatcattttaacatgggattaaatataattaagagaacaaaatatctaataaaatactctatgcatcatgttggacttttgtttgtgcatttaataataatagcaaaaacataataatgagttgaagatttggagtaaaacctaaatttgaattttgaattgaaaatggaaaagaagagagaaatgttataaaatacaaaatcaatttataaataaatagactcatcccataatggagtgtccaaattagacattcaaatctgagtacaaaattcatcacaaagtttgaattcaaaaattggaataaaaaagaaatgaaaagaaaaaaggaaacaaaaagaaaagaaaaagggaaacctaaatgggcccaaacaacaccttcggcccgtttgataactccctgtgtggcccaacctgtccatactggcgccgac

SEQ ID NO: 58678 - DNA, 793 bp, Zea Mays
accgccctgctggattatttgggtcaatccagaaaggggtatatgagagatgtcttgtgcccttttcatatcgaaattgggtcaccacttcaatcattgatgatgaagggggcatgtagacatcccttgagaggaaagcaagatgcatggataatctcttgccaaatcatgtcaaaaacatttaagctctcagtgctatttggcttcatgaaggaaagcaggactttactttctccctggatgttcatctgatttccccctttggggatgagagtcatcctgcagagagagttgatgtacctatagtacttgtgcagatttattgatttctagaattcatccgtctcagaaatgtgaaaatccttggcttcatccctggtgggagggtgaaagtcatggatcttgatcttgtctctagagatatcctcatcagtaaatcccaaaatgtgagcaaaccttctgtagctcactttgtaccagcttccttctatgaaaaaattagataaggaaagttgtatggactttcctcatcagcatgcttaatccacagagtagaataaaactgagcaatgatttcatcattccaatcatattggaatgtcatgatagtcttcatcctcttttgctcacaggccctcaatgactgtgtcatctcaggatccccaatagcttcgcacccactctagttgataaaacgctgatggaggatgggctggtgcttctttggaaggataactgaattatagaaatcgacatgaaggagagttcagaagcgattaccatcaatcctgac

SEQ ID NO: 58679 - DNA, 609 bp, Zea Mays
tcacattaggttacaagttgcatagatttttctttaggcctacgctgaagagtattttgtttttggaccaaattgcaaggtagttagaggcctatccaaaacaccccttgggtccacccctgggcaatgttattgtaggcaagcatgcagaggggagcagtgcatttttggtgagaggagaaactgttatggtgcatcgactgtaagagtgaaatagggagaatgattacctatcctctgcaagatttaaagaaaaagactcctttgcatatggtaccttgaaagaaagtagagaaaagggtaggcacctaagtcattgaagtagtagttttgcatcaccgattgtgggcggctacacgatcccggtcaatgtagctatattactatgtcctttgtctctcttttgttgaagacccaaaggcaaactttgtcgttgcatccataatttgatgtagcacatcaagtacctcatcttctgttatcccaacaccagagcccataaaaagacttgggggagttgttttggtggagtgaaaggagagtaagaaagaaaaataggaagtggtaggagttagggctgaaaacaagcctagccgagctcaacgagct

SEQ ID NO: 58680 - DNA, 415 bp, Zea Mays
gttatgtgtggtatgatggttagcctaaatttttgaaacaggggagcgatggtgtccataaggcagtagctaagagagcgctgcacgggcgctagacgtcgtgtccacacagcgcacgacgtcgaggcggggcgcatgcggcaggtctagagtgttagtgccaaaggtgaaacgatggtagtactagttaaccacgttaggttcttaatatcatagagatagaattctttcacggtgctatggaacccgtttttagaagaactatttttgttcaccgcagtgccatttcatcttcggctgcatggcgtttctttattctaaattattacatgctaagtttaaaaataaattaatggacgataaatactcgaaaacggaagcagtatataatcacaacaaattaagtgtcaacttc

SEQ ID NO: 58681 - DNA, 654 bp, Zea Mays
caatgattttcgcttgagaagagaagaagctcaaagatatgcagaaatgactaggggcttcagagggcatttgaacccaggcatgtcagaagtatacacaaccaacctcaagcagaagagaagacaaattagactcaaggacagtagagtcaatcacatgtctctagtacccaacaatcatcacaaaatagcttcagaccactagccccaaggggttgcagaggcaggagaaactctatggaaggttcagttctcagccaagaaaggtattctatctttcatgtggggaagataaaagacacacaacagaacatgtcaggtgacaattcaaaagcaaaaggagattcctgaagctcaggcacctcaaagccagtcaaagcatgtttttcttacttcatattgttattctccgcatattctagagtatgttcatcatcaacatccaaacccacagccttcagggcccgttgcttcggcaagtcactctccatctcgttagatcgtgcctcagccattcacaccgacaccttcatcatatgagcaacaacctctaggaccgtcttagatccaacaatggttttttgcacacaaaacccactacaacgcgatacaagggaacagtttgaggctagaactgtcaacaatgcattccca

SEQ ID NO: 58682 - DNA, 692 bp, Zea Mays
cacactgaaaccgaagctgggccctcagtgcctacttacgtgaagcctgccacaactgaggataaggctgagcaagaatctccaaatgctagcttagctgtggagcaggatgcgacagaaaaagctaaatctcctattttcgaagcaccgtccgaggatgttgactttattattcgacatgcttcaggaataaggttatctgaagaagaagttatggaagccaaacactacgcctaggaactaaaatatccgaagggagccttagtgtttaacggcacgcacgaagatgatttcctatactgtttaccagacaacaaggaaatatccgtctgccgggagatggccagaaatatgggatttccgaagctcgaagctggcctctccgccatgtcgaaggatgacctcgcggatagcctcgcatacaacagtttgaaggtacagaagttgtgaacttaaagtctatgaacttgacaataaagtcttttattctcatgctaatcctttatccttcttttttgcagggcttaattcttagcaacaccctgagggcgcaaaagaatgctgaagatgaaagttgtacgatagctctcggcaaccttcgatcagaagtcataaagctgagaaatgaagccctggagaaggataaaattctactttcattggtggataaagtgaaagaagatgaagcaaag

SEQ ID NO: 58683 - DNA, 573 bp, Zea Mays
cagggaacaaatcagcccaagaggaggaacgctttctggccatgaagtcttcaaaagcaggatcagggttggtctgttccaagtgcaacatgagcccacattgatgttttcctcaatttgcatgtcgtcctgtcccttgacattatttccctccaaattcatgttttcgggaggaaaagcaggcaacgcgagaactgcttcagccggcaccggggcttcttccttctgaaactggactccctgagggataatgatatcattaaagtagcccaccgagtcgtcagaaggaaggtcttctagacctgataactgataactgaactgttcttcttcattgatcgcaacgtttgcattatttgcaatgaccactggctcagggggttgagcctgctgaactggccaagggtcccaaccttcatcaacattaattgcaacattttcctcagcattgattccttccatgggaggaatattgagatcaaactgaaaattgggcactggctgacccattccaaaaaactcaactggaagctggtgtccatcatgagggtagggaggcatggggtcctcatc

SEQ ID NO: 58684 - DNA, 343 bp, Zea Mays
gaggaggttctacagccctgaacgcgcgcctgatgccgagatcgatggcataaataaaggagagcggagagtttgagtttgggggcgcttggccaggttcaatccgatacgatttggtgcaactgattctgaatctctgacgtgtccatccaccggtttttagggtttagggttcattgcttgcaaactgtgcgtctgaacatgtgcatgcattgccttcttggattgaggtccgagagtcataagactgtcaggtaggcgtccaaaatcggacgaggctgtccggcccacgaatccttatcaggatgcgaaaggagctgcaatgctgcatcatatgttggtg

SEQ ID NO: 58685 - DNA, 365 bp, Zea Mays
ggttccagcgcttgcccccctgcgggagcgtgtcttggatcctttggttgggaattgggattcgaagccgtcgtcgggattgtctgttcccgttcttgaattctagcgcggaggcggattggattcgagctgcgagttttagcttactaatttttctgtgcggtgggtcgagtaatagaatctggagggcgtccttttgtgcgatattgtcagttcatagctgttactcagctcgatgatgcaggcagtgagctcaacatgttcgatgaaattgcttacccaagttacttatctaaggaaggattgctgcggtcagaattacatcttcaagattgtagactgacaactgtgtttccaaacttaaa

SEQ ID NO: 58686 - DNA, 402 bp, Zea Mays
caaaccccagccgcccgatctgatcctaacggctaggattaggttttcgtttaaaacgaatcggtacgcactagcagtcgtaggatcgaagatatccggcccggatctgaagtcgtgaaggggtatctactcatttattcctgggcgcacatcgatggatcaacggcccaaaactacccatgccatgatgtaatctcccttgcccgttctagatccgatggtcataagcaattggggcgaattgctttccttatctctaatctcagtcgcccatcaggcaattgatggctgagggcgtctccctcgtttcagtcgagcagagaggcgctgccctgctccccgcgatggaggttcgccggcgcgtagtgatctaggattctagtgccccatccgtaatccctg

SEQ ID NO: 58687 - DNA, 775 bp, Zea Mays
caccccttaaaaataatctcgaccccgagattacaacgaactaggaaaaggtggggaaattctactcgtaattcatcttcttgttcccaggtggcttcatcttctacgtgatgactccattgtaccttgcacatcttaatcactttattcccggtgacacgagtcaaggtattgacgatcttgatgggatattccttgtaggttagatcaccctgcacattgagttcctccataggtagttgctcttctggcactctgaggcatttcttcaactgggacacatgtaagacgtcatggacatctgctagatggctgggtaattccagttgataagccacttctccaactcgctttaggattatgaagggtccaataaagcgaggggacaactttcctttaactttaaaccttctcataccccgaattggtgacacctttaggtacacgtgattatcctcctcaaactctagttgtgttcttcgggtgtccgcatagcttttctgcctcgactgtgcagttctcagattctccctgattattcgaacttgttcctctccttcttggataatttccggtccaaagaactacctttcaccagtatgatcccaatacataggggtcctacacttccttccatataatgcttcaaacggggacatcttcaaactagcttgatagatgttattataagagaactctgcgtagggtaaacttttgtcccaactgccaccatgcttaagagcacaagctctaaacatatccaccagtacctaat

SEQ ID NO: 58688 - DNA, 711 bp, Zea Mays
atagatttatgatgcatttgtatatttagaaccactactcattttggtgtaaatgtgcaataaaatcatctagagcatgcaatctaaatctaacgatcactactgttttatatttaacatccttcatataaaacctagtaccatatgttacctaccttttagatggaagaggttaaacgtaaaataacaatcatcattagattttaattgaatgcaccagatcccttggttgtgtatttacaccagtatgattgattgtacagaatatgtatattctgtttataatttaggataatttcatagatggcggtcaaaatacctttaggatagtactccctgtggtccacattgtaagctgtaatcaaatatgttttggtcttctatacattttgatcatttatttattttacattatattatttatgcttataagtttatgattgtggaatagtatattttattacaatcgaacagtattaagtttatatttacaatagtttaaaattgtcagctagatcattagtcaaagattataaaattcgactattgacggatctggattctggaacgccttgtaaactcaactggagggagtaatttactaaggacttattttcgtaccaagatattaatctctttggtccaactgcatcagaattgtagtggtcctgttggctgttggcatgagctgttttttttcattctttgcat

SEQ ID NO: 58689 - DNA, 783 bp, Zea Mays
gaagcattgatgcactgcctgttgaggggcatcaacaggaacaatgttgagagcatcactcggagagacctcatctccatcagtaggcggaggattcctagcatccggttcattggcctctaaggtgaccggaccgacgagagcagcagataaatttgtcaccacgagttcctcagattgaaccagtggtgatccaacgtgaacgtccatagaagcagccgaagaggagcctggcccagcatcattgggggttaggctgtcttcagcaccaccctcaggggctgggctgccctaagcaccaccctagggggctgggtcgtccttagcgacaccctccgaagttgaagcaccctcggttgtacccaaaggagctgggtgactctgactagcagcgtcaagggctagcgtgtccttgtgagctagacctccctccaaggtcgacgaagcacgagaaacagtccgagttacctcttgctcgacaggatccgggacctctaaacggatgatggaactttcaacctcaaggggctccgataaaaggtttttagggataatttcttctaatgcatggtcaaaggcagacattgtcaacccttggaggctaacaagtcctgataaggcttgcatcgggatgtcactgctcctgctactgctgctactgcagcttttcttgtgaatcaagggaatttcttcttcctcctcctattcatcctcatcaagcacacaaccgccaactctggcatcatcacaacctctaatatcgtcctcaagggtggtgctcgc

SEQ ID NO: 58690 - DNA, 373 bp, Zea Mays
caattgtggcagcgctagcagccaatttcgagtgacacaactacgatcaccttccaaggagctcgatgaagcgcccaagctaatctctaagatgcgcagccatggcccatgcgaaaattgacgacgacccctctcgttccctccgccgatgtgggtgaaatccggtccccccaagttccgtgatgtagcgacggttgcggtgagggttacggtgatgccgatttgggttatatagcccataatgggtgagtccaagcgaagaaaaggcacaggactgttgaagaccgatattccgcgtttctgttgcggtctgacactctgacgcggaacgaccatagggaggaggatgatcctacccgacgggccccgcatg

SEQ ID NO: 58691 - DNA, 1060 bp, Zea Mays
gggaggacgacaagcaggggcaggtggccgcgcccaacccgttgctggttaatcaaactgttgcttgctttgcacctactttgatttatcagaaaaaatttgaatgtttattacattcccattggacatttgttactgtttggttgcgactttgcttagcaattttcctcaggaatcttgtgtttcctatgcgttatggtcctagacttatgactattctaatttatttaggctgattggaagaagtgcatttctcaaatttattctagaaactgggtctgagtgagttctataatttgcattcacgccaatcaaattttagcatggtatcggcgagatattttgtattgttagggcacaatgatctgttaggtgtctttctaggattaatgatggttctcttcatctcgggtgatggtcttggagtattttgatcagtacagcgagctcgcattgctcctatctcaatttatatgatttagatgggtgaaacgacatttggtttagtaatttgaattcaagccttcatatcattgttgtgtcttatgctcccatttcaagtcacattgttgcttactttgcacttacattgatttattgggtcaaagttgaatgtttattgcattctcattggacatttgaaggtctagcgatttttctaaggaatctcgagttttaccatgctttatggtcccagacttcttgctattcacatttattttaggctgattggaacaggcacatttctcatttgatggttctttcaattcagctaaatttctcgttccacattagcacattgcttatttgatgattctttcagttcagttcactttcttgatccgcgtccacattttcactatttattgttgtacaattagttcttacattgtatttgatttggtgttgttacttttggatgacttcccttaatggtgattcagacatatctagcataataatgtcatatttcagttagctttatacggtggatcaggagttcaaatctcagctctgaagtattagtagagccatctgccctgcatagattggatacccc

SEQ ID NO: 58692 - DNA, 447 bp, Zea Mays
caaaaattaaatatgctatggcaaaaaactaataaatcatgaaagttgttgggcactgacacgtggctgcactgtcacgtggatccaaacacttaaagaataggtgagagcttaggagtgcaacaaaatgaatagcatagaactgtagtgcgagggtatttatagacctgttctgggtaggtggtccaaagtatggccctactccatctacaactatatctagggaatattcctctcaacagagtaattacaacgtcgtgcataccacgggcgacacacaccaattagtagactcgtaccctacgctgacaggtgggccaatgaagtcgtcatccgatgggcaagtagcggaccgacgtgtggtcttcactggcgctgttggagccttcgcgccttgacgcagttgtctacctgtccagactcgccgaagaatgtcgaggatttcgc

SEQ ID NO: 58693 - DNA, 572 bp, Zea Mays
ctaaatctaattttgatgacgtacgtgctgataatctgccttgctatgcgcttgtatgctctgatatgatgttttcactagataatgcgccatctttggatataccccctgctgttactaagcttttgtaggactatgccgatgtgtttctaaaggagttaccaccaggtcttgctcccattcgcggcattgtacaccagatcgacctcatcccagatgctcagcttcccaaccgcgccccgtactgtaccaatcccgatgaaacaaaggaaattcaaaaccaagtccaagtgttacttgataagggctacatttgtcagtctcttagcccttgctctgttcctgttttgcttgttcccaagaaggatggtacctggtgcatgtgcgtcgattgtcgagtgattaacaacatcacgagttgttatcgctatcctataccttgccttgctgatatgcttgatgagcttagtggtgctgttattttatccaaggttgatttgcgtagcgggtaccaccagattagaatgaaacttggggatgaacggaaaatgacattcaaaacaaaatttggc

SEQ ID NO: 58694 - DNA, 1524 bp, Zea Mays
gtgcttggttaaccaatccattcctaagatcacatcaatcccttgggatggcaagacggttaagtctgccaagaacactaccccacttaaaataattctgacttaggagcatttgagctggcatagaaggtctgaccctagggtttgggtgaccaagcgagtctctagaggggtagaggggatgccattcttttccacaaaactagtggctataatagaatgggatgctcatgaatcaaaaagtacagtagcgggagtaaattcaacaaggaactcaccgagcactactcccggagcttgctgagcctcctgagcatcgacgtgatttactcgtgcccttccttgatactgggtcttgttctactggctggtggaggagggcgccttgggggcgagtgccgaggtattcttggggccattcaccgagttggagtaagtaggtcctgatgccctcaactgggggaagttgtttttgaagtgactggggtctccgcagtgccaacaggcatttgctggctgttggttgcttgcaaccgagggggcatgaaaggatctctgactctgctgactaaaacgtgacggagtgggtccagctggtctaatgaagcttggtcccttgggtggaaacccaaaggatcgagttctttggtgccggtcttgctgctgagctcggaggacttggaatttccacttgaggtgacctttttcttcttcccttgccctttccacttgtatggctttgtttgagaggtgcgagaagctgaggaaatcttggctggctaggatggtcttgacttctggtctgagccccttcaaaaagcgggccatcttcttgacttcggtgctgacgtcatccggcgcatagcgggccaattctgtgattttgtgcacgtattcactgaccgatcttccatcttgagttagttcccggaattcatcttccttgagctgaacgatcccttagggcacatggtgctctcggaaagtagtttcaaactctgtccaggtagcatctctgatggcagcattgaaagtatcccaccaagctaaggccattccaggaagtagatgagcagccagttgaacacgctgattctccgggcatccgatggcttctagcttccttttaatcgtgcacagccaatcgtcagcatcgaggggattgctagatccagcgaatgtgggaggcgtgagcctcaggaaatctcccatcctgtcttgtggtcttccaccatttgggcgttgattctccagacttctagtgaggacctcaatgagtcgagtttggttggctagaacttgggctaaatctaaaggtagctccggaggtgcagggaggtgggtctcactcccttctccaccggcttctctttcatctcttagcggaaaccctgctccaatcccggagtcggtaggcgtggttttatccgaagccatctgccaggggagagagttgctattatgcatatgccaatttttttcaaccaagtcattttattcattacaccagttcattacaagcat

SEQ ID NO: 58695 - DNA, 376 bp, Zea Mays
taactttctatcaatgtgttttcatccctaagtccctatggcaggttagtaaagcagtgttttgtgaacaaacttcactcactagggttggcttattgttacttggaaatgagcggagatggagactgaatattggttgtttgtgtcgactgtgtaaagttttagtatctaaaactaaatttggttcggttctttttcagttagctaaatttgagtttttatgttttcatctgaagtgggtgctctgtaacttgagatctgtttggggttagctgatagccattgaaacaagatagagtgtgattatagaggaacaactcctagtagaggggtatgtcgagccctcatgtgtaattgagagaaactggaccgagag

SEQ ID NO: 58696 - DNA, 592 bp, Zea Mays
ccgccaagctcaggtaccacgaccggctcaatataacgtggctggtgggtaaggactttcagttttttgctcttcggtgcaggctcatcgggggcggccgaagcaacaagtttggccgaagcagcagccttcctcttctttccccgtcctcgcagcgggtagcagtagtcggggtaaacaaaaccaatggcatcaaaaaatctgtttaatctcttttttccccggcccccgaaggatgtggataaggcattatcttccgctttggaatacggcccaagcagttcatcacttgtagcttcgatacatttcagctagtcatcattcggttcatcaaatttatctccgtatctgaaggtgtatttcagttgaaccagctcaccttcgccagacttggtgacagtctccttcggcatttcccagttctctacaagcggccacactctgaaagctatatgctcctgcattaaatctcttgtaccaataaaaaaagcaaacagtaccgaaagctttttggcatgcttcggcagcttcgtcaatctcaacctttggccttcgaaggccgaagcgggaccaaatggggcacataataact

SEQ ID NO: 58697 - DNA, 514 bp, Zea Mays
gagaaatcctgctagacaaagctcacaactcatcctattctatccacccagggtctaccaagatgtacctagacctcaagaccagatattggtggagaggaatgaaaaaggagatggcttagtatgtggcccagtgtgatacttgttaatgaactaaggcagaacatcagaggcctgcaggcctactgcaacccctcccagtgcccaaatggaagtgggaagaaataggcatggatttcgtaattggactgccccgaacccaaaaagggaacgattttatctgggttataattgactgtcttaccaaggtagctaacttcattctagtggagactaccttcggaggagccacccttgcccggatatatctcaaagaaatagtcagacttcatggcattccacgaagaatagtgtcagacaggggaacacaattcacctcaaaattttggatgagccttcagcaagctatgtgcaccaagctagatttcagcatcgcttaccacccccaatcaga

SEQ ID NO: 58698 - DNA, 482 bp, Zea Mays
cggagttaagcacttcccacaagatggaaggaaaaccgtcgcgagaaaggaagttagaactaaaacgagagtctcctccactggcgggggtgggtgaattcatctgcggaagggaatcaagggtaaagattatggtggatggaaaaagaaaaagagagctcggatggttttaagaaaaagtgggttagctcaaatttttaattcctctttgtgttttataatgcatgcatgctggaagaaacgttgcctctcaaaaagaaaatagggtgctttttagggcatccttaaaaaaatataagtactggcctacgggcctaattaattagccacctgttttccctctatgcctaaggcctttcgtcctaggtctagcggtctagtcctgacgagccgtagcagttctaggcaagttttagatttaaaaattggtattcattgtttattgtccttctctgtggtggaatttgctccgataccagctg

SEQ ID NO: 58699 - DNA, 713 bp, Zea Mays
caacttcgggtttagctcgctacggcgaagaagcgcaatctctcgacagctgactattttcagaagatcaaaggcatcgccactgaacttgttgttgccaatgaaaccctgcgtgatgacgaggtgattgcatatttactcgccggccttcccactgaatatgatccgtttgttatgtcgctaaccaccagaaccgagcctgcttccttgatgacgtctatgcacacctcctggcgtttgaagctcggtaggtgcagcataccgccaacatgcagttgaacactggtttgtctgcaaattacgttgggcatggcggacgtggtaatcatggtcatggccgtagccggggacgtggtggtgctccccgttccagtgacagaagcaacaagacttcttcttcgtcctagtccatctgccaaatttgcggcaaaaccggccacacaacaattcagtgctggtacatgaatgatgaatcctacaatgaagatcctccttcggctgttgttgcctcaacttcgtatgcgattgacacagactggtacaatgataccggggcaacggatgacatcaccagtgatcttgactgtctaaccgtccgcgaatgctacaatggcggagaacaggtccaagtcggcaatgacgcaggtttgcatattcttcatattggtcattcctcaattgaatataatgatcgcccacttgcacttcgtgat

SEQ ID NO: 58700 - DNA, 1049 bp, Zea Mays
atgaattaaaccaattctaggggtttatttttacattgaaaatccttttctaattaattttcctggattttataactctctgtactgggcatcaaattctgtagaatacaggggcctctatgcaagatttcttagactcagtaaacagtcacaagggactgtggttggttactggattctacaggggctctttagcgagtatggctcggcgaagtggtatgcggccatctgagccgtccagaatagatcccacgacccagattaaaacatcccaacaacgaaacggtatgcatttctgaccgtgcgatcagagatccacgaccaggagttcaccatgacgcgaggtcgtcctagccctcggatcatcgaccgacgaccaagatttaaaatagtagatcgattcctacgcacccgatcaagatcggatggccccgatcgcatcaatccactcgacactaggacttgatctcgatcgtcaaacacatcctacggcggacgccatcactcaccgcgctatccaatcctgtacgcccatttcctgatctacgccccaaattctatctttccccctccttctttcttcgtcgttcacacagcgtcgctaggcttcctcgcggtggagcgcaggtcgccggcgtacatcgattggctgacacacggtcccatcccgcaatccactgacgctacaccacccgcagaaaacgacgaacacgcataggtaacacttaccgacgatcgaggcgcgcagacgctggaccgcggcaaggtgcggatgcgcgagtattcctagctccggcgagcaattgggaagcctcgaaccaataccgagctacccgaggtacttttatcgaagcacgcgccaatacaagctctcccccggccacgggacgtgcgcagatgaaggtgtaggcgagaggtccgcacgacggatcccgcggctggagatggatcacggtggtggcgccaggtatgtccaatagagggatagagagtcgcagcagaggaaataggatcgatcgaggaccacgactcttcatataggcataagg

SEQ ID NO: 58701 - DNA, 290 bp, Zea Mays
cagtaaaaagccacaccgatttcgatactggttttgatgcaaaatttcgataaccgattccgtttccaaaaattaccgttacaggtgaatccgatcgaaaaaatcgaaaacggtttctggaattccctagaaaggaatagtgactaagaacatggcccccctcctgcctgcatctggttttaatccaatgtggcactgatttatgccacatcatctggttttgtgccatatcactcaagttggactaaattctgcatcttctaccttatctcccatgtctgcctctatta

SEQ ID NO: 58702 - DNA, 1279 bp, Zea Mays
ggttaaccttggagtaggataactcttgatctgtgagcttttggcttggggttgctgtgtcaagattgtagagttaagttttgtgagcatatttggttagccttggttgacctgttgttgtgtcaagaaataaagggggctgaacagagaaggttctgtcaagtaatgaagttcacgttattagaagaaaaatctacagaagactttttggtcactgccgtgtttcacttttgtgtaaaggaagagatatggatgaggtgaattgcaggggcggtccagactttaaccagtactgaaatatcccaggtgaactgaaagacatttattctggcaactttatctgttgtgctcgatgggggtaacaacaataaaatctaccctattcctgccttgctttgttcatgcgaccggcgtggatgcttggaatggagccacatactcgcgctcatgcaattgacagcctcacccagtttgacacctctatccaatctttgaactcagccatcgtatgaagcggcgctgtccatataaaagggtaaccgggggaaaataagaagagagaaaaggtagaatccttacccttgtagtaagtcgttgtgggtgacttcaataccctattgctgccttcattttcccccaagctataccctgaaaacactctagtctctagccgtgtagtttcgcgtgtctggtgaccacgtcatcaaagtctcagcctcgcgtggccaggcgtacatggtacggttctgcgcccctgatttagcgttctattgtttacgtttgttgctgaagctcatcgtggtggtcgtttgatcattgccgacctaaatctctcggaacgagagctcgacgccgcatattagccccatgaactgcccctgtgtcaacttatagaagtttggttagtctgacgctatctaacgtcagcatcgtgcctgacgtaacctactagtgctttccgttgcccttgatttggattctttcgtgctaatcattcatggacgggcgccgtggacatggaacctcgctatgtggggggggggggaggacgtcgttgtagggttcataagtagaattcatgcctgagataatttgttttaaggtttgggtaggtccaacagatacttgcgaatgtgcttgagctccccctcgccgttaccgaggcccgacttacctagagaaccagaaactagataatagacatatttaaaaccttaacttttgatactaatttagggttaaatcaaacttgagccatacttaatgttaaactataaat

SEQ ID NO: 58703 - DNA, 524 bp, Zea Mays
gaaattgtcgatgtttatcgaacgatgaatacttgcaaccattcttcaaccaaatgaacctaagagcttccttgcaaactgggcatgggaacttaccgtgaacacaccaggcgtagaatagctcatacgccggtaagtcatgcatggaatactggtaccaaacatgcattttgaagtttgtctttgtagctcggtcaaacgtccataccccttcctcccaagcgcggaccaattcatcaatcaaaggctccatgtacatgcccattttattccccgggtgtataggaattatcaacgacatgaatattttgtctttgaaagcatacgtcagaggggcagagattgatggggataacaaacacgggccaacatgtgtacggggcaacggccatttcatagggattgaacccatctgtggccagcgcaacacgtatattatgagcctcttcgactttctcacggtgaatggcatcaaagtgtttccatactgcaccaccggatgcatgcaccatcttgtcatgatt

SEQ ID NO: 58704 - DNA, 369 bp, Zea Mays
gaggagatgggcactggcggcctggagaagaggagcaggggcgcgggtggccagggagaacgacgacgagatttgtaggaatccaggtgtggcagcttgaaatatccaagcagagggggcggcgacgcgtgtagaggataggaacgcaagaagaaaaatcagggagagaagtagattgacgtgatcagatttttgtttttaattttcccttctcattctttttaataatgaaaattgtagatatttcggaatgagaattttcaataataactaaagggtcgacagtacttgcggcacagtttaacttgattcgaaatcggataaatttatctgcggtctgattcagttgattttagacgaattccattc

SEQ ID NO: 58705 - DNA, 329 bp, Zea Mays
gaaacagtgagtgagtgtcagtacatgcaaaagattaggatgaaggcaacatttgaatggagggatcaaagtagaaatttagggatgaagaacccacaattcaagccaagctgtgtctactgccatgaactgtctgtcagtcactaacagagaatctgcccctgaatgccttgttgtgttttgattttgatttgttgaaacagtatcgccactgtagtcagagcgcaaaggggaggggggacaatgacactgtccaccgggccaaatcagtggtcaaaagtttcacacactttggatgaggaaaagggccagatttcagacacacacac

SEQ ID NO: 58706 - DNA, 1409 bp, Zea Mays
tatttttcaacagtatcgttattcatttctttttttctctccagtataacagagtttcaaatctaatggtaacaccactcctcgtgtcccttcatggttcttcattagattgcttagagatactaattgaggtgcagtactttgtcactttagagatgttgcttgccccaaactatttcttgcaaatggggttcaacaaatttgattgtgcgattcctgagatgaacacaattgcaggctggtgctgatataaatggggctggctgttctgtacctccagtagcgctagctgcttataaaggcttagatggttgcatccagtgtttgttgagaaatggtgctaatcccaacgtgcctgatgaagtgagttctacctagctatttctcaatttcagtattatttgtcagcttctgggctttatgtctattttaattgtacagtaatcttcctggacaaatgtttcttaccgcattaggatctttacaatttcggatcagttattatgactctattggatactccaacaaatttagggtaattagcaaaggtccttaagtcaggcaatttgttgtttgagatttaatgttgtgatttcaaaaatacatttgtgcttactatcctgtttaggtcttgatatcccgatgttgattgttagaacttgaaacaagtattgtgatacctgacactgatggaattatttcataactaaaagtacccacattatgattcaattccaacaaatttatcttgggaatattccatagtttgctagtactctttttaaaaatacttgttcactcttttcacatggcccagtgagcaaaaggagtttgaatccacttgtacagtctatactgtcgttccactgcttgtttgcgctgcataattacatgtacttctttggattacaatgtcttttccatgttctttgcaactaatttgcggggcccaattttgttattccttaagctctcacatgtttatttctaaagctcacttttctgtggcttcttataacaggacaataatatcccaatacaaattgctgcattcaaaggatgggagaaatgcgtggagattcttctccctcacgcaccccatttgccacaatatgaaggcctgagcatctctgaaataatccactgggaaagaaccgtgagttcagaccaacaacttggaacaaaatatttccatttttcttttgtagcatgatggttggattggtgttagtagcttttatgaatactgtaatgcagatttctttgcaccactgatttggaatatggtttctacttgacttttgggcgtgcatgtgctgtaggagcgcttccgcagaagcagtagtgcaattgaacagggagatgttgcgtactggaaaaaagaacatgatattgcgttgagattctac

SEQ ID NO: 58707 - DNA, 493 bp, Zea Mays
atgatgacgagaggtgttgggcagacccacgataaaatccatgctgatgtcatcccatttccacgaaggtatagataggggttgcaaagctccagctgatttcaagtggtttgcctttatcctctgacaggtgtcacattccgatatgtactgggctatctccctcttcattctggtccaccaatacaaaggcttcagatcatggcacattttggtgcttcccggatgcatagagaatttggagagatgagcctcgtccaagatttttctcttgaggtcctgatttttaggaatcaccaatctgcttttgaaccataacacacccttttcatcttggcggaaacaattatacttctcaaccttcagatggagattcttcttgataatctgcactcccttgtcactgagctgggccatgatgatctggtcttgcaaagctggctcaacagaaatgtgagacagagcaccggaaggaatcacttctatttgcatc

SEQ ID NO: 58708 - DNA, 740 bp, Zea Mays
gccggaatagaacaccaagaacattaagtgaagtctctcattaaaaagacactccatgcaaagtcgcccacgggcgcagccggatcaacacaggcgtacgaatacggccaacaggccacattactatacaaattacagttacatacacacggcgagggcatcacatattacatcggctcaaccttcgggatgatacccatctccttataattgaacagcattatcctcaattcctcaccctaaaaaagattccgaagatcaccctcgcctatgcttgccccaatcggcgaggacatcaattctcgtttaccaacccggtctactcggagacagccacgctccatccccatacgacgatgcctaccactttgcgaaaattcacccacactatgttttcccaccacccttcgccgcctatacccagtactcgcactaggaagatcactggcaccctccacacacggcgaagtctccgccgcagccacatcgaatgcaacaaaataatctaagccttcatccgaggactcctccgtccaaggaaatgaactcccagattcaccattagactcaaaacactcacacacagagccaaacaaactatcatcggcaggcactacggttgaggctgccacaaaatcagtattgtcagcagcggttgcttgcgcaggcccaaacgtcggaacctgcgcagcaaccgaggttcagtatcacagagacaaaagtttacacttaaaatccct

SEQ ID NO: 58709 - DNA, 503 bp, Zea Mays
cagcctataaggatgctagaacataaacttgtaggggttaagccataccacaatcgcctggccatgtgaagtcgatgtgtgggcgaggtggtcaccagtcatgctcagtggcttgatcaatgaaactgggcgcgtccaggatatagtttggggaagcagtactgctaatggaagctactcactatggttaatggtcgaagcatggatcactgaactggctcctgccttcttccccccggttgctctttaaataggcagtgaaaagatccgagctagctggattcttgagcttataggggggataactatgtgcatggggtgtagtcgtggctcacccaagaaagcccacgccggtgctgcagggtgaagaatatccatggcaaagggagggggtaaggataggaaagcactgtagtggatatttctaccagtgatatttcagctgatggcctgattttgaatatctctgccctcccttatctctaccatctcccatacccaaa

SEQ ID NO: 58710 - DNA, 400 bp, Zea Mays
caggaggcatcgtagctccctgcagacacttgagggagaggagacgtggagctcaattgtagcaacccgatggatggtgacgcaacccttgggtcggtagtgaccacactaccgcaagaggaaaaggtggagtgaagtcagacctgagaaggaagtcaggggaacccgaagggaaaagcttacctcggctcatgaccagtggagcgtgacatcccaatgacccaaaatttaagcactgacctggtcgaaggtgcgctcaagggagaggccaaagagaagggcaagacgagggtaaccaacaaacaaaacagccactcagggtttataacggggcggagaagcgcctgtatccaccctgagaggcaaccagacgacatcgagtttcgaggaggaataaagc

SEQ ID NO: 58711 - DNA, 568 bp, Zea Mays
gtgatttgtggagaggagtgcgacgcttgatcctgtcagaatctggctgaccatagccaggatttgtcgccggacttcgcagtgttatcgatcctcgtaccccaacgtcgtcgtgctgctctgctgaatgatcaccggtgtgtacccttcctttgtattttgcagtccctctattcatttagcacctgggtaatcggagtttagcacgcgaaatcgccggtgggggtcaccggtacgccctccgccgaggctctatacagcgccgccaggttgggtcaccgaggggaagaagacgagctcgcggtcgttgccttcgcgatggacggtctggatcggaacctagatagcgctgggttatatcaaatcatatccgtctgattctgatcgagtggccgagatttggtaccggttcggtatagataggttctaatctgggacgttgaaatctgatcggatgcctctagctcacccgtaccccccttcggtctggcaaaaatcgctaaagagtccctaggcttactgataaacaacccgcagtcctgctgctggcgctctgtgtcttagaaac

SEQ ID NO: 58712 - DNA, 734 bp, Zea Mays
agatgatccaaataatacagctgcaaaaatcataacatgaatcattgtgagacataacaaagcataatcaacatgtatatggattttgcataaaaaatatggctacatataacagacaaaaaaaggatatgcttacaagaatgacgatggaacatccgtaaatggttgtagaaacgtttgtaacgctcctagtatgccacttcttggtagcttggcataaatcattgaaaataagctggcactagtccatctggtggaaacaattcatctcctcagttaaaagaacctcatggttggttattccccagctggcagtagggaacaacaacctattgaacagtatcaggaagaaggatctaatgcttagatcatcatcagaccctttcctcagacgatcttgaagagctgcaaccccaaaatcttctttcgataaaccaagttcagcccttaaattgttggcagcaatagcttcatcaatgcccaatgccgttcctccaccagcatttggtaaccccaaaataaggtgcaccgcatcctttgtaattttgagctccttccttgggccggctcgaattgtcatgtcattatggtcaagtttttccatcagccaagctaaatgagatctactgccgagtgcatcaactctcatatcaagaatactggagaaccccctccgtgcaatagcttggcgctgtctgtcatttaatatctggatgcttactaatacgtcttgg

SEQ ID NO: 58713 - DNA, 541 bp, Zea Mays
catcaattgaggcctcctccagatacaggccatagcggaggccgttcaactcaaacacgcaattcaacctaacattcgagcctcgaatgttctagctcctcgacatctctgtcttcatcgaatacttgccaacaatctttaccgcctcagcctccacttacctaacgaacgtcgcaacatctcgcccccgtagttcaatggcgaaggccggactcaacaccatgtgattcttcaaaaatggcatcggccacaacttcacctcgcccaccttccagccgtgcgctagtggccacaccgcaagcaataaactcttccaccaaatcacgaccgctgcttgtcttcgacgtacgacgaagggcgaccttgttagcaccccccttgttcacttcaaattgggggaaggctatgtagcagtgtgaacacaaaatagtcggaggcagtcagggtaccccttcggtgccctatagctgcacatagaaccagaaataccaccagtttccccacttgttcttggcacacggcacgagctccacaacctcgc

SEQ ID NO: 58714 - DNA, 347 bp, Zea Mays
caattttggtgggtacactatttctatctttaattgtgtggttctttattttatgtcaatgtgtgtgcattcactttatcatccttgatcaaaccatgagggtggttgtgtcttgcgggcgtttgttgccttaccatcgggtacactttcgtgcgagcagtttgtcttggagtcctcctccctaccttgttcaaaacgtccatgttcacttcctactccttgaagcaaagccctccatgtattatgatacccatcagtcagagcaagggtgactcctaggtcattcgctccatacctttctcttatcatcgtatcccttggttgtggacatgcatcgattggtcaag

SEQ ID NO: 58715 - DNA, 490 bp, Zea Mays
cgcaccgtcacctgttcattcctacgtgggtgagcaacttggtgcagtctgttatgctacgactaacgtagaactgtagatcggaaagcgatcggggtccactacgtggcggctctcgacgtcaacggcgagggatagggcagcgtgtttgacgaaatgctttgcgcagtcaaaagatggccaccacctcgctactctgtttttagttgtacatcctcctctgttctgcgacatcctcgcgcttctaatggacttcccataggatgataagctagtttatgagtcggcaagcgcatccaaaaaaaataaaaacaaaaactcgcaaccatacgttgtcgccacctttaaccggcattgctgttcacgaattggtagacacttgtgctcgctttagcttttcgctctaatatcgtcgtgcactttgctatgtacaacttgccaaattgctctagcagtctagcctctttgtgctgtgctctcttctcacctt

SEQ ID NO: 58716 - DNA, 378 bp, Zea Mays
tgaacggtgatgtggtccgacgtttgcaagtatcctattgttatagtatagaattatatatataattaatatgcatgaaaattaagtacatgccaaaagattttaggtaaaggagaaattactgtgtagcttgttacgtcgcaccatatctcaataattatgctcttgttatctttagctaacatccatcatagagtatttcgttgcaagaggccaggaaatatgcccacgacgattataacccgcctataaataaagctttgattgtttgaataatacctaacaaattttcaatgttttaaaaagaatgtcgtagttatgaatcagtgacctggaatccattagtatggactctctgtacaaccttccaccaacatg

SEQ ID NO: 58717 - DNA, 503 bp, Zea Mays
actccatggatatctcatagcatttttctttgcctgcgcgaagctcatcaacattcttttgtgctcttgatctttcaatttcgcatatctcatgctttaccacttcaacatcaaaattttcagttgcttcggcaactttcctttttagctcttgtacttcggctttgtaagcttctgttggagaagacatcttggcttcactaagtgccatttggcaactctcgtcttcggcatccttttgggccttcaaagctttactcaggattaaaccctgcaaaatgaaacaaaagagtaaacaacaaatgtaagaactactgaaaaacagttcggaaagtactaaaacacgaagccaaaatttgcaaaccttcaagctattgaaagcaaggctgtccgcaagttgatcgtttgacatagcacataaaccgagctcgagcttcggaaatcccatgttgttcatcatctcgtggtagacgtgatttccttattatcaggaaggcaataga

SEQ ID NO: 58718 - DNA, 435 bp, Zea Mays
gctccattgcactttgcacatctttataatcttatttctcgtgacacgagtcaatgtatcaagaatcttgatagggtactcagcataagtcaggtcatcttgaacactaaggtcttccattggtagctgctctttaggtaccctgagacacttcttcagctgagatacatggaagacatcatgcacatccgcaagatgatcaggtagctccaatcgatatgcaacctctcccactcgctttaggattaaaagggtccaataaaacgaggggatagctttcctttaactttaaatcttctcataccccggagtggtgacaccttcaaatagacataatctccttccttaaactcgagcagtcttctccgggtatcagcatagcttttctgccttgactatgcagctctcaaattatcccttatttgttggacttgc

SEQ ID NO: 58719 - DNA, 479 bp, Zea Mays
gagccgtgtggtgaggctttgcactgcgcccacgtctggcaagattttgaattcatcaaggacaaataaaatgcgttgctcttgtccatacttcttgcccattctgcctaacaagaataggcaaatgttcctcacttcagtgaactaatctaactggggttggtgccttctgtttcaggaattgtaacggaaagcaaggagcgctgtagctgtaggtattgcccaatggtttttgctatagacaattcagtgcgtgtgtttccttcaagaactctcgctttcttttcttgttagtgcggactgccgatgaggttgcccatactttagcaaatttatttcgtcaatcatttcacctttcacgtactagaatcatgcattgctccaacatccacctggtagcaatagtcggtgagaaatatgttgcctattacttcccatccaacatatatcgaacaagcaacaaaagaccaaaattaaat

SEQ ID NO: 58720 - DNA, 336 bp, Zea Mays
attggtagttgttcctcagggacacgtagacacttcttaagttgagacacatgaaatacattatgcacatcagatagattatcaggtagctcgagttgataggccatcactccaacttgcctaaaaactcagaatgtccaatatagcgaggggacaatttgcccttaactttgagtctcctcattccacgaagtggtgaaaccttaaggtacacatgatttctttccttaaactccagtggtcttcttctattatcagcgtagctcttttgtctggtctgagataccctcaaattctctcgaattatacgaacttgtttttccgcctcttgtataa

SEQ ID NO: 58721 - DNA, 328 bp, Zea Mays
gtacacgcgaaggggttactctgaccaaatcagagccgcccattcatagatcgagggttcgcacatcatcttctccctcgagtcacagagcgcggtggctagggagacggctccagcggcggtactttgccggagagcggcgccccggtgttctggtgctcctagcgcgaggcagagatatgcgatccacatagaggatggtggtgaatgacatgggaggggatttaccggtttctgtgctgcgcataagtctgcccatggtacaggcggctccacgacggagcacgcgcgcgacgagtacacctggaaacaccagcccccaaaatcc

SEQ ID NO: 58722 - DNA, 332 bp, Zea Mays
cctgaccggggaaacgtgatagtcttgcggtctctcctttctttctgacgttgagatggccgggagccgtactcgattcgttctttcaggcgcagcaacagagattcagttggaataatctctaaaaatgctcccatgcgctcctgcatccgatcaaagcggcttaactgttggtgaaggacctacgcggtaaatcagctgactgcagtacgggcgagcccctagtggcctagtggctgcatgcccttacgtagggcgtgggagccgacccaatgcaaccaggcccagcgcataaggctgctggagtggctcgatggtggggccaaaaagag

SEQ ID NO: 58723 - DNA, 316 bp, Zea Mays
gttttgtccctaaatccgggtgtgacaatcgccgagcttagagcatagagagtacatcatcttggcactgagcttgtgccactacttccacatggactccaagttcgtccttatcttccatgaaccccgtgaacaactagcacacctggatcgatcaaagtgattcgcaaacaaaaaataatgcaacctcaacatcaatttgttccaagtccttcactttgaattcaacatcactattctgctcctcagattcaaggatgcaggaaatgtcattaaccaaagtaccatcaaagatatattttcatggacagttaga

SEQ ID NO: 58724 - DNA, 534 bp, Zea Mays
tttgggttcctacggggagctcggcttgccctggtatgtgtaccgaatttgtttctccctccatctctctcctccgagtagattctacggctttgggcatgcctgtgcggcgagttgggcgctcgccggtgtacgtctgccgctgaccctatgtgcgccatgttccacttgggaagaagacgacctctgaccattggttctttgatggacgtttcggattacaagcagtcatgccccttcgcgcataggatctcaaccgtcagtctcgacatgggtgcatgagatttgatctgagcacataacgcatcgggcagtggatccaaaatcctacggctacgaaaggttacaggtttatataagtcgcggcctaatccacgccgcctacggctgatccaacggctgatatgggtcgataccccttcggacaggggattatgcaaaagagaccttgtagtcttatcaaaacaacccacgatccattaacgtgtaaaagcaattgcacttaagtccagaaattcacagatcggaccctgg

SEQ ID NO: 58725 - DNA, 355 bp, Zea Mays
cctgaatctatatatgacaaatacttgggatgtccctctctggaaaaaaaaacgatcagcgatcatgtaggagcgctccacactcatatagctatccatccaaacaatgaacaaaacagctcttcagtcaaataaaaaatttaacggttccgttgtcagaaactgtaacggaggtaggggcaaccgaagagtacgtggattagactgctacagaatttcagactgggacttgtaccagatctcaggtacgtagaattttaccacacgtccctcttttgaagcggccaaaccaaggctaaacacgctttacttggagtcacactcgagtatttgattcctccagagacgtcgtatt

SEQ ID NO: 58726 - DNA, 859 bp, Zea Mays
cttcccactatttctctgtcttgctgacacttgcagaaacacccccgcgctttctcctctttacattctgcagtccacgacggcgaacgacggggaaccgagctccggcgagcttataccggccggatcactcgatgatcggtgctctacttcggctgagacctaattcaagccctaacaagagttttccctcatctaatttcactatcggacctgtaactcgctctgtccacggtgacagggggcacgacgaacaatcaaacgcgttcccggcaatccaaggcatcttaactcaatcgaattggtcgaggagcatcaggagaacatagggatgctgaaacaagagagcagggagcacaaacagacctggaattcgctgaccacggcgagggctctaccacggtggcggaaacagaattgggggaaaagagaaattgggaggctctgatggataatccgaggcaaggatcggtgcgttggatgcataattacctagcggagccgtgggtgcgctcaatttataggctccgggggcggcggcgcatgaatttgggttggcacagtggcggtcggagatgaaaggggtcacttgcgctcgggattagtggctttcactgtggcggctctccggcgatcaccgggcatgtatgacgcgattcactacgacgtggtacaacgctttagtacgtggcgcggctacaatcgccggcgaactccgacgaggacacctctgtccactacgcggcaagtgtcacggtgaacagtccggcgataagtctctctcccttcccccgagttgagatctttccttgcccacggttatccgcaagtcacggcgcacgaattgcgatgatcgatg

SEQ ID NO: 58727 - DNA, 641 bp, Zea Mays
gtgagatattgtcaagcatcgcctaggcttctgtaaatagtacgtgggttgcgaaagaagagaagcagcgaaagaagaggacttagagtttgtgtcaactaatgtatggcacggattacagttcgacatgtgtcaacagactgtcatgtgggacctggtttgatagcaagtgggggcatctctgcctacaaaaaggggaaacgtgtagaccaaggggcatcgatgaatcatttgctgttcatcttcttcctctcatgtacccgactcctctctctagtacaattagctgctactctgaatttgtctagaaacatatgcacaatgttcctctcggtattggtttgagatcgtgagacgagtgttgctaacaacatgtgtgatccaccgtgggacgtggatgggagagatgatgctgtacctgctgcatgtgaactgggtgaagtgcaggcgagaaaaccgtgggcgcagcgcagaggcgtccaaagctgctggctgaggagtgaaatgtggtgctacaggaccgcgccgggtactgcgccgaacagagacaccgggatttgttgcgaatgtgtggccggttgtgaggctgtggccagttgtgtggccaacggaaaaatagactcatcaaaaacaacatgcca

SEQ ID NO: 58728 - DNA, 521 bp, Zea Mays
cggtcgagtctacatttgacgggacatagtttttgacgaggctctatttccttctgctattccttcatcctccgttgtggaaccatcccagggcagtatcagtgctatttggaacaataaccatttgtatactttgtttccggctaactctggctgcagaccgacatgctgcccacatctggccgacgctgcacaagacccaatcgctggataggtgccacttgctgaggaccaagcgctggctctattccatgacgtggttggacaggtgccatctcttgtagaccctgcaccagccttatcccaggatgtggtcacagatatggtggcagccgacatccactacacggctggcggcaatctgcctgtaccagctccacacacatgtgatttgatgactgaaacacgttgataccggttagcacctgagttagggatggcaattttacctatgggttcgagtatccggcggatatctgatccgttggatacgggtttgggcacgaaatttgacccgcggg

SEQ ID NO: 58729 - DNA, 1322 bp, Zea Mays
gaaacttcgtttcttctccaaataagtccccgacgtcgagcggcgttgcgcagagctccggcgagcccatacaccggtcgactcacgcggcgactggcgccatacttcgactgataccgaattcaaggtccaatgagtgtttccccccacttaattttactaatggcttcctggtttgctctggccgcagtgaccgaggattttgcggatggatgaatgtgttcccggtgattaagggggttctagttcaattggacgggtcgatgagcatcaagggtaagcatgggtgctgaaacaagaatataaatggcaaaatcggacctgaattgagcggaccgcggcgacgtcaagacacgcaatgttcttgagcagcttggggaaatccgaaattggtgaattctaggggaggattcaaggtgcagattgcttcaccggctgcgcagttacctagcgaagcgggcggaggtggcaatttatagtttccatcgtcggtggtgtccaatttcccgaggttgtgctggcgaccggagggaaacatggatactggtgctcgggataggtggctttcaccatggcgcttcctccggcgatcaccaaatcccttaacataactaattgtgacgtggtacagaacctagacacgcggcgcacgacagtgatcaaccaacggcggtgagctcttatccgatcgaccgatgagcaagtgggtacggcgggcttagccgcaaccgagctcgagtcgaccctatgccaatatttttacctcaccgtagttatcccctgaccgtggtgcacgaatcgcgacgatcaattaacacacacggcgaaggatcaccagcgacgaggggaaatgaatcccgtgatctgattcagtttgggggtatactgtaccatagtgagcttggttcagacatctgacagagcgatttgcagggagatttgctccccgttttaagtagtaacatgatcatctcactttagcaaagttatagcccaatgatccagctaccaacatgtcatagcaacccaagccaaattctcactagatcaaggttgaatcttagtccaaagatggcttggttacattgtcagactggtttcagactgaaggcagcctgacagcccgactttgggtgcatttttcttcatatttttcatgacaaccatgttgaaccccttaagcaaagttgttcacctttgataggtctataatattgatgtggtgacctagggtaaattctcaatagtttggaagatatagagctccaaagttgagccaatatcactgaatttcagacttagggttagaactcaaatagggt

SEQ ID NO: 58730 - DNA, 412 bp, Zea Mays
ggcttaaattaaaccgtcaataaaaaacccctgcacggcacgcctgtcagctccactttagtaccagtttaagtcacgaaccgatactaaaggacgggactaaaaattggcacatctattttcaatcggtacaggctgtggcggcacgactcgtgtgcaaacaagcttcctagtccgtgcaaatcttgggagatcttgcgtggggattagtttgcatggatagggtaggtagaggggatttgatttgctgaaagaaatgctgcggctgtgaatttggaagcattgttaacctctgccgtctctggtttggtcagggtcctacgcgcgcgctatatataataaacaaaacgcacttgggcactgttggcagtgcctttgctagcgctagtttattgcaaccatgcatttcctt

SEQ ID NO: 58731 - DNA, 597 bp, Zea Mays
ctcttgcaacagataaaaacccttagatgaagagaagaactctatctcataaaattaacaaagaggaccaagaccagacatgagaaactactcgcaaagaggtgccttaacaaaggctatatacataggatcatctcctatgatgatcatatcatcaacgtagagaaggagaagagttctaccacaagacgaagtatgcacaaaaagtgtaggatcatgagcactgctagagaaactggccataaagatcatagatgcaaggaaatgaaaccaaacacgtggagcttgcttgaggcataaaaggagcacattaggcaacaaaccacacccatagggacaaaatacctagatgatggctacatgtagacctcttcatacaactcaccattaataaatgtattgttgacatcaagttgagagatagaccactcattaatagaagccataacaagaagagtgcaaacaatggtcatgtgagcaacaagcacaaaagtctcatggtagtcatgactatgttcctgctagaagccacaaatgactaggagagccttataacgctcaagagattcatcagagcgtgttttaaccttgtagacc

SEQ ID NO: 58732 - DNA, 439 bp, Zea Mays
gtactctcttgttattcaaataagtgacatgcaaaggctagaagctaagataggtgaaatcttgagccttttagagattattttccctccatcattttttaccattaatgtacatttgatggtacatcttcctacccaagcaagagtggcaggtccaatccattttcgaagcatgtggccggtggagaggtaattttctttggtatattacatagcaaacaaataataatataatttttcaataacaggatgagtattgttgtttacatgtataggtttcttaaaaaaatgcaagggctatgtgtgtacaaaaagtcacccaaaaggatcaattatggagggttctttgtttgatgaggctcacacactttgttctcggtatttacaagatgagacccactttaaccaaagagttagaaatctcctaccaacacaaatt

SEQ ID NO: 58733 - DNA, 349 bp, Zea Mays
cttgcttaaaatacatttcagcctaaaaatgtggtctaaaagacctcctgcttgtagcgattgagcctaacgctggcggcttcccttaatcgctcgagtcacgagaacacagactcttccaattatttcgcaaacatgtgtagctgcgcttcctatattgccagcggcacgatcgcctccctccagtactctatcattctccacgcctttgggatccacggatccggcaagggcataagccagcaacctccgaggcggtcgggcgggctctgactcaagcatctgccaccgccagtccgcctctagcctccctgcgaccctgcagcagcgacacgcgcgcgtccagcac

SEQ ID NO: 58734 - DNA, 989 bp, Zea Mays
tcatggccacactcttaatatgaactttaaatcttacaatatctttagagtttaaagataaaatgtccacttcctccacagccccaattgtagagcccaattcacagatagcctggtaattctgaagttcttcaggcacattttcagccacaatccaaacaaagtggagtttggattttggcttagtctgagagctccacgaagatacagagatttttgcaccagacaatttcatcttcagttcagggaaattaatcatctcatcaagcctctcttgagaaggaaattgcatcaggaaaccagagtgacacttgatggctttccaagtacggccctaggggaaatgaaaaccgaaatccttctcaagatcctcagccttgatcaagccctcaacaattttaaccaaacctataaaactgcgcttcggtttatttgacaacggtttggagaaatgagaggagtaaaaccctaatccatccgccgccatcccaacaataggcatgcaaggcttgttttgtttggggagaacgcaccgagcggtattatgtgtttccttgcgacagatctcacaccacaaagatttgaagcactccctagcatgatggccatccataccgcatttttgacagaaaaccctacgcaccatttcattctctaacttcagaatgggaggaggatgggttttaagaatacttgtctgaccgccatcgtcggaagacgagatagggatatcatctttgttcttaggctttccagtccccggcttcaagcgccagctaaggctccggttctttccccaggattgggatccctgaggcgcttctttcggcccccaacggtcccagttagggttacggttcttcggatccatcgggagcggagcagcagagagacccgggaggggccactcctcggcgatcgcgggcggacgaaacggagaagaaaaccaaccactgcagaaactagaacgcgacgagcacgggagagac

SEQ ID NO: 58735 - DNA, 526 bp, Zea Mays
gaagttgtgtgccctcgcttgcctgtgcctgcgaaggcgttgtgtactttgtctggtatgttttgttatgctgtgctggtgtgattatagtcggtcttggcgcggatggtttgatgctgtcgtttctgcttttgttgtactagtccgggctgcgcccttaggcggcttctgcgcggatagtcttcgcggtaaacttcggttttttcgcacttgttgtgctagtccggctgcgcccttaggcgacttctgcgcggatagtcttcgcggaagacttcggattttttcgcacttgttgtgctagtccggctgcacccttaggcgacttctgcgcggatagtcttcgcggtagacttctgttttttcgcacttgttgtgctggtccggctgcacccttaggcgacttctgcgcggatagtcttcgcggtagaattcagattttttcgcacttgttgtgctagtccggctgcacccttaggcgacttctgcgcggatagtcttcgcggtagacttctgttttttcgcactt

SEQ ID NO: 58736 - DNA, 344 bp, Zea Mays
cctgttatgcgtagaggtgtattggaggagccgttcagattccctctggcttagtaacgtatgagtaatcagcgggagtcatgatgactgcggtccatgcagcattgacaggcagtaaccccattcttggtaacgcgcgagtaatggtgagtcactgtccttgttgtagtaacgtgtgagtaactgcgcagcccacgcagtccggaatgggcgcgccgcctgtcaccggaacggacaggcgcacgtcttatccgtaataaatgcaaagatgcgcgtagcccagaggctttatgccagcttccgcccgttagcttacgccacgcgcagcaggccacgtgtcaaca

SEQ ID NO: 58737 - DNA, 436 bp, Zea Mays
atatgctgcatggtcatggtcatggtctctaggtctgggtcgtaggctgatgtctcaaggaggagtgtgttgctgctggtagacaaagctctaggtgtccaatcattgcttacatggtatgcccgtctgcagttcagttgagaactggagatgctccaagctcagggctaaggttctgttatgtgtggtgtggggtgtagacacgacacgaggttgctaatctgtgtcagcagagcgttagcattcttcaacagtgctgtagctagtatataatctttaacgtctgagttttgatcagaaatatttgtcctaaaatcaactcccattacaatgaaatcttctactctagtcaagtaagagattgtgtcactaatattcctaggtatttggatgtaaaaataagctcttatccttttcgttatttgcgtattcgata

SEQ ID NO: 58738 - DNA, 938 bp, Zea Mays
ccaagatctgggcactgcaattctgtctgtcaagcgctctaaacatgtttcccatggtacagtagctaaaaaagatcctgggttcagatccccttgccgccggtgatctcatgccgtgatcctcgtcgtcgttgcgattcgtgctctgtggggtgcagataactcttaagggtaagaaatatcgcatcgtggatgaactcaggccactgttccgccccagccgccgtgttctcttgactcgcgaccaattcagatgactcaccggagttagccgcctatccaccatgcgccacgtacttgggtgctctaccacgtcgcagtaactggtcttaggtgtattcgttgccactggtgaccttgccacggtgaaggccaccaatcctttgcgccagtgcacccccttctcttcggccgccaccgcgccatctccaattcacaggccactgcccccggatcctataaattgagtgtgccgtcgactccgctaggtaattacgcgtccaacacaccagcacttgcctccaattgtccaccagagccgcccaattgcccttttcccccaaatcggtctaaacaccatcgcgtgagcacctcgtcgtggccagcgtgctacatgtccgatcatgtcctctactctcttgtttcagtacccttatgtgcccctgatgcttctcgacccgactgattaagctagaacccattggatcgctgggaacactttcgtgttatccgttgatcgtgtggtcaccgtgagcagagaggttgggagctcgaaccgtgcaattgatcaaggggaaacatttgttagatgttgaattaggtatcagccaagttagagcaccgatcattgcatgtcttggccggtacaggttcgccggagctcggtctgccgccgtgctacgttgtggacctgacgttgtgaagaaatagaaatccaa

SEQ ID NO: 58739 - DNA, 408 bp, Zea Mays
aaaaaagaagtgtggcccgaatacgtcgaaaaagaccacaaagtcggccttcgccattcgacggcaggacagtcaccaggacgacaagtcttaagttagccttcgtgtgcgacaactaaatccgagcaaaattcgcctcagggtgtagccgagttagcacaaaaaatgcgcaaagacacctaagggtgtgaagtcgtccaatagatgcaacatctacccgaacaaaaagtcacctcagggtgcaaccggattagcacaagaagtgctgtgaactcacctaagggtgcaaagtcgtctattagacacaacatctattcgagcaaaaagtcacccaagggtgcagccggatacgcacaagaaatgcgtaaagtcacctaagggtgtgaaatcgtctacaggcacatcact

SEQ ID NO: 58740 - DNA, 518 bp, Zea Mays
gactagggggtatatagtgcccaccttcaattatagctgttggaggatgtagctctgtctatgcctcacaggaacggattggtgcccaccgaatgagggtccagtgcctccatgttagctagtcgttggtcagacggatacattatctgcaatagtgcaaaggtctggtgcaccattgaactagtctggagactaccatgtcagatgaccattgctgactagccattgtcgaccgttgacactagtccagtgcacacccacacagtcctgtgccctagcaggacgagtgtctaaaaacatcgcctctacacagttagtctggtgcgccagtttgccgaagacacgagaaggggctctctagcaaagtggtccggtgcactggtccggtgcaccaccaggcagtcttgtgcacccagtttcagcccatccttgatttcttcaatcttctttgcatgtgcttgattcttggtttgtgtcttggactttgcttgatactcgaagatcttctatgagtcttt

SEQ ID NO: 58741 - DNA, 399 bp, Zea Mays
cggaggacgagatctcctactgagaagaatcgttgccgcacgaccttgtcatgatagcgtcttagagtctgctggtaccgtgctgattggatcactgcatttagccgttcctcctcgagtacatcaatatcctctaatctggtggcttcagcttctgctatactgtcgaagattaaccttggcgccccgaacttgagatcagcaggtagcactgcctccgacccatagaccatgaagaaaggagtgtttccatgcagggctcggctaggttgagttctcaggctccaaacaacataaggcagctctcttatccactttcctgcgaatttttcattcttatcaaagactcttttcctgagtgcctccagtatcattccgttggctcgctcaacctgcccg

SEQ ID NO: 58742 - DNA, 383 bp, Zea Mays
attctttctttttcttgcagggcttaattcttagcaatgccttgagagcacaaaagaacgacgaagacgaaagctgcacaatagctctcagcaaccttcgctcagaggtaattgagctgagaaacgaaggtttggagaaagataaaattttaatttcattggtgagtaaaattaaagaagacgaagctaaatacaatgctcaggtcgaagcccaaaaagccgaggttgaagaccttcggaaacaacttgccgaagccaaagaaaattgtgaggtcgcaaaggccagctaagaaattagtgaatggtggaaagccaggctagagaaaaatattgaggagcttcgcgaatccaaggaaagatgcttcaaaaaatccttggattgc

SEQ ID NO: 58743 - DNA, 662 bp, Zea Mays
gaggccgatgtgcccatgatgatgaagctgggctatttcggagaaactgagaaaaagcttattcgttttgccggagaagaaaccactccaaagccgaaagatgacaaagtagtagtttacaaaagttttttcagagcaggattacggtttcccttgaacgagatgattggggaagttttggataattatgaaatatatcttcatcagctgacccctaacgctatcattaggctcagcatcttcatctaggcccttcgaagccaaggaatggacccaaatgctgaagctttctgtcgagtgtatgagctacattatcagatgaaggccagagaagacgggctacatgaaaatttcggttgttataacttcgcatatcgcaaggatacgaaggctccggtgctcagttatcgcaccaagtggccaaccggctggaaaagtgagtggttctatatccaggccgatgagaagaagagggagaagttggatacgatgatcatgagcccactgagtttaagcttcggactgaccaggcccctgtgccgcatgacgtcggggtcaccatgtcaacaagttgtagcagaattcagggtggtggctgaacagatcagcactagagatctagtgcaagaatacctggccaacagggtgtctccaacgttgag

SEQ ID NO: 58744 - DNA, 804 bp, Zea Mays
ctattatgcaaaggtgattgctttggtttgtcaaatcctacaacctacaatgtgcatggtacaacaatgagatctaagagcacaattgcacaaatttatgtaggataagaactgcgtattcagacaatattaatagccacattcgagatttagttagcagaacaatatgagaaatgtctcccttcatttggtccagaggttaatcatgattaattttcttccaactttctacacaatgctgcagtacttgcatttctgaaatcttgatgggaagaaatgactttcttaaagaatctatgcaatcagttcactaccattttctcctgcgctgccagcctgccaggccatgcactccaatggagatattcctctctccttggcattcgcacccatctatatgctgaacctagctaattatttcagaaactccatatcaaactgtatacataagaatttaaataccttagcaattattggtggtaacattggtaaaaattctgcaaaaacaaccaattggattcacaagttaactgttttaaaccaaccacaaattaccgttgaagctgaagttatacaaacctaatcaaatgctaagcatgcctgatttttatacctagaacattgactctgcaaaaaattcatatcaaattctgcaaaaaaaaaagtaacacatatcttcagtacatagtatcaccaattggattcaaatgacaactagtgtagccagccggaaactattatcgaaatgaactcattcaagcataatgaacagacttccaagaaacataatatcttagcaattta

SEQ ID NO: 58745 - DNA, 693 bp, Zea Mays
tggcaataatcatgccgagtattatgggacgcagcccaaggatggaaacaataataactactatagcgagatttcctctctatcctaacaccccccctcaatctgtacgggatgaaatcaagttcagattgctacaaatatggcgaaaagcaggtcctggtagagccttagtcattatatcagcaagctggtccttagaggagattagtcgaacatccaattggccggaagcaacacgttctcggacgaaatggtagtcgacttcgacatgcttcattctttgatgaaatattgggttggcagtaagatatgtagcaccggtattgtcacaccatagaactggtggtcgaggaagaacaacaccaagttcccgaagtaatacttgaagccaaataatttctgccgttgcattagcgacttccttgtattccgcttcagtactggatcgagacacagttgaatgtttgcgagatccccaagatatgagattgttaccaaaaaagatagtgaaacctcttgtactccggcgatcatctggattgccggcccagtcagcatcagagaaggcccgaagcaacggagtgtgtgtcttggtgatagccagaccataatcaagtgtaccgtttaggtaacgaagaatccgtttgacggcagcccaatgtgatgttgtgggcgccgacaaaaattgacaaa

SEQ ID NO: 58746 - DNA, 775 bp, Zea Mays
atccaaatgagttaggttgagagagtagaaattgaggaggtcgtggaagaaaggaggaactggtagacctaatccttggatcaagaagggaatgaaaaccaccgactcgtgggtatcctccatggggacagtaatcccctgctagatccgccaagaacacagttcctttggcagcaaaattccaatctcaatgaggtgatgaagatcggagtcagagataacagaagcatagttactgcaaaacgggagttggcttttagggtcaattaggggaatgacaggggcgacggtaccctatttcttcctcctagcgccatcagacctggtgagcagacggggttgagcacaaccacgaagatgagcaaggatttcaaaatttggatccaggcgaaaaaagcaaagttagggttcactgccaggggactcccagcgaggatgtataggcgcgcactaagtcaggcgcataaggaggaaagatgtaactccgaccagaccctcaacaaagtgaaatcagtcgagctatcagacagaggcgctaactgagaatgtcagtcgaactcttcaacggaaccagtcagtcaggaattatcataatggactcacgtaaccgaaatcgtcaggcaacgcataagccgagcagaagactgaacagatcagaggaaagcagcaaacaaaatttttcattcattagaagtggctcattacaaagggagagggtcggccctctaggaaccagccccaacatcctacacatactacctactactaaaactac

SEQ ID NO: 58747 - DNA, 560 bp, Zea Mays
agatcaacggcccatgttttaaacaattgagattaatcctaatgcacaggatcgagattggaggaatcatgttaacccggacgaattgatatcccagcttctaatctacgctgtctagatcccatccgacggtcagcctcggatccgcgcctaactaaggcggtactcgctattagccaatagatctgagatcactggcccagattcggccacggcggattggtgtgtgagcccttggatcagaacgcgacggctcacgattccccgtcaacctccgatccggcagctgcggcgagcaggattctacggcggcgtttcgccgaagaaatccccatttaaaggccccaaaacccacccgagggctattgcgtgcaagagtatgttaatgtagtaatgaattcgttggaaggtgactcactactaatcgcggcgctgctcggtctggccacgacaggttgtggacgacggtgttgttgaccggccgatgaggaattccttaatattcggtgggtcgccttccaattactccctcgcccagcttctacgtggtcaatcccacc

SEQ ID NO: 58748 - DNA, 506 bp, Zea Mays
ctgttatcactcggctgttatctctaaaacgccgccagtaaccgctcggtcgtttggtctaaaacaccgacatggcccgttatcactcggctgttaactctaaaacaccaacatcaccagtaatcactcgaccgttattcctaaagcgacgacgtggctccaaaagactcggctgttacctctaaaacgccgacgtcgcaaaaaaggaaaaccactcagttaccacctctgaaaatactaacagtaaatcagacgttttttctctatgaatatgcaggcaaatctaaaatgcgactcgacgattctaagtcgttactcaagcattacatccaagaacaacagctacattaagcataaatacgatcgaccgatcgacgggaaaagaagcgatgggaaagcaaaggaacgcacacagaatggggtgaaatattcttcattataaagagaggggaaatattaccaaacttaaaaaaccaactcattatgagttggctttcttcccacag

SEQ ID NO: 58749 - DNA, 425 bp, Zea Mays
cacacattcccgtccttccagaaactgttggacaaggctatagctctggagcgaaaacaagttgagctaggagagaaaagaaaggctactaaccagggacaggctggaagaagtactcgtccccgttattctacaccccaaggcacacccgctcgtggcagttctggacaatagtctcaacaggtccaagctgctccccctcaagcaagcaccctagtgggacctgttgctcctaatgcatccacaaacaggtcatgctttaaatgtggacagactagacattatgccaactactatcccaacatggctgcttacaccactccagcttcgatgaagcaaggtcaagtctctaggggtaaaagtcatgccttatcagtcaatcagggacatgtcaaccatgtggaagcagaagctgagcctgaaga

SEQ ID NO: 58750 - DNA, 895 bp, Zea Mays
gttcgactgaaatacaccttcagatatggagataaatttgatgaaccaaatgatgactggctgaaatgtatcgaagctacaagtgatgaaatgcttgggccatattccaaagcagaagataatgcattatccacatccttcgagggccggggaaaaaagagattgacagagtttttgatgccattggttttgtttaccccgactactgctacccgctgcggggacggggaaagaagaggaaaactgctgcttcggccactccagatgagcctacgccaaagagcaaaaagttgaaagtccttacccaacggccacgttatattgaaccggccgtagtgcctgagtttggcggggagacttcttcagctgctgaaccaaaagagcccattcctcctttgcagaaggttgaagatccggctataatgccgaaggtacctttagcggagctagctgagtcgaagactgataaagataaggccgaagagcaaaaaattgaaggaagaaaaatgttaaaaattttaagcccttcggcagaagtaacagtgtcgaaggcacaaaaaagttttgtggcaactcccaaaagaagaaggatggcaaatgtactagatgtgttagaaacagtaaaggctttaagctccactccttcagggaaaatcgccgaggcttcaaaaatgcaaaccaaagctaaaacaaagccgaccgaaattgaagctgcagtaatccaagctagtgccgaagctgggccttcagagctcgccgagaaaaaaccttcagaaattgaagaaagggcaatagaagaaaaagccacagagcaagtgtcgcctgaaaaggttgctactcctactcccgaagctttgaaagagagcattgattacatcatccgccatgcttcggg

SEQ ID NO: 58751 - DNA, 366 bp, Zea Mays
aaggtacgaaggagctaaaccgtattgcattggtattgatggcccaaaaggaggatatgttgttgatgcatgaaacacttctgctcgccaatcctgatctctatatttacgcttcagaggtgattttgatgtcttcaaaggtgctctagatgacttagcattaccagtttgatcaacatcatttgccttgatttgcttgtgatatttagcctgaagttgctcaaaagtaaccttcgaccttttacccttttgtttatcacgaccttcacctccaaaacatttacatttgggcatacttggatcaccatgctccatggcgcctccggtcttattaggttttcttctatccggagccttgcgagtaac

SEQ ID NO: 58752 - DNA, 607 bp, Zea Mays
cgtacccattcatctgcttccaatggttcttctgccttaacaaagagcggtagacgagttttagagaactctaaatatgtggtgtctcgtggcccttgaggttgacctctgcctccatgttgctaaaattgatttcctgccaattcacgcaggaaacgcgtgttgttggcggtagcattgactaaggcagcgatagcctcagccaaggtaggaggtacaggtggcgggtttggagtttcctccccgccgagggaaattcccgccccgtcatgagcacgagttcttgatggcatctgaggaagaaaaacatcctgatttattacatgccaaacatacaccacctttattacattatgttgaactaataataattatacatactcattagtacaacccaacttccttatttactttacataaggacactacttaaactacactactctaattatcttcgtctttggccgctccactgccagcatcgggagaacgttcatcagcgaggttcatggaaggaggggctccaaaaaggtccaactccccatcaggtcctccattagctgctccagatggtccaactcccattgctgcaacttatggtgacata

SEQ ID NO: 58753 - DNA, 354 bp, Zea Mays
gcctttcatagcttttaatggttcataggccaaatcatactctttaagtgcataagcccattcgccaatcctgccactcatgatcgggttttgcaacatgtattttgatcacatcggtttgaccaaaaaagtgcaatgactagataataaataacacctacactcggtgcatgcataacacatgcatagacataacttctcaacgaaagtgtaccttgtttcagcgttcatcagcctccgacttaggtaggttaccacatgctcctttcatttggtctcttgtgtcagaacaactctaatgacttttttcttcggctgcaatgtataacctggatgacactctcgcccgtggcg

SEQ ID NO: 58754 - DNA, 277 bp, Zea Mays
cctggctaatcacgggtcaactgtgatgttgttcgacatccacatctgtctcatgtgccatggatttccaatgccgacttattgacaaacctctttctttgtgtcttactaaaaaggttgcatccaattcggcctagacaattgctatccacctgtccactgttctctcaacagaatcatgttgtcggaagaagaaaactgcacacatggagccttatgtgttcttctggcagacattgtctctattgatggacgtctctaattagcctaaagtaat

SEQ ID NO: 58755 - DNA, 411 bp, Zea Mays
cagcaagcgggaatccgttgccgctttttttttcattgcactagtaaacgacgtttgcatgtgtcatgtgagagtaagtagttgttgctgaaaaggcaggacatcgattcagacctgctctgctaacagtttcgttcttcatccttccagagcccatgtttgtactagaaactgttatatacgtcctgcccatataattagaaaccttgctagcaaattccaaactttagtgctttgcatggccactgatgccgcaggtttaccctgctctttctgaattccatgtgcgtgctaaagggccgcgattagtgccagtgggtgtggtatgcagctgctgtattttttgtcctcctccggttcgtttaagtctcagtctcgacatgaaagtaggaaaagggagggaagctgctg

SEQ ID NO: 58756 - DNA, 372 bp, Zea Mays
gttaccttaaccttgccggtatcattaaaccattgaatgtggtatggatgcggacgtgggcgtgtgggcaagctaagcttcttgaccaaatctgaattcaccaattttttacagcttcctccatcaataataacacgagcacgtcgatccttgatgacgaagaaagtctggaacaaattatggcgctgctgctgcccggaggtctctggctcagcactgaggacacgctgcacaatgatgttccataaatttgctgtggcagcatcaccatcaatggaagcatcatctccggcatcatcacttgtaacaccatcatcctccacatccgacgcactaatgtacccatcgtccgtagcaatgtacgtccgttgg

SEQ ID NO: 58757 - DNA, 434 bp, Zea Mays
ttacaagcatccttgttccgttacaaagccccgcagtctggttcaagttacgtagcagcatgactgtgacgcctctttttagcacgagtttgtggcaagggaaatttgctgcattaatagagtttaggattcagtaggatatagcatgtcaaaatcaggtatgcattcagacgcctttgagatcgtgtcgcaactaaggcattggacaccatgtccagggagcattgagacaatgtagtcatttattttatcagttgtaaggttattaggacataaaatggcgcgtgtagctaagtatgtagggtccatatatctctctaacagatctgggtagacctcggatatgagggccgcagcagcatcaccatccgtgtgtatcaacaaatcttcaggaatcgtaacccatgtaggttcggactcgtctcctcttgtca

SEQ ID NO: 58758 - DNA, 663 bp, Zea Mays
ttgacacctaattccacccccggcgacactaattctccaactaattgcactaatccggaccggagcatgcttgttcatgacgacggcgaaaaccgagaagaaactatagtgttcagggcaatccagcgtggtctaactcaatcaaccgagcctacaagcaacaggagacctaagaggtgctagaacatctaatagagaggcatgaaccaacctgaggagggctggccacggcgaggtgttcacggtggcgcagaaacccgatttgggggaagtttagaatttgcgagctacagtggctaatcggaggcgagggctggtgcactggacgcgtaacaacctaacagagctcactggggcattgatttatagggtccatcagcggtggcgcccaatttgaagaaatcgtgctggcggccgagaagaggggatgagtcaccgcggcgatctaccgtggcattcactggttgaggagctacgacggtcactattgaactactacggctagcaacgacgtggtgaaagggtcacggcgtggcatgatcatggcgaatgacgtacacctcgacgacggtctctcggccacgtcgccgacaagtggatgggcgacagagcaaccacagtgctctgagttcatccacgacaagatcttttcaccaggggtcg

SEQ ID NO: 58759 - DNA, 514 bp, Zea Mays
ttcgctttgagtgttatattcttccttgtcgatgttggtctttttcttctccagtcttgatctcattgagtcggggtcagtgtatatcatcggagttaggaaataaggttaagataggtatggatgagatagacttcatggtgtaggtcaaagtttgtttgacgttgggtggggatagacagattatgcaatccatcatgactctattggttgggttagctcatggttgttattctagagtgggataaatacgctaattagggcaagatgaatcccgtagaatcttttgaggtcaattagatctattaggatgacatgaaatcttttttaagataggatgattctattaaggcagtagagtatctcttaagataaggtaaatctattaagctagattaggataagttaggatctttttgagaggagatggatctatgagtgtaggatataatcttttaagatgagatagatattgttaggctagctgcattaatggggcataatctagtttgcc

SEQ ID NO: 58760 - DNA, 563 bp, Zea Mays
agagaaagctaatgcatccatggctgaagctaatcgagaccaagctaatcaaggcgaagctaattgagcgccaaacccatttctattactttcgtaacagaaatatatcagttccggacgacatatatcccaacaagttttcagggcgcacacctgcaaccactcaacaaagcatcgacaacctgccaagtccacgtgattcaggctacttggatagaccttacataacaaaggaaggagcccacaacaagttcagctgagactcatgagacagacaaattatttaaaactccaccaaaagcctgaagactaaaaacgactgacaaaagaccaaaacaaaagcagatcagcatggcagcatcagtcgtccatcctcgcatcatcatcctgacccatacataatctgcctaccagtactcacgcttgctgcacgcactagaaacttgcccccatcctgaagaagctccttgcagttttttttttttttgccgagtcctgaccaagatgaaatcagagcaccagcgtgacatatatttttttgaaacaagaaggcagaagttctg

SEQ ID NO: 58761 - DNA, 699 bp, Zea Mays
gaatcacctgcggaagaagttgtaggctgtggtagatgagtctccatcgtatccgtctgttcaacaagtcctgaaactctcttcaacctttcagtgttcatgttgagtgcatcacacatagctctcatcatgtcgcggagctccagatgggatgttcctgtcattgttagtacaaaacagaaacaaaggcaacaagcaaaaggtgtgaaccctacaactactctcaagggtggtggtggaacacaagttgtgaagcgtcttaccccgctcttacaaggttcttaccagcactgcaggtggcaaacggtggacggtgtaacaacacttagagcgtgggtgtgattgcaaaggagtacctgttctgctcgagagaaaggtggagctttgggaaggcttactaaatatatatctgtggcacacaagtcagtaacagatagcaatgctgaataagtgtccaaagtactcgtcctagttgctggcctagagaatgtattagcacagttggaggaagacacaaaggaggtgacaaggatctaggaacaacaagggaacgagttggaatgaaaaacaatcacagaggtgcatagatcaatggtgttcctgcttatgcgcactctttttctctttttttctctaatttttttctcttcttttttttctttgttttgtgcggctttttttgcacttgcatttttatat

SEQ ID NO: 58762 - DNA, 634 bp, Zea Mays
gcgggtcacggcgctacgtgaattatggtatggtttcctcccctgtgttcgcgcttatccctatcgtgtatagcacctctcgggtgggattttggggcactgtgcaggggtaatcgaactcggcggcgatgcgctgtcgcggtggatctcgccgtcgccgatggtgaggacagggggttgatgacggtcgtggtccgtccatttgttgatgagcgcctaggattagatctggcataggatggccctcgcccgtcgatcctgcaacgaacgactacgattggaacctgacattctagcgcgggcgtgggttggtagccgttgatctcgtgatccatggctcgggtgtgtaggcaggtttgatctaatctcggccttcaatacttgatcggacagctgtaggccctggataccccttcggttctgcagtattgcaattgagcccctgcatttattttaaattgaacccgccgtccagagcaacagcgctctgagtctcgggaatatttgtagaataacccctgccttctctaggaattgaggcccagtccaggaaattaagaaattcaggaaactaaatagaaaatagattattaatatataaataagtgctagaatttataaaattcatataaaa

SEQ ID NO: 58763 - DNA, 592 bp, Zea Mays
aacaaaattgtcaaccatgaaagagtgatactgggaatgcatatgatccactggagaaagctggggttgatttgagcttagaaaactggttgagacatttcatcgaacacatggtgtgtgtggtgtaggaaagggggtgaaactggtttttctagagatcaaacccctgaagggagatgaatacctgcaagagggactcataggagcacaaagcacacataagggtcacaaggatttgcatgtttgaatattggagatcaaagttcttcacaggtggttactaggaacttctctggtgaatacagagagaggagagggaacagatgttagaagcaactcactagagagggagaagggagcatagggcacaaccaccaaggagcaggaggaccgacagtgagcacacgacggtgatagtgggagagcacactggcagtagcgctagacagacagagcacaaggaggagcatatgcgggctaagcatggggcaaagaaagagaaggaaacaacgactggcatacgagtacgaacgagagaaaatatttgagtcagtggttatgggaacaccgtacattgcacagtacaatgttt

SEQ ID NO: 58764 - DNA, 1121 bp, Zea Mays
cgcaccgccgcagtggatagtccaaatagtttctgtgcgatgctagtgtggttccgaaggccctgtccagtctactatgaagtctgccaagacctaggattttattgttgtcctttgctcgaatgtgacgttgtatctggagagctcggttgcccatctggctattctggagtatgcttcaggatttctgaataggtctcctagacctcggttagtggtgacccttactttgtgcgcctcgaagtagtgccttagtttgcgcaaagtcatgatgaccgcataggctatcttctctagctctgtcatattgcacttgcaactggtgagtacatcggagacaaaatataccggacattgttgggtcttgtcgtgttttcgcctttcttataccatagttgcgctgaccatgctgggtgacgctgtgatgtagagcaggaggggtaacatggggtctgggctagtgagtgtcgctaaatcagataaataatgttttaaggactcaaaggctacaacctactctgggccctaggtgaagtccttggctccgcgcagcattttgtggaacggaaggcttcgctcggtgaaccgtgatataaatctgttcaacgctgctagtcttcctatcaactgttggatgtctcgggtcgactgtggtggagtcatgtccattatggcatgtatcttacttcgatttgcttcgatgcctctatgtgatatgagataattgagtatcttgccttgtcagactccgaatatgcatttttccgggttcaagcggagtctgactttgcgcatgttggcgaatgtctctgccaggtcagagagatggtcttctttgttcttgctcacgacgactatgtcatcaacgtaagtgaaaatgttgcaacccatttaactttctagaatgcttttggtgagccgtgaaaatgtcgagccgccattttttaggcctttgggcattcgcacgaagcagtatgtgccaaagggtgtgatgaaacttgttttcgccatgttttcttccttcatatagatttggtggtagcccaaaaaacaattgagcagagacatcaattcgcatcctgtcccggaatcaatgattttttcgattcttggtaaaggga

SEQ ID NO: 58765 - DNA, 513 bp, Zea Mays
gagaaatcttacgcacattatagatcggagttttatgcagtgatgccagtgagctttagacttagattaatgtagtggcatgaatactacatatttttccttcaacatgaagggttagtctcaacatctagcaagacacgcaataacaagttgcttcgtgtttacaattctgcaaacttattgttattattaccaaatgcacagtcgatcattaagatttagactaacatgcacaacactattttatccataagggtccttcaggggctcatgaattccattcgtcgtttggagccattagttgacttcagatcaacaagtaaaatgaccatcagggtctaacgctcacaaagacattcactggttgcattgtgcgtttaagcacataggaaaatatgtgtgtagataatggtagtaaagtgcacggcatcaggccaatgctgccaagcaaatatttttatatgcatagatgtatagtccaactcatttttatcactgcccatggtttaccca

SEQ ID NO: 58766 - DNA, 420 bp, Zea Mays
tgacgccacgttcaatctcaaacatcaacactatcttgggggagtagatcgatgcatccacaacgctaaaccctagatccaggtccgaaaccaatcacacatgcgtcgtgcattaggggagcagaaggatcagtgcatatcgtccaagacgaaggtgcttcacttgtcggtgaccggtggagtaaggagatctacgatggcgccgtgcgaatcagtgaatgtttcttctacgccccactgtatcagttgtcgatgcagctcgagcacatccacatcatcgacgtcgaggatctggtgttgtagaatcacgtgaaccgatggactccgtgtgatccatgcttccgttgatcgccacggctcgatccagcagcgataggggagggtccctagccaacaactcggctacaagatgcacctcag

SEQ ID NO: 58767 - DNA, 541 bp, Zea Mays
ctttagatagtggggtggtactatgtgggagtgttgcgttgtatgtgacttcctgtcgtgctgggcttgggtggtttctcacgacccatgtgtaggggtaccaatccactaataggggttgagtggttttcacaacctatctatgtggtaacgggccactggtaaggggaggagaatagacctaagcgcttcacgcatgacacatgataaccgtcgaaactggtgctttataatagtagagctataaaaaacactttgcgattgaatgatgaacaacactaagaaacaataaacagtgatacaaccagcatctaaaggcgacccctcaactctaagcaacaaaaaccacacacaataaagttttgttggtgtaaatgcaaaatttgtaaaggacgtttatgcaaaagtgaagaaataaagagtgagtgtgtatgtgtgtgtgattggtaggatcacactaaaagttcttcaaaaccgacatggtatcagagcgatagctaggaacacacaattgttatacattgccacttctatttagcag

SEQ ID NO: 58768 - DNA, 421 bp, Zea Mays
tgatgccgataaaaaaaattcgaatggccactgtcctaggcaccttccaaaaaacttcagatctgacaagtaaaataccaagccaactagtgattccatgctcttaatgtaacagaacactcacccacaacggtaaaaccaaagcatcggcaaatattctcttaaactcaaaaatcaagctctctaattaacaaagtttagggttcagggtccgtttggttatcacagaactgtgatatgcaactattcatagcaggattgttagtctaaggttggatcagctggaattattccaggttatattctcgaacaacctaacagaccctaatctgaatgaaacaagagctaaacactaaatcatatcaactaaccggtaatttgaagacttaacaaagtttcctatcaccacacaaaactccta

SEQ ID NO: 58769 - DNA, 643 bp, Zea Mays
gcaaaatagggatggggcagagttggaatgtagaccgagtcattcaagatgggctatagtattgtccttttgtaagccatcggcaagctttattaatagcagcaagctttattcaaagtgtgcttgtgaagaccatggaaaaaatattggtgattgttgatgtatttagccattggctattgtgaagggcttttatggttagccttgtggaagattcgtcaagagtgactacagggaaattaatcatggtttgaagagatccttggtgatctactgtcttttgtgaagtggtgattataggatccacttcaatggagacacatgttgccatctagcaaccaaaccctagggggaaattatgtcaattgcacttgccatttttctatctcaacactcgaatacacaattgttatcttgtgcttgtgttgtcgattgcctagttgtagctagctttgtgtatctctcatgttgtagccttgactatttagctcctattttttgttttcgatgttagatttgctctagtgagtagtagtttagttgttctctctgttagctcactagtagctaggtgtagttctagttgcttgtttgtttgagtgcttaattacttgttcttacaaatagacatgtgtagggggct

SEQ ID NO: 58770 - DNA, 418 bp, Zea Mays
aaaggaggagaggagggggtgctgcgctctatatagtggaggaaaggagggaatcagtgtcgattaagaccctataaagagaaattgatgcactgctattaatccgtgagtaattaacagccagaatcaacatcaatggccgctgcgggggaaggtaactgctgacggggatgccgcgaggagggagaaggggaaaaatcacaggaggagaaacgtcgccgcaatggtgctccactacgcaggcgaggagacggaacggctggcaaacgggtacggtcgcgaacagcgaacaacaaacatttggcgaggaatggagaagacggatagtgttgatggctggggctgcttgtcataggaagaaaggacggaggtgagaggagcccgggtgaggttcacgtgacggtgttggccgagcggc

SEQ ID NO: 58771 - DNA, 704 bp, Zea Mays
cttcatgacaagagggagcttcggcaaagataaaaaaaaattcaacttcgtcaaaacgcaagaaattcaacatcaaatggccagggtgcgctcaacagctagggttattcgcgacggggaggaagctgaagctgatgaaactactccgatttccgaagttatgagacggtcgggattggttgtgattgaaggcgcttctgacgaagaagcacccgctgctgaagccgagcaagcagatattgaagagggtgatgctaatgaaggagagattgattataacatcattatgccatcaaagcccagccatttggattttgggaaatcgactgtgtctgaggctgatatgactatgatgacgaagccaggctacttcagagaagccgataaggggttggttcgctttggcggggaagagactgtcccgaaaccagaaaatgatgaagttgtagtttttaagagcttcttcaaagcagggttgagatttcctctgcacggaatgattgcagaagtcttggaaaaattcgggatttaccttcatcagctgacccctaacgccattgttaggctcagcgtgtacatctgggctctccgaagtcaaggggtagagccgctcgtcgaagcattatgccgagtacatgaacttcactatcagacgaaggctagagaggacggattgcatgagaacttcggctgctataattttg

SEQ ID NO: 58772 - DNA, 334 bp, Zea Mays
gaatggagaggagagagaggtagccggcacggtacttaaccacaggagccacggatttcgcggagatttggttggaactaccccgcggagttcgcgcaggagacatgttctgttttcggagcttgcgatacggggaagaggggtctgacgccgaggccccacgcagcagtggcgcatgcgcgttcaaggagtacctagactggcagagcccacatgcaagtggcgggtgtcggtttgcgcgtggttgggccatcaaaatgggaaaggagcagagagagatgggccgagcgactccgaattcggcccgggtatacagggtgagccgtgcccccct

SEQ ID NO: 58773 - DNA, 449 bp, Zea Mays
agactctccatgcaaaagtcgcctacgggtgcagctggaatagcacaataagtgcgcaaaatcgaagtcttctccaaaatactctccgtgcaaaagtcgcctacgggtgcagccggaatagcacaataagtgcgcaaaatcgaagtcttctccaaaagactccccgtgcaaaagtagcctacgggtgcagccggactagcacaataagtgtgcaaaatcgaagtcttctccaaaagactcccctgtgcaaaagtcgcctacgggtgcagtcaggctagcctaacaagcgcgcaaaatcaaagtattttccaaaaggttcggatcagcgaaggcttgcagtttcacataagttacggttacatacatacagcgagggcatcacactttacattggctcaacctttgggatgatacccatctccctgtagttgaacaacattatcctcaac

SEQ ID NO: 58774 - DNA, 390 bp, Zea Mays
ccaccgccggccgccctgcgggttcatcacggccctcgcgaccctcgtgttcaacgcgaagctccccgccaccagcccgatcagaatgtacctgaacgggaccacggctaccaccgccgcggacacggccagcatccagatcaccgtctctgtgtgctgcaaagcaaagcgcaagaccagaagatgctcagctcagaaggacccaattgacaagggggaaggggagagggagtgtacctttggcgaccttgctagcgcaatcgaccacagcctgaggatggcaacgttcgcggtcacgatgtacctgtgcactttctgcaggcttcgctgcgcctccactatgctatccatcgttgtcttgtccgacgacgacgacgaagaggcatcgat

SEQ ID NO: 58775 - DNA, 359 bp, Zea Mays
catgggttggcttattcccttcttgtatagttgtacgtctatcacaacgaagtcacggcttctgtgtttcaaccttttggctttgctttggtcagatgggtgataatgaccttgaaggtataaggtgataggttcccgctagtcttcgatcattatcacatgtacgattcggtggccatcgaagtcttgtgttatatgtaggccttcggggtttcttacaactagtgtgccgattgtgtggaaaaacacgtcagatggcagtgggtcgccttttgctgctgctttcaccaacatgtgggcctcttcattcttgttccactctctgtgttgcaatgtaaatcctttgagttgcatgagga

SEQ ID NO: 58776 - DNA, 385 bp, Zea Mays
gcgagcctgtaccggccaagatacgcaatgaccggtgctcaggaatggttgacacctaattcggcccctaataatcatttcctctcaaccaatttcaaggttctagcccccaatctctctgcccacggtgacagcatgatcaacggacaattcgaagcgttcccggtgatcttatgggttctagcttaattggtcgggtcgagaagcatcaaaagcacatagggatgccaaaacaagagggaggagggcatgatcggacccatggagagctgaccatggtgagctcactcagtacggtgttctggaccgatttgggggaagtctcaaattggggctctctggtggataatcggaggcacaggtgggtgcgttgggtgcttgacta

SEQ ID NO: 58777 - DNA, 523 bp, Zea Mays
agaggtgctccagtcaaaacgacaactgagcaggtttcaccatgaccccatttgataagttgtactaccttttagtctgataaaagaattgtagctacgctagatgcggaattgaggagacctgttgttgtaatccaagcaatgtatgtgtcaggtcctagctctctaatggacgagcctatttctggtttttcttgtctctttgaataggatgtgctttactaaagcacacgaactggctattgaaccaatacaacttggtgggtagatttagagttcataatagatttagaaaaatcacaaaatacattcgaaggcataaaaagtcattaaaaatgttgttgccataactaaacgtcaggttaggatttcactgctgaggttcctcctatattttctgtgttcagttattgaaccattgcgaaactctcaaccatgaggtaacaccaattttgaattagtgattcatgtggaaatagctggcattatttgttcaatagcagtgttactataattgctcaat

SEQ ID NO: 58778 - DNA, 934 bp, Zea Mays
gtgtcgaggtagatgccggagccactgcaacgcgtcttgccctaggacaatgggcaagtacgccgtcatgacgtcctccgttgccccagttgcgcgggcgacaatcgtgtagacggccaaccagccacttgggtcttgcttaggcttgtacttgtcgatgttagagaccttgaagttgggaggccattggatggcccgaagacgcggagtgagcgtgaagactccgcacgtgtcctcctgccggtgttcgtgtcgtcagtcccagggaggggagtcggtagttggtcgtctcgaccgtccccagaatggcccactggttgtggttgcagccgactcaactcgggtggcacaactccatgatggtatgccgtgatcccggtcatactcctcccgatgccttatctcattttcatgtcaccaatcgcgcgaagcgttgatggagctccgcgcgtctcatcggctgttgatggtgtgacgcaggtcaatcgaaggatgagcgaggggtagaaggtgattagctgcctgagtaagcagtcgtcggtagccttccgcgtctaaggtttgcgggagaccgtcagctatctatgttagtactcctccgacttcactcggcgtgttcagtgctcgagcaaaatcagggtacaggtttcgagcgaggagagggttctctcgccgtagcctagcatcctactcggctagctcacgctccctgtcttgagcttgtcggcgatcacggcggcgagagctacgcctttctcggtgtactcgttcgttaggagtttctcccacctctgaggcttcgtctcgggatatgggctacgccagaccccgttccccgacttcatgatgtcgctgcacgttctggtatctgttcctccgtcgccgtgcttcacgctggggaggttcctccccttgcatggtaggctcatcgttg

SEQ ID NO: 58779 - DNA, 962 bp, Zea Mays
cccctagaccgtgaatagccaggtgatggagattgtttggagcacgtgcgtgggcaggttggtttgtcgagcatagtattgacatacttcacatgttcgcaccaccgagtgctcgtcggacactgtagtaggccaatagaaaccctgccggagggcgtttcccatgaggcttcgtggggtggcaaggtgttcgcaggtcccgctatggatgtccttcaggagctgcatcccttgttcgatcaagatacaccgttgctttattctgatgttccccctttttgtacaggtttcctctaatctgggcaaaggacttggctcaccgatggagccactgtaatggaagttacggtatggtgttctctaatcgcctggagaacctgtcgaggggtctccaccttctacaacaatgacagactcatgggtcggtgggacgacaccttagtgtctcttgccctcccgatgtgtttcttcataatgaacggttggttcgaagaggtcggtagcaaaaacccctggtggaatagtcgttcgtcctgatgccatcttcacgagggcgaccaccgctttgttatcccatcgagggatatggttcaattcaaggccatcaaatttgtcttcaagtcgcagtacctcccgacagtatgttgtcatttttggttcatgacattccgagtctctcagcacttaccctatgacaagctgggaatcccctcgaacatcaaggcgtcggatgcataactccacatcgatgtgtaggctattctcgaggtcctcatactccaccacattgttggaggcctgaagtggagccaaacggtgtatcgcaactattcccccaagggtgaagtgaagatgaggccgtcgtctgccccttccttcatgagcgagtcgtcgaagtgcatgacccaacacttctcattcgtcagtgtcagctctatttgggtttcggtccattatgcgat

SEQ ID NO: 58780 - DNA, 1049 bp, Zea Mays
actccacaatgactttgttagggccaggacagcctgtagggatattaatgttgtccctagggtggtcaaaagtgctctgggtcttttcatctatgatttcttttttcaaagacaaacacaaagggaggaaaatgaggagaatttgggtgctactgtgaaagtggatgataatcctcataactttgctaaaaaagcaagagttgaagggcagatatggaagaaactttggggaaaagtgggatctcagtcttctggatccatgaaacataactctggcaaggaggaggagcagagttataaaaagaatattgtgtaggtctcatctgataagaaaagtgtaagtgcgatggagaaagggaaaggaattgtggaggagcattattattctgaggggatgtagttcagccaaaatttggaatgcaatgaaagggctcaaatcactgatagtgaagatgatgaggaaagtgacttgttaggtgataatctgctcaagtttggcgctagtgctggtggatccattccctaggcgaggtgtaatacacagaatgcaagtagggatggagccattaaaaatatgttacttcaaaaaaatgggggtaaaagttctgttgccattgaggaattaacaaactctgatcctaaagataacaacaacaagaatgaacctatcattggtagtcaagaaaacgggttggttaattcatctcaaggtattgataaatatgggatgaactttattgtcaggactgataaagctgaatatgtgaaggttcagtctcctgttattaatgtgaaaagtctgatttttgaaagaagggcgagcgtatggctcaagaaagatatgggaattagaatcgagtagaagaatagaaggatggcggtcaaaatgaaccttgaagataaccttgaagctctcaatattttttaagtttaaatactgaagatattgttatgttatctaagaaaatgggtgtgaaaattgagggaaagaactttgaaactattgacatgatcaaggaaatgaaaaaaatcgatattgtttagcccag

SEQ ID NO: 58781 - DNA, 769 bp, Zea Mays
aacgaaaccatgcatgctctaggatgcctctaatctcaatatccactaatttggacagagaagaggcagaagcatgagcaaatctcgaccatttcttgaacaacaaagtgaaacgaggcccccgcagtgcctttccatcattgaaaaccttagatgcagcatcttcattaggcagtaacaaaaggaagtcttcaggcattgtctgatgaatcgtcatgtccttcactgcatatcaaactggcgcgcaacttcttccacaacttctgagccaaggacctctggctgtgttccggccatagagacaaacagagcacgtcggagagcaatttcctccctcgccagatcatccgagaagtccaaaacgcaggaggagttgagtgcgaagtcaatctccttagaattgttgacaaacaacaaggatggagccgggactaccgctccatcaacaggaaccagagatatgtgccgagggtgatcatccgtcgtcatctttccccttccgcgcttggaacggttccgcttccgcgtggatcgtaagccttcatggcctccaccactaggaccttcagcaggtgcaaattctgtcatcctagcctcctgcggtggggagatccttttccagaccgacttcctctgccatgagcccgaaccatcgttccttaaaggagcatccccctccatccttgtcagacgctgtcagataggaattctgtctaccttcttttcgtgcttcagtccgccaaaccgcttcatacgagccacatgtctc

SEQ ID NO: 58782 - DNA, 486 bp, Zea Mays
agaatatgtccgagatggaccatctggggctactacttccttattctgcatagggaagatgctttcaaagaatgtcacatcccgagattccattatgacatttacagcgacttcgctcgtctcagaatggaccactagaaatctataagctgcattgttatgtgcataacctcggaagacacaatctatagtcttagggcctagctttctcttcttcggcaacgggacattcaccttcgcaaggctgccccaagtccaaagatgcgaaagatctggcttccttcctttaaatccttcatagggcgtggcctcacggttgcgaggtggcaccctgttcaggacatagcacaccgtgagtattgcctcaccccaccagatgtcagacattcccgaactttgcaacaaagcattagctaagtcacacaccattcggttcttcctttcagctaccccatttgactgaggtgaatatggagcggtggtttc

SEQ ID NO: 58783 - DNA, 320 bp, Zea Mays
ttccgcagccactgcaatgtacaggtacaacggttcccctggctctggggcgaccaggatcggcagggaagttaggtgttgcttgaattcttggaaggcttgctccgcctctttggtccaggcaaaagggccagatttccgtagaagcttgaagaaaggcagtgccctctcagccaaccttgaaatgaagcggctaagggcagccagagatcccgcaagcttctggatgtccttgacacgggcgggaggcctcattatctcgatagccctgatcttttctaggttagcttcaatgccccggtatgaaaccaggaaaccca

SEQ ID NO: 58784 - DNA, 679 bp, Zea Mays
agtgggagaggaggaatcctaaatcctcatagatgagtgctcaacggtgatgttgaggaggtggatttaaaggctctagagctgagagaatgtcctaggttcaaggttcatgttaaaagcatctctatgattcctacaatggttgaagtaggagtcaagccttacctctatgacatcttctttaagattgactctattgaggaagaggggtggaatgatgaatctgtaagcttgggaaaaagagctttagtggagatgctaggtgtggaggattctaggcttatgaaatctagagaaaatcatatatgaaaaaaggtccatagctcagggtgataaaatatgaagtctagtgaaaatgagagtgagttgttgaacgatgatgaaagagttggtgaagataaggttgatttgggagatagggatgatgacttgcttaattctcaggatatggacatatttgctaaggaagatgaagctgaatttcatgaatcctaggaatctaacaaggaaagtaaggataaagaaatccagtgtgaagacttctagatggttaaagacaaaaaggcaaagccaagataaaagatcatgttgaagggaatatgaggagcagtaggctggaggcctatgaagatgtaaaggtaccagacctagctatttccaaggctgaagccaaagatgc

SEQ ID NO: 58785 - DNA, 567 bp, Zea Mays
gaatggtgtgcttagtgggcgcaagattttatactggttcgggtagaacatctctacatccagtcttccatgacttgcgctactgacacctttgttgctcaatgcttgtagtaggggttacaagcggacgagagaggtaggagcacccaattctcttatgcgtggttagacctaagactatgaatttggtgctctctactaagctttgggggtcgttgtggtgcgctcctcggctttggcctccgtagccctcttttccgtgtctcgtccgaccctccttttatagaccaagagggtggttacagatagcttctcgcggaaggagttactttgccatggtagaacgaagcattctacctcttgtagaaacgtgtctatcagtattcgtcttggtcgtccgcgctccctgtccagactcattaggtctgctgcacgtgggtggcgagaggttctggattattattgctttctctgtgccgcgccaacccctggcctccatagcctgagtctcgatgcggttcatcgtgttgcgggccctatagattgccagggcactcaggccttggc

SEQ ID NO: 58786 - DNA, 360 bp, Zea Mays
taagattctaaactatttatccaaataataaattgacaattcaagtgtgcattgagattcaaaaggggaaaattttcataaattattttcacattcaaccttacttaataattcatataaaaaatcatccatatttcctaacaattcatagtgaaggtacgatgttcattgtttcttcttgaaacgaattcttatggatctcttctaaacttgagagggtactacatgtacgatgcttcgtatgatcatgcttcttcaagtgctgatataatgtcacatttttcattctatgcatataatgtaaaataaatacttcgaggaatgacattataaagggcaaccttcatggcccgtttggat

SEQ ID NO: 58787 - DNA, 636 bp, Zea Mays
tgtaggtgtacaatggtgacaagaccgtggtcttgtcaaagattcaccaactatgattacgcgtgcaaccattgttcacgcacgccgtctgtcggcccctaacgggacatgtaatatgacaggggcacggaccagccctcgggcacaaactccatctcgcccgacacaggcctcgctctcgggacaaactctgcctcgcttgaacccggcctcggctacctactcccccgcgaatcccacggaatgccactccttcaactgtggcgcacgtcattgaatctcaagctgggttcggtcatgacctcaggcggacctccgcctcactcgagcccggttctgccctcgatatctataacggaggacgccccaacgtcatcagatacagtggagcttacgcaccccttaagaagctttttcccatgcttagcactgtgtcaaccactacggtatgggcaacccctcgccaaggggctcgggtacgtgaccgaaccctcggcctcggctctcaacaggaaacaagcgggcacaagtcaacaacaaagtacaaggccataccatctacatgatatgaatacatcccttcacagtgtgcagcaaactcccatcctccaggaagctccccttgagcctatgaat

SEQ ID NO: 58788 - DNA, 590 bp, Zea Mays
atggaattgagccgatacttcacgaataggtttatgtagatgaatatgagtgaagtgtgtgcttggtttgaatttaggcgaagaaaaagagatttgtgcactcggctcgtaaacgatcgctcgaaacggggaatttggtgaaatttaagcctggaatctcggattggcgtgaaatttgacaagagtgttactggaagtgttgggaaggtgcctgaaaaatttgggtttgattggagcatttttggctggtttgggcatttcaccgagcacgtggcgtgcgaggaattaggttttcggtgaaatggccttttgaggtgggaaaaccctcccgaaggagctaagaacctgcaggagtgttcaaggaatacaggggaacacaatacacaacttggttgcactggatttcacaggaattcacaagattttggaagagatgcacaagggggtggcacagtccaaagaaacagagagaaagagagaagcagaggggaggaaagagggagccagagctgctcaccgaggagggaaggagaggggcacgaggacgccgtgggatcgccggtggtcgccggagagggggaggtcgccgg

SEQ ID NO: 58789 - DNA, 460 bp, Zea Mays
catcacaacttgcttgaaaattttacctagtgaatgcactctaggtgtgacaagtaacatgaaatgtcaatacacatgatgtcatgctcaagttttagtgccagtaacactagaggtgttacatccttccccccataaaagaatctcgtcctgagattttaggtcctagggtaagtaatggaaaagttaacgcatcacatctttatttccttacttgtcttacagagcagggggtggtatggggtttattccaactttacaaacaaatgtatataccttacaggttacatgaagctaaaaacctaggaaaattcttttctaagaaatcttgagtctcccaggtagcttcatcttcagtatgttggttccattgtaccttatagaatttaagagtcctttttcgtgtgatcctatccttctgatccaaaactcgaatgggatgtgcggaataagtcaaatc

SEQ ID NO: 58790 - DNA, 658 bp, Zea Mays
ctccactctgttggctctgtaattcgctttcaccagtggcgtgactttcacactaggaaggtgcatcaccttcggctctctcgacttctttgccacctctatcagcgagttccgcctcctcgattccacctcacccgtcgatgccctcacccagggcatgggcgatcttcggctcacaggaatcatccacatcatcatgatagaggaagaggggcatacaaccccccatgtcgaggcgcttgctaactgtgcaaatgcgctcctcggttcatcctccatgagtgaggaccgagagtaagtgccaatgtggtgacccaactgcatgggaacccaatgctaccatccatggtggcgctccaagggaccacccccgacatgccaccatgacaagcatggtaggaccccacacacccatagccgccggaaccaaggcagacaagcgacgcctcaagaggggcatcgccgctatcaggcaaaaagtgaggaaatcacaccctcgacactcgtggccatggttggtcaccaaccaacctccatcctcgttcttctcagagatgattcgagctgcagcttaacatcagagcctgacaatgatgctgctaaggtagtcgggtgaccctattttgtggagacaccaccatgagacaggttagcgctg

SEQ ID NO: 58791 - DNA, 747 bp, Zea Mays
aaggaacaatcttcatacaaagctccttcggttggatgactcaaaatgatgaggacaaatgcaatgagatatgtgggaattaccttaccagagagcacgaagatatgtcttctatctttggaagtagggggaagcttcatcttaataaagtcatgaatgcaattgggtttgaatacatagactataaagatcccgctgttaacactgaggctggggaaaaaaagataaagagttgctaaaggtagcgggaaaaaccttgaagaagactacagatgctgatatagagaatgatgagttagagtgcaacaaagagtcatctataggtcccaaaaagatgaaagccaagacttgaaaaaatctgccactgcacaagggcaagggaaagggaaaggaagtgctacgaccacctcttctatgggttgcacacagattcttgagttaatgacacaaccattaccattctctcctctaagtcccttaggacagacactaactcggttttgccaaccataaaggggactaacgaaggaggccacccttcgagggtgaagaaaattcatctggggaagaggtagagagcccacgtattttgggtcttggagatgttgccttcgaacgttcatcatcttccgacgaagacatcgagaataagactgctaaaggtggcggatcttggagcatgaaaaagcaggaaaatatctgaaagatctgaaccttatgctaggaaaagacacaaccgagcctact

SEQ ID NO: 58792 - DNA, 349 bp, Zea Mays
cttatttctatgttgttggttcttatccattatcaaattgctccacaagtctgcatctcttgggtcagttgctcgcactggtggttgatttacagcttttgtttcttccagcatcaccagtaatttcaccttcactgttatgaattgaggttcgagtcatttggttcaatttttgtatcgatccctcaatcaaatttggaccttatgcaccagaaactattcctgcagatatcaatttttcttgaattgtttcagagcaaatctgtggtgctccttatccttgtgctgttttaatccaattatgttcagtatagctccgacatgtcaacaaaatgttaaggggctgttt

SEQ ID NO: 58793 - DNA, 1008 bp, Zea Mays
attctccacatttcccctaaatatctcctcctatccaccataggaatggatgcatgcaatacctgctgaggtgttggtacgatcaaaggatgcactcccatcaacccatctccctaaaggtatcctttatgcagtgcctatgccattaatggcggcattagccgctgtcttcgccaacctcgcctgatcctaagaaacctgggccaacgacttcatcaagaggtctattttggttgcaggtattgcatgaccttgtcatgttccatctacctattctccatctcatgtaacttgttcatcactatcccaagtccatccatcttctttgagagttccatgagtgtcgtggtcgaagcatccatcgcctgttgaaacttctcaatcaagtgcttggagctgtggagacgaactccgaatccgcaccaccaacaaagaacaaccgccaacaactagaagttgaaaggaagaatgacgtgaactgatgatgatggctccgatactaatatgtggtgtccaggtagactttttcggtgatcaccagaataggaatgggagatagtgagggaaagaagaatttaggtagaagaatgtaggtgggaagagttatgttccttttcatttcgtgcctttggattacagagttccacactttatacctggtcgaggcctaggcccaacatacgacacaaaatatagcctaaacaaccaaacaataaacctatataatttcctgcctatagtatactcttccacatcttcgctggcgctaaccgactcagtcatcttctaccaccgacacgacatcatgcctggtgtttttcggtacagttaactgtcaggtggattgtggaacttgaatttatctaaagtgaccgatcatttttattattattaacattacactagtctctggagctttgtgatactgatcatttttatcattatcctatctcttaatttctcttcccttgtgttaaagttgagatgaaattggaaaataatctaaat

SEQ ID NO: 58794 - DNA, 505 bp, Zea Mays
gaggagtcctggctgccgcgttgtctcctgtggggaggaagatgtgcgcgggccgtcagattctggtgaacgaccatgatcaaatctggccataccgattcgggggggggagagatccggaccattgggaggcctgcaaacagacaggatttgctctcggagttttatatcagatgtgttgatgcaggatccaacggtagcgattaggtaccggttcgaggtggtgctcgatttaatatgggcatccatctttgatcgaacggccacacacaaccataacccttcggccgtggcaaagttgaaaataagcccttggatttatttcaaataaacccgcagtccacattgtgggaaacccaagtcttagggtaattgtgattttggcccctgtgtttttctgttattggcgcacagttcagagctcagagaaaatcaggaaaatgaatttagaatttgattttcaatacacaaataaatccagaaacttatataattcatattaaat

SEQ ID NO: 58795 - DNA, 547 bp, Zea Mays
ccctcgccgagcaagtataagcgttgagtcagagctacaagcatacgtcgaccacggtagtgcgtgacgctagaggcccagacaataagacatagacacaactatcctatcaggggtaacctcagcaccggagcctctacagtagccgaaatagtagaaatgacaagatagtgcaccatgtgaaatggacaaatccacatgcacggaaggacaacacggggcccacgatggtggagggaagccatgtcgtgttagtcgagtctcaggcttacaccatgggacccaccgctcatcaccacggggacgttagccatgaacccgctgcaaggataggagcaacaggcggtgccatatccagaagcactacttcttcgtacgattaggacaagggggcgcaccgcatggtcgaaggacttcttctctctttattccgtcttgctctctctctccctctctttgaagagagagccatgtaaggtctgacccttaggatataaaaggggaggatccttttcctctcagacgggtaggcacgctagcacacaag

SEQ ID NO: 58796 - DNA, 426 bp, Zea Mays
gctggtccaagcaccctagcccccgtctcctccccactaattgagccttcaccactttccccatccaccggtgagctctccctcgtgacatccccctcttcgaccttcaatgagccattcgatgccactgtaagcttctaggagtaaccttcgagcccgttcactccttcccaaccctctctcacccctatccctcccctgacgaatccccacacttgacctatccaaggctaatgagattggattcctcttgctacttgtgaagaatttcttctttcttgaatcaaaattgatgtcttattatttgagtttatttggcatttttgtttctttcttcaacaaaagctctagcttcacaccatcactttcatcatcatttgagctctcaatttctttcttgattatggctttgcttttcttctcatg

SEQ ID NO: 58797 - DNA, 449 bp, Zea Mays
atggagctgttacaagaaaattcatatctcgcaaatttcgtcttgaatacttcttgaagggtaaattggcttggccccctaactttgtcccattcggtcttcactacaagggtgctaggcgttggtcctattgttagaaatacctatacaattgactcagccagagttagggcccctcaagggaaggacgcaatatcacctctacaatttgatgtcccttcatcccacatagcagtcactgcaagggcattgaggtgatttgatcaacccgaataaaacagtacttaaacaccgagtcttaatgaactaaggtcccttagagcagtggcggagccagatgacaattagagcctgggcactatcggtccatcgccggttgccttggctttgtcgttggtttcgtccatggatggcccaatggtggcctgatgtgtatactagtaggttgc

SEQ ID NO: 58798 - DNA, 422 bp, Zea Mays
cgggtatcgtaattaggggtacctagattacgcccctaaaacacgcttaaccccaagaccaccatcaagacatgttcctcgagggcaagggagtgcaaattacgctttgcccgaggcccctctcgagggtcatcatagctccgcttcgcccgagcctgccctcggacaaggtatgttctcgggagaatcctcatcccagccgagcccgtcttgggtaaggaagacaactccgagtggggactcagccggagtccgcagggacacgagcattcaatgtgcacacctaccccacacagagttgtaggtgaacagaagcaacaagaccacggtcctgtcaaacttcaccagctacgatgacgcatgcagccactgttcccacaggtcgtctaccaactcccgatgggacgtgtacacgacaagag

SEQ ID NO: 58799 - DNA, 637 bp, Zea Mays
tgtttgcatctggaaatgggtcagtttctcctcattagggagatttcggtatggagcaatgaaggcctcaatatcctctaggtaaggtcgcactctatggcccggattgccatattgaacaggagggttggaaacaaactcggaaaaggggctctgtggaggaagattctaggcagaatacgataaggaagcaccagcattcaaaatattgcctctcatcatcaaatcaattcagctcaacatgtcttctttaggaatccgtctgttggtaattcgggtagggtcattgaccctagtatataggtaggcagggtagactctatctttcaaaggttgaatattcttgaagacaaaatcaacaacaacagcttcagcagtcaagcctctatccttcaatgcacatatctcggcaagcagcactctggactcagcaagctctgaatctataggggcctctgtccagctgggcgttctgatgtcaggctacctcctcgatcgagaagggagggacttgttgtgattctccatggtaaaccactcgaggcgccatcccttaatattgtccttcaaagggatctcaagatacttaactttcctgcctcaacaaagttcaaggctagcaccgccaacaagctca

SEQ ID NO: 58800 - DNA, 448 bp, Zea Mays
cgggaagaggaaagatattctcccctccagtcctcacaatagaaatatcacgaaagtacctgccattcatcgcttcgatctgcccttgcttaacagttaactttccaaaaacaacatggctcggcctccatggtcggtcttcgacattttcatttccgctctatacgtcaaaactctcactatcgctggagttctcggacaacccagccagcatctcattggtgattttctcagtgttggtcttctccatagcttcgtaaaacccagccagtgcggggtcagtgatcctcttctcctcagccattcagacgatggttgggcagatgccgaagctaaaaagtcaatcaagattgagaaagcaaagaaagttaaaatggcatgcatagtacaaatagctagataacatgaaaaatacttacgacataggtctctatatatacactaagag

SEQ ID NO: 58801 - DNA, 414 bp, Zea Mays
ggaaggtgtagtcttacggtatgggaccaggctaagcggctacctaactctggaccacccgtgagaatgtggacttttcctttagaccagatgcttgtcaacctgtgtcttgttcagtattaagtggggacataaactaagcaacaatgcatattatataatatagatttcatgataacaagaaagttgagaatctcgagagggggtagaaggagaaacatacctcgactaaggctatgatgacataaccaatttactagaactacaccgagagcaaaacctttcgtcattactagatatgtgagatttttcatagagatcacgagggaccgggttcataagggcggcccttaccgggctcgaccacatagggcgctagagaccgagtttatgcgagcgatcataccggactgt

SEQ ID NO: 58802 - DNA, 693 bp, Zea Mays
aaagatcccaggtgcagtgcacccgccgccagtgaacccgcgccacgatccacgctggtgttgtgattcgtgctcagtggcacgtggataactgctagaggtaaaagattttggcatagggatgagctcgggtcctgttactgctcagttcgtcgtacccgcttgcatggcgatgtggtcgtgcgaccatcgccgtggtggccgccgtccttcgcggttgcgccacgccgtgaccatttcaccatgtagctataaccgtggcaagcaaggagttactgctcttgagccgttgtaccggcaggcgccatgacgaactcgtctagtggaatatctcaccgccgctgtgatcgcctttgtctcaaattggcgaagcacatagccagctcctttaaattgagcattacccttgctccgcctctctattacgcgctcataccaccctcagttagtctctctcgtgcaccatagcccccagtcactggatttccctcaaaacgggtcactcacgccgctgtgagacaccctgccatgatcagccattcccaggtccgttcatacctctttgtgccgtgttttagcattcttgaatgatacgaaacttatcgtctcaaccgattgaacactaccaagacagggcatcgagaacatcacctcgccgccatggaacacttccgagagcgcactcacgtcaaa

SEQ ID NO: 58803 - DNA, 481 bp, Zea Mays
aaaaaggtgaaggttatgacccaccggccacgttacattgaaccggtcgtagtgcctgaatttggcggggtcctcctcagcagccgaagcaacagaaactgctctgattgcacagagcactgaagaggcagccgtaatgctgaaggtacccatagccgagctagtcaaagataaggttgataaggctgaagagtcaaaggttgaaaaaaataatgcaaatgccaaaaattctgagtcctccgatagaggcaacactatcgaagatgcaaaaggcttctgctgcaactcccaagagaaggagaatggccaacgtactcgatgttgtgctggaaactacaaaggtgctaagccctgctcctgcaaagaaaatttcccaagctgaagccaaatcacaggccgaagctgaaactgggcaagcagaatccgaagctacgcaggctcaaggtaaaaccgaagctgggccttcagtgcccaccgagac

SEQ ID NO: 58804 - DNA, 392 bp, Zea Mays
cacgaaagctttacatcatgtagacaaagtgtaaattaagatggtgatagatcacacatgtgacagtacacacgcatcacacattcgctgaacatgcatgaacactcactcactcctcgtagcagcaggaaaagagcatgaatcgtaacacgtaccgcgcaacaaaggtctagtgttccttagagctagcgcaggaggtgaggccagcataatcgccggggccatagacgtcaaacagttccgagaagaaccccttgttcctcctgggattgtgccccatgtcgcggcagagctggtcgttgtaccaggtgtggagcagcaggatgctggagcggcggaagtaccttcccgagtacctcttgatgcacttctcccacgcgaggacgtcctgg

SEQ ID NO: 58805 - DNA, 314 bp, Zea Mays
gcttgctgtgctcagctgctatggatgaagcaaaccttgagagattttgactgtgagtttaagagaattccattactttgtgacaatgagagcgccatcaaactagccaataatctcgtgcaacactctagaaccaaacacatagatatgagacatcattttctgagggaccacgaagcaaaaggagatatcgaattatgtcatgtgaacacagaaaatcaactagctgatatcttcacaaaacccctcgatgagactagattttgcttccttaggagtgaactaaatatcttggattctcataacttaacttg

SEQ ID NO: 58806 - DNA, 1024 bp, Zea Mays
aaacattgaagatctagtgcactgaaatatctgaaacaaagatctaggcactgttgaatcggatgagttcggatgaatcggtgggcgaaccgatcgagaggggaggataacctcagacgtggcaccatcccgcgtacttagccaagcgtggccggagatattcaccgccggtcgccgtgactcagtgattttccgccgcggtgtagcccatgccttgctcctccctcactgtgtctcttccctacttggtaaacatgcgctaacgatgttatccgtggtcgtggatagtaagtcggaccgccatgcctataaatagtgccatgaaccccgacgagacacccacaacttcaccagtgagtttgattgaagcccaaaattcgcactgcccctaccacctctttccaaattgagtgtgcatgatgaatcaatagcactttgcgaccgtgtagctccaatctcacctcccaatttcaccagagctcgtcgcagcgacgttttcccccttctcggtctccggcaagtggaagttctccgcgctccatggccggaccgttctggtatggttatgtgcttctcgcatattgttttagtagctctgcgtacccatgatgctcatcgtggcaaccatttgaccaattcgggcgtgattcaatgggaacgcgtgctcgacgtcgcggtttctgccgtgcgcgtgggtagaacattctctatgtttgcaagccaaattgaagctcgttctgggtttgcctcgggtcggtgatgctggcccatcagttaatttgggcagtcaacgccggtcatggccagtctgagccgcgtggtgatcgacggcgagcgcaccgtggccatgggtctgtttggagaagaaacaaaactcgggggacctctgtgtaattgtcacagagatgaggaatagtggctaggggttcttaacgagttatccaagcaatcgggggcctgtgtgcaaatccgccaacgtgggcgcgcgcgcggtcgcgttcccgttttctgttcaggttgggcc

SEQ ID NO: 58807 - DNA, 628 bp, Zea Mays
cgtgagcatacatacgatggcatggcactctgtatttggagttggacaaccctggtctggtccctgaaaggcagagacatgtcgaattcagccatgatggctggccttgaccgagtcagctgtacggagcgtgagcgagtgtatctccaaatatacatgcggtttccgaaagagaatgagtgttcattgctattatagctgtttaaaagtgcagataaactaactgaaagggaagatgtccgattataaagttgaacatgaattcttgtcgttgaattttgattagctgaatattgtttatcgattgaaaaaataaagcaagaatcagacgtccgtaatttaggagtaatagagagtatgaggcacccaatcagcgccgtatacatcctacctggcagtacctcgtcgctcggtcgctgtcacgtttctcggtgtaccgtgtatccatacagtccagaccgtctccggagagcttgtttatctgttcctcacatgagatgaacagtgttcacgaggtacaagtataacaaaacagcaggttgccagtttgtacgtacaccacacatacacataccgcggttttttttctatgtgaccgagactctatacactttcaagtacacagttg

SEQ ID NO: 58808 - DNA, 483 bp, Zea Mays
ggcaaaaaagagcgcctagttaccgagcactagcagaggcaagggcaaactagagtatagggaggaaggagtaggcggaaacgaagcaagggaagcgtaagcgttaggagacgaggcgccgagggaggcaagccgatcacaccaaacgcttcgtgctgctgccccgtctcttctcatcgtgatctcagggcagtggatcgatctcacgtcggaggcgaccttcttaggcgcgccaccgccatccgagccgagccgcagcgatccagatccaggtacccccttttggaccgcccctgcccctctatccctcgccccatcggcgtccgcgtgtcctcgtcccctgagacgccaccggcgtggagatggagtgacgatccgatcagatccgattgctcgttttctccgagaatctctcccccttttgtcggttgtgagctctgaaagtcgaatatgccctgtttccctccaatccatccagttggc

SEQ ID NO: 58809 - DNA, 531 bp, Zea Mays
attttagcaaacaacccgccggatttcttcgggtctagtgctggaaacactaaattttggaactaagataggtgaagagcgagctcaaagtgtttgagaggtcggacaccagcacattaatgttgcagatcaaatgagtcgctgaaaatgacgagcgcacctcttgattcacattttcatttggcatcaccaggacaaacttgctcatgtttcaggaaatagccatcttgtgatagtttagatgccctttgacaggttcggatcataagttcaccctttatctactctggctcatctggagttctaaacagcttagaagcacatgacatctaccgttcttgcttcatgaggataataatcttcaggagcataaaacatctaccagcattgctaggaactgaactcatcgatacagaattgaactcataattacaaaattccgcccactctaactgcaggatcaaggtacaggaaccagggcatggatgttactgtacatgccaaagccatggctcctcagctagttgacat

SEQ ID NO: 58810 - DNA, 611 bp, Zea Mays
ccgacgaacggagagaagattgtgagtgatatatggggctatgagaacatcgttgagaaagaacggtccagggagcaccgaggcacctacagaggtgaccggaaaagtggaactgtttccaacgacgatcgaggtagggtgtgtgaggggaggtgagtgggagcgagatagcatgcctgtggtgggagtggtgtgataggatgctccggagtcgatgacctagtcagatggcggaggggccaacgccatggtgcgatagtatgtggcggcgagggcgatagggtcccagcctccagcgaacgaaggccacgtcgtcgtgggagacgacccctgtcggtacccagaatcaggggtaccctcttctacagtatgaaggtgttgtacatctacgacgtctccaggtcacacggagaacggctcccgaccccaccgcatgggcaggtctaaaggcaccacgtggcaaggaaaggtaatacatccaggatgtatcattgggtccgaacctccacagtaggacatcggacccctgtgcgtacaagcccggagctcccaagaaggcatgtcgggtccctcgggtaggcctcaggtccctccgagtaaggtccgggcct

SEQ ID NO: 58811 - DNA, 1112 bp, Zea Mays
taggcccgactagaccctagttttgacagtgcatctactgctgcattgcgatccctttccatgtgatggaattccaggccttcgaatttatcctccagttttcgtaccgcgacgcagtagctatccattgagtctgtggagcaatcctagtctttgttcacctaactgatgactaatagagaatagccatataccattagtctcttgatgcctagtgatatggtgatgcctagcccatgaattaaggcctcatactctgctacattgttggaagctgggaacaggagctgaagcgcatatttgagttgatctcctccaggagcgatgagaagaattccctcccctgccccttgtagcctcaacgagccatcaaagtacatcttccagacttcagctacctcaaggttttctgggacctgatgctcagtccactctgatatgaaatctaccatggaccgagtcttgattgcggtgggaggtcggaactctatatcatgagctctgagctcacattcccacttggttgttctttcgactgcttctttgttgtggagtatatctcctattgggaatcccgtgattactatgactttgtggtcgtcgaagtagtgtcggagtttacgagcagtaagaagtactgcgtatagtagtttctaaacttgaggataccttatctttgagggaccaaggacttcaatgatgaagtagacatgatgttgtaccgggtatgaacactcttcctctacccgctcaactaccaatgcagtgcttactacatgagtcatgcaggagatatacatcaataggtcttcagctgactggctagctgtagcccgacacggtggcttgagtaccggtggtgtggtcaggaatttcttgagtgcttccaggacttctgtagtccactggaatttgtctaccgtcttgagtagcttatagaatggcattcccctttcaccgagccttgaaatgaaacggcttagcgctgccatgcaccaagtgagcctctgcacctgtttctttgatcgtggtggttccattctcattatgacttcaattttttggattagcctcgattcatcgatggctaatgatgaacccgagtagatttc

SEQ ID NO: 58812 - DNA, 736 bp, Zea Mays
gaagagacgggctcgggctcttgaagagctcgtctcttgtatattttttttcacttaggtccttaaagacccctcaagaaactccatattaaatggagttgtacatgtcctaaggattgctcagttaagttttgatacgcacattacttttccctggtcattgtgtcatcagcgaatatatcaaacaaaactgaatggagggagtatcaattaaaactgaatggagggagtaataaataatggggcacgtaaaaatgcaagagagccggcacaatgcacggtcgatttggcgtgcgctcgggctcagcagctatgccattgcatcgtgcgcgtgcccctaaacatgtaggcggatgtggtcgacattgtgtggacgtctgtggatctgtcctgtagtccccttccgccgcccgccacgttctttttgattgtaccccctgttgttatcgattaatttgccagcaacaacagtgatgatgttgattggagggctctcactttcgcagagatcacttggatgtttttctcggcaaaacaccaaagaaaaacgaaaaaatggtagatgacaaatgaaacaaacgataacaaggattttccctttttttctctggccttcctgtagcgtacaatatgtttatatatgcctgctctaactgaagataaaaaccaatctaatctaaacaataggaactattttatcctaaataataggaactgacttagtctaaacaacagg

SEQ ID NO: 58813 - DNA, 954 bp, Zea Mays
gcaaagtttgaagatttgccgacagcgaccgaggtctctgtctgccaagccaaaattgttattgtggatccttttgaagacaacgatgacgtcaacatcgaggaagatagcaccatcattcaaccaacaaagcctagccatttgttagatacaagagttgcattttcagacaaaggcaactagggaccttcacaataactttggttgttataattttgcctatcggagaggtgctctatttccgactcttgcataccgaagcaagtggctgaatgagtgggtaaaggagtggtcttacatgaagaatgatttgaaagagcgacctggcataaagggaatcattcatactcctattcttacttgcttcagttataaaaaaccagcttgttatatcaacttcaatgctcaggccgatatggttgccttcaatgctgtttgtacacatattggaataagggaacgtgttcaagagtatttaacttttaaaccatggttgtcgataccctgaaactagggtacgctctcctacaatatcaaaacgcagtacccacacgattatctctaatcatgtgcaaaggaactgagtagctcgactcaagtcatgactcgcccgaggctaactctaggcaggagacatagtcacgactcacccgaggccaaccctaggtaggagacgtagtcgcgactcgctcgaggccagcctcgggtgggaagcgcatccctaactcgcctgaggccagaagagcatttctgattcgctcgagggcatcttaggcaacgctttgggagctatccacctcggccaaccactccaattccagaatggcgcatgtccctgccttatgtgtgggtccggtgctgccacgtgtctagggaggcgatatgctcaaggacttcaccaacgagtctaaacccccatgggtgtgtcccagacccccatgtgcacaatgtgga

SEQ ID NO: 58814 - DNA, 423 bp, Zea Mays
cattaacaagcggccacaccctataagcaatatgctcttgcaccaaatccctggtgccaatgtaagtacacaccgtgttgaaggccatcaaacatgcttgcactttgttcccacttgcgatcgatggcctcctgatgccgaagcgtgaccgtatagggcactagattataccactcatatcctctctcttactcagatcattcttgacataaaaccattgcttcatccaagagcccgaccatttcttttggaacgttggcacatggcacctcacatcagaacggtgcacaaaactgtagcatccgaagttgttatgatactgctccttcccaattgccttcgtctcgtaggatagttcatgaatgttgcagaagcacttggcatctggctccagcccttggatcctcatagcccaaataaaga

SEQ ID NO: 58815 - DNA, 317 bp, Zea Mays
gctgtctacaccactgctgcccgggctgctggggcgactgaagatgtgatgactgtatatttgcccatcgtccttgggcaagatgcgctgcaatgactacgacacctgccccgacactgcatcgacgattggagcgactttagtcggtgttttatcgccaacttccaatccctctccgacaagccggcgcagccatgggacctcaaatccatcaggcactgaggggatgagactctccggtcatacctcaaaaggttttagaccatgataaatcgtatccccgaggttgtggaagcagcagtgatcgaggacttcta

SEQ ID NO: 58816 - DNA, 850 bp, Zea Mays
ccgaagttgtggacgaatttgcgatagtatctcgctaagcccaggaagccgcggactgctcgagctgaccgaggagccggccactcatggatggcctacaccttggccggatccatggcaacgcccgcctcagagatgacatggccgaggtatgcgaccgaggtggcgccgaaagcacacttggtgcgcttgacgaagagttgctattgtcgaagcttggaggagatggcacggagatggcgcaggtggtcggcccatgtattgttgtagattaaaatgtcatcgaagaagacgaggacaaactgacgaaggaacggtcgaagaacatcgttcatgagcgcctagaatgtggccggcatgttgcagaggccgaacgccatcaccaggaactcatacaggccatcatgagtacggaacgcggtcttgtgcacatcctcgggccacaaccgcacttgatggtaacccgaccgtaagtcaagcttggtgaagaagcgcgcgtcgtgaagctcatcaaggagctcgtccaccaccgaaataggaaaagcgtccttgacggtgagagcattcaagacacggtaatccacgcagaatcgccacaacccgtctgatttcttgacgaggaggaccggcgaggagaacggtgagtcgctacggcgaacgatgcactgctcgatcatggcaatgcactatcgctcgagttcgttctttgtgggcgaccgggtacctgtacgggcgcaccgccactagggaagcatcgggcttgaggataatgcgttggtcgtgaccccgggctggtggtagaccggtcggctcggcgaagatgtcggcgaaggcacccaatggctcgtcg

SEQ ID NO: 58817 - DNA, 409 bp, Zea Mays
ttacatcgaaccggccacgattcttgaatttggtgaaggggcctcttcggctgccgaaataaatgaaactgttccgcctgcgcagaacactagagaaccgaccataatgccgaagttactttcagttaagctagttgaggcgacggctgataaggctgaggggtcaaaaaatggagaaatatcaaagatgccagagattttgagcccttcaacagaggcaacagtgccgaaggcacaaaagagttctgccacaactcctaagaggagaaggatggcaaatgtgctagatgttgtgctagaaacagcaaaaaccttgagttctactccttcaagaaaaaatgccaaagcttcgaaagcgcaacccgaagctgaagcaaagcaggcagaagttgaagctgcaacaattgaa

SEQ ID NO: 58818 - DNA, 782 bp, Zea Mays
gtacaactcaacttccttatttactttacataaggacactacttaaactacactactctaattatcttcgtccttggccgctcctgctccactgccagcctcgggagaacgttcatctgcgaggttcatggaaggaggggctccaaaaaggtccaactccccatcaggtcctccactagctgctctagatggtccggctcccgttgctgcaacctctggtggcacattcggatgtaaccggtcatataacacgtgcacctcttcatgaagggtgttacaatacgcttgcagattttaaagggatgcgcttagttccgctacccgggctagagcatttgcctcgcagtcccaggcgaaagagcatgaatttacgacccagtcgatagccatgtctcgttccacgatttcctgctgcaagagattaacctccgctaatagctccgcaatgtggcggctatctcgcgcatgctacctattttcatggcatagttctgacatgagtcgctccaccctggcctccatatcccctattggatcgttgcttccactgctgctcccctcatgtctaggagccaactgatatcgtggcacaccacgaggtccggttgccttttgttgggtggtcttggtacgcgtcatacctccataagaggggaagatttatttagtgtagtttaaacatgatgaatgcatgacctaatgattatggaaccaacttttcatagatcccttatctcctacgtatactattatttggcactctattacccgacttcaaaaga

SEQ ID NO: 58819 - DNA, 562 bp, Zea Mays
gtgtgatgagttgagcaagatgaaaatcgaagtgattccttctggtgctttgtctcacctttccattgagccaactttgcaagaccagataatcatggcccaactcagtgacaagaagagtgcaaattattaaggagaacctccatcagaagacaaagaagtataagtgtttccgccaagatgggaagggtatattgtggtttgaagacagattggtggttcctaaaagcaaggatctcaagaagaaaatcttggatgaggctcatctctccaaattctccatgcatccgggaagcaccaagatgtaccatgatctgaagcccttgtattggtggaccagaatgaagagggaaatagcccaatatgtatcggaatgtgacacatgtcagaggataaaggcaagccacttaaagttagctggtgccttgcaacccctatcaataccttcatggaaatgggatgacatcagcatggatattattgtgggtctgcccaacacctctcggcatcatgattcaatttgggtcattgtggaccgattgacaaaagcgacacattttct

SEQ ID NO: 58820 - DNA, 610 bp, Zea Mays
tcatctccaggagtggagcaggagacaggggaccagcgcctggtgatccacgagcacgaacgaggacatcgtcgccacctcatacccttggccctagtgcatcgtcgagatgcgttgtgacaccgccgagacacgtcaccaccgcgcccagacagcatgcccttcacggctgtgctagtgtgccgaagctccaagcctccagtcgccacgtgagtcatgcgcgatgcctagcaagtagcgcctaaggaccaacccccgccagcacagcaatctgtaatctccaatttcccaggtttctaattgtgatttgtaaaccctaactgttagatttgtgcctaaatatgcaattgttaatccataatgcttgtagatatttgttttatcgtatgaaataatatatacattagatagaattgtatataattttttttacgacacacactataaaaattctaggtccaccactgactcaaagcacaagaggtttatcctagtttgggtgtctaaaccctacgtctagcggcactattattcgagttacgaatgttcagtcgagttcttgtattgaaggaagagaaatatacaggggtagcattgttctactcaaggg

SEQ ID NO: 58821 - DNA, 453 bp, Zea Mays
cttttttttgtaaattgtttacgacactttgcacagttgtttatgcttaatatgaacatgcagtaaccaaacggtccaactgattgtgcgctgactagtggatcccatagtcctgcgccgctccccccgcgggccgatcgagccaatatggtcaacgagcgagacccaccagatcactttcaattaactccgctcgggtccacccaaaccctaaaaaaatcagctcctccccgtcgccgtcactcgctcttgcgatcgccatcgacggccgcccccaccgcttccacccgacgtaatctccacgcttcatcgattcaccgccgtcgttctcctcccctggtttgtttcccctctccttcattcgagttccccacattcttttgcatagttcagtcgccaaaggccatcaggttcgccacgccccttctacatccctcccattgattcgaaatt

SEQ ID NO: 58822 - DNA, 1062 bp, Zea Mays
gccatgcagtagatccaatctgtgctcaaagctcagcagctgagagactaattcacccactgagatagactcggtgtgcacccccaccgccgtcacgactggattgaactccccatcaaggccagccaggagataagaaaccagctcttcatcatcaactttctttctagtcgaggccatgtcatctgccagggacttcatttttgcaacatactctgtaacagacatgttacctttgcgggtcattgcaagtgcgatcctcgtgttgacggtcctcgcacgtgaggaagatgcgtacctctgcacaagttctccatacacctctttgcggtgtttcgagtgtggccacttgggccatcacctcccgtgacagcgacgtcatcaggaacccaagcacctactgttccatggctttccaggcagcatgatcggggttgggcaccttcttgaccttctctccatccttggctttctctccacccttggcttcaagttctccaggtggagtgtcggtgccgtcgagatagccctgcaactgtgctcctcgcagtatgggcaggacctgcgccctccatagagggaagttggtcttggtcaatttttcagtgatgacctgaccgaacaatggagatgcgacgttgagcgccgaggagctcgccatgacgacgggcaagactcaggcgacgctagatgtatttttgtgggagttggctctgattaccatgaaagcaaccagatatgtttaggaagcgttctcacctctccagaggccgcgtagctttgttaatgtatgcagagaagagccctctatatggcgtacaaatcaccaaccgaaatcaaggagatgctggtattatacctttctattttcataacaaccatatctggactttcctatctttacaacccaggaactttctacacaattttatcgcatcaggactccatgatttcggttggtttgtttccatacaaagcatatgttacaatattatctaacaagcataactagagcacactgctgcaatagagcctagtttgttttcctttttatgggctgta

SEQ ID NO: 58823 - DNA, 308 bp, Zea Mays
tgagagatgagaagggtaaaggcaataagaagcaaaagcacaacaaaggatgaggttacaaactcgcgagccaaagaagaggatacgatcaagagaaagaaggtatgagacggaagagggacgattttaaatggcaggtatgagacaaacatcaatgtaggatatagaggtgccaagggtgcatatgataataattaaaaagcataacaaatgatatagttaagacaagactcgcgaaatgacaaagtggagaaaacaatcaagggtaagatcggtaaggttccaacagaagggttgaagtaaagatt

SEQ ID NO: 58824 - DNA, 485 bp, Zea Mays
tgggattgagccgagacttcacgaataggtttatataggtgaatattagtgaagtgagtgcttggtttgaatttaggcgaagaaatagggttttgggcactcggctcgaaaacgatcgcgcaaaacgggaattttggtgaaatctaagcctgggatctcggattggtgtgaaatttggcaaggatgttgctggaagtgttgtgaaagtgcctgaaaaatttgggttcaattggagcaagtttggctggtttggccatttcaccgagcacgtggtgtgcggggatttagggttttaggaaattggccatttgtggtaggaataccctcccgaaggagccaaggacctgcagggatatgaaatagggacaagggaacacaatccaccaactggatgcatgggatttcacagaattttgaaagatttgcaaaaggggtgttcactgcctaagagacagagggaaggagaggcaggggaaatggatcag

SEQ ID NO: 58825 - DNA, 309 bp, Zea Mays
ctggattgcgcgcattattctggagttctataggggtttctctgcaaaattcaggacctcggcgtaatgattttataaaagaccaggactgcaggttgataactaaaaacatcaagggcacttttacaaaatggcacggtcgaaggggtatcaacgaatcctggccgtccgatctcgaccgatcggcccagattagaatcatgtgatacaacacttcgcaatccgtcctggccgctcgatccggttttaaagtttgagagacgaccacgccccgacttaatccaaatcactcatcaccgaaccgacatc

SEQ ID NO: 58826 - DNA, 642 bp, Zea Mays
ctaggtataagagatatgtgtaatgaacgctagagaccaggtttatacgggtggcccccatcggtctggaccacagatggtgctagagaccgggtttacgtgggtgaatcttaccagactggatcacagataaaagttatcctattacaaaggaagagttcaatctcatgctaccttatagatggaaggtatgaggctgacctatgcagaacacacgctgcctttctttagagccaaagggtaagtagtggctcattctaccttggctatagtccagggtagcgcttgaaggaagttgtcggtggctaccctgaacgccataagcttgtatcgtggtcgatgagcggggccttggtgatgccgaaccttgcaggaggctgacacagcaagctacacaggctttgatgctgccccacccactggattcaaaaggtaagaaaaaccatgtgctgcccctggtgatggtcgatgatagggctcagttggaggtgacggtagcttagttgacgtgggtgtagcagttattggcactcctcctgcctcgctggagctgctgttacccttcagacacgaaagggtaagtagtatccctttctgccttggcggtagccaaaggcagcacttggaggaggtcatcggcgg

SEQ ID NO: 58827 - DNA, 788 bp, Zea Mays
ccccaatccgcgatatgctctagctacagccgcaactgctctgtcccctccgcctacctctgttcgcatggccctccgcgacccagtctggaaacatgccatgcaggacgaatttgatgctctgatagccaatggcacctggacatcattctgatggcacattagaacgtagaaaagctcgctgggtagttcgggggtttactcagagagcaggagtggactttcattagaccttttctccggtcatcaagccaacctcaatacgcactgttctaaaacttgcagcagttcgtcagtggccagtccatcaactcaacgtgaaaaacgtctttcttcatggtcttctttgtgagcgcgtctactgtcaccagcctaggggttttgttgatccggatcacccagctcatgtttgtcaacttgtgaagtccatttatggccttaaacaagcgccgcgtgcatggtttgagcgcctgggcgcttatcttcggcacctgggattcacttcaactcggtcggatgtctctctgtttgtatatcgtcaaggtgtagatacatattatatacttgtttatgttgatgacatattactcactgcctcaacgatagactgctgcagcgtattattggccacctgtaatctgaattcgcaatcaaagatctcggtgatatccacttcttcttgggagttcagattcaactagatcattcaggattcttcctcacacaaggacagtatgttgaagatgtcctcgagcgagccggaatggtgaactgtaaatcgatttcta

SEQ ID NO: 58828 - DNA, 526 bp, Zea Mays
ataagccaccaacatcggaccgcgaaatgccatcaatcgagccttgtccatgcgcttagatgctcacccggaagtgccgatggtgtctggggcttggccatggaggtttagcgaacaagttgcaaagaattcctcaccgaccttcgtttctgccacgaattcgcggttcaccatgggcatgagaccatgtgcctccacctcgggtaacaaactatccatggagttcgccatcctttcttaattgcgtagaaccatttaggtggagatttggggattaggggcaccggcttgaccgacaccggtgtgcccaccaccgtgagtggcgtcaccggcatcgctgtcgggaggtggaagaaatgtggaagtcatcgaatctgaaatggaggaataggattagaatggagatgacacttcggccatggttcatcatggtcattggtcggtgagtggacgtatgagaatagatcgtagcttcttgaaatctggatcattgagtctccgatgaacgcaccaggttaggtcttgc

SEQ ID NO: 58829 - DNA, 1137 bp, Zea Mays
cccagctctgattcgatggtgtgccaacgctgaggagaggtgtgctcagagtcaagccaatctgaattaggtttctgcattcttgtatggtgcccgaaccatgcactcttccttgaatgctcagcttgattcagagaagagagcccatgaggtagattcttttgattgttcataatatctttgttttgcgcttttgcttggatgtttagtactcttcttgtctgcaggaggagatgcgaagacttcttgattctcgtgacagtctggacaaactgcaccatggtgccagcagctcccttactactttggagaggagtcatcgctttactatgtcagagctttaccaccatagggacgagttgaaggttacttagaatgaagtgtcacagcttaataggttactgtcttcaagagattctgtcatcagagagttgcgtgcttcgaagaaacttttttcgcaggagttggaaattgctcgtcacgacatcaaggtcttagaggatgaccgtgttattatgaaagcaatgtgcgacaaagcaatggacaaagttgttcgtgctggttgaatcctgatgaagagacctagcatcgtggtgcctgaagacattgttgctgccgtgctcgctgcgtccgttggtacgagtaaaccttctccttctggtgatcctgctggcaaggtcccttgtgaggacgctcctgcacagtaattgtgtagtgaaaacaaattttgtttcgttcgaacagaaaacacttttcattgagttggtatttttttgtagagatggcgcacgatagtcatgtatgtgtgaacatgctgtatcggcttaaggtttctctgacttaagtcgattactctgttagcagggtatagtaatcaccctaagttatgtaagcatgagcacatcacaccgacttaagacgtttctgacttaagtcgtttgctccgttcgtagggtatagtaatcaccctaagttatgtaagcgtgagcatgttgcaccgacttaagacgtttccgacttaagtcgattgctccgttagtagggtatagtaatgatcctaagttatgtaagcatgagcatgtcgcactgacttaagacatttccgacttaagtcgattgctccgttagtagggtata

SEQ ID NO: 58830 - DNA, 332 bp, Zea Mays
ggaaatatttgtatcactgtcggcctgggatggccggaggacagcatcaactggtggggggcgcaagcttggagatgcgccgcggaaggaagactgattatctcgacatccccctcaaggacaacattaaaggatggcgcttggagtggtttattgtcgagaatcacggaaattctctccccccacggtcagggagacagccggacgttcgtactccaagctggaccgagtcccccacaaaccaggatgtggctgaggcaggagttctgctagctgaggtcggattgttgaaggaaaggggtctgactgctgaggctgtggttgctgacttt

SEQ ID NO: 58831 - DNA, 380 bp, Zea Mays
agggtacgctcaacagctagggttactcgcgacggagaggaagccgaagctgctgaaactgctctgatctccgaagttatgaggcagttgggattggttgtgactgaaggcgctgctgacgaagaatcacccgttgccgaaaccgagcaggcagatattgaagagggtgatgctaatgaaggagagattgattataacatcactttgccatcgaagcccagccatctggattttgggaaatcgacagtgtctgaagctgatatgactatgatgatgaagctaggctacttcagagaagccgagaaggggttggttcgctttggcagggaagagactatcccgaaaccagaaaatgatgaagttgtagtttttaagagctt

SEQ ID NO: 58832 - DNA, 711 bp, Zea Mays
gtggaagcctatgattgcttcaagaagcagaaattcaatgttcatgttgcgtatctgttctcggttcatgattttatggcgtatggtattttctctggatggagcgtgcatggtagattgatgtgtccttattgtgctaaagatacatattgttttcgtcttagtgctggtggcaggatatgttactttgattgccatagatgttttctacccttcaatcaccccttcagaaggcaaagaaaggagtttaggaagggtaccatcgtcacgaagggaccacccaagcgacatagtgggatagaaattatagaagagcataggaaacttgtcctagatgagagtgggaaaaggtatcaaggttttggtgaggagcataactggactcacatatgtggcttgtgggagcttccttatgccaagtcattgattttgatgcacaacatcgacgtcatgcatcaagagagtaacttttgccaagccctcataaatacatgcatggatttccctgataaaatgaaagacaatgacaaggcacgcatggacttagtcgtgatatgtgatcgtccaacccaagtgcttagagaaaacggaggcaaaccaaaagttgactattgtctgaaacctaagcaacggaaagaagtgatgaagtggataaaggatctgaaattcctcaatggttatgctgctggttttagaagatctatgaatttg

SEQ ID NO: 58833 - DNA, 380 bp, Zea Mays
ctcgggacgagattcctttaaggggggaaggctgtgacaccctagtgtcacctagggtttctctcaaaatgccaaaccaagaaccatcattgtatgtgaaccaaattaagcacgagcatcaaattgacttaagaatgaagaatccaccaagcatatacttaaaagtatcatgatcaaaacaaatgggtctttcaaaaaggtaataatgttgcaaccctaataaaaaccctaagtgagccccatgagcaaaattcaagaaaataaggaaaagggtatgaaaaatttaaaatcatggcttgagccaattataaacattgaagtatattcattaagcaacaagaaaggttgagaaagcttggccaaaacaactcaaataaaac

SEQ ID NO: 58834 - DNA, 435 bp, Zea Mays
ttcctttgctgattctggtggatacgaaccccatctagattgttttggttatgggcaagttctcgtaggaccctagcattatccgcagtggcattcaccagggcaacaatgacgtctgccagcgtaagcggaactggtggcggtggaggattgagattagtttctgcatcatcgtgcgatgttctggccccatccgaacctcgagtacacataggcatctgaggcaaaactaagctcatgaatatacatccataaccgcgaaatatattacataaaactagtacatggagtattattcattacaataccaaaattggcatagcttacaaccctatgcctacaacagaggtcacaacatcctcacacatgccacactaaccctttgtatcagtgctacctcagaaacatcactaccacctaggtactcaccaccag

SEQ ID NO: 58835 - DNA, 1048 bp, Zea Mays
caaacggaggccaggacggggccttccgccattgctttcacccacccccaaaccaccgctaccactcgatcgagacagcagagggagatagtaatacggaaaaatatatttttttaacctttagtcatgtcgctcgcctcccaccccacactagtgttcttttcatcactttcacctaaaagccctaacagtgccacctctgcggcgcgacttttcgcctctacggctgttgatattcctaccctctgttccacctccaagttggctccgcagatctcccctttttaggacaaacaatccatccaccaccgccctacacaccctccttcctaaaaatagtagccggcgccatgcaaatgcgattccccacagctccccgttcctgatggagctcctccgcagatcaatggacctatgagacgacgagcgacgccagtcagcaaccaggtcgtccaggtaccgcaggaactcccagcggccacccctactagcaaccactccagtctccagctgagctgagctgagcaacaaagggtatacacttgtaactctatgatactctccatgtccaagctagctcctttttatcttttttcctcatctcttctcttcgcggccgcttcagcagttcagctccattccaacgcgcggccgctgcctcggctgccaccgccgagatcagccgccatctccaccaaaggtaggagtatacttgctcgcagcgcgccagtgaggcagtgactgcatgctgcctctccaagaaaatagaacccatcccccccgcatgtataatttgactgacgaaaatattgtttcttataagcagcatcatttttccttttatgcataaatatgaaagatgcatcgctttcacacgaacatggacaggcaaagaaaatatcgagcagggcacctcagatatatagatccccaaaatggcgcatgtaatcatccgctgcgtcaatccttcatgtgtctgtatatgattcctggatgccagcaggttaatcgatggacctgcccccaaaccccgagagcccgggaggcg

SEQ ID NO: 58836 - DNA, 403 bp, Zea Mays
cttggagaaggcgggatgtgatcacatcaagaccatggcccaggccgaagctgccttctccgcagatgacacgaaggatccttcagctgaagcaaccttgatggacgggaaattctataatgatgtctaggtgaatggtggccgagagatggctcatgaaattataaagaagagtgaaaaagacacccatgacgtccggatagaagcgagacaagctgaagaacctacagagcgagaaaaacgtataggtaatatcttttgatattcaactttgacattttgtttttgtggcttcggactaattaatttttcccacttcagctgaattatcccctccacctgtaacacccctggtgttactataactaaaacttgagcatggcatcataagcattggcatcgc

SEQ ID NO: 58837 - DNA, 432 bp, Zea Mays
ctgtgggggtgcagtgcgctgcgcgacatcaaattgtggttgatggggacgcaaccaccaacgtcgcaaccgtgcgagattcgggacgtcgttaaatgctcgttaaacgacgcgacccaccggccagtttggaaggaaaagcatcggaatccttcacatggcatgcagtggcagcttattccctttgtagtggccgattaattaataccccatgcatgctaggtcgccgtcagtgtgcagtctacgatccacgccaagtgctactgtgtggtacggtacaccgtgcgctgtacacagtgtttcgcaatggctgatcgacaagagcatttgttgctgccagcacgtacatatcactgagtgtgtatggatcatgtgatgtgaccttggctttgtcactcccgcaataatcgttcttgggggtagatgcttttt

SEQ ID NO: 58838 - DNA, 724 bp, Zea Mays
atttaaaccgacgagacgggaccgcaccgtggaagagaatccgatctagcggcgcgcgacaaaccgcgttactctggggcaggccgggaatcgaatccagagaggaatttgactacagtgggaccgcgcacaattcatgcgcaaattgaagtcgtcgtcccaataatctactagtcggatcagatgggcctgcacgagccatgctttgctgctcacctgctccgcagactacaagtgtatgcaggagcgcgtcggcagcgcggtccacgtggtcagcagcggctatatatggccaaataaatacatccagctaatgcggctatatcagcattctggtctggacccatcagtaggtagatcccattcgctgatatacttctttagttaagcttcttgtgcctacatttgttttcgcccacacaagtaaaaaaaccagcaatgttttactgtcgaaacgtaggaactagacaaagttgaccattaaactgatttttttataagtaagactttattaatttcaaagtgtcgcatcaacttgatataaagaattaaaatttcttcccgcctctactcatcaataagcatacaacctaaacaaaagtagcacacactccagtgacaaccaatccgaccactagattgtcatcaataagcttgaaaaaaaagaccttagccacctgccccaagaaacacgtagccaccacaaccgtagcttgctggtccg

SEQ ID NO: 58839 - DNA, 1656 bp, Zea Mays
atttactgagtgtcaaaaataaaacaatcgataaaaaagctctttgccgggtgtcaaaaaaacacggcaaagaagctttttgccgagtgtcaaaaataaaacactcgacaaagaaaccatttgctgagtgtttgtttttaccgagtgtatattgttaggcactcggtgtcggtgtttatgagggtggtctggctcgtgaagacgctgatccgagtcacctggctcctatggacatgggcgagggatcttcagccttagaggtggctaccacggaggacccagcccccgagggtggtgggggcaggctccccttctgttgtttccatggacgtccacgttggatcgccgccagtccaatccgaggaggccgcggtgacacatctatctacaactctcactcgtctggtcactttagaggccagtgacccatacgctaggagtctgccgcttgctgacgaggctaaggtccctccgagtcgtgcctttgatatcgttgtcgttgacatcccctcatcaagcaacgtatcaattctccctgctttgggccttcctttgttcctctccaatcttcaggtaaatcaacttccgtttttaccattcacgctggcaaactagcttttttgcttatcttttcataattacaggaagttcttggttctgtatctacccaactgaagtcctgtggggctcctgtcccgaccaagtttcatctttgatgcagtggaactctctactgcttcaaaaacatatagatgatccgaaggcgtcaaacattggttagtgaactttcttctgctgctttatcatatttggctcgatgatgctctgatattgaagagaagtatacccagagccaggccgacttgagccaaaactctactttcttggacggtgctcgctccctgaactcctctctaaatgcacatcttgactccgagaagatggcacatgaggtaaactttcttggctgcttctgtcttgcttcccttgcttcgatgctcattggtgttcttccttacaggagaaaaaacaagcactcattgcctctcgtgataatctggacaagctgtaccatgatgcgagcacctccttgaccattctggagaggagtcaccgttttaccatgtaggatttggaccatcgtcgtgacgaactgagggcatcccaggatgaagtgtcccgacttggcaagttgttgtctaccaaggattccgtcatcaatgagctgcgtgcctctgagagacttgttacacaggagctggaggtcgcctgcctctcttcaaggccttggaggatgaccacgtcgttatgaaggagatgtgcgacaaggccatggataaggttgttcgcgccgggcggatcctgatgaggagacccaacgtcgtggtgcctgaagacattgtcactgatgtcattgatgcgcttgatgccggaagccgtccatcttcttccgctgctcctgcaatcgatgcttcctgcaagaatgctccagcgcaatgatttgcctgaaaaacacttgttcattgagttagcactttttagaggaaaagtgtaacgtgaattctgtgcgcgtgtaattgttatgtttgaactgattgttctgtcagcaaggtgctgaaaacacccctaacaccgtaagcgagatatttctttttc

SEQ ID NO: 58840 - DNA, 354 bp, Zea Mays
aaaaacagtgtgtgtagtccaaaacaacaattaataactttcagcttctatataattcaagaattgccatggtttagagacttgaattattctaacactttaccatttgttaaagttaaattaattaaatgaggactaacaagtagacttacaatttttactcaagtcatttagtgcactaaaattactacaaccaattaacaacgcattcttcacgatgatcacccaacaatttgcgttttaaattagacatcacatgagcactactactttttacccgcgaccataatcatgcgtatctagaccaaaacaagcaaatcaccgggattacgagcttaactaaggccatctaac

SEQ ID NO: 58841 - DNA, 299 bp, Zea Mays
agggaaacatcatttttagtttaaaaggtgatctattgttttgaattctttatattcctacttattagcaactgtttggtggaaaaaggtgccttacaaccttaaactatgtttggacagttctctcgtgtaatttggctaaatttcccatggtctttattttattttgagaaatgatgtggcataatgatgtgcgatgatttacttgagtggacataaacactatctaggtatgccttgaatagaggggattataggaaacctggtatcccaaaatgtcattagctagccctttaacg

SEQ ID NO: 58842 - DNA, 1277 bp, Zea Mays
gttcccaagattgataaccttcgtgagactatattgaaggaagcccatgattctaattactctatccaccctggtagcactaagaagtattaggatttgaagcaaaagtactagtggtacgagctgaaaagagatgttgctgcacatgtggctaagtgtgatgtgtgtcaaagagtcaaggccgaacatcaaagaccagctggactactgcacccgcttaagatacccgagtggaaatgggaataaattggcatggatttcattgttggactaccccacactcctgcagggtatgactctatttgggtgattgtggacagactgacgaaagtggcttacttcatacctgtgagaactaactacacgagagccaagctagcagaattgtatatgactcggatagtttgtctacatggggtgcctaagaagatcatgtcagatcgaggatcacagtttacttctcggttttggaagaagttgcacgagtgcttggacacacagttgaatttcagttcggcctaccatcctcaaactgatggacagaccgagagaactaacaaagtactagaggatatgttaagagcttgtgctcttaaacatggcggtagttgggataagagcttaccatatgcggagttctcctacaataatagctaccaggccagtttgaagatgtccccatttaaggctttatatggtagaaagtacaggactccactgtattgggatcaaactggtgaaaggcagttatttgggcctgaagttatacaagagacagaagaacaagtgcgaatgataagggagaatttgagaactatgcagtcaaggcagaaaagctatgtggatacccgaagaagactgctagagtttaaggagggtgatcacgtgtatttgaaggtgtcaccgattcggggcatgaggagatttaaagtcaaagaaaagttgtcccctcgctttattggactcttcttaatcctaaagcgagtgggagaggttgcctatcaactggaactatccgatcatctcgcggatgtacatgatgtcttccatgtatctcagctgaagaaatgtctcagggtacctgaagagcagctaccactggaggatcttagtgttcaagatgatctgacttatgttgagtatcctatcaagattcttgatacactaactcgtgtcacaaggagcaaagtgattaaaatgtgcaaagtacaatggagtcaccatggagaagatgaggctacttgggagagagaagaagagcttcacatagattttcc

SEQ ID NO: 58843 - DNA, 509 bp, Zea Mays
tgggaagtcagttggtgacttgatgaaggattatcaaccgaggcaatctgcagagcatcattggggaccaactcagcatcaccagtaggaatcaaaactctagcatcaggtgcgctggcctctaaggcgacttcctgacccgaagcacgtgctgctgccatgcaatcagaatgtggaggagaagacccgacgtggacatccatggaagtatgagaaggggaacctgctcggacaccctcggggctgggtcatagctcgcgttgcccacccgagccggatcattactagcaacaccctcggggggctgggtaaacgctggcgccatccttggggatcgggttctctacagcagccacctctaaggctggaggattttcagccacttccatgggaactgagcaatctagatcagcctcttgactcttaatatcgtgctccaaggtcgatgaggcacgagacgctgctcgggataactctaacccaacatcaggcatatcagtgcaaacgtc

SEQ ID NO: 58844 - DNA, 741 bp, Zea Mays
ggtggtttggtttatctttgatacaccttttggtatagaagccagtttgacgagccaaatgacgattggctagatgctattgaggcaaccagtgatgagctgatgggatcctacacgaaggcaaaggacgaagctatgatcgttgccttcggcgctcgaggaaaaagaagactaaatagagtttttgatgtaattgggtttcaaaagcaaggaggaaaaagaaaaattgccacttcgacctcttctggcgtgcctaagccaaagagagccaaggtactgacccgtaggtcgaagctataatctttagaacagacagttgtggtgcccatgatagaggaggtgaagtttatggagagtgccgaagctgtccgagccatgccagccaaagctatggaagcaattcctgccaggcgaagctagtgctaatgcgatagaagagctggaaacagagaaaacagcagaagaacagccaaagctgtcgagccctctagtagtggcagagttaccgaagctatcaactactacgagaacgaccccgaggaagaggaggatggctagtgtattggatgttgttcttgaatcgatgcaatcgccaacttttgcctttgtcgaagcatctggtaagaaaactggagatgcaaggaaagttgttattgcaagcgctacttctgctcatgctgaaactggaccttcgggagctgcgccagtaaggctaatggaagagagtctttcagaaaaatc

SEQ ID NO: 58845 - DNA, 380 bp, Zea Mays
aaggggttctgcctcaggaatggatggattgatgtaccacttacatggtgagcttccagtcagacaaagcccatataaaaaagggtagaaggtataaatgtatgggagtcagaaaaagactaagtgttacgtcaatatacctgcatattttttgacaagtgtgccaacaaatagcacaatctgtggggaattctgcccatcttcgtatatgcgctctcctgggaatagggtggcttgggcaccccacaacacgacattgaccgaagcacctctgttgtttccagttcgagcatggaacatgagtcacaaacaatgtatatgtaagacaacgccaaaatacataccatacatctagcagaacacaaggtaagaacaaccat

SEQ ID NO: 58846 - DNA, 448 bp, Zea Mays
tgaatttccctgcctctggtctgcgcgcatgaaatctggaaagcgcaggggctagcatataaaaattccctagactcaaagctacagtcgcatggacgacaggttgttttctgtaaacaataagggttctttagcaaaatggctaggggtgcgatcctaatccctggatcgtgattcatccatccagattagacgcacccatgttatgatccggggtgctatcctaacacctagatccgagatctaaggcccgaaatcacccatgacccgatcatgtccgatcccaacccgacgacccggatcaagtgcgacaaggggtatctaaacatcgaatcacagtcgtccattctcgatcctacgctacggatttaatgaggccaagacccgactccgatcgccgattgacggacagacggtcacgatctactccccccaacgggtactccca

SEQ ID NO: 58847 - DNA, 675 bp, Zea Mays
ctcagctagaggccctatgcttacccccacaggtcgagtttttttatgttacaaccatgaaatcttgtaaagtttttaagccaaatcatctttggaaacacagatgtgtcctttttgtaattgcatattgttctttgcaattgcagtattgaatcttgtttttcatttgaattgatgtgcagaaaatgttgctagtttagaacagcgtcagattagctgtctacaaatccttgtgctttgtagtttctacaagaacaaaatattttggaatttggaagggatatggtacttttgtattaagcaaacgaacctgtacaaagctgccataatacttttttgacaacttatctaaaaataatttgagtatgtgcctttctttgtcagtgtgcttgcacatattctgatgattatttggcaccatatttgcacatggctgtatttggtactttcttctcatatgggagggttaggttttatatgtattttactaggaacaaattttagaacccacttgatttgaagttcatcggataggaaccttggatgagctggcttgtagaaatgaaatttgatgagagcaaagctatccaatgtaaatagtcatggtgtattttttgtgttttgtgatagttgactatttgaagatgtcaaaatccctttccgcaccactttgag

SEQ ID NO: 58848 - DNA, 894 bp, Zea Mays
cacgccagtagttgggttccaagtgtgagcatgcactttctggcaccttcgacatcatcatcaccttgaaggggaattgacacgagtagagaccatcgtcaagcctctttggcccaccaacatcaattttttctccaaggcatgtgagagggccgatgatgcactcctcgaagaactaggattctaggatctgaaggcttctggaccttgaagggggtgcatgtggcgccaactttgtgcctttttgggcccctgaccatcataagaagatatgtgccttgcattttgctcactcaccaacatgttggtgaagcactctagaggtgtgccccttccctcagatactcttatgtgaaacatccctatagcattcccacaagaaatgccgaacacaattagactcctagggttggtggggatattaattatttctcctaatctcaagttcctccttgtacttgtcattatatgcataaaaagcctcgtgaacattatcctgcatagcaatagccatgctctttctaatggaagtggcgaaaagctctaacaacttttctacaccttgaagggtatggtttgggatcttcaccacacatagagcatccaaactgtcatcatattgatcgttgttgtactggtagtagatgtatcaatactctatggcccatttgttaggaccaaaagccctctttagccatgtttttagctggctatggaaatatccatctctagagtcctcttcatgtgcttcttgttcatcatcctcttccatgggctcatcatcattgttgctatcatggctgttgtctccatttccaccacgatcatcatgtggcccctccttcaactacaccataaattggagttaggggtgcatcccaaggtgcatcttgg

SEQ ID NO: 58849 - DNA, 483 bp, Zea Mays
aagaaaaggttgaacagggtatttgatgctattggcttcgtgtaccctgactattgttacccgctgcgagggcaaggggtaaaaaggaagattgacgctgctggaaaagctgttgtttcagccatcatggttgagccgaagaggaagaagatgaaggttttgactcaccggccgcgttacatcgaaccggctgtgatacctgaatttggcaaaggggcttcctcgaccgccaaaacaaaagaaactgctcctcccacgtagaggactaaagatctagctacaataccgaagctaccttcagttgagctagctgagatgaaggctgataagggtaaggctgaagagtcaaatattgaagaaataaaagtgccagaaattttgagctcttcaacggaggtaatagtgccgaaggcacaaaagagttctgccacaactcctaagaggaggaggatggcaaatgtgctagatgttgtgttagaaaca

SEQ ID NO: 58850 - DNA, 706 bp, Zea Mays
ctcgatttcctacctgcctagtgcccacctctcgagcgatcagcgcctctccatggcgctcaccaagccaccggcggcgaccgatgacgaccaagccgagcgggagtatttataaatggtaacggttagaggtctggggcttgcactcgaacacggagtccggtctccgcctcccacggtaccggcccccgcatccgccgcgtgcatctagatatattcggccatcgtgccgcctaacgcctcaatcactccacgctctctcagtccacaaagtcaccgctcgatttcctacctgcctagtgtccacctctcgagcgatcagtgcctctccatggcgctcaccaagccaccggcggtgaccgatgacgaccagaccgagcgggagtatttataaatggtaacggtaggtctggggcttgcactcgaacacggagtccagtctccgccttctacggtaccggcccccgcctccgcctcgtgcatctatatatattcggccatcgtgcctacctaacgcctcaatcacgccaccgctctctcagtccacaaaatcaccgctcgatttcctacctgcctagtgcccacctctcgagcgatcgacgcctctccatggcgctcaccaagccaccgacggcgaccgatgacgaccaggccgaacggaagtacctcacatcctgcctcataatgctctcgtgcggcctccgcg

SEQ ID NO: 58851 - DNA, 610 bp, Zea Mays
gaagaaatgccctcaagttcagaagatattatatgcagtacttttaactgcacgcaagctccgtcactacttcgacgaccataaagtcatagtagtcactggatttccgatatgggatattctccacaataaagaagccatcggaagaatagccaagtgggcctgtgaactgggatctcatgacatcgagtttcgacctcgcaccgcaatcaaaactcaagcactggttgactttgtatcagaatggaccgagcaacaggtgccggataacccggaaactgcagaagtatggcgaatgtattttgatggctggttgaagctgcagggagcaggcgcagggatcctctttattgcacccgaaggtgaacaactcaaatatgctcttcaattgttatttctagcatccaacaatgcagcagaatacgaagctctgattcatggactgaacattgccatatcactgggtatcaagagactgatggtatatggagattctctggtggttataagtcagataaacaaagaatgggattgctcgaatgattccatgggataatactgcactgctgtccggaaactagaagacaaatttgaaggtctggaatttcat

SEQ ID NO: 58852 - DNA, 1392 bp, Zea Mays
ccaaaatcatctagtaaaatgggtcgaggtccattttccttacaaaggtcatgcgggttcgtgccgatggactgggagcggcgaagggcgagcagtgggacttgaccgagagaccaaagaagctaggtgactagccatggtcactaacacctgggacacacactggcgcgaggatgtgacagagcggatcatgtcaacgatgtggtcaaggactagcgagacacgtgtctaggacatggggattcacatgcggtgcgctactcgcgacggttttggtggttgagcatcaaaaccactcagctctacgtatggcgagttttgctgagtttgaacctcaaaacttagcggtacagatctaacggtaattgaaggcggtgtgtggtgtcgttatgaagggtgcatcgaggcaaagcaactttgtgttgagcgtgtgggcatcagataaaaatcataggagttggtccattttgcacccaactaagtggataggctctatgtatatattggtagtttagactagtgaaataaccctctataaatagatgggtggcctattgtcgatagtgatatctctgtttggctatctctttggcttttgtttagaaaaccctagtttctttctctaggttgcagtagtttagcctgagatccacatatgctttgaactccgtgtgtatgtttttgtattcatcattttgaggaagggtggcctatccatccacaatgttttggtcgaatcatgctcagtttgtgtgttttggttttttattcaattttgtctccacgctcaattccttccttctctctttgaattttggaagaaccatcgagttcttgagttgtggttgatgttggggagtggtgtgaggtgagatacactctttggatcactacatacacccaatttgagcagtttttggtcgtgatacgagttgatcttgttttgaattcgtttgagacagccccaacaaaagcccactcttctcgggacttttgatctgcgcatggagttgtgatttgttcatgaccatacttcacaaaacctcttctcttcctctgcgttaactatttgtcaagtttaaggaaattttgtgcagaatttgaggtgcggcactaccacctgtctacacggcactgccatggccaagcactgccggcccacagagcggcactatcgcttgcctgtttctgcagttttgcttcattttttctgtagacagtttagcagttccttttctaacacttttgtgcactcaatcgacactggattgatttgcatagtgcttcctacttttggtgtcccgtggggtttgagttgaaaattaggatcaagtcacggtgttctcgagtagagaaatttttgtggctatcattcaccctctctagttgcat

SEQ ID NO: 58853 - DNA, 305 bp, Zea Mays
ctgggatcttctccctgcgcgcgacccagccagggtcacgacggcgccccagcgccgccacccttctcgctcccaatccccaccctacaacctacgcaatctgcccggtaggatccgtcattctaccagcagacctccagcttcgttagtccagctgaaatatggctatgatgcctatgaattagcataagtgcattgttttggggcaccatcatgctattattgttttccagaatgagtctagtctaaagactatctatggtagattttgtttttcttaatctgtcaattaaactaaatttctt

SEQ ID NO: 58854 - DNA, 599 bp, Zea Mays
cttttgcattacttcattcatgtgaccattgtgattggataatttgattacgaggggcacatatgatatccatttcctatctttgtcgtctgtaatatctccaggttgctaatcttggcaatgggttatctatggaagtaaagcttatgaaaaggtattcggagtgtgttttggatactttacacattgtttcccctatcacattatccatgacttgcaacttatggatgcaggagggaggaaatgcttgtaagaaaggaggtacaagtttaattttgcatgtttacctgtttacgttaatagcaatttgatttttttctgaaatggaactgaccacatgttaactaacattgctatccattcttgaagtgtgatgaatgatgcattaaaattcctccattttgttctatgaagtggcccaaatctcgatactttgtataatctaagttttggtcgtataattgctactctaggcaatctcttcatctgctaggtgttacaagaggacataatgttgatacatttgtttcctgatttaaaaacagcaagagataagaaaagctcttatatccaagaatggtaaaagcgaggaactcacc

SEQ ID NO: 58855 - DNA, 279 bp, Zea Mays
gattgatgaagcaactgaagagatgcggaacattgaagcacatgaaaagatgaacaactatagggaccaagattatgacggacgcaaccatgagaaccttcgtcatgaagaatacaatgtctaggatttcatctatgatgaagcctctccgctgacaccagaattacaagctacaccatggccaccgttgtacaaggcccctacactgcctatctatgatggcctggccaagccaaagcagtttctcatgagctacgaggctaccatatcctcgtatgg

SEQ ID NO: 58856 - DNA, 977 bp, Zea Mays
gccgacttggacagaaaaacgagcccgcgggttagacgacctgccccgattttctaaccgtgcctaacaggccgggcctagcggcccgtttggccatctctaggtgttgtgctccccgcgggagatcgtggagagcgcctctagttgagtgaggtgtgaatagtgccaagtggtatggccaaatcaaagtgatagggctcttgtgtgagcactatatatggtagagagagacatcttgtgtgatcaccactatccaaaggatcaccgacaatcttaggcttatctatcaatgaaaattaagtggttggcaaaccatcaaacctcatgataaaatcgccacgtcaaactatcaccatcttcttgttggcttgtaatttcgctcactagcttgtattattttatggcttcagagaaagctttatgatgggtgttatgctccccgcgggagatcgtggagagcacctctacttaagtgaggtgggaatagtgccaagtggtctggctaaatcaaagtgatagagctcttgtgtgagcactatatatggtagagagagacatcttgtgtgatcaccactatccaaaggatcaccgacaatcttaggcttatctatcaatgaaaattaagtggttggcaaaccatccaacctcatgataaaatcgccatgtcaaactatcaccatcttcttgttggcttgtaatttcgctcactagcttgtattttatggcttcagagaaagctttatgatgggtgttatgctccccgcgggagatcatggagagcacctctacttaagtgaggtgggaatagtgctaagtggtctggctaaatcaaagtgatagagctcttgtgtgagcactatatatggtagagagagacatcttgtgtgatcaccactagccaaaggatcaccgacaatcttaggcttatctatcaatgaaaattaagtggttggcaaaccatcaaacctcatgataaa

SEQ ID NO: 58857 - DNA, 563 bp, Zea Mays
gcggagtacacgcagcatccagaactctggttgggaaagttttcaggtcaggtttctattggccaacagcgaagagtgatgctgccgagttagtccagaggtgtgaagcttgccaattcttgtcaaagcaacaacatttaccgtcacagtagctgtagaccatccctataacatggccatttgcatgctaggggttggacatgatcggacctttaaagaaaactcagggaggctatactcatgtcctggttgccattgacaagttcaccaaatgcatagattacaagcctattgcttcttcagcctcaaccaaggcagtataattcatacaagacataatattcaggtttgggataccaaacaacatcataactgacctaggatccaacttcaccagctctgagttctttgatttctgtgaacatcggagtatccagatcaagtatgcatcagtagcgcatccaagagccaattgtcaggtggaaagagccaatggaatgatactggaagcactcaggaagaaagtgttcgacaaaaatgaaaagcttgcaggaaagtggatc

SEQ ID NO: 58858 - DNA, 307 bp, Zea Mays
ggtagtagtgctatgtactgactgaggattgcaaacatggggaaagtggttgactgtgtaactgtgtttatgaatagggagtactgagtagggatgaatgttggtgcctttgctttccgccagagccaagattgaatgaatgcatgatctgcccaccccttttttaactatagtttgtgtggcaggtttgtggtttggaagatattgatatcatgagatgttcttgttggttatgaaagcacactgagatacccatgttgcttttgtcgttaagctttcttttgataactgtttaattctaattttg

SEQ ID NO: 58859 - DNA, 457 bp, Zea Mays
tacatctcagggggaccaggtaccagggaggagtcggcagcgctagaccactgggaggttggagacaaagagcgcaaactctctggcggtgagatcgctgtgaagagaggcgctgacacagatccttctggcgaacgccggcacaccccatcctttgcgcaccaagttgagtgccgcctcgggctggagacactcgggaggatctagcaaggccatggcggctacggcggcagaagagcgcggagaactcaagggtgaaaggacgcagcgagtgatgagaatggctaccacgctcgggggagtccctttttaaagaaagattcccccactgatgccccgagacaccgtagaagatctcgcccgacgcgcgccagggtgacccagcctctgacatgggggcccgggcccacgagtcatactccttgggcgtcggcctccgtgtgcggagagggtgaac

SEQ ID NO: 58860 - DNA, 573 bp, Zea Mays
cacaaacaacgctagtgctgctgatgttaaggaaagagagacgaagcggtggatagcatagcaatacaacctggggttatgtggtaatggcgcgtgccaaacttggccgtcccggagacgaatacgagcaccatgggagccacgagccgccagtcatgtccatgcatctgcttactgatgatgtagatggccgtcggcacctgggtggttaggctgagaaggtggcgcttccagagcacattgtcctccagagagaaggtcgtcatggtctcttgccctccaagatgcagcagcaggaagggcaaccaaaagagggctagctggttgccaccgccacggagagaggcggccgaggaccaagacagcaagggagtcggccgacaggtaggcaagccacagaatgacactgagaatgcgggagctgtggcgcttccggaagcctgagaagaagaggacaacctgaagacagaagctggtcaacaccatgcactcgttgatgatttgttgggcacgtgacactgcgctgatgtagttaagtagtaaatgggattaaacacctgtaacagaaacccg

SEQ ID NO: 58861 - DNA, 419 bp, Zea Mays
agtgcgctggttttggaatctttttctaatttacgctagttgatcagctggtaaggcatagagatcgccttgcgagcatgttacactaagttgagtaagcgtgaacatgttgcaccatcttaagtcattgccgacttaagccgattgctccgttagtagggtatagtggtcaccctaagttgagtaagcgtgagcatgttgcaccgtcttaagtcattgctgacttaagccgattgctccgttagtagggcatagtggtcaccctaagtcgagtaagtgtgagcatgttgcactgtcttaagtcattgctgacttaagccgattgctctgttagtagggtatagtggtcaccctaagtcgagtaagcatgagcatgttgcaccgtcttaagtcattgccgacttaagccgattgctccg

SEQ ID NO: 58862 - DNA, 875 bp, Zea Mays
tggtcgatggctaaccgtgactagtcggctgatcgttaactatatgactagattcgaaatattaggctggagccccatagcccctctttggatccgccactggctcgtaggaatgttctcacaactctgaactacacaatcactagcacaatgttacggcccgtggccaccagcggtgagacaaccgtgacgtgagcaatcgttgccgccgtcaaccgagacaacagcgaggtaggtgggatttctgttcgtattatttcctttctgccagtttcatcatacacacaagagttatacccgtgtcccaacgtcggcccatatcaatgttcccattacaacagcccatacggcccacatccagccttacacttcctattccacatccgccagcccctgaacatcttccagccttacccttcttgaccagccgacgatcgactatctccaatggaaccagttcatacttgctgaggtccacagaaaccggaagagtagaaaacactggcgaatagttagcagtaaaaggcttgagttgggaaatatgaaaaaccggatgcacctgggctgataaagggagatccaaacgataagcaacagacccaatacgttccagcactttgtatgggccaaaaaatttgaacgcgagcttgggacagggtcggttcaccaccgaatgctgagcatatggttgcaacttgagcaaaaccaaatcccccacctggaactgccgctcagaccgcaagcgatccgctttgagtttcatcctgttctgagcaacaaccaactggtctttcaacatctcagtaaagtgagcacgctcagccaacacctgggccactgaatgatcagtatcagatggaataagaggggcagca

SEQ ID NO: 58863 - DNA, 1218 bp, Zea Mays
gttgagcaatgtatgctgagatttatagtcttaaattatttggtaaggccttttgcttactaatagaatcccaatttgtgatgtcttttatgccaaaaaggctttcatgcattatattatatatcttcgggttacttcgggtaaaactttatgcatgaggagagagcagagaattaacttatctgtatttcattgtattttaatttaatttcccagatttccaagcactatagagcttggtatagttgttatggccacttggcgatatataaatatacaatgccacacaacacggtcaaataaaatatagagccaaacaaaattgtttatgaaggttgcgcataatatgacttcaggaccttgaacaacccaccacaatccacgcgagtacaagctctagcgtatctagcatcaacgcatgtgcggccatcagggctacgacagtatagcaagccttcgtaataagcgcaacaggcacaattatggctcgataattggggtacacgataaatccacgcaacgtgcgcatcaggcgtaattgtggctcgcgacagacacacagtgcctacaggacatgcaaaaaatacgcgactcagcgatgatggtttgactcaatggaagcgatccgattaatggagagcgcgacatagtaatcacatgacgcagccaagttcgaacggcacaaatattgtgtcgtgttgccagggcgcagtcaatattcagctaatgccataactcagccgattaccaacgcagcctgatcggcgtgtctgagtacccattatacaatttaatcgctcaacgtgaatccaaaagctcaacacatcataaatatttagagcgatccgagtctacgcagtgtagtctgcacacacgttttgaataattttctgctaattatttactatgagaaataaagcagaaaaataataatagaattaatgcatgagcataagcagatcagatgcatgaaaacattttccatgcttaaacatgtattgtaataattatctgctaaatatccgctacgagaaataaaagcagataaataaacaccaaaattattgcatgagcataacacgtcaggtgtaaaaagcatttccatatttaaacatatacttttctactaattatttcctgctggaaataattaattaaagtggaatctgaaacctaaaatgttttattctttttgtttattttctggtagcttagtcg

SEQ ID NO: 58864 - DNA, 429 bp, Zea Mays
atgtgctggctacctagaggatatgcacgaccacctgtctacctgtgactgcacgagagatagagatgaaatgtcgttgtctagttgtacactgtgacactgggtacctgggcctaagactatgggctactactagaatatgcaaatcaaaattgatgggatagtgctccttgcttgttgttgccttattgttcacttgtgattaggccattaaaactttatagagctagcaaggcctgtatgctgaatatatgtactagtgtttagtacctggggtgaggccctgttgatctagggcctaggttagagtcactactcgaccccgccagggccagcgctaacaccaaagcacaggtctaaggcccgaccatggttgcgatttttctcacatgggctatggtgatgctgtgtatgggtagggtaggggct

SEQ ID NO: 58865 - DNA, 295 bp, Zea Mays
ggaaattgctaagtatatatcggaatgcgacacttgccaaagagtcaaggccagtcatttgaaggtggcaggcaccttacagccccttcccataccatcttggaaatgggaggatatttgcatggatttcattgtaggattgcccaatacctcccggcaccacgattctatttgggtcattgtggataggttgaccaaaacagcacatttcttgccagtacataccacccaccggacagaaaagtatgtagaaatttttattgaccagatagttcgtttgcatggaatacaaagg

SEQ ID NO: 58866 - DNA, 643 bp, Zea Mays
aagaatgaagaagccgacacattggccaaggctgccgccagaggcgagtccctgccctccgacgtgttctactatgttatcggcacgccagccgtccggagccccgaagggctacaaataaccaatgacaccgagggccactgcatagtcaaccttattatgaccgaagattggcgggcaccaataaccctgttcctacaggggtactaccacccaatcgacatcaacgaggccaagcgcctcaaacatcgaagccgggacttcgcactgattgagggccaactctacaagaagggggtcagtcagccaatgcttaaatgtgtcaccgagaccgaaggcgtccaaatcctgcacgaagtccacagtggtacctgcagctctcacgcagggccaagggccctagccgcaaaggtgatccgccaaggtttctaatggcctgcaatgatctgcgccgcaaatcgggtcacaaggtcctgcgaagcctgccaaaagttttctcctcgatcaggcagcccctcgcaattcacaaaactgatcgcccacacatggcctctccagcgctggggcctggacatcatcgggcccctgcccacggctcaggggaacctcaagttcaacttcgtcgctgtcgagtactttacca

SEQ ID NO: 58867 - DNA, 321 bp, Zea Mays
gatcaatcagatagaagaggctaaactactaagcagatttcaagctactacaagaccgcagagacaagattagcatccaaattacatgcaaaacttggaaacagtacatctagacaaatcatcatataggtagcctacatgaagagcaaccaccaccatctaactagcatcgaaagctagcaacacccaaatgtcagcttgggacaatagatcgcaacaggaaatagggtgtcatctgaagcaagcgacaataccttgtagtactcctcacaacctcgcaggtcgggttctcagtagcgaagggcaacgctgcttgaagtg

SEQ ID NO: 58868 - DNA, 634 bp, Zea Mays
gcaaaatggacctcaattgagttctatactaagtctgaaattcagtgttgagggctcaactttggagctttgtatctttcaaattctagggtttttgccctaggtcaccacatcaaacttgtagatcaaacaaaggagaacacttttgcttaagagtgtaagtctagttgttgtgaagaatttggagataatcaccctcaaagtcaggctgtcaggacatcttaagtctgaatttccagtaacagtgaaattaggcagactttgaacctgattttgagttggattcggtaactattttatggtaagctccatggcaaagttgaagattaactgtaggtctataactttggtacagagagctagcctggtcaccacacaaaatcaggagtaaatcgagctccaagatgctctatcaggtcgactgactgaagaaacgccatggtacagtgctcagatgtggattagactgccagcgctgtgtgctcaccgccggagacctctctgcgtgaagattcgtgccaccaccgtctggattcgtgcgcggtatggaacggataacgccggagttagatagcgcatacgtggcaccctaccccgagtccaaccggagacctcaccggcggccaccgagtca

SEQ ID NO: 58869 - DNA, 887 bp, Zea Mays
ctcaaattgaaggattggatttcgctttacagaccaagtaggccaccttgctagataagcacgatgagttgagatctagatctagcttgttaggtgcgtgtagcatttgtcctagcttgaagactaagctagcagagagagacgctagaatagccttgcttaagaaggctagctcagtgagtgccccgcacttgcgcagtgtgcactttgtaagggtttaaagtctgttcttgagttctgcagacacgacaagactaggatcaaggaagaaaacacataccttcgatcggtcttgagatgggtgtcatgcattgagccccagttgggcatgatggtcagtcagttcaataggggaactggcggaccggggttatgctttactgctaaggatgggagtgctatttgctttggaaaggttggtggtgagtggagtagactgaagccatcagtgaaaccttcagtcacttctaaggtggcatacttggtctacaaagttgtgatgttcgacatatgtagagcgcactcgtcacacttagtcttgttagacaccacaattgaagctctagtagactcaagctcctaagactattgtgactatgatagatggtgtgattgaggagcctatgagagcccctccttagaaacaagtgtgggttccagaccaaatcatttcaagaacacacttgataccgttcccgacatctctagtgatccccttcctagagagcccctcagctatccaaaagaaattccacctaagagagagttggggttccattgtgagtattgtgagagggatgggcgtctggctgaatttttctttaggaaaaagagggatgagaagcgggtttctgagtcgagcagaaagaacatgaaccgcccctctc

SEQ ID NO: 58870 - DNA, 326 bp, Zea Mays
atggtatctgaaacttacgaagaaaatcttaacagctttgtgatgacattttggtgaccttccccttcttgaggacacacctcgctcaagctaccaaggcgtacatcaaatttatcatcaagaaggatgctgctggcttgcacatccctatagtacaaaactgacaaaattagtcaacggcaaacctttgcattgatctaatttactggtcttggaaggaagcatctatgcagtcagaatcattcatgtggccatataaaaccgacaaaatgacaaaacaatcagaattgattgtgatctactgcatgcctcacattaataacaaa

SEQ ID NO: 58871 - DNA, 427 bp, Zea Mays
ttcatatctataattcaaaatgtattgatcgcgcggaatttagagcctttttcaatctttggaatcatggtggccctaactggattcatgagtacaaaaaatttattggtgaagagaatgcttcctggtgggctattcggggcaagaagagttttcttatgcagatattgttaagctccctctctctggtactaatgcggtctcgattctcaacaaaaaggagatatcttgctgtgttgggcatccggatcaggctagaatttttgcattcagacgtctgggatcttctgttcgtaattcaggatttcaggcttgtggtattcgtcttctccacggattttaggacctcggggacttcggaatccgatgattgcgaagattaagtcaattcccatgaatgttcctcgccgggacgtcttcctcggtg

SEQ ID NO: 58872 - DNA, 934 bp, Zea Mays
ttaacatgttatcacatacaaattagagaatgaagctctccaaattgtgctgtcagaacttctgatgaggattaccatggtacagtgaccagaaaagatctccggtgccgtgagctcaacgccggtgatctgccaccacaattcacgcctgtctgggagatttgtgccacgggaggagtagataacgtcggggcggggtaaaaatatctggtagggggatgaatccagtcgctagccggaccgaccgccgtgtcccgcagcggacagcgcgctggcatcaccgaagctcgtcgttttttcggccgtgacacgtaataaccacgcctccgcgtcgtatgggtcatggtaagccaccggttattgaccgcagaccagttcccttttgtgtgccacggtgatcaagccactgtgaaaaatcctagccggataaccgtgatctcaatcccaaaattcttgtccagttcgatcgagacatataaattgtggatgccctctactctgcttcttagatacacgcccaacccatccccagctagctcctatcatgcaccaccacaccctaatttcgcatttcccccaattcacttctccacgccgctgtgaaccatcgcgccgtggaccaccaattctaggtccgttcttgttctctttgttcatgtttcaacacctctattcactggtgatgctcctcagttcaacccattaagctagaccatgctcaattatctggaacacctcgatttgtccatgaagttcgccgtcgtcgtgggtgggagaacctagggctggattggtgcaattaaagcagggcttagattcgtatagggttggggacgctagttcgacacttaattgggtcagtcgacgccgttcatggccggtcttagcaaagagatggccaacggcgagcgcgccgttgccaaggttcggtttg

SEQ ID NO: 58873 - DNA, 566 bp, Zea Mays
cgatccggaagtccaccacctatttttgacacacaacttagtgcaccaatttcacataacaatgctcataaacgacgccgcacctatgcacaatttcaaaccctgccgcggtaacaactctccctacacccaccaaactacagcggcgctgcttaacaatttcatatctttaaaattatgacagcagtggtaacaaacaaaaactccagaggcatctacataaaattccccacaagttttgtatacaatttataattaaattccaacatataattagcccaacacagtccacaagataaaccctgcaatctgtttttttggacagcaacatacctggattcaaacatggatatcttctaaaatataattccaaatcaagcgcataagtactcattggaaaggtatgacaaagctctacatgattcttatactgattatcactaattacccacgaaaaatccccagaaactgctaatactactgctgttcgcctacctgcaaaaatctgttttttttggacagcaacatacccggattcaaacagtgataccttctaaaatataatt

SEQ ID NO: 58874 - DNA, 502 bp, Zea Mays
ccagagtgcgcccatttggcaagcactagttggcaaggagggccgcccaagtatcgatgagaacttgagaagctagatgactacgatctcaagaggggagagggcggacgtcgtttgtgttagactgctagaggagtagaggtgatgtgttgggtgtatgatgggattggaaggcaccaggattccagaataaatggttcgacttgaagtgactacatgcctcgcttaccattctaatttggagcttttcatgggatcggaaggcacttttaccatatgttatgtgtggcttaagagccctctcaagatcatcatagggtacttgtagcttatttttcctacttattattaacaatagaccaaaaacaagaaaacattgtatcaacaaattctctagccaattaaacaatgtttttgtactcaccctaatgtgtctcaaagaatttgattttgacatgagatgagccctcatggtatttcttgagaggcaacctaacctcac

SEQ ID NO: 58875 - DNA, 705 bp, Zea Mays
tgtggtgacctagggcaaatccttactaatttgaaagctacagatctccaaagttgagccaaatctctgattttcagacttagtctatatagggtttaagtggtgctttttgcaaatagacccaaaacatagggtttaacttgcaaatccacctatttgtgatccatatgacttaggacaccttattgacatggtttttgcactttagtctaaaagtggactaattttgcacttaaccccctagggttcggatttagggttttcccgggtcctttttagggtttttggtatctcaggggtgtaaatgtaacttagatccattcttagtaatattttacgactattttatttaaactttagggttttctccatttgggtgttgttttacccctcagaaccatatttagggttaagtatcctacactagggtcttatttgcaaaatgccataacaatacaacttgtttgaaatttttacctagtgaatgcatcctaggtgtatcaaacatatgaaatgccaatgcttatgatgttatgctcaaggtttagtaacagtaacaccaggggtgttacatccttccccccataaaagaatctcgtcccgagattaaaagtcctagggtaggtaatggaaaaggaaacacgtcatacttttatttccttatttctggtacaaagcaggggtggtttggggatttactccttt

SEQ ID NO: 58876 - DNA, 428 bp, Zea Mays
aaggaaaaatataaaacttatatgttgttcactgttttcttggtgtgttaattaaaacatgttaaataggaaaaagatgattgttttgattgttatttttggatctgtagctctatgctccaaataggttgaaatttttacagtagactcttggtgtgatgtttggtgactggtaaaaatttcatgaattgttgtgcatgtatgattaagttagtgatttaacttgtttaatgcaccttaagtagttttaaatgatttaaaaataatgtatagatgcaaaaatgtaaaatagtgttccactgtccttgtatgatattatagtagcctaataaaacttaatatggtcatgaatccacagaaaataattagttttagatttaacttgctctcacatgctttattgcattaacaatttgttatttttgtat

SEQ ID NO: 58877 - DNA, 364 bp, Zea Mays
ggccaattagggcttgatgtttaatatacataacgctagagtatgttatgatgattttaataatgaatattaaatttttatcaccagtcttctgaaaattgtcataaacaagggaatctaatgacgaattattatattatcattgactatttgtcgaagaagaccataactgttgtagtgaatattaaatgttactagcaacacatattaactattattgtcacatcctagttcatcaatacattccgctagcaatgcatattaggtgtcgatgcatcctatttaaacaacgaatggtgctagcaacgcatattaagtgttgcccgctaatttcttacaacgcataaaatcatgtgttgctgcg

SEQ ID NO: 58878 - DNA, 371 bp, Zea Mays
atgagaccgaagctactgagactgtttcgatttttgaagcaatgaagcgatctgggctggtaacatcggaggacgtccctaccgctgaaacagagcaagctgatgttgaggagaccgagtctgaagatgactatagcagcgcggtgccgagcaaacccatccatctggattttggaaaatccgccatctccgaaggtgacctacctaaaatgttgaaattgggctattttaatgaagaaaagaaagagctggttcgctttggtggggaagaaactactccgaagccaggaaaagatgaagtagtagtttttaaaagtttctttaaagctggtttgagattccctttgaataagatgattgctgatgtgttg

SEQ ID NO: 58879 - DNA, 866 bp, Zea Mays
tataccgaagaatgaatctttatagaatcttaacatgtctgtccatgtccgcgtgaacgaagttctctaaattaaagctactaaattcatatttgtgttctattacgacaaaatacgtattatttagccacaatagcacccgagagtgaagctttggagaagatcgaatataagcatattgtccatgattttctttaaaacccaccaaaagaacgatgttatttaaataaaatagatatgtttctttagatattctattgcaatatatattattgcaacttgtagattgttattactgatttttaataaaaatatatattacaatgctttagatttggcacagggcctcaaatttctctggcccggcccaaaggatttggttttggcttgtggagacgtgtcaaaactgaactccgttttgatccgtgatgctctagcttttggacacggtcacagcgacagggggatgatggtccatatgaatatattgcttggggtaacattacagttttacttaagcttacctagattttgtttccttttcttaaagaccatgaagtaaaaaaaatcccctttctaaagctgtgtaatgtgcagatacaatactcacgacccgtataattgtcaactagacaactattggcacattttatcctttacaaaagttgcaactgtcactgcaataagatttttgtttctgatgaccatgattggtaattagtaggtcaaacatgtccgtggagctatagattttgaagtggacttcacttattatttctaacattagtcatatgttcatgtttccaaaaacagcaagggagagagagagagagagaggaaacatttaacatgaacgcaaaatcatg

SEQ ID NO: 58880 - DNA, 1473 bp, Zea Mays
cggacaacggcgacggcataacagcggtgagaatccttatctgtgggcggtgagcaaggggagaggtatcgcggctagccggagtggcttccagctcaccggcggcgataatcttttaccccgcgacgttatcgactttcctcgagtacgaattgggacgtcggcggcacgaatcgaggcaaggagatcgttggcggcgagggactaccgcgctagcgttctgatctgctcagacactgtaccatggcgagctccattcagtcaacctgacaaccatagtttagggtcgattttctctaagatttctatggcatcttgcccaaagatctgcatcaaagttatagagctacaatccaactataactttgttacataggatttctacaaaaagccactggatccagcttagaattaagcttgaagttcatgccatctttctatcagtctgaatttcagacttaatcagcgtgacagcctgacttagggcttaattatctcccaatttttcataacaacaatgcttaaccttttaagcaaagttgttcccctttaataggtctacaaatttgatgtggtgacctagggcaaaaaccctagaatttgaaagttacaagggctcaaagttgtgctcataacactgatttcagacttaggcaatatagaggtcaagtggtactttttgcaaataaacccaaaacttagggtttcacttgcaaatccctaattttgtgaaccatatgacttaatatgctttaacatagtagttttcacactttagtccaaatgtgcactatttttgcacataggcccctagggtttggatttagggttttccagggttctaattagggtttttggtatcccaggggtacaaatgtaattcaagttcattcttgggagcattttatgactattccactaaagcttttgagttttctcaatttgggtcaagttttacccccttaatccctacttagggttaagtatcctattccagggttttatttgcaaaacaccaaaacaatacaacttgtttgaaatttttacctagtgaatgcactctaggtgtgtcaaacatatgcaatgccaatgtttatgatgtcatgctcaagttttagtagcagtaacaccaggggtgttacatccttcccccataaaagaatcttgtcccgagattaaaagtcctagggtaggtaatggaaaaggaaatgcttcacatttttatttccttatttttggtacaaggcaggggtgggtttggggctcactcctttattacaacaatgttgtatactttacaaattacaagaggctaaaaagcctgggaaattcttatctaaaaagtcttgggtttcccatgttgcctcatcttcggaatgttggttccactgtatcttgtaaaacttgaaagtttttctccaggtaatcctgtccttttgatccaagactcaaatgggatgttcagaatatgtc

SEQ ID NO: 58881 - DNA, 670 bp, Zea Mays
gggtatgggtatggggtaaatccatacccgccagtgtatatgggtgactcgatgggtttatttttttgtcgtgggtatgagtatggggtagtaaaatccggtgggtatttacccattgccatctctagtgtcaggtgggtaacacagcgtctgtagcaaccgccatggacttttatgcgaggaagaagcgtctaggtgctgggtccaaccggtcagcggctgtgaacgacgaaggcaacatcgagtcggtggagtgcgtgcggtgttgggcctagtctggccactcgaccaatgcggcgataaaagaaaagaaaaaggagaagtgaagtaatcgggccgcacgggaaagggtattgggtcgaggaaggttgggcccgcgagttgtggagatgagccgctagaaggggaactcgacccacggggtcggttttgcctttttcttttcctttttcttttctgttttcactttcctaacttcaaatcaagtttgaattaaaatttttgaattacatttaaatggtgttcaaatttcaagcctatttaaatgcacaaaccaaaatctcggcatgaatgcaaagtttcttttacttatttattttttacttacttaactcaatgcctctaaatgtaaaattgatgaaaggaatattcactcaaataaatagaaaat

SEQ ID NO: 58882 - DNA, 374 bp, Zea Mays
tatttttttaaaaaggggaaaactgaacagtacgatggtccaaggcgtccccgatcgaagcgaagctcccacagcgggtgtgtagctcgtttatggcggcgatgacgaactttcccacccacagcgattgccaatgctcctcggtttgctgtgatgaaggatggacaagtgggggggtctctggcgcccgcgtttatacagccagttgggagggaatcggaacatggacagccggatttctaggcaagcttggtggattcggttgtgaagtgcatgggtcacgcgaccgtgttcgtcgcgagggagaagacggttctgtgggcatggccccatgcgccagtggagacacatcggacgcccaaaggctggcagag

SEQ ID NO: 58883 - DNA, 439 bp, Zea Mays
tccttcggtgctggggtggtctcttctccggcaaatcggacaagtttcctttcagcttccccaaagtagcccagcttcatcatcatgggcatgtcagcttcagacatagtagatttctcaaaatctagatggctgggtttggttgggatcaaaatactataatcttcttcatcctcttcaatatcttcttcttcagcgacggtctgttcagcttcgagaccggggtaccttcgtcagtagttccctctatcacaactagacctgattgtctcatgacttcggaaattggtgctgtatcggtgacctcggtctcttctccttcacgagtcacccttgcagtcgaacacactctggccatctgatggattttttgcggtttttacgaagttgatgtttctttttgcagttttgacgaagctcactcttttgacgaagttaa

SEQ ID NO: 58884 - DNA, 461 bp, Zea Mays
atctggtctaattcctataatatttcctatacacattcaagaatttcaagttcaaagttgattttcttttgcggacatcatgtttcatatggtacatagtaacaccttacatatcatcagtgttctaagggtacttacaacgcattgtagatcggaagctgactgtatagcgtcacttttgcaaaaacaaccatctcgaagcgatcaatgaaggaagagatcgagcaaacttgttgcctcataaggcgacaacaatggcttatgcaccctagcgaatggaatgtcgggagcaatgttgtactagttgtctttaccaggtgatgtgccaaacaggatatagctgcacacacgtgggatggcattaaaatccatctcatatgtagggcatgtttcaccatggtccatccttgtgtcctactatagccataagcgttcgcctgttcaccatctcatgtattcat

SEQ ID NO: 58885 - DNA, 451 bp, Zea Mays
gttaagaagttgatggtatacggagattcactagtggtcataagccagataaataaagattaggattgctcgactgattctatgggcaagtactgtgtagtcgtccgaaaattagaagacagatttgaagggttggaattccaccacgtggaaagagaccgcaacgcagcagcagacgcgttgtcgaagctgggatccagtcgggcccaggtcccacccgggatcttcgtccaagaagtgtcacgcccgagtattctctcatatcaggcagaagaatgcaacaccttgagccaaccatagtcgaaccccaatgactggagagagcctatcatcaggtacataaagaatgaagaagaaccagatgataaggctgcgacagaacgcgtcgcaagacagtcggcccactacaccctcatagggggcgcactgtacagaaggggtgcgactggag

SEQ ID NO: 58886 - DNA, 295 bp, Zea Mays
ctcaggggcaagacggtaggagccaaagtggaggcgtgaggcctcaagagtgccctagaactgcggtggatggatcagttgtgcgaagatgtagcagagataatgtgcatatggcagctgtcgccgggcacgaataccatccaatactgtgtcctcgatctcacatataaggaagtcaacaacatcaaactctgaatgagagatcagggcaccaagtagccagagctggatatgagtggtggcctccctataacccatccagggcagtagtgtccgtctcatgagctgatataag

SEQ ID NO: 58887 - DNA, 582 bp, Zea Mays
atccccatagaaccaatgattccacctttaagagttaaatcagttgggggaaaagtttagtccgataggatgtatccaaatctaaggattgaaataagggggatagacttccccgctaacctagtagtgatgggtactcaagggttagatgtcatcgtagggatgaattggctatatagaaacaaagccaccgtcagttgtgataagaggacagtcaaattggtgtccccatccggaaaggaagtagtaactgaactgtatttgcctgaactagaagaaggagcttgtcactatttgttggtagatgacaaggaggccaacccaattgaggatattagaattgtgtcggagttccccgatgtgtttctcgaggagttaccaggcttgccacccgaaaggaaagttgagttttccatagagcttatcccaagcaccgccccaatttccaagagagcatatcgagtgtccggaccagaattagtggaactcaagaagcagattgatgaattgttagagaaaggctacatcagaccaagtacctcgccttgggcagccccagtgctatttgtggagaagaaggat

SEQ ID NO: 58888 - DNA, 642 bp, Zea Mays
cgggccatgaggagccaagggttagaaccggacgcatggtgcttctataatattcatgtgttatcttatcagacgaaggcgactgggaaagagcaatatcacaacaacttcgggtgctacaacttcgtgccccgctctgaggttagttacactgtgcctacattttggaagaagtggccaggatcttggatgcaagagtggttttatgtgaagaacgatctggaccagagggaagatataaggggcattattcaacaccctatttggtcgtgcttcggcattagaagaccttcggtcgcgcttgggaatgacgtacaagcgtgtcagatggcttttaacaccatatgcacttacattggcactagggtatggcctcttgccagcggatgggaaatgccgaaggaggccgccgctggctccagccaacatggtctggtgtatcttaagtatacatttcgattcagggatcagtttgacgagccaaatgatgactggttgggtgccatagaggcaacaagcgatgagctacttgggtcctattcgaggactgaagacgaagccatgatagccagcttcggcgctcgagggaaaatgagactaaatagggtttttgatgtcattggattcatgtatccagactac

SEQ ID NO: 58889 - DNA, 434 bp, Zea Mays
gcaatgtgaccgggttccgcacattcaaagcactttctatcattgaaagcattccttcttgatgattgacctcttctaaattgaccatttttcatcttcatgaccttattgaacttcttcacaaagagagccaattcttcattgctctcacttccattttcttcatcatcactttcttccttttctaccgccttagaggttttaaccttgagagctattgattcacttttcactttctttgctaaacttatggcctcggcttgagacttcttgaatatgtcttgagtaagaatctatcccaaaacttcggttggagatgttgtggtgaaatcacttcttgcatgattacaatagtgccatatttctctggaagggatctaaggaacttatgagtaaaatccacatccggtacatcaagaccaagtcccttgagc

SEQ ID NO: 58890 - DNA, 616 bp, Zea Mays
agaaaaatgaaaaccaaagatgcaaatatctcaaggatcaagatgcacccaattgacataaaaaactagcaaacacactaacacgggacaaccgacacatatcaagcgctaaactgcactattttttctccgtgctctattttgatttaccccttataaatgttttgcacattttatttgctttaccactgcgcgagtaactttgtgcatgtttgacttactatccttgtttatgcacgtgctgcagcaacagcaaggctctgaacacgtagatgcaaaacgagctcattttagacacagtaaacttagacttgccagttgccacggttactagatggctctataaaatctttgtcctgccatagcatgcagtcctcagatcaatcaaccagcaagtcgccttcttcccatccctctccatcaagcaaaagactgacaggaaagctaaaccccaacaatcaccatgggattcttccaaggcaagacctccaagcagaccacgagggtcaagaagcttctcggactcgccctgtcgcgcctcgccattgcacgccgtccccgccttgctcgcaggtccatctgccgtaacgatgtcggccagctcctctccctcggc

SEQ ID NO: 58891 - DNA, 626 bp, Zea Mays
gcgggtggttggtcctttgacaggtaggaaccatactatgtatatacatgtaatactacaagtcctttggactaactaactctctataagagttccaagcaagatccaccaaatccaaggcaagggagttgaatgcaatctgaccagggcggcaatagcgagtgacagtctaacctaccatgttccactcctttgtaaggagacagtccctctctaaattatagttgtaatcttgcacgtcgcctacatacaaaaatccatgattagcaagagggcgtagggtattacacacactatgatcaaaacctctataaaattatgtaatgtcacgacctagtagatatactctatggtgacatgactcacactcttctccctttaaaattttttggtgctttggtgtctttgctataacatttgacattgttagtggggaacttggcacctatagcaaggttttgctagcatggcttcaccttccttcccgctggttctcatactctggctctagcaatttgaatcgtggcctgcgacattgacaccgttagtgtgcggctcatcttgtcctcatctacctcatgtaggagaaatatggaattatgccattatgaaacgcgggattcatc

SEQ ID NO: 58892 - DNA, 390 bp, Zea Mays
caaaaatatagaaactgaaatggatcaatttggactcaatatgaattttatatgaattacacaagttttaggaattgtttttacactaaaaattcatctccatatttatttatcccccattaaatggtcactagaccgagcactaaatctataaaaacacgggggcgaaatcataagtgttcaccaaatacagcccaaccctagggtggacggcaggttagtttccaatttctaggagagcttcactgtaaatagagcactacgaaggggtaccaagcctcctgaattgtccgatcgcgacacaagggttcagattagaaccccacgctcccgaaccggtatacgattgtgatcattgataaaaaatctatggcatagattaggtttaaa

SEQ ID NO: 58893 - DNA, 651 bp, Zea Mays
caaaatgagctaccatatgtttattcatacccaaaagctataataggacaaatagattagctgttggaaataaaactttacagcataagaaagttggtctacttgaaattgtaaggaatcatctcataattcaaactcatgaaacctagatatcctacattccaaatatgatacatgaaacattaatgcacagggttacagttcactaaaatgaaatagaggactgctagattagtacctcccagtcaaaaagaacagatgcagcagttctctctaggtcttgcttcttagggctcttcaaatcatttccattaagttcagataagctcttcaaaaagtccactgtatctgttaatccttgaaggtccccatggagtatctcaatgtcttcaatacatctgtgaaatcaaatatgcaattccagttgcaaaatatttcactgcaaaacttgagatgtctgacaataacaagagaaggtactcacaatgctgcactttcctttgtagcaacattttgtgaggtcggaccgccaccagttttggtttcggacacagagtaccagtcaggaatgcctgcatctctcccaggaaccctttgaagtacatatcctgagaccatggcatcttgcaatcttcttgcaccactagccta

SEQ ID NO: 58894 - DNA, 417 bp, Zea Mays
ctacgggggagcggatgctgccgcgagtatcgttatgctagcaggcgttccctcagggcttcttgtaagtggggaacagtcttccggggaggcggttgtgaaacactcctaagccgagtcaacatagagctgtgtccgtgttctgaacccaacgggaggaggccatggaatgaatctctaacggggtccatcattcccatgaacttgacacgagccggtaccatcgcgtgtccttgtgcatcgcttccctgatgggagccaagtcgaaggcctctaaggcccctagcaatgttgattaagacctccatcaagggtgattgagcttttagggccttgaccatcgttcccttattgttgatgacgaattcgaggcttatgaaacaaatggtaatttcgggggcccaaactacgccgtgg

SEQ ID NO: 58895 - DNA, 329 bp, Zea Mays
tttcctataggatcaatcttagtgattggccccttgtcttcagggaagaacttacgcaacacattctcatattttttaggctcaatgtaaaagaaagggaaagctgctgcctgaccatctctcgacaagtttgggataggcttgacaattatgtgatctggctctgccatcaaaatatagctgcacatagtatgaaattaactagctattgagtctgggctctgaagggtgattattgcttctcaaataaactaactgtaaacttactcttcctttatgtctgctttctggagccactgaacaaatgcccatggcctattgagaacgat

SEQ ID NO: 58896 - DNA, 387 bp, Zea Mays
gctggctcattcgttgttgcaactgtgcacgagaaggtgaaataggaagaaattatgggtaaaggccagttagatttcagcatcgtaaaaagcgataaagctcaagtgagaagtggcccgggtgactgtgctgagcggagacggcatattccgggtgctcccaagtcccaattccggaggaacgcttcatcctactcatcgcctttatgtgtggatggggtcagctccaggctcggatccacatccacctcataaaatacatgctttcatcgtacgataaccagcagggaaagagaggacgaactgtacgcaaacgggaagccgtcaatgcaagggagaccatttcttcaaagatctaaagaaacctaaacacgtcatcaggccatg

SEQ ID NO: 58897 - DNA, 520 bp, Zea Mays
caaagaaccaccctcgaatctcagaacagacgaaaggggaaccctttcgttcaaggaccgattgtgtgtgccaaagcgggaggcacaagaaatcctgctagatgaagcccaccatttagcctattctctccatctagggtctaccaagatgaacttagacctcaaaaccacatactgatggaaagggatgaaaaaggagatagctcaacatgtagctcggtgtgattcttgtcaacagactaaggcagagcatcaaaagccttcagggttactgcaacccctcctagtgcccaaatggaagtgggaagagataggcatggatttcgtgatcggactgccccgggcccaaaaatgaaataattccatctaggtcataattgactaccttaccaaggtatcccacttcataccagtaaagactacttacggaggagccaccctcgctcggttgtacctcaaagaaatagtcagactgcacaacattccgcgaagaatagtgtcagacagaggaacacagttc

SEQ ID NO: 58898 - DNA, 718 bp, Zea Mays
gttgtgataaaatatttttcgtgctatgaactttttgctggcttgtttttagtttactgccactgtaagcgcaactgttttcatgctttgccttttttctttaatcaaagttgagatggtcgaagataagagaagcgaagaccccacactggctagattttatgaagatatggagaggaccaacacggaaaagataaccagtgaaattctggctggtttatccgaagattctgagggcagtgatgactttgattttgatagttgtgcagaagacgccgaagatcggccatgaaggccaagccatgttgtcttcgaaaatccactgttaagaaaagggaagattgaggcaatgaagggcaaatatttccatgatatatttgtaatgagagctggaggagagagcattgttcctcttcctgaggtagacgaagtgatggtattccaaattttcatgaaggatgggcttcgctttcccttgcataaattgctagtcaaagtgctgaaaagattcaaaatataccttcatcagcttcttcttgaagctttgattaaagttggagttttaagcccctagctgccgagtgggaaatgtcgaaggatgctagggctaatacaagttagaatgctggaaagagcagtttggttcatttgaagtattcttatcgatacagaaatcaatttggcgatcctgacgatgactggcttgatgccatcgaag

SEQ ID NO: 58899 - DNA, 933 bp, Zea Mays
atgtctctatgttgaggaagtttttgcgggatccgaaccatcaaattgagttggaaccgattgatgtgcagcaagatctgactctagagtgtcgctcggtgcgtatcttggagtccttggaatgtgtcatgagaaggagatcaattaaatatgttaaggtcttgtggactaattagtctgagcacgaggctacttgggatcttgaggagctgatgcggcagaagtacctcgaacttttcgttatgggtgagtttttgttttcgctgatctttattctgtcattccaatcgaagcactgtaattacggggggtagagtgtgatacccagttttctgaaaaagaagttaaatttctttttctattttctttcgtgttctgtgtcattggggtttggagttttaggaggcataccgcagagaaacagtagatcattttggcatttttccgctggggccgagagctcagatgagagagcaagttttgggccgttgatctcgcatccgatggctgggaggccccctcttctccccaaccctagccgacccctctcctcctccccaattcttgcagctgtccccccattcccaccccctttggtcaccgccccctccctctcttcttctcttccactcttgcagccgcccctctccctttctttctccctttctccatagcagcagccgcccccccatcacacacaaccctagccgcccccaccatctcctcctctccaaggtgcagcccctctccgcttggatctccttcgtgttggtgcaagccttcaattggagaattggtgggaggaagaaggaaggagagaaggaagaactcaaggtgatcttgtggttatttttgtatttgtgctgcaattcatttggttatccgttcacctaggcgaattggtagaagtgctgtccagattttttgtggcgg

SEQ ID NO: 58900 - DNA, 420 bp, Zea Mays
gtggaattggttgctcaccagcgatggtccgtcactggttgtgggcggcgccaccgtgcgtggatgcgagatgattggggaatttggggccgttgatcttgggagttgcgacctagattagatcgtggatacctcctccatcttgtaaagatctggctgttcacttcagatcgaactagtgctggttaatcagacctaataaaatcctgaccgcatgtttttgatctggtggtccgcatggcgtaccgattcagtgcgtagaacgaatcatcgggtgcctttggatcatgatcgtgcggttcagagcagatcaagcctcataaaatccgggtcattcattaatgatccgaggatcccgagcccatactggttcacgtggatatgtggttaatccgagccattgatctaaatctgtgcggt

SEQ ID NO: 58901 - DNA, 893 bp, Zea Mays
acgagatactacctatctggaattctctgaaactcgaccaccgctcttcgtcaaggcagaggaacccttagaagccgatgaatgggtgcgagtaatggaacagaaatttgggctaatccgatgcacggagacgcaaaagcccctatttgccgctcaacagttaagagggtctgccagtacctggtgggcgaatttttccgcaatctagcctattggacatcaagtcacttgggaagaattcaagctggcattccgggaacattatgttctggagggagtactccagatgaaactagaatagttcctccgactgaagcaagggagagatactgtgatgcagtatctcaataaattcaatcacctctcccagtacgccattgagcatgtggatacagatctaaaaaagaagaattgttttatgagggggataaatgacagacttcagcggaagatggcaacatgttttggacctcacctacagcagggctgtcagtacagcactggcagtcgaagctaacaatgcgggacacgggaagtcaaagggatatgcgggtgaaagatcaaatcaagggcctaaaaagagatcaaggttggtaatccgacctttcaatccaaatcgttctttgtctcgcccaccttcatatccattcaaacagctcgtatttattcgtcccactcctgcccccgctcctaccaatcagccgagtgcccctggtactcgtttccctgcccttcctagttcctccagtggttgcttcaattgtggaaagtccggacatttcatcaaggacggcccatatccgaagcaaaacaaatccaactttcagcagacttttgggaactcgaatcaaggaaaggggaacacggccaactcttttacgggcaaaaatttc

SEQ ID NO: 58902 - DNA, 453 bp, Zea Mays
caagacgcacggtgggcacggaggcaagcgtccaagtgcgacgtgggaaggaatccagggcaccatgagggaggtcagatgagcttgacgacagatctcaccagctccccacggtgattcgggcggcccatatagggagcagggaagtccgagcgggggataagcggaaggtcgcgagttcgttaagatttccagggtgtttgttatggggaggtcggcgacccccgactatgtcgcaacaactgatcccggtttggacgaaaggtaggggatgatcctgatggtgagggcccacaggtaagtgacctggagcgaggggataaacctaacctacggggtccacatgccagtggcaaccaggtgggcgggtgacgactctgagtgggccggtgcgggagtggaagagaagagtaattgggttggctagggaattaggcccaaacgctgttttcc

SEQ ID NO: 58903 - DNA, 298 bp, Zea Mays
acagattgctgacttgaagttgtcaaatgctagttagtgaccttgtttcttccttagttgtttcaattgattatcctgtttttaatcatgtaccccctttcagctacattgtcaggtatggctcggcggtactctgagcttgaggaaaaatatcttcgaaatcaagccgacttagcccggtgagactctgatcttgaggagaagtattctcaaggtcaagccaacctggcccaagtttctgcttctgtggatgatgcgcgctctttgaactcttctcttaatgctcagcttgactcag

SEQ ID NO: 58904 - DNA, 530 bp, Zea Mays
aaaaacttatgggtgcttcatatataaaatttacataagtagatttatatttcgcattgttagtatgacattgattttgtagcaactaaagacttcctcaaatcctaatgcacctactatatagtaaatattcgagtaaaatacaatttcgttccttaaacttgttgagctgtgtcatcctggtccataaacttttaaagtatgcctcttaaaggctcaattgttgttcgagtctcagttatatcctaatgggttgttgtggctggactaggcccatatgtcaattgttgtggtttgttgcactccaaccacccttctccctccctcccatgccgccacgacacaccttggtcgttgggccgccattgctgtcgcttagccaagctcgtcacacggccacctcccctaacatttgcgttaggtttgcctgaccaccctctatcctccccactagctctagtccaccacccctccactgccttacagacgagaacacgtgaatgatggcggacaagccggaggcactaaca

SEQ ID NO: 58905 - DNA, 288 bp, Zea Mays
gccaacatttggcgcccaccgttcgtgctacgaacaaacaacccgcgatggcacccaaaagagctagttccaaggcagccccctccgtcgacgaagcagcgaaggcagcactgctagatgagaaaaagggcaaggccctcgtagacaacacccaccaagaagctagcgaagacgaagcacatagtaagagacagcgcaacgatcaacacactcccgaaggcaccctccgcacctacagctccggagggcaaccacaagtaccacccctaggcttcactccgctagagg

SEQ ID NO: 58906 - DNA, 446 bp, Zea Mays
atgaaatcttttattgagatgtaatcttgatttgttgagggttactgtggtctgtggttatggtacacaaccagaatccttaatcttgatacaggggagacgtggatgacatctcctagggatctttgagattgatttgctagggatcaagggaatgacactcaatttagataaattgacgaggttggtccctacatcctcctccatttgctcatgtaaagcttttcccaactcaggcaatgcagtttatgcttattgtcgctccactgcaaatcatggcactcatcctatcacatagttgttttggtcaaaccaaagcaccccatgtggcgaaggttggatggcctgtgccatcgctttgatcaacatttctttgccggctttcgataacatcttttttcttccaccctagaatccgctcccaaattcgcttcgtttataaaatt

SEQ ID NO: 58907 - DNA, 727 bp, Zea Mays
catcgatccttcgcagtgggagacttggtccttcgccgaattctaacaggggaaggacggcataaattgtcgccactatgcgaagggccattcatggtagcagaagtcactcggctaggatcatatcgacttactcaaatggatggcacggaaatagggaattcatggaatatagagcatctcaggaagttttacccctagctagatttcaaaagctattggggtagcactgtattctgtaatgggaaaagtacatcatcaataaaaagacttcattctcaaaagaactcaacctattgacaatctgcacggttacttaactcagactgaccactataccctactaacggagcaatcggcttaagtcggcaatgacttaaggtggtgcgacatgctcacgcttacttaactcagggtgaccactataccctactaacggagcaatcggcttaagtcggcaatgacttaaggcggtgcgacatgctcatgcttacttaactctgggtgaccactataccctactaatgaagcaatcggcttaagtcgacaatgacttaagacggtgcgacatgctcatgcttacttaactcagggtgaccactataccctactaatggagcaatcggcttaagccggcgatgacttaaggcggtgcgacatgctcacgtctactcgatccagcataaacatgcttaagattattcatctcagggcgatctctatgcct

SEQ ID NO: 58908 - DNA, 616 bp, Zea Mays
aaccgttggaggctggtgcccgcccgtggagacactaccagaatttggctctttgtcgagtgccaaatgttttgtcgagtgtttttttcgggcactcggtgtcggggtgataattaggggtacccagattatccctccaaaacacgcactcaggagaagtaaatacataacccctaaggggaatcagctgaggtacctcctaacccaaggcctctccctaagtctcccacctcaggcagaactccaccttgcctgaagtcaccacctctatgtccatctcgcccgagctgatcccaggcagataagacaaaggcacccgaaaacaggtggggaacgctcgcatttaatgtgcatacctaccccatgccgcggcagtaggagcacagtggataacaagacaacagtcatatccgggtgcaatgacatgattacacccccgctacagtacgcccacgccgcctgccatccctgatgggacatctaatatgatgggtgaagcagaccggccctcgggcgcaaatctccacctcgcccgacactgagtccggccctcgggcgcaatctccgtctcgcgccgacgctgagttcggcctcgagtgatttcatcgcctagccc

SEQ ID NO: 58909 - DNA, 631 bp, Zea Mays
ccgccttgggggtcggggtgttctggatgtacgcagtaggcctggacctgctgtgtggaaggcactagaccctgtgcctagcgagcggacctccaggatagatcccggacccttccaaatatggttcggacggttcaccaccgggtcccagatcctaggggcaggaaatacccgatccttgccctagaaggggtctggggtagacacgtgtccggggcttgcaccatgccccccccccccccgccatggcggtaacccgctactaccacatggctggtggcccatgacgtaagccaacggaaggagtctgacgtcgggtcactagagtcgtgcagccactgcatttattgcagtagggacgcgacgcctgtgccaagccaatgaatgatgtgccccctcggcatttaatgcgtcaagtcctctccgctgacagacggtgtcagacggcgcacctgtccaatctatcatcaaacagcgcgcctatgtcatgcggcaaactgtgctcgttgtcccttctgcaagaaagcttccccagcacgccaaggacacacagatctccagcgtcagggcgtagggagattgccttggcagcgaacactagaagcttcaagtattatatatgcattttgtc

SEQ ID NO: 58910 - DNA, 891 bp, Zea Mays
atagagcaggagcagcactggaactacccgcctcatgatcatgtgaacgaggaggcacaggagccggtggcgggatccccaggccctcatcattatctgaagatgtgttagcaacggcaccctgggtctcgaactgtctaaaggtctcatcctcagcccagatatctgacactgaatctggcactgggactgggtcctcaggtgttggaagataggaactgagctgaaggagagaggcctcgagggtgccctagaactaaggaggcctgatcagctgcgcaaagatgtgacagaggtaatgagcatatggcagctgacggcgagcacggagaccatcccatactatgtcctcgatctcacaaataaggaagttaatcacgtcgaactctgaatgtgagaccaaggcaccatgtagccatagttgaatatgagtggtggcctctctgtatcccatcctgggtagtagtgtacgtctcatcagctcatataggaacttcagtacagtaggagatcgtcgcgacccaactgtgaaagaaggtctgaacagggctgtgacgtgagctgtagcaggtgcaactccgccgtgagggcgacgaggaggatccgaagtgccatagcacagacagtgaagcctagtcgtcgactctggaaatccaaaaggctgacgaatctgattgacatgcaaagtgacatcctctcactcgaaacggaatcacatccactgatggtcagggtcaatccatacggtagcatagaacactctgacccactcgttaatatacctgccactcgtggtcaatagtgaaagcagtcctggcagataggtaagatgaccctctgaattggcaccggtggctagcaaaaaagcaggtaaatccagaagccgatgcg

SEQ ID NO: 58911 - DNA, 421 bp, Zea Mays
gattcaaacaacgataacttctaaaatataattccgaatcgaacgcataagtactcgttggaaaggtacaacaaatatctacatgattctcatattgattatccctaatttcccactaaaaatccccagaaactgctaatactactgctgttcgcccacctgcagaaatctgtttttttggacagcaacatacccggattcaaacagcgataacttctaaaatataattccgaatcgagcgcataagtactcgttggaaaggtatgaaaaagctatacatgattctcacactgatccccactaattgcccacaaaaaattcccagaaatcactaggactactgttgttcgcccacccactaaatttctggacagcacctctaccaattcgcatacgtaacatctattcaatggaattgcag

SEQ ID NO: 58912 - DNA, 425 bp, Zea Mays
cacgagtcaaagggggatggatgaagagtccgccccagaagtactcacccccaaggcatcgagcctagtggtcgggcgaggcgaagttaaggggggtcatgcgaaccgagatttagtcactcgagtagattttgcacccggtccaaggtctgtccccgcataaatggttgaccttattaaatacgcctggtaccaagccatgacagaaggttggtcgtcactccactcatgacctgcggacccaaaccaagagcccacccatgaactgcgaagccatagactcgtgactcactcatggcctactgagcctaggtctgagtcccctggcgatctatagggcatgcaatacaacgagaatcacttaggctcaggctacgaaggttaggggtcgacgcgacgcagaaggagtaatgatgacgcatgtg

SEQ ID NO: 58913 - DNA, 774 bp, Zea Mays
tctctacactaccttactaccaaaaacccgttaaacagctaattaaaaacctaacactgctaccaattcagacgacctagctaataaacagctacaggtagattaaacaaagcatgcatgaacatgatcaggcattaaaatcccaactgagaagacgacctagcgatctacctgtagcttttctctactaaaagagaactctttctgttaggtgttgtagctgtacagactaagggtacttcatcacagaggaaggagggtagttgtccatcctgttggacatgtacgcaactacgtgtatatatgatatgatatattcttgtacagcagtacaggagagggaggcacagctcatatgaacttgcactgggacccattcaagtgatgaattgaagaagatatgtttagttcttccagccagtcctaaacaagctcaactcattgacctgttatatttatttgcaagctgccacggcagatggttgagttgagcactccagtcactggtgactaccaaactaccaatgcaagaaccataggaaaatggcctcacgccatgtcaaattctccatcctgaattcagtggccttgttagttgcactgctaagcacagcaagaaacggcaaagatcacttttcaagtacttgtagatcgtttgagccccacaggtttgcagtgtgaaggtcacaagttcatcatcactgtggcgtccatgccatgccactgtcgcctccaaaagctcacgtccgaatcatacaaaattttcagttcccc

SEQ ID NO: 58914 - DNA, 494 bp, Zea Mays
cgggaggaggaacaatggaagagagagtggtggaggtggtaggtatggctgaagtggtggatggctcaagagcgactggagctggcgaagtgggaggtggagtggtagctgtggcgggtgtagagggagcggaggagcgaggccgagacgtgagacgacagacccggtaggcaatctgatatgatgatatctgtagttctccacccgctctctgcctgctctgttgctgctctcactgcaagagctgctcgggctgctctatccaaacgctgcttcttgcggccttcgtgctgctctaagtatacggtcttccccttgacctgcctgaaggggcgaggagggtcctcgtcatctcctcccctggcactgacacattctttgtgcgcaccatactaaactgaaggctgcctaggagagtgaaaaactaagcacgagtagatagcagctgagaggattacaaaagaatggaaaactacctggaaacctcacgtgag

SEQ ID NO: 58915 - DNA, 759 bp, Zea Mays
aaagtcaatcaatatttttcagaaggataaaattaacttccatcaccaaatttaggtgttacaatttgaaggctttcccccaccttctctatatgccttgtggtttggttgtgggaaaacttatctatattaacaatgtacactttgaaggctatctgatcgccacagcaggatccaaataatctcagaatattaggtaagaaacattaggccagttcttggttagtaaggccgtgtttggtttcatacggattatagaatctggagtttgcgcttgatttccaaaaatcagtaccaatcaggaagtacagaagtagtagtttaatcaaggcacgcttgatttccaaatgttcttgtttaatcaaggcgcacttgattaccaatcagcaagtacagaagtattaccaatcagcaagattgaccggttgtgtgatttggttagtaaggagcacttcatttccaaaaatcagtaccaatcagcaagtagatactgaatattctgagtcggtttggtttccttttctactgaatgttcttgtttctatactgaatgttcttgtttccatttctactgatactaaatcgcttatcattgcagcacataagtagtagtttaatgtatttgctctgattccatatgattgaaattgttaaaatcacagaaatgttgtttttttgatgataaatctatgatgttgtccttgcctacaaatctaaatattttggtacattagggaaattttgaaagtttattgttcg

SEQ ID NO: 58916 - DNA, 752 bp, Zea Mays
ttggttcggacgatttgggccgtaatccatttacggggtgccgttgattattttgagttgggcctgtccgccatccgtttccactccagcctcaccatgacaagttctcgaagatgtagagaggcctcaaaggatgatgcacgtcggaagaagttattaggccccgcttgctgccaacaatttcacctaggggccgtttggattttgaacgaattaaaatccgcttagaagagtaggctacttggtttgattgaaatttgatatttcaccactttataaagttatatatgtaagtctatctcgaattcataagctgggggagtggaaattgattttatgcctagacataagcatactatttggtttggaatttgacatttcacccctatatttacacatactattgttaatactattgttagggtacgagtccaggtgacatgcatcccagattggttttctgatctacagatgggctgctgaccaggaacgagtgatgacaacccatgttccactcgatcttgggatggccatgattaagagcacctgaaacccactctgatgaattcgcggcgtccgcagaggccatagtcacaatgtttggttgcatttgcacatgcggggcagttcgttttttttttttttttgagatttcggggcagttcgttcgattggttcatccaagaaaagtgacttgcaccgcgattcaaagcggagccgagacaccagcgagcttccttcatcaatcaaag

SEQ ID NO: 58917 - DNA, 455 bp, Zea Mays
gtctgaagatgtcaccttttgaagctttgtatgggagaaagtgcaggactcctctatattgggatcagactagaggaagacagttctttgggcctgaaccgattccagaggcagaagaacaagttcgtataattcaagggagtttgagggtagctcagaccaagcaaaagagctacacatataatagaagaagaccacttgaatttgaagaaggagattatgtgtatctcaaggtgtcaccacttcgtggaatgagaagattcaaagtcaagggcaaattgtcccctcgctacattggaccattcttgatctttagaagagttggggagatggcataccaactcgagttaccggatagtttatcggatgtgcataacgtgttccacgtatctcaactaaagaagtgtctccgtgtccctgaggaacagttaccgatggaagagctcagtgttcag

SEQ ID NO: 58918 - DNA, 468 bp, Zea Mays
cacttgcagctcgtgacggtgattatccaaatctgccatggtaaaacgatggctcctctccaagatagtaagagaattgttggtgtcacgatacaacctatcaagattatcgcgagaggccacaagtacacgtttttcttcctacagacaagaatcagctctcaagcacccagtaagcagtaaaaacacaatagaggaagtcaagtaagcttacttcattagctgcccttttagagtcaagctaagcactgagagaggaattcaatgcgttggcatcatctaaggaagcagaaacccaagccatgtcgatctgaccttgagaatacttctccccgagctcagagtaccaccgggccatatctagcaaaaaaacggttggagaaggatacttagttaaaaacagattaatcaagtagccaaggaagaaacaaaggcactaaccagcatttgtcattttcaaatcagata

SEQ ID NO: 58919 - DNA, 303 bp, Zea Mays
gcatgacatcgttcgttgtgcgaatcatgcgctcagccctaccgttttgaggagacatgtaggggcacgacatgcggaggtggacaccgcgagagagaaaaaagtcatggggcacattgttatagaactcacgcccgttgtcacactggatactctggatggtgtgaccgaactgagtggagacccaagcgaagaagtgagacaggggtgggaaaggtgtccgacttatgatgtaagggaaaagtccacatgtagtgcgagaagtcatcgagaacgagtaaataatacttatagccagaaatg

SEQ ID NO: 58920 - DNA, 930 bp, Zea Mays
ctggatttggggtagtaactaccctgactccgcctccggtcaaaggtaacaatcttcttccgcatctgggtttttctgctcagccgttgaaccaagcagtacattccagtttatcaccttactcggcaaatctggcagcggctttacccaacatgagttttcctcaatttgatggacatcatcctaaaatgtggaaagtgaagtctgagtcatattttgaggtgtttgctatacctagtgaattatgggtgaaaatagccactatgaactttgtgggttcggcagcattttggcttcaatcaatggatccggctttgcgtctcacaccttggcttgatttttgctcagccgtgtgtgctcgttttgagcgtgaccatcacaaccacctcattaggcagttttttcgcattaaacagtatactaatgttactgaatatgtggaacagtttgacagtctgatgcatcaaattttggctcatgatccatcatttagtatgtcagccatagtaaatcgttttgttgatggtcttagacaggatattaaagcagttgtgtttatccagcgcccattagacctcgatactgccgtctctcttgctcttttacaggaggagttactgtccccaagagttcagcagcagtttaagcgttctgaggaccaacgcagtagcagcaacacttcggggtttctaccaacatcattttcaactgctcaaatttctgataagttgattcgctcaccagagacaaattttcgtacaccaggggactgtcaaaaccagaataccgagacaagaaaagcctctgctctgatggcgtatagaaaagcaaagggattatgctataagtgtggtttaaaatgggggcctactcatacttgcagcacgacggtgcctttgcatttagtcgaagagttgtggcagatgtttg

SEQ ID NO: 58921 - DNA, 701 bp, Zea Mays
tgaagatggcccatggcggcgttctagacaaaactcgacggcgttcttgccggagtaccacggtagcgttcaaaaggggaagctggccacggtggggaggacagtcggctggtgtggtcaccactggcagagcttgcttcagctttaagctttcatagtggaattagaggagtgggaaaggttgaggaggtggtctaagcgtagaagatcaatagggtatggtgaagaagctatagaaccatcagggcaattaaaattcagtcttcaggtttcaaacaaccatggcaagcaaccaaggaactggagcttttctgggttttcacagcaacttacacagggctaactcatgactaatatgttccccaaccccctttgcatggccaccacgcagggcaaggcacaagggggaatttctacacccccactgcatgttggacagcagggccacagtaaaatagctgagtcactcccttggataggcttcaaatttgttttcttcatgtccctaggcagtaaaattttaccccaagttactccccttctaacaccagatcattcctatctgcagattgctcagaaccagctagaaaaggtagcagactgggatattattctcagatcttttgggctgcccagaacctgttcagtcgactgcaggaccatatttaccccctcttttctccaatttccacataagaaca

SEQ ID NO: 58922 - DNA, 284 bp, Zea Mays
gtttcttttgcataatacgctagtcgaaggggtatcttctaatctgaaccattcgatgagaccccggccgctaggattagacgcgaccacggcggaattggtatggcacgacaggcatcagatcaagattctagggttgagattttatgaggtctaacacattccaaaccgttcgattacatcgacggtctagattacgccctagcgaatcaatacgcgcgggatgagcacgtccgtccgataggatccgtggccatatccgctagctaatcacagccgtccat

SEQ ID NO: 58923 - DNA, 854 bp, Zea Mays
aacctctcgcccccacaatccttcgccatcaaccatatcggccatagtacagcgtaagatccggccactgctcggaattggcgttcctcgtccccatccgtctcgtggagagctctgggtgatcgtggttgctgtggagggcgttgcgaggaaaggcgcaatgactgcggacgatcggtgcggcggaattgcttgccgtagttcgaattccgccgcaggacttcaccaccatgtggctgggacccccaccgctataatccgaggtgataattccctcaccttgttcatcttgtcattcgcgttgagtagtgcttgaccatagtggattcggggcatcgctgtagccgggcaacctcgccggacaccgtgccatgggcggcgcctccgtttccgtcggcacgttggagaagaatgccctgggaccgttgatcaacagattgagggcagggatcagttagagcttacccatttgtgtatctcttctgcgccgttggatccatttgtagcggccatgattcgaagatctataccttttcgttgaatcgattgcgaaccgtgcggtccgcatctggcggatgggattaaatcctgggagcattacttcacgtggtagatcttggtcgtcggatcccgatccactgatcgggattgcttactgattcatatgatgtgtaggtctaatctggcggccgaattctgatcggacggcagtagaagctccataccccttcgccgagcacttttacataagaaaccttgggaaatagtgaaaccaacccgaggtcctgcgttgtctcttaggaaattttactccagagaccctgccttctttggtatttgacgcgctgtccagg

SEQ ID NO: 58924 - DNA, 741 bp, Zea Mays
gttttaggaaccatgggacaagcttcaggctaaagctttagcaaaccagaagaaaatgatgatagatcatgttcgtggcttgaccataatgttcacgcgctggcaaagctcaatcctgggcacaacctcgatcgaaccctggtgccaataagacaaaggtgtctcaaggatatgtatacgacacgtctcgtggaggaaaggacgaaagcgcccctagtctacttgagagaatgtgagcgtgtgaattgaataatgtaatttcacatgaagatgcatgttaccatttttctataaataggtgtatattgcccatgcaacaagacatgttttgttgttcatttgcgcttgctgcttcgaaatactctacattcagagctttatgtgcaaataccttcatacacctcacccacgtcgtgaaggtaatgttgtaatagtttgtaattgcaaagaaaatattaaaagatcgcaagtatacttcacaactcttttgcatatacatctctccctttgtaatatttatgcccactcggcgttgtccttgcgccctttcctctctgtttacgagtgaggggaaggagaaggtataatcaatttaatcgtgttgccctgttttggttttctacagtgacaataatagacgaccaacgtctctaaacagatgtgtgtgtggattttgtgctcgcaagccattatttacccttctagcagagagcagatgaggacattgcaaatgtgcactcg

SEQ ID NO: 58925 - DNA, 395 bp, Zea Mays
gattaatgctcggggcctcgggcatggcttcctcaacctgttattatcaggtaacacggaacaagctgtcgccgctatacagatttctctaatggtcacgtaatatatatgatatcttgtttctgttctgaagttttcactcactggaagctggacgacaaagtcatatacttgaaggtactggtagtagtgcgttggtgcggtgcagttttcagttatatttctgattgctcatgaacgaattgcgcttcttgatatgaagatgtctttgaggaagagggacctaaacctgaagagcacgggaaggccaccaggtgcagttaattgtctgtcaccatgcaaacgattatttcgtgcataggtgtgtggaattctgatgacacgtgtttcagaac

SEQ ID NO: 58926 - DNA, 581 bp, Zea Mays
cctcaggtcaatggcgctatagtagcctggtaggcagctaagactgtctgcaacggttgcggtttgcttccccctccctccatttagaggcaactgtagaccgctatccactgcatcggtaccctctattcgtccccctgcactagagtgaccttctctctccccctcaatacaggggcacgctacactcagccgcgaccgcctctactgtcttcgcgccaactcccgctgcctgcatttgacttggcgccaagtcctgcctgcacttgactcccgctcgctgcctgactacgaaaactggtttcagatttggttgccatgcaacaatatatatattccttgtatactctcgtttgctaatttgagcagcactgaatttctgtgttatgaagttgtaataataaactagttggacatttatttcctgtgtcatcggattgttaatgtaaaaccgcagtagcacttcatgaactgttaaagaaacacgtttgaatttgaaagttttaaaaaaacatgctttcctgttcgtgcaagatacttttgattctaattaattttcgaatttaattaattaatatcgc

SEQ ID NO: 58927 - DNA, 581 bp, Zea Mays
attaaaataaagtctaggggtctctctgcaagaaaccagggacccatgtgcaagaaaactggaccgcgggttctattcccgggaaagctaggggttctttaataaaaatgccaaactaagggggtatcgggttgtctcgaccatcagatgtcaggtcaatggccaagaaaagatcccagttcttggctatcgatggtggaacgacggaaacaaagggtggctagggtcgtaacggagaggcgggactgagcgtaggctcaatttaaaggaagtcaccacgacgatggggggcggcggcgatagcctgaggagctccacgttagcctcaagggtgtccacaggccagtaacgtggcagacttaacacaaacccattatggtggttcaatactcgagcctccaaccagctgcatggatggccagagcgtccggtggctggctacggcggcggtggatgattcatggtgaggacacgtggtgtcagtggctagagcggtaattcgatcatcgaatccgagcgaagatctttttaccacgcattgatccacatctcggcggctccaatcatggcgcgagctcgaa

SEQ ID NO: 58928 - DNA, 610 bp, Zea Mays
atttttccaagatgtttgtatggctataaacgaatttctgacaatgtttcaaatttatatgaagtcatttgcatttgaatttgaattttaaactcaaaatctctttctcataaattttaaagataaaatagtgcccctaagcgggccaagtggctttcggcctagaagcacagcataccagcataaccatgctcttcaatcactgacaggcgggaccaccccattaggtgcagcagcgcggcgtcgatttcaccctctcgtagctgctgacaggtgggacttcctcgttagccgccttcacgcacaccctcacgctcggtccctaacttgtggggtcaccttgtcatccttaacccctcgccaagacgtaaaatctattttcgcaaccaatcatataatggcctagatttaaaataagaatgatttccatcattgtatgctactgcaaatagttgttgaaattatttatatttagttttcacagaagcatgcagtggtaaatctagtgttggtagaaaccttttctatagtagcgtatctaaatgcactaccggaacctggctctttgtcgagtgctcgagtctttgccgtgtacatttttttaggcact

SEQ ID NO: 58929 - DNA, 577 bp, Zea Mays
tgggtgtggccctgctgatgctgatcccaatgggtgtgaccctgccagagttgatcccaatgggtgtgaccctgccagagctgatcccaatgggtgtgaccctgctagagttgaacccaatgggtgtgaccttgtgccgtttattgtccgtattgttgacgaagacgaagaagaagaagaagtcccactaattcgaaagaacagtcaacgttacagagtaagtggggggagtagcgatattccttctccagctctgtctgctcttgttggtctacaagaattatccatagcaaattttgatcaggctctcgaggatgttgttcctgaagatctgctgtccaagccaactgatggtgatatgatggacgtctgctctgacattctagatgtgggattagaggtatctcgggcagcgtctcgtgcctcgtcgaccttggaaggtggtcttcgaagctaagaggttggtcaaggttgttcgattcccatggaggtgactgagagtctttcagccttaaaggtggctgttgcggagaacccagtcctcaaggatggtgccagcagttgcccagcccccgag

SEQ ID NO: 58930 - DNA, 794 bp, Zea Mays
gcaaaaacatctttaggtataattcctttggatggctagaatccgctccattgctatatgggtcgctccattttgggggaaaaaagacttgcagatgatgaagaaacttggctatttcagcgacaaggtcaatgtgtgccttcttggagaagagacaatgctaagtccaaagaaagacaaagttgttgtctataaaagcttcttcaaagctagacttcggctgattgcgaagatattatagaggtatgaggtatacatgcatcaattgacaccaaacactatagttgcgttggtgtttttatttgggccatatgaagctagggaggtggcaccgaggttgatgcattcaacaaggttcacgatgtacattatcagacgaaggctaaatccctagacaaccttcacaacaacttcaggtgctacaactttgtgtaccgaaaggacaaagttgcccagttctcgcgtactggacgaagtggcatgggaattgaacgaaggaatggttttacgcggaagtagattttgaacatcacaaagagttcaggggcatgctaatgagccctataaagattagcttcggtctaacgaggttgaagtgtgaaatgaatgagactgttgaggagtgttataagatttttaatatggtcatcgagaaaattggctctcaagacctaactcaagaggtgcttgcgcacaacatcttccctacctggaccgagtggaagttgccgaaggaagtgaaatcaaaagaaggagagctcgtcacactagcatttgggttcaaggaatagtct

SEQ ID NO: 58931 - DNA, 374 bp, Zea Mays
attctttgttgactatcatagaggagtaggtggagagcctaaaggatggatgttgcaattgctgcgactccaaccactttattgccaactgccctaagaagggcaagctagaggcacgccagcgtgaccatcactctggtcggggcaagaacaagcaagagtacatctccagcaagcacacgtccaaggggaggtttgacacggaagagttcaaggagaagtacctctagaaggacaaggtgaaaaagcatgccttccttgcctccctcaacaaccttgaccatgactctaacaactcatattcttccttgagcaacgaggagctcgagagatgggttgaggacaagctgaacagactctacttcctcgtcgac

SEQ ID NO: 58932 - DNA, 839 bp, Zea Mays
tgcaatcacactagaccagcagttgcaatcacaacacaccagcaattacacatcctcctgttcttctcactaatccatccgttttttcttttttttgttgctgcaggagaattttgttggagtttggccttcttgttggactcactggcgaggaaattttaacctctttttctaatgacacccttggtgagtcaggaatcatagactttttcgtgcactgcatgcgacatgatgatattgtgcacaagttcgattcttgtggatacagagtgtttctgaccactggtttttatgtaagtttcttctccaaaaccatgtatttttttgtatactgtcttgcttttatgtgtttaaactaatttaatcatttatcatttctcttttttctttattctccaaactggaaaacacatacagttcaatgtctcaacgtgtgaagcagtactcaacgctgataaatctgagacacaagacttcatacatgtatggaatcatctgatgtctgagtgcgaaaactatgatttgtcaagaccaaattggttagcagaccttttccccaacccactctgtttttcgaacccactttttcatacctacaattttaactttccatcatcagcagttgcaatcaccagtacacatactttgcaactgtctatacttttttcttgcaacttcttttttcatatatgttttccattttttcgtaattagttttctactccttgcttgcaccaggttgttgtccctatcaaagatgatgctcactattttgtatattgcttcaattttatccataagcgtattgatgtgctggactcgaacgactacttcctgaa

SEQ ID NO: 58933 - DNA, 435 bp, Zea Mays
tcgagttgaggaacgtcggcgccacataccaacattgcatgaatcatgtgttcgacgatcacattacgcgcaaaagttgaagcctacgtcgatgacattgtggtctgaaaggaacatgatgcccaagaggggggtgaattgggcttttctaaaattccaacaaaaagttaaaccctaagcacgagcccaactttacccaaactactaacaataagtaaatactacgagatagacaacaaccctaagtcatcactacaaacactaactaagcaattacacaaagtaaaaagctcaaagtaaatgtggaatgtaaagtaagggcaaaagactcctccatttttccccgaggtatcgaagagtgggaactctttcttagtcctcgttggagcacccgcgcaagggtatcgctcccccttagtcctggcaagactaaat

SEQ ID NO: 58934 - DNA, 603 bp, Zea Mays
gtggactgactgaggacgaggcactagggcggagcagccgcatcagcgcgtcgttctggcgagtcatcgaatttgtcgtgagatagcgttggtgagacgacgacaagtaggaggagcgagtgcaggaggcaaggtagcgatagatgatggtgacgacaagcgacacccattgtcgtgttgcaatggcgcggtgggactctaatgagttagcgagggacgggtgatgccatggtcccaccaacagcttgcccatgtgctggtgcatactaggaggcaaaatatcaatgttgtgtgtaggatcccgacgagtcgacgagctgatgagtgatgagaaggcaaagtgcgcagtagcggacgggttaggtcaccgacttactggtcaatcgatgaccgaagaagcgagtgagccacgagtgagcttgcgctagggaagagaatcaaatggctcaggtgaaaagtggactgagtagtgaaggatcgaaagaaaaatagatcaaaacctagttttcattagatttgtccacgctaactatacaaaaatttgcttattttggtgtgtacctaaacctaggtataaggggttaagaaaaattgaggtggggc

SEQ ID NO: 58935 - DNA, 521 bp, Zea Mays
gggtcgtgtgtagccatactcctagtatggcgtattgtatcgcttgttcgtcatacaaccccctatagctagtccttcattgacaccttcatagtagtgtgcagtgggtatcgcgggtcagtcccatggagcggtcgtgcgtggcgaagttttgcctgtcgtcacgggcctatgtcacccctagcgtgcgtaagcatacaccccggtatggtgtatctgttgcgttctttcggtgcatgtgggtcactatagagactccaacgctgaggctcataagactgaggttgactggccccacgagtcagtgagggtatatttgtgggcgcatgcaggggtgatccatcgtgtctgccagagaccttttgatattgtatgtatggttcagacgtggtttggtgatgttgcgtcttgttgcgatcattgtgggccagtagcgtcggcctgggttccttccttgtggatccgctcgcgtaggagtttggtcgttcgccccacctcacagactcgctcggcgggggttt

SEQ ID NO: 58936 - DNA, 361 bp, Zea Mays
ggaagtgggaagaaataggcatggattccgtaacaggactgccacagacccaaaaagggaatgattctatctgggttataatcgaccgtcttaccaaggtagctcatttcatcccagtaaaaactaccttcggaggagccacccatgcccggatatatcttaaagaaatagttagactccatggtgttccacggaagatagtgtcagacaggggaacacagttcacctcaaaattctggatgagccttcagcaagctatgggcaccaagctagacttcagcaccacctatcaccctcagtcaaatggtcagacagaaagggtcaacaaagtccttgaggatttgttgagagcatgtgtgtt

SEQ ID NO: 58937 - DNA, 376 bp, Zea Mays
gaaacatgggcacaggataactcgcctcagatcgaggcacgaagctgtaacaaccaaaattattatgatactgttcctttccacttgccttcgtctcataagacaactcatgaatattgcaaaagcatcttgcatccggttccagtccttggctcctcatggcccagataaaacccccactttaataagagcttcgagggtaatctgatgaaggtatatctcaaatgtcttcaaaacatcgactagcatcttatgaagtaggaaacaaagcctagccttcatgaagctcctgaagactaccacttcatcgctttctggcagcggaacggtgtcctctcccccagccctcactatagacacatcatgaaaatatttc

SEQ ID NO: 58938 - DNA, 506 bp, Zea Mays
atgtatgaatataatgaaagtagcacaaaagtagcacaagatatacaaggacaccgtggcgaactaaacaataaaatggaagacaccgtaacaaccatatgttcactttagttatctacacattatcgacgttcagcattaacaccattaaaaagacgacaaacattttgtatatttacgcaacacaactacgacatcacaagtacacgcatttaccacgttcactttactcatccattagttacttaatcatcaagttagttaagtacctaagtttgctacgactgatatgtagatagacttagttgaaaaggaattagacacttaatttgtgctttacaattatttgctaggcaaacacttattagactttaaccaatttagtttactaatttagcgatacgtgtactaattacctatgtacttaggctcaattatattagttatattatcattactgcgtgttcaaccaaaaccaaaacgaggaaacagtcgactcaagaaat

SEQ ID NO: 58939 - DNA, 475 bp, Zea Mays
cactcgtttgcctttactattcagtaaattctccgagtgactacaggcgtcaggtcttgtatgttttggatggtatgtcaagcactcaagctatgttgagtctacgagcctgcatcttattgattgaggcaaagccttgaggccatgtttaatcagaccgtgctccaggtttttctgggccgaattcacccaacagtttttgtttcgtttaccaatgttcagtggccagtcaccggttacaaccatcttgcaccgcaatggtcgtttggtcacgggcatcggggcatgcagcacaaagctgtctgtatcagtatcatggtatggcatcagtgtatcacttaactagtactccctccgttctttttttatttgttggattttagttctaaaataaacaccattttatttgtcgtgttttagttttaaaataaacagtgttactctgttcttttttatttatcgtgttttagttcta

SEQ ID NO: 58940 - DNA, 514 bp, Zea Mays
tttagcttttgatcatgtgacctatcccataaatgtattatcaaacaatatttgacatttggtgtgtcaggtaggagaagacgcaaaaatcaacagagagttcatgatagccataggtttcacatcgggggaagaattcatcctcagtatcttgcgattcgtcaccgactcactcagatttcttaggcgcgtcctagattttccagcggttttgaaactacaagataaagatcatgaagcttcgatctcatctcaatgagttcaggtcaatccaatcttatgacatcgactcggacttggacccaacttcgaccttaactcagactcagacccgaattcaactcaaattactgatccgacccaaactcggacttgggctcggacttagactcataagatttacttgaagagcgcttcgtgttcatagccaagtcaatgaaaggacatcaggaggaccatcattctcaccctaaagaagacaatgtaactaggaactaaaggagtcataaagact

SEQ ID NO: 58941 - DNA, 566 bp, Zea Mays
ggggaattaaagttcgacgctatggcgaccataaagctgggcaccgagtcttcacctcttttcctctctcgccgtatgttatccaccgctgccgaaaccatggaggaagagactgctcgcaccgccgccggtgatcttcatctgtgccgacgtctcggcctcggcgcatggccgaaagcgtgtgccaggatctagggaagccatctgtgtcctcaagacgagtctagcatcttcaggacacgagaaattcctcgtcggtcgacgaggaaggcgccacgctgtgcgtcatcgtggactgcttcaccttcatcggtgttttgggtgagaatctcccctctagtttcacttttgtccccgcatcgcgtaggctcaatcgattgcggatttagggctcgcggtcgctgattcgtagttcgccggcggaaactccatcgtgggactcatttccgccgccctgctccggcctaggtgaggggagcttgctcgggtcgttggatccgcactgaacggtctagattagagtgtagataatgtttggatgtgttggatcttagccgcccatctgg

SEQ ID NO: 58942 - DNA, 639 bp, Zea Mays
gtaaagagcaaaatacttgattgttgcccttgtggtgaatatcgagatttctattctgtgttcgcagccatgccgcttaattactcgattataagttgtgacaacactccatggtggtggtggcataacctgatggaggggagttgcttatcagacatgatatactatgttggaaacctatggcactaaccatcagagatcaatggcagggatgaaaacttaaggagcagaaaaacatcttaatcttacaaatgtagctttaatggtactattaaaaaaatgcagtattagactcaaaatatccatgtcgtatattgttatgtgttgtatcgaacacatgcttcttcagaattgatgcagtaatccaaaggagcaagaaaatgaaactttaacagagctgcagaccttattgcgcatagctctgttgaaaatggaacttaacacacgcagggtggctgaggtgaagttaacacatgcaagtgacattgtgttgggcccaggtgagcctcagataacggtatcaagtcgcctagtcaatactaatgtaaggggactggtgggacaactaatcgaacctagttggtagtctagtcctgccttcatgccatcgtacaagggtgtatgtgctatatgtagtat

SEQ ID NO: 58943 - DNA, 356 bp, Zea Mays
caatgacactctatgttgcaaaggtctagaggacaagggttgcagcagattttccagttcagcttttgagattaaccagcctagcacgtccatgactaatatgaacaacatagatgagagggggtctccttgtcttaaaccctttttaagctgaattttttcaccagctactccattaagcatcacttgtgtggacgtggtagatagcagtccactcaaaacatctgtccaaatctgtccaaacccaagtttttgaagcacttcgaggaggaaaggccaggatactgagtcaaaagctttagtgatatcaagcttcaaaaggattcttacctgtctttgctgatggaggagtctgt

SEQ ID NO: 58944 - DNA, 604 bp, Zea Mays
tttttcccgaagcatgacggataatatattcaatattttctttcaaagcttagggagtaggagcggtagctttttcaggtaaaatctgttctatagcttcttcctccgctgccttttctccaatttccgaggatttctctttggtgggctctgaaggcccagcttcggcgtcggcccggctcattgtagcttcggcttcggtcagctttgtctcggtttcagtctgtgttttcgaagccttggcaatttttcctggagtagagcttgaagtttttatcatctccagcacatctaatacactagccatcctttttctcttgggggttgctgctagatctttttgtgtcttcggcgcctccactcctgccgaagggcagaacttctgatgttttcgtcccttcggttctcggttcttcaattttgccagccttcggcattgcagccggctcttcaatcctctgcataagagcaggtcctttggcttcagtagccgaagaggtctcaccgccaaattcaggcactatggccggttcaatgtagcgcggtcggtgagtaagaaccttcacctttttcctcttcggtgcgggctcgcttgaagcggctg

SEQ ID NO: 58945 - DNA, 548 bp, Zea Mays
gaatcgtgcggagtagtggggtagtggggcggcaattggttgtgcgataatcgctgcaatgcgataatcgtcgcggtgctgcttagtgacgtggtcatgctccgtgtgcggccggtccaccgggggaaggtcactggtaggtttgttaggttctcggctctgtataacccgaagcggaagtaggaacagtggccctagaacgctgtcgggatttctccggtgatgctccgctaccgggagggaccgacaccgccgttgagtatatcgtgggtaaacgacgaccgttcggtcgttgatctccgcgtggacggccgtgattcaatacgagatataccctttcgcgtgtttgatctaaaccgtagatggttcatccgagggtagattgtagtgacgggcgtgaccggatctcagacgttgatctcggatccgagggtctgggtcgtgtactggttcgagcgcgagtggatctaatcatgaccgcggattctaatccgacagcggtgaagcacttgtaccctttcgctgtggtagtttagcatatgaacccc

SEQ ID NO: 58946 - DNA, 704 bp, Zea Mays
cccgatgttatgtttagtgtatgcatgtgtgctcggtgttaagcttcacctagagaagttcacttgaaagtcgctaattttaagatatttgaagaacacccccaatattggtttatggtatcacaaaggtgctcaatttaaattaattaaatattcgaattcaaactatgcaggttgcaaagttaataggaagagcgcctccagtggttgccaatttcttggaaggtccctagtctcatgctcatccaagaagcaaaatttggtcgctctcgttaccgccaaggcggaatatatttcgaccggaaattgttgtgctcaattattgtggatgaagcaaactttattggattatgggatttctttgaagaattagcctctcatgtgcgataatgagagtgtggtaaaattggctacaaatccggtccaacactaaagaacgaagcatattgatataaggcatcacttcttaagagaccatgttggaaagggggatatctctatatattctatcggcacagatgatcaatttgcgaatatattcaaaaaaatcgttggacgaaacaaggtttttgtgagttacgaagtgaaatgaatgtgattgatctctctaatgtggtttgaagttgagtacatatgcatagcaatgcatttggacttgtgtgtgtgctcgctaagtgatttattgcctatttttttatgaatct

SEQ ID NO: 58947 - DNA, 789 bp, Zea Mays
ggtggtgctggcggtaatccagcccccaagggtgttgaggcatgctctctctctactgcttccatggacgtccacattggatcacccccaatccggtctgaggaggtgatggtgacacgtgtttctgcggctttcactggttaagtcactttagaggttagcgaaccagatgccatgagcctgctgcctgctggtggggttgaggtcaccccgagtcgtgcccttgagattgttcctgctgatcctccctcgtcaagccatgcaccagcccttcctgcgttgggtcttccactattcctttccaatcttcaggtgagtcaacattttgctctttattgttcatactggcaaaatatattttttgcttatctgtctatgaccacaggattttgttgacggcatatccacccaattgagatcttgtggcgctgctgttcccgatcaagctttatctctgatgcagtggaaccctctgctgctccttaaacagatagatgatttgaaggcatcaaatgctggttagtgagctcactgtttctctagttgctttaattgcttagcttatctttaatcacatgttttctttcagctgctttatcagatatggctcggcggtgctctgactttgaggagaagtattctcaaagttagaccgacttagcccaaacttctgcctttctggatagtgcgcgttccctgaattcttctcttaatgcccagcttgattccgagaggatggcacatgaggtaaacttccctggctgatcctgccttgctattattgtttta

SEQ ID NO: 58948 - DNA, 607 bp, Zea Mays
tctcgtatttattatggcggatgacatggggcggtgatggtcccaagcattatcattctggttatgtcgacccctggcttctgcagcgcggcccatcgtgtagtgccctgttggaggtttgtgcactcaggcctagtctggtaggccataagtgcaccgcaagccaagaggtgtgcgagccattaatgcatcgtagtccgagagctcgtaggtcatgagcgctatgcgacccgaggggttcataggtcatgagtgggaagcagaccgtacccatgctatggctcggtgtcaggcatggttaatgcgactagtcatctatggcgggtcagttcggggtcgggcgcaggatccactcgagtgccagacctttaacatgcgttggttatggtacaacaagacaaggacgaagggaccatgaagagaattgcatattaatgttcatccaaatgtagcaactctctctgctaccttggtggtgacaactattggagatggcactaatgctttttctagatagatatgtggttgcacggacagtccctctccattcttgctcctacactagttggagcaactttaaatgtttggttaaaaagagaacgattta

SEQ ID NO: 58949 - DNA, 480 bp, Zea Mays
agaaaacataatgtaaacgcataatcttaaagtgtgataaagatacaaactcccatcaacacgatagtattctactgatgtatcgaggagagtgcaagctttttctctaatccttgttggatccccatacaagggaataccacatgaggtccaaactcctagttggggtaactttgtgggtagctttgagccttttcatgtgtaagtggtgctttaattatggcctctcctagatgctctttatcgtattcgttatcaagtttttagccaaaacaccctaggcctcgttcctccaatacatagtggtgaccacactatagatgaatcacaaaacttatagccccttctagtataactattacaatggcatgtaaaagcaccaagggataagaggtgtatctaacctcaatctcaatcactacgtctaaatctagagcaactgctaatgtaagcgacctaactaacctaagcacttcataa

SEQ ID NO: 58950 - DNA, 357 bp, Zea Mays
cacaactctagctccagatctagttgatccactggcatcagatctcagggttgaggacgaggccatccgacagtttgaggatcagggtgcagctggtgatacttcttctgatgatgatgaggatctagggattccgccaccacctcctgtgccacctcgttcccatgatcacgaggctggtggctccagtgttgctcctctggctcctccagcgttaccgctctggcttccatccttcagtcactcactcagcagcaggctctcatggtcacagagcatgcccatcaggcagcagagtaggctagataggtagttatttagcagaagttgtccgagcggatgttatctatgttccag

SEQ ID NO: 58951 - DNA, 585 bp, Zea Mays
caatacacacactagcacatctcaagaccaccaaaagcaaggctggctggctacatggctgatattcatataattaggattgaactgcaagcgtttggtcatgatcgtatgcttttgcgtggcatgcatgcatatatgaacgactatagctagctcatacagtcgccaacagccagccattcaccaacacaaaagcttcctttgtccattccaatccataaaccctagcaagacctaagtacgcaggtgaagaaaagtttggctccgatccagagcaagctaggtagcttcatttatggtttgcatgcatgcaacgcttctttcatatcccggccgggccaccgaacctctcagaacgacacatacgtctctctctcttccaaacgacaacacatatcttgatccaacagcatcagatcagccacactgctagatcatgctgcccgatgtatatgcggctggcctgcaccacccaccgaacgtacgtacgtatatacgtggccggcctatatatagtatcggatccaaggctgctggtctgctagttgagcttgagcaaggagtcatcgagtggagagagtgaca

SEQ ID NO: 58952 - DNA, 748 bp, Zea Mays
ccggaaccaaaggacgatgaagtcatggtattcaagagtttcttccgcatagggcttcggttcctgatgcatgaaatgattgctaaagtgttgaaaaagtttgagatatatcttcaccagctgacaccaaatgcaatagttagacttagtgtctacatttgggccctttgaagctagggcatgatcacaaattccgaaggtttctgcagagttcatgagttgcactatcagatgaaggccagagcagatggtctccataagaacttcgggattttgcatataggaaggatacgaaggctcctgtgcatggatatcgtacaaaatggccgactgactggaccaacgagtggttttacatgaaagctgatagcaagggtagggagaaggttaagaatatagtgatgagccctatgaagttaagcttcggtataacaaggcctctgtgttttatgaaaataggctccccgtcccaaatggctggagtccatttcagagttgtcgctgaacacattagtactcgggacctggtacaagaatatcttgccaataggggttttccaacattgagtggataggggatgccgaagttcaagggcaaagcgaacaaatttgaacttgtaagattgccataccgattcaagttccaggacaccttcagcggtccttgcaccaaatggctggagatggttgaaacaatgtgtaatgaaattcttggtaattatatgaagaaagaggaccagttgatgac

SEQ ID NO: 58953 - DNA, 956 bp, Zea Mays
aacagtgaggtatgatatgtctagtttatgagtatcattgatccgatgttctacaataaaatctgctacgacctggcctttcatagatttcaatggttcataggccaagccatactctataagtgcataagcccatttaccaatcctaccactcataatcgggttttgcaacatgtatttaatcacatcggtttgactggtaatggtgccatgactagacagtaaagaacatctacactcggtgcatgcataaaataggcataagcataatttttcgataagagtgtaccttgtttcagcatccactagcctccgacttaggtaggtcaccacatgctcctttcctccagtcacttgcgttagaacagcaccaataaccttgtcttcagctgcaatgtacaatctgaacgatgctcctacttgtggagcttttaatacgggagccgaagacaaatactttctgatgagatcaaatgcttcttgttgttctgcccgccaagtgaattcggcatcattcttaagccgaaggataggggtgaaggcatcaatcttcccggctaggttagaaataaacctccgcaaataatttatcttgccgagaaacttctgcacttcgaccttacaggttggaggtcccacattccgaatggatttgattcggtcagagtctatctctataccatgttcatgaatgatgaaccctaaaaacttaccagccgacactccaaaatcacatttacgtgggttcattttcagaccataccgacacattttatcaaaggctttgcgtaaatcagctatatgagagctaaactcagccaatttgactacaatatcatcaatgtagacttccacagtgtttcctaacagctcgtgaaagatcaaattcatagcactttgataagtagcaccatcattctttagaccaaatgtcataacaacccactcaaataaac

SEQ ID NO: 58954 - DNA, 1592 bp, Zea Mays
tgttgttggaattcaacagttgttatgattgcagaagtaaatgcagtgtgatggttttgaaacttttccctattttatgaggcatagagatcgccctaagatgagtgatcgtaagcatgtttatactaggtcgagtaggcatgagcatgttgcaccgccttaagtcattgccgacttaagtcgattgctccgttggcagggtatagtggtcaccctaagttaagtaagcgtgagcatgttgcaccgccttaagtcactactgacttaagctgattgctccgttggtagggtatagtggtcacgctaagttaagtaagcgtgagcatgttgcgtcgtcttaagtcactgccgacttaagacgattgctccattagtagggtatagtggtcaccctaagttaagtgagcgtgagcatgttgcaccgtcttaagtcactgccgacttaagctgatcgctccgttagtagggtatagtggtcaccctaagttaagtgagcgtgagcatgttgcaccatcttaagtcactgccgacttaagccgattgctctgttagtagggtatagtggtcaccctaagttaagtgagcgtgagcatgttgcaccgtcttaagtcactgctgacttaagccgattgctccgttggtagggtatagtggtcaccctaagtcgagtaagcatgcagattgataataaatagttcgagtgcccttgagaatgaagtctttttattgatgatgtgttttctgattacagaatacaatgctgccccgatagcttttgaaatctagctaggggtaaaacttcctgagatgctctatattccatgaattccctattttcgtgccatccatttgagtaagtcgatatgatcctggccgagtgacttctgctaccatgattggaccttcccatagtggcgacaatttgtgtcgtccttcccccgttagaattcggcgaaggaccaagtctcccactgcgaaggatcgatgtcgtatggccttatcatgatagcgccttagggtttgctggtacctagcttactgaattactgtattcaatcgttcttcttccaatatatcaatatcctccagtctagtagcttctgcctcagctatgttttcgaagaccagccttggtgccccaaacctgagatcggcaggtagcactgcctccgaaccatagaccatgaagaagggagtgttttcatgcaaagctcgactaggttgagttcttaggctccaaaccacatacggcaactctctgatccactttcctgtgaacttttcattatcgtcgaagactttcttgccgagtgcttccaatatcattccattagccctttctacctgaccgttggctcttgggtgtgctactgacgcatatttgatctggatgcttctttgtttgcagaaatcaaagaattccgagctggtgaaattggatcccaagtcagttataatgctattcagtattccaaacctgaatattatatcttgtatgaattccactgccttagctgaagtcagagaagcaacgagtttgtactctatccatttagtgaatttgtcaatggtgactagcacgtgagtgtatc

SEQ ID NO: 58955 - DNA, 326 bp, Zea Mays
aagcgtcttaccccgctcttacaacgttcttaccagcattgcaggtggcaaatggtgaccggtgtgactgtccaacgagcgtgggtgtgattgcaaaggagtacctgttctactcgagagaaaattggagctatgggaaggctgactaaatatatatatgtggcacacaagtcagtaacagatagcaatgctgaataagtgttccaagtactcgtcctagttgctggcctagaaaatgtaatagaacagttggaccaaagcacaagaaaggaggtacaagtatctagtgggaatggcagttctgtaaatagggcagatttttcagc

SEQ ID NO: 58956 - DNA, 514 bp, Zea Mays
gcttatcagatgcacctcatgaccgtgcgacgtggccggacggtcgatgtcgtcgtgggtcgccggtgagctcaattgcgccacgctgagatcctttaccacgtagtcataaccgtggcacgcttagaattactatccctgcgtttgtatgccattgagcgccacgacggactcgccagtacaatgccttgtcacagtcgtgctccgctctcctcccaaattcagagccaccgcttcgagctgctataaattgatgccccggcctgcttcgccaagttattacgaactcagaacactagctctcgcctccgattagtcactgtagctcgcgaatttcaaacttcccccaattctgttttctgcaccgccgtgagcacccctccgtcgacccactgtcatgtcccttcaaccgccttcctagctgccgttcttgagctctggtacgtcgctaaagcttaccgtgcccttaatttggatgttgttgtactatatcgtcaggaacacgatggaaaag

SEQ ID NO: 58957 - DNA, 502 bp, Zea Mays
caagaaccatcgtccaaggggtccggacgcacaacttggcttcccaggctaaaccctgcaggtcccgagcatgtatcaaaggatggctagtgtcagatggcgggtcctgcgggtgtactactaatgctccctagccgaattgtgtgcaggcctaggtcccagtcgagactacctcctgggggccattaccaactctttcttaggtatgttggtctgcagcctcgacaaaccgagcctacatccctaggggccaagtaccaaggaggaatcggttacaccacacacaacagggacaagtggtacacagataagtgctaatactgcttgataaatagtactcaaaagtaccttacaaaaagcaaaagtattacatccgcctttaagcggagtcctagctccatctctactttgcaggaatggactactctgcaccagcagggtcacgttggaagctagctctgggcggctcaccggttcgccagcggcggcggccacctctgct

SEQ ID NO: 58958 - DNA, 448 bp, Zea Mays
agaagatgtctttaaagcatagataggtttgggtaagaaagagtacggtaaggaaagactccatccaagattgtggatcttgattccttttggagatccggcttgaatcttatctttccttgatttgatgaggtcgatcatctttgatctttggccttggaatcgtcacccaagttggggacatatagttaaaatgacatgtaggtaaggacagatggttagtgggtaggtcgcatagaatgagtgttgacatgtcataatctagcttcctttggggtctagcttgattcctattcttctttaatgatattgacctcttccttcttcggtcttggtctcattgattcgagattagtgtattttatcggagctggggagtatggttaagatagatatggatgagatagactacacaatgtaggtcaaaactttggttgatgtgaggtgg

SEQ ID NO: 58959 - DNA, 1046 bp, Zea Mays
aataagtgattccattcagtgtcaccataggatgccgcatagccataattctatatcaagcttcgatacagatagggaacttacttgtagattgcaactaaatgatatgaggtgttgatcctgccacattttttctcgacggtactagagagctgcatattattatattaagaaaaaaaatgttcaataaacccatacaacccacacacttatgcacctaaacaccctaagtaggtatatttgtatcaccgttaaaaatctgatcaaacttatcctacatttggcaagtataacagaaaattttcatgtttatattatggaaaagtcattttacaaagaagataggttaattgcatttatatttcaaaattcaagatttgctgcgggtcatagcaaaaactattccagattacctgttggcggcttccgcatgagtggagtctgaggaaggaataatcaaggcaagccttatccttgcatttttgtggcaaaacaaacagaagatatatttttatttatagtttgtggcccttagatgtgcgaagatttttggcctctgctttctccagaagcaatttttttctcgaagatgtaggaggactgcgtctcattatattaagaaggaagaaaggttatggggccagaaaaacagcccagttacaagagcctccttacggaggacgaaacataaaaacataaaaggactcataaggaacctatggacatcatcctcacaacaagaaaagcggggagagaaactagactgcaaggtgcctggcaataaaaaaggaaatgcctttggccccagccatcacccatctcaatctttcctgcccagctgaactcagaaccagagataaattaggagtgcagccgtcaaaaaaacaacggtttctatgattctaaagagtccaagctcccagggcaatcagatagttgaggcccttcaaagcaaggccgttcacggcttcagttttgtcctcccaccagctcataaaggatatgcgtccaggctgtcgcgccaaattctggaagctaaattgccg

SEQ ID NO: 58960 - DNA, 989 bp, Zea Mays
ctggactgcgcacagaattcctgagaagcacagggtgtagcgtgtaaattgttccaagactctggctaattccgcagtggacggcgggttaatataacaaaagggaaggggttcttttagaaaatgtgaacgatgaaagggtattgggcggttcgagtcgtccagattagatctagcggtgaagattggatctggcgtgttatgtactggtgagcagcgaggaccattggataatggatcaacggtccaggtcacttttgaacgtgatctaatcatacacgtcggtaaatgatccaacggtgcccgatttccccctcctcatacagacggccagccaatcacagccgcaaacccgtggatctacggtgctcgtgtttcttccccgctcgaattcgggaacggcggcgccgcccgcgttgatttcaaatcccgacgagcaatttgtcccccaacaatacctaatcccggatttaatggagttctagcgcatgcggagatgaagacggtcaagggcagagggtacctcgatggcgcagctgatgccgtccacacgacccgcggatccgcagcggttgtagcacgacggtgagcaattcccccctcactgcacgacgattcccgccggcgaggccatggaacgcatccacgagacccagcgaaacccctgggcacgacccccaaggatgcgacggcgagaagcaagcaggattgcctacggcagtgactctctttacttggtcacaacttaatctcgcgcccctggttgactgtggctcacggatggctagagaagaggaggtgcgggagaattcggcccgcctttgtagctaggtagaggtggtctacgcgtggcgaagaatccgagacgtggctcgccatgctcggagctgcgattgacggggttaagctgacggagtccgcgcgctagatgaggacaattccgacctgagggccccaccgcgaagccacggcgcacatgctcagtcgag

SEQ ID NO: 58961 - DNA, 503 bp, Zea Mays
ccgtggctgcacgctcacccgaagatggttgattggatacaggcgttttggcggtaggagcgaatgcaggtaattgacatctaaatggcttgttttgcatctgccccgtgtggaccacgtcttctatatgcaggcaaccaaacatacgtttaggaaaagtcaatgcacgcggtgatctataacaaaacgatgcgagcaaccaatcaactggttagagtatttggtagacgcaaagcaccggcattagcactttagcagctgggaaatttcgaaatgcgtaagggatagtgaaagcaagtgatttattactgtggtagtgactagtgagcaaaagaaaacgatggcggctgttccagagtgttatacccagtctcctgtgccacggtttttcacaccggctagacgccggtccaaggaaaaatacagcacacgggcctggtggtgtcaaagctacgttcccgtgtgggagacgagaagcaaacgacgccgaacgctgctctccg

SEQ ID NO: 58962 - DNA, 687 bp, Zea Mays
cggcgtccttcggtccatcgtcttgggcgacaactataggtggacctccgccgtgggcgcatgtggtgtgccggtgaatcggcggtggtcctccggcgcggcagatcggcggctgggcgagggcgaccaccatatgacggcttggcggtagatcgactatgctcctccaacttggccatgggcactgggcagtgagcctctgtcgtgggtgcctgtgcggtggctcgttgccgtgtaaccacggccgtcaccgtggatggtggttcctacgacgctaggattggggaatggatactggggaagcaggaggctcatcagggctggcggctgcgagtctgcgaggggaacaggagcaggtgattcaggttaggtcaccgctacagtcagggagaaagatcgagcctgtgttctaatattataaatgttactgtactagcaacacatattgttgtcgcgtcctaattaatcaatacattcccatagcaacacatattaagtgttatcacatcctatttaaacaatggatggtgcttgcaacatctattaaatgttgccaccaccctaataacttaacagatgatgcttgcaacgcatatgaagcggtgcccgctaatttcttacaacacataaaaccatgtgttgttgtggatgcgttgctataggggagtttgtgttgtagtggtcgag

SEQ ID NO: 58963 - DNA, 690 bp, Zea Mays
gaatttaaaaaggaattagaaatggaaaacagaaaagaaaaaggaaaaaagagaaacagcttgaccgttgttgggccaaaaccctcagccgaacccaatcgtgggctcgtgtgctgacaagtgggccccactgggcaaacgtcgtcgcagggatattggagggcacccaaggggttgctagagcacctcaaacgcgttcccgacacattggagcatggggaaggaccagagcgatcgaaattacctcggggccaacgatccgggtaaggagtgcatcagatagttcacggttgtcttggctacattcgttaccggtcgttgtgcatggaggtgctgggatggctagatcggggttacgcctgttagcgtccactgtggcgaggaggcgtcgtcctgttttgttggtgaaaggagaagaatgaccgtgcgttgttagattagacacaagtggttcagattagaggaactttgtgaccttcaattttctcacatatgatccccgcgccctcgcgaactccttcgattgccttctagcctccgaatggtggtgtacacagggtgatgccgacagctccctctacctctatgttctctcgttgctcgcttcaatgggcccgtggctcatctactacgacgcttatgggtcaaggggttgaagtgcagtgtgtatatatagtctcccaaggtcct

SEQ ID NO: 58964 - DNA, 391 bp, Zea Mays
cggtcggccgaaatggtcctcgccggcgttggccgcttaccgaccgtgccccatgtggcttagggcattaccacgttgcagtaaatcactgaagcaagccgtccatcaccggaggccttgccacggtgagagccacggtatcacctacgccagtaaccttccttctctccagccgccagccttcaccttcaaaattcgaagccaccgcccttggatactataaattgagcgtgccgctagctccgttgggtcatcacgaagccagagcacccgtccttgcctccgattagccaccatagcctcccaatttttccctccccccaaatcgggtttccgcgccaccgtgaacgtcgggccgtggctagctctctgcaggtccgttcacgccctc

SEQ ID NO: 58965 - DNA, 603 bp, Zea Mays
gattgttggggtccattagtcagttggaagaggcaaatacgtcaaccctgaaaggacccgcccctagtcgaactccacggcaccgagcctaaggtcgggcgtggcggaacctgacaaggggggtcggacgtgtcggaagagaaccactcgagtggatcccacgctcgaccccggactgacccgccataaataactggccgcattaactgcgcctggcaccgagccacaacgcgggcgtcagtccgcctcccactcatgacctacggacccgtcgggccgcatatcgttcatgttctacgagccctcgaattgcggcgcattaatggcccgggtgcctctcaacttgtggatcacttatggcgtatcgaactaggcttgagtgtgcagacctctcgtagggcattacacgacagggtgtgccgaaccccaggctatgtgaaaggatcacgatgcccaagagggggggggtgaattgggcttttctaaaaatcaacactaattaaaacctaagcaagagctaaacaagagcccaacttcaccccaacaactagcactaagaaaataatactagaaatgtaacaaagctaagacaatgcttcaaat

SEQ ID NO: 58966 - DNA, 293 bp, Zea Mays
cgccaatggtcagtcgaatcgatgggtaatcgttgaattgctgagtctgatttggtgcgcattatctctggctaggggtttgcagtggctgtttctgggtcgatggattggtcggttttggatttttggtcactcctgtgccatcacttggggagctaatctttggggagggttttaggtctaaattaaccataataaaaaattcaatccatcagccaagtcgattgatattgatacactatgatacagggatgtttagaagattattaccagctgattcctgtaccacttca

SEQ ID NO: 58967 - DNA, 530 bp, Zea Mays
ttagaaatgggggcggtgccaggaagaagctctatggcaaactcaactttccgctcaggtggcatacctggtaaatcttttgggaacacctccagaaactctaacacaaccttgatagtctcgagtggatctgcctccttgctatcaatagccatctgatgacaacctcctttccttggctcaggtgagactaactcagtcgccacttcttctcctagtggagacaccaacttaattgtcttgttatcacagctgataactgcttggtacttatctatccaatttatccctaggataacatttattccttgagtacccattactatgaggttagcgggaaactctatcccccttatttccacacttacattcaagcaaacactatcggctcgaactttaccaccggctgaatcaatttgaatgggtgttgacatggtagttattggaaggttatgcgattctacccatgatgcagtaatgaatgaatgtgttgctccagtatcaaataacacttctgcaatatgggaatc

SEQ ID NO: 58968 - DNA, 479 bp, Zea Mays
atagacccctgagcctctaagcgagtccattgagttgatcggggtttatttagtgggacaaccccttggttgaatagcaggtttggtcatatagtcattggatgcactttgcctaatagggcaaatacagacccttgagcccttgaacgattatgttgagtcggcaaggttcatttagtgggactacgtattggttggacaaaagatttggtaattggctcaatagcatcatgtaatcattttaatggataatatttaatagttgaaacatcatgttgagcaatatcaaacttttaagattagtgcttgtgaaggtatttgtcgatccttagaacagagccgacgacctagtatttgacgctagaggaagagtgacacagggacacacatgcacacatgattttagagtggttcgggccactagagcgtaacatcctactccattgtgggttgtattgctgagagcttgagaaaaccta

SEQ ID NO: 58969 - DNA, 633 bp, Zea Mays
cttgcttgtgtcttcgattctcaggaaggaattagcccttgtggcgaggtcaatcgcgcaatgcacggttgataaccagaggagaaagtggtgctgtgattgcggggttctagtcgtgttgattggaagccggatcgtctgtgtgacatctccaccgaatcgatagttatcttcacctgacggaagatcgggcacccccattcctatcgaagtgtattctagactcaggtattaccgtcaggcttaccctagtttagtttaggtttttcatcctataactccagataattgccatacaaaaaaattccgctgtcctagaacccttgtttagcctttgcaatttcgtttctagttgggctttgttcagttcgtgtccgtggtcgagtcgtgttgctggtttagggtgtatcttcatcatagatcaactgccctcgctagccgctatcccattcaccattacccagatcacaagtcgatccacccattaatcgacttgccctcgctagccaccgccgcgccagccctagatagattgcagatacgccgctatcccatccaccattacccagatcacaagttgatcccccccattaatcgttgtgattgcagatagggaatttttgccctatcccc

SEQ ID NO: 58970 - DNA, 552 bp, Zea Mays
cttaggccatttgttcggtggtggtgatcattcttgtgtcgtatggtcgggggaggtcatgatgtcgacattgtttctccctccaatcactaaggtcgcacactcgcacttatgtttgggatggttctttattcgattgctgaaggtggtgctaatcgtctcttctccagacgcatggtcgttggcgattaccattagctcgatgatggtcttgggcctacttgaaagggaaatgagctatatgcacttctaacttggttttagtgattaatgaccaacataacctcgagtactaactagttttctaagtgtgtacttgcaggtccataagtgctagattgtggaatctagctcaacttacagctcaaatagaggcaaatagggcaaatcttggataaggtgaattatgactagttcataggtttggataaattctaattgcccttagcaacttttttgagtgccttagaggctttggaatgacatatttcaaaaaaggtgcatttagagccgagtttgaacctagaacaagattctgggttcaaggcaaga

SEQ ID NO: 58971 - DNA, 553 bp, Zea Mays
gaagtacttccttcctctgggccctgcttaggacgaaatcggccttaggccttctccatgtctttccaccacttggaggcttcatctcttggtttggtctatcacataatgctgccagatccactcttgcctttacgttatcctttgacttatcaggaatgtccataattgttgcccacagtgccttggcaacattattttcagtgtgcatcacgtcaatgttgtgtggaaggagcaggtcgtcataatagaggagccgagtcaagccagacttatgtgtccacatatgcttctctccatatcccacaaaaccaccttctgtgttggtcacgagcccatctatctgttgacgaatttcggcactagtcatcattgcaggtgggcggtctgtcactacgacacctttcgtaaagttcttgatgtctcggcggaatggatggtcaggagggagaaattgtcgatgtttatcgaaggacgaatattttccaccccttttcaaccaaatgaacctgagagcttccttgcaaactgggcatgggaaattaccgtgaac

SEQ ID NO: 58972 - DNA, 840 bp, Zea Mays
tgagaagccaagggctggagccagatgctaaatgtttctgcaacatccatgaattatcctaccagacaaaagcatattgcttacaaagtgtggccactggtgaatgactgggaaatgccgaaggagactgctgtcggctccaacgaaggtggtctggtttatttaagatacacctatcgctatagaagtcaatttgatgagccaaatgatgattggctcgaggttgttgatgccaccagcgacgagctgttgggagcttattcaaaggcagaagatgaagccatgacaactgcctttggcgctcacgacaagaggaggctgaatagagtttttgatgtaatcggatttttttatctcgattactattttcctgaccgaaaacataggttaaagagaaaaatggcagcttcatcctcctccgccacgcctaagctgaaaaaagctaaggttttgactcgcagaccgaagccacgtcctttagagaggacagtcgcagtgcttgatatagaaaagatggagattactgaacatgtcgaagctatccccttagctccaaagacaattcctgctgcgacagtcgaagctagtatcggtccgacagaagagcatccaaagctgctgagtcccccaaccgcaactgagttgctgaagataacaactgctgcaaccacaacaatgactcctaagaaaaggagaatggccagtattctggatgtttttttgaagtctacgaatattccaactcctgcttctaccgaagctcccaaagataatgttgaagagtcgagagaagtatcgattgcaagcgcttccccttcccacgctgaagctgaaacttcg

SEQ ID NO: 58973 - DNA, 639 bp, Zea Mays
ccaacaaggccatgcaagttgaaagagctaaggaggaagaaaaaggacatctcaaaaggaagttccaggttctccgggcacaacagcaggatcgacaccagaagactcgatcatttgggtttccacccaaggggcccaacttcagtagaccagctggacccactccgtcacgattcagccagtagagtcagagctctttccattctccctcagtggcaagcaaccaaccttcggcaaatgcatgttggcactgcggtgatccaagtcaagtcaagaacaactgtccgcagctgaagccacagggacccgcctactccaactcggtgaatggccccaagaatacctcggcacccgcccccaaggcgccctccgccgtcagccagcagaacaagactccgtaccaagggagggcacgtgtaaatcacatcgatgctcaggaagctcagcaggctccgggagtagtactcggtgagttccttgttgaatttactcccctaccgtacttttcgattctggagcatcccactctttcatagccactagctttgtggaaaaatatggcattccctctactcctttagagattcccttggtcacccgaaccccagggtccgacctcctatgccagctaaaatgttc

SEQ ID NO: 58974 - DNA, 569 bp, Zea Mays
ggcagagttacatatggctcggattgtgtctctacatgttgtaccgaagaagatcgtttcggataaaggatcacagtttacccccagattttggaaaagttttcatgagaatatggatgcgaagttgaattttagttcggcctacctcagactgatggacaaattgaaaggactaatcaagtattggaggtcatgttgagagattgtgcccttcagcatggtagtagttgggacaagagtctaccttatgctgagttctcatatactagttaacaggccagtctgaagatgtcaccgttcgaggctatatatggcaggaagtgcagtactcctctatattgggattagactagaggaagacaattctttgggcccgaacttattcaagaggcaaaaaagcaagtccgtataatccgggagaagttgagggtagctcaaatcagacaaaatagctacgctgataatagaagaagaccactggagtttgaggaaggtgatcatgtgtacctcaagatgtcaccacttcgtggaatgaggagattcaaggttaagggaaatttgtcccctcg

SEQ ID NO: 58975 - DNA, 420 bp, Zea Mays
gtacgtagtaaacacgttggctgtttcaaggtttgagcataagaatccaagagagaattttgtggcattactaactgcaaactaatctgcatgttgattgtttgattggcatcatatgcacgaacatggtacaatgctactccgtacctgatttagtacgtagtagtagtatgtgtgaaaagacttgacgtacgtgcacagagagatacgaaatgaaccgtggagatccaatagcagattggcaccttccggtagacacagtggcaacttgggtcatgaatggcgtccttgtgtgtagtcttgtcggggtgctttcttcaagggggtgtgacacgtctactcgtatagagagggcttcatttctgcacgcgcgtacgtacgtttgctgaaaagattgagcttgatggctgtcaaatcgtc

SEQ ID NO: 58976 - DNA, 1320 bp, Zea Mays
caagatctccttgaattcttcctttcctaattcctcctttcttcttcctcccaccaattctccaaatagaggcttgcaccaacacaatggagatcccaagagaggagagggtggctgcaccttggggaggaggagatggaggggggggcggctagggttgggtgtgatgggggggggcggctgctgcaagggacaaggaagaagagagggaggggggcggcggccactagggggtggggagagtgagagagagagagaggggggcggctagggttagagaggagaggggcctcccgtccatcggatgcgatccgacggcccaaaactcactctctcaacagagcccccaaccccagcgaaaagaatgccagaaaaaagatctactgtttctcagaggtaagtgcctcctataaccccaaaccccaatggcacagaacacgaagatgagagaaaagaaatttaacttcttttcagaaaattgggtatcacactctaccccccttaaaaagaattcgacctcgaattccaacgcttctatcggaacgacaaaagagagattaatgaatcaataaaactcacccaaaacaaaaagttcgggatatttctgccgcatcagctcctcgagttcccaagtagcctcgcgctcagactgattagtccacaagaccttaacatacttaattgatctcttcctcataacacgctccaaggactccaagatacgcaccggacgacactccagagtcagatcctgctgcacagcaattggttccatcttgatctgatggtccggatcccgcaagaacttcctcaacatagagacatgaaataccgggtgtacccctgccatggaatccggcaattgcaagcgataagccaagctgcccacccgggccaagatagtgaacggtccaatgtatctcgggctaagcttcccggagacaccgaaccgaacaactcctttaataggtgataccctgagaaggacttggtcaccccactgcaaattccaaagtctcgcctcctcacatcagcataactcttctgacggctctgagcggccaaaatattctgacgaatttcctgaaccttctcagaagtctgctgaacccaatcaggaccaaccagagatctctcccccaaggtctcccagcacagaggggagatacaccgcctgccatataaggcctcaaatggtgccatcttgatgctagcctggtagctgttgttataagcgaactcggccaacgcgagatgatcctcccagctacccttccaagctagaacacaagcacgcaacatatcttccaaggtttggat

SEQ ID NO: 58977 - DNA, 594 bp, Zea Mays
tttccttctccaattttcgttacaaaagactacacaaataatttagttctcagattaagtccgcgcgagatgtaaatagacccatcaaaacaatatatattttaatatttttagactacgctaacactggtaggtattttcgggttctataattgtagacagtggaacagattaattatgagtactcagttcggttctagttatctcggtccgatttaatctcgcaccaacactcttattgccgagcatttaataaaatttactcgggtcaaaaatcacaagagtgggtcgaggttccaaattcgtattcgcttaatcgataaattttaaatagacacaaggctcgatatttcatgaaataaatacgcgagattgatacaacatcgaaattgtgatcctttcggaatcgacgtcacgcaacgttcacgtgggcaagaggttgtgcgttgtccaggcaccggttagcaccagccacgcgccatgatgccaggccacagagagacacgtgcaacgcaagcgtgaaagaatttgaaaccaagtttaggaaccagatccgatttcaagaatttagagtttggggcaaggcgtcgatgg

SEQ ID NO: 58978 - DNA, 608 bp, Zea Mays
aagtataagtttgaaagagagtttggagagccttgtgatgaatggttggacaccattgaagcaaaatgcaacaaagtacttggcaactttgttgcgaaggaagaccaagccttgacgaccaccttcagggttaggggaaacaaaggttgaaccgcgtatttgacatgattgagtttttctatccggactatcatcatctagcatagggtttcagaaggaaaatggaaggaactagcaaagcacaattaggagagacgaagtagaagaaagcaaatgttaccatgaagtgacctagagcgacttcaggggccgatgacaagaataagtttaggattgatgacaaaaaaagaactatcattgagttgaagttctctacaaagataaaaccctcctagccttgggcatggggacttcagaaatgacaaaggtaacaacaacacatgttccattctaggaaataggacctgctttaaggggtgctaaatagttttcttctttcataggcaaatgagaaggaaaaagataaagaggaggacaaagtggtggatgtgccatccaagacgagtccctctggccaacatgaagcctaagccaaagctagaggcgcc

SEQ ID NO: 58979 - DNA, 731 bp, Zea Mays
gagtgcaacgggttgcggctcgtagtgaggaagaggttcgttggcaatgtcgttggcataccttgcttcttttaccatcatgtgcccgcttacaaacttaccaagaatttctttgggtgacattttggtatgcctggggttttcacgaataagattaacaagatgaggatcaataacaataaatgaccttaacatgaggtgcacgacatcatgatctgtccatcttgtgcttccataactttagattttgtttactagggtcttgagcctgttgtatgtttagttggctcctcactcctcttcatggcaaacctctctagctcgccttccaccaattccattttggtgatcattgtgacatcatttccctctgtgaccggacatagaattcgatatcatttgggttgagccatcgacgtctcgcccaaactctaatccttgaaatcgaatctggttccataaatttcgtttagaattctttcatgcttgtgttgcacgtgtctctctgtggccgaacattgtgagtgtgaggtcatgcaagacttctcgcctacgtgaaagacatgtatcgtctctgtggaagtccgcgtatgcaccttatctccctactgttatccctcgtttatctggatccgccacctctccaactcctcaccacgtgtcgcgctttccttcactccactgccatgtgcccgacatgctagcgtcacggtgattattgagctcgcgag

SEQ ID NO: 58980 - DNA, 391 bp, Zea Mays
tggccatcaactatcgatccaacggcatgcacctcatctccctccccatgccaagcaacagatggtggcgcacctgcccgcaaggcgggcgatcaccggtgtaagcctacccggcgctagagttgttaatccgagcactatcagctgctagacgtagctatgatcatgaagaacctatggacaatgtcttactgacggcgacaaggttggccgcgttgaaggcatctctacgccaacacaacgatgaacgatccgacgagcgattgccatcaccttggttcaccattgagcccagagaatccacgtacatgctcccttcgagctggcgtaccgccacgatccccttcccggcctctgaaccaccaagcacgctagggacgacaccggcggc

SEQ ID NO: 58981 - DNA, 655 bp, Zea Mays
gtctggttgagcattcggcgagcatctcctcgcgacgatattctagaaacaggtaagatcgccttagtggagggtaattattccggccgccacgcggccattgatccttccggtcgtgcctggtcaccggcgccgctcctctctgtccatccacgccatcaccgatttgaccgctttaccgtcgtggcggaacatggcaaactcttagaaaagggcagcgcccgacgtcgttgttagtcgccagctaagtatggtgatggttatcaccatggccatcgcggtggctcactgggcctataaattcaccgcgctctcacccccttcatccaaattaaccaagcacagctcttcgtcccttagttacgaagccaacgaatcactagccaccctgttctgtccaccaccctcaaagatcatcaaaattccctagaatcggtctcttccgccgccgtgaaggacccatccgtggccagcactcctcgggtcagtacataccaaattgcttcctattctagcttgactttggccttctattgctctcggagccggctaattgaactttaccgaagcccacactccggaacacccagtcctcccgttgaacgccgccacagacaccctctctgtcgacctactcttctattcttgtttagtc

SEQ ID NO: 58982 - DNA, 580 bp, Zea Mays
aaccacaggtttattacagagtgtcaaaggttgcaccttctcaaactgtttttgagacaagaattcttgatctagcccttctattgcttcaataaatatgcctagactctagaatagtactgttaactatccgagcttcagactcctctcttgtatcacgctattgttggacttgacacttcccttgaggctgctgattatgggatgaaattggagctaatacaggtgttgtggtaagaccaacccagctagagagtgacttgtcgaagccaccgaagctgtaggttgtgagaatggctgttggttacctacatactctgggatgtatggagagtaacatgaagcagtgtgaagaacttgctttggttgattatggcgtgcttcggccttagctatctccttctgtttttgtatcataacttgacaggttcttgttgtatgccccctgtcctctccgcagaataagcaggacagtcttcttggttgagagttgtatcttcctccgaagctacgtcctcctctgcctcttggggccgatggtttgaaggagctctattgcaccgctgttgactggaaattg

SEQ ID NO: 58983 - DNA, 760 bp, Zea Mays
atgttggggcactgtggccgccctgccgctgtacccacttgcgccacaacgtggccgcacggccaacacctgtgtgaccgccatttaccggaatccaccacgctactgaccctgttacctcgtggcaaggtgtcctgtgaattgattagtcatcgtctcaggtctctaccctggctggttatacggctccggtgactcacccctctcttcggccgccagccttctccttcaaaattcggagccaccactctcggacactataaattgtttttgccgctaactccgttaggttgtcacgaagccagagcacccgcccttgtctctgatcatccactatagcgcttaattcgggttttcccccaaatcagttttccgccccgccgtgagcacccctccgtcgaccctccatcctatccctccacccgcctacttagttgccgttcttgagccctggtacgttgctaaagcttatcgtgcccccaatttgtatgttgttgtactatgtcgtcgggaacatgataggaaagactcttgttccgcggtgttcgtgaaccgagctctaggatggcgtttcgatcaaattagtgattcccagtggagcgccaacggtagaattaggcgtaaaccaaagtcgagcgtgaattattgggtattgtggccggtacaagctcaccggagtagctgctccgccgtccgtggtcggggacccgggcttgtgaagatgagaaagaagaagggcctcggtgcacatgtcagtgac

SEQ ID NO: 58984 - DNA, 697 bp, Zea Mays
aagtggaaccgggttatattcgcacgacctccggttgtgtagacagatgctcgagcacccaattggccacacctccatcgctctccactcttccctcttccacagctcgacgcagaaaaaataccgtcataagttaaaattaggctcaccgcctagataaccttcacacaaggcaacaaaagtggcaatatgttgaatcctgtttaggttcaggtaatggagttgcacctgcagataatcaaaaagaaccatgacaaggaaatgaagaggaagatctaggccttgctcatgaaaacgaatgaacgagaccacataaccaggggaggggctggaattttctcagaaccaggagctagccagtcaccatcacctaataggccacacttgaatagagctcgaaagtgcgcctggtccaccgaggatcggtgccaccaagccatagggaaacctggcgaaagctcgaaggcaaggagaaggctaaacaaggaagatggaacaacgaggaagataagaggagagtagggggaatgggtaggatggcatgattaaataaagaccaccctatgactcctcaacacactgaccaagatgcaataactcatctaacaagggaacaggcttggcccacccctaggtcgatgccacaccgacgcgcaacccactgcctcccaaacggaagcacggatgataattcttt

SEQ ID NO: 58985 - DNA, 530 bp, Zea Mays
gttgccttctataattgctaaggtctcgttcaagcttcggtaaaccaatgctctttgataaagtattaacgattcttgccccgacgcgatcagggaagcaccctaggatctctttgtcaacaccgccaaaaagcacagacccgggctgatagccacccgcaaaagcgaattcttttaactcagaagtatcttcttcaaagagctattggccacccaggtaccgtaggtccaaatccttgatcttcgaagaagtttcttctatttctttcatttttgaagttgtagcttcgacagcagtaacttcatccatttccctctcacgaaccacactaactataattctgtcaatttccgacagcatggtcccgagagggcctccgctgttttcggcttcaacttctacttcaccagcttcgacaccagcgggaggaatgaccttttctatcgcgaccggtgtggggggggggtcttgtgcacgaccctcatcacagccatcatacgacgttttttctgaccactcccgtcccccc

SEQ ID NO: 58986 - DNA, 361 bp, Zea Mays
gtcagcaggtagcactgcctccgaactatagaccatgaagaaaggagtatttccatgcagagctcgactaggttgagttcttaagctccaaaccacatacggcaactctctaatccattttcctgcaaacttttcattcttgtcaaagactttcttccttagtgcttccagtatcattccattagccctttctacctgaccgttagcccttggatgtgatactgatgcatatttaatctggatgcttcattgttcacagaaatcaaagaattcagagctagtgaaattggatcctaggtcggttatgatgctattcggtatcccaaacctgaatattatatcttgtatgaactccactgcc

SEQ ID NO: 58987 - DNA, 387 bp, Zea Mays
catttgcatggattttatcgtaggattgcccaatacctccaggcaccatgattccatttgggtgattgtggacaggttgaccaagaccgctcacttcttgccagtacacaccacccacaggacaaagaagtatgcagagatctacattgaccagatagtttgtctgcacgggataccaaggactatagtctcagacagaggagcaccatttgtggcacgattttgggaacaattgcaggaatcacttgggacccaggtcatacgaagctcagcctatcatccccaaacagatggccagacagaaagggtgaatcagattttggaagacatgctgcgagcatgtgcactacattacgggaaggattgggacaagtgtctttccttggc

SEQ ID NO: 58988 - DNA, 345 bp, Zea Mays
agagtgcggtaaggaaatactccatccaagatttgtggatcttgattcatctgatgatctagcttgatctttgaaggcttgagttggggctgaagaccagatttggcttgactcttatccttccttaacgcggttgatcctttcttcctcgagctttggtgtcttcatccgggtttgtgagcagatgggtagagggttcaatagctatatgctagatgcaattagttgtgtaacctgttttgtaggtcaagttgatctgtcattcttaatttagtgcagggtgaactaagttaagacccgctctataggagtagagtttaatctatttcatcagtattatctaac

SEQ ID NO: 58989 - DNA, 498 bp, Zea Mays
gagcaattcacccacatatttgtggggaaacaattgtcctgcaatccctatgcacatcaaccgaagccacgtgtgaagttttagtgcgagcaggtggtggctctagacaacggcgatgtaacgtgatggggggactggtgtgatggtcggcctatggcgacgtaacctaagcatgatctccctccctcgcaccagatctgtgtgactccacctaggcaagcctcactaggggtgaagaagaagaacaagtatgtgtttggttctcagatttcgactcctcctttttgttattcggtaagaagcatttttacaaccactacatgggccaagaatcactatagattaggcctaacacatgccatattattcccctaatcttttgttaagcactcactgatttctgcccgatccatctccttccttttctgcaacatctcccagtgccacagaacacgcttgacccatagcgagggcttctcgaaatttgtcgttcatcac

SEQ ID NO: 58990 - DNA, 277 bp, Zea Mays
cccaaggttgaatgattgtgcaactctaatcccatgttcatctcaagttaaataagttgtagaggtcttgaatcattattggtgaatcaagcaaaggaccttgatgagaatatgcaacttgctctccaaaggacggtacccgggtatcttaagtacattattgcaaatcaatattgctcttaagttggtttgttgtgctacctatccttggagtagttatgattttgagattgcctgtgttatcaatggttcataatgatgcttgcttaatcatgat

SEQ ID NO: 58991 - DNA, 348 bp, Zea Mays
atacagatacagcagcgcttgtcgacgacaaggaccgcttgagttaaggtctgttccacttccacctatttttaacccatcgtcaattaatcattgctcctggtaaagaattagatcaccaaaacactactaagcaaaagctttttcagaggtggcggtagagagagacggttggctcaggaaagctcctgcgtgcaccgccgacgcagcagcgggagtggttgcaaagagagatcattacctgatagatcagtaatagaaaactaaacatagatctatattctatcatgtttgttttggtctggtgctctgctacttattaatgcaaattatctgatctcgtccatc

SEQ ID NO: 58992 - DNA, 468 bp, Zea Mays
gagcaatcggcttaagtcgacaatgacttaaggcggtgtgacatgctcacgcttacttaactcagtgtgaccactatgccctactaatggagcaatcggcttaagtcggcaatgacttaaggcggtgtgacatgctcacgtttacttaactcagggtgaccactatgccctactaatggagcaatcgacttaagttggcaatgacttaaggcagtgtgacatgctcacgtttacttaactcagggtgaccactagaccctaccaacggagcagtcggtttaagttggtagtaacttaaatcggtataacatgctcgcgactactcgattcagcataagcacatttgcgaattgcttgtcttagggcgatctctatgccccgcgaaataggaagaagtttcaaaaccatcacactgcacttacttctgcaatcataacgactgttgaattcaaacaacagaaaaataat

SEQ ID NO: 58993 - DNA, 1040 bp, Zea Mays
tactgccactaaaacatgagcatgacatcataagcattggcacatcatgtgtttgttacacttagaatgcattcactaggcaaaaagttcaaacaagttatattgatgtgacatttcatgcgtgaaaccctagggtacagcacttaaccctaaactgaagcttaaaagagtaaccaaagtctaactaagagaaaacttcaaaacttagttgtaataatcataaaatgtcaccattaatgaacataagtgatatccaaaccctagaagtaccaaaaaccctaaatagacccctggaaaaccttggactaaaaccctaggggttatctgcaaaatatgcacattttggacctaagtgcaaaaatcatggaaatagggtatcttaagtcatatggttcacatatttggagatttacaaatgaaaccataagttttgggcttatttgcaaaaaggccacatttgtgctccaatggcaaagtctgaaaacagtgaaatataactgactttagggctctgtagatccaaaaatattgagaatttgtctagggtcaacacatcaagtttgtaaagctactaagggagaacaactttgctatagggattaaaccatggtcacatgaaaattttggagaaaaatgagcccaaagtcgagctgttagactgccctaggtctgaattcagactgacagtgagattgggcaatctttgagcttggattcgatcatgatccagtcattatttggctatgattgctatagcaagattgtagctggatcatcggacaacaactttgctactagcagatcaacaagttgtcatgtaaaaacctaagatctaagccctgtgaagtggtctgtcaggcgctctgtcgaacgtttccaatggtacagtaaatagataggatcaggttcagatcccctcgctgccgatgagccgtgcgctcggattcgcgctcgccatggtgattcgcgctcggatcagttagataacgctgggggtaagtaaatatcacaccgtggatacactccggccactattttac

SEQ ID NO: 58994 - DNA, 550 bp, Zea Mays
gcacgtgggacccaccggtcagtggctcacagcgcaaccacgttctcgcctgggctgcgcagaggggagtgtggagctgggccgaattggaggcagtcggcccagttagggttttattcctttttctttttactttattttcttttgtcttttcccttctttccaaattcaaactccaattcaaattcaagctttggggcactttgtacaccagataattatttattttgatcataccaactgtgatgaagttatcaaattataattttgtttgtattgaacaatattccttcctccctatctttcatggttttatccctaagtttagagtttaaatttttatggaccccttgatatgttgctaatgactcatttattttattaaccacaaatgcgcaatcgagtaaagctcagcatgatgaaaaatttatttaggggtctttgggggtatttatttaactgtgtaagtggtgtgtttacatatggtagtaagtagaaatgacacatgcaaatagataaaggaattaattcctcctcttttattatatgt

SEQ ID NO: 58995 - DNA, 655 bp, Zea Mays
ctcaaaaacatgggttggagcagattaatcagctttttctaatcattgctcgacttaaatttgttaacgcacaagtcacctaaaatagcacatttttgggggtctaacatagaggcattaacacatggcataaaactccataagactacatttgctactgaaggacctaaagcacttatgtgcatttcttttcggattgttcttcaattttaacaaggaccgacttatgaacgctactcgcctccaataattattgagctatgataacgctcatataagacctctaatcaatcaacaagatatttatttatccaataggcatggaatacaataactgacaaagcaaagcatcgatccgccatacaacagaaatcacgacgacactaatagatgctatcagctaaccgtttaaaaatactaaacttacttctcgctttgccactacaccaccgtttagtcacatgaccatcgtgagcatccttcacacgattatataatagcgacctaagcgtcgtgttacccaatgcatacatctttccacgtcgcgagtataaccatattacggcatatacccgcacaccttaatcaaatatcttacgccatcaccactgtaatgcaccatggcacacacgcacatacatgtcctcatattgcg

SEQ ID NO: 58996 - DNA, 545 bp, Zea Mays
attattcttaagccgaagaataggggtgaaggcatcaatcttctcggctaggttagagataaaccttcgtaaataattcaccttgccgagaaacttctacacttcgaccttataggtcggaggtcccacattccgaatagacttgattcggtcagggtctatctctataccatgttcatggatgacaaatcctaaaaacttaccagccgacactccaaaagcacatttacgtgggttcattttcaaaaccatatcgacacattttatcaaaggctttgcgcaaatcagcaacatgagaactaaattcagccgatttgactacactatcatcaatgtagacttccacagtgtttcccaacagctcatggaagatcaaattcatagccctctgataagtagcaccagcatttttcagaccaaatgtcatgacaacccattcaaataaaccaatgaagcctgaacatatgaaggccgttttagacgcatcttcttcggccatgaaaatctgattatatccggcattaccatcaagaaagctaataatt

SEQ ID NO: 58997 - DNA, 486 bp, Zea Mays
aagcttttatcgtctccagcacatctaatacactagccatcctttttctcttgggggttgctgctagacctttttgtgtcttcggcacctccactcttgccgaagggcttagaacttctaatgttttcgtcccttcggttctcggttcttcaattttgttagtcttcggcattgcagccggctcttcaatcctctgcataagagcaggtcctttgggcttcaatagctgaagaagtctcatcgccaaattcaggcactatggccggttcaatgtagcgcggtctgtgagtaaggaccttcaactttttccactttggtgagggctcgcttgaagcagccgaagcagcagtcttcccagaagttgcaccctttcttttctgcccttgcggctggtagcgatagtcagggtacacaaatccaatagcatcaaaaactctatttagccttttcttttttcggctcctgaaggccgcagatagtgcatta

SEQ ID NO: 58998 - DNA, 580 bp, Zea Mays
ggactcatctgctccgtgtgggttgacgcatgctgcagcatctgtacctgacgaggccatgtccaagattgtgtgattgtaccatgatttgttcaagatcgtgaagtctggaatgcaaagctgggagcatgattgtagtgtgatatcagatgaagcatgattctttgtagtattgccaatttagattgtagcaataatgctatttttcaggaatacaaaagaatggagcagctgatttagtaacaatatatgctttgtcattcacaattgaaattactttgcaggtctagtttgtttgtaacaaaatattccatgcaaggaacataacttggtttgtttgtaatttagtcataactgaataagttctcttgcttgctgaagagcaaacctgggcagacgctcggcttgctgcgagcaagcagactgagcacccctttaggcaccccctcatgctggcagtagaggcaacaaactgagcagctagtcgcaaccatgaattcagaaaatatgtaggtctgtgaagttctcactgtactaattaaaactgaattcagaacacatgccacaaaattcagaacac

SEQ ID NO: 58999 - DNA, 957 bp, Zea Mays
aattattttggatacgaaaatactacataataggctacaagtttcttcaatcacaatcacaatctataagtaactcatcttcggagtcatccgtcacgcaatcttcaacgacaacctcattccacttgctgcattgccctgcatcacacttgtcaacagttctcttgtaataattggcttctgcttcatctgcaacttgggataatagctcatcctcagcctcatcagacttcttcttgtaataagccgcctctacctcttcagcggcctgagacataaactcgtcctcttcctcttgagcacgtaatcctgcctcagctagtgcgatgagctcactcaaccttgatgtgtcgtcctcctcttctccatgtaatcctgcctctgcgagagcgataagctcactcaatctagatgtgtcctcctcctcctccatcagctcaaccgtcgccattttatcctgaacatatcttgcatgcgcctcatcggccaaatagtttacgccacatccaatctctgcaaatataatgagcaaataaagttagcaaagtcaagataaataaattgtactaacataattatagtatcatttttctcactcacttcccttgaggcgatcagcaagattatccaacatctgtttctcggctcgggccgcttcccattcccttgcatcctgtgctctcttctcatctgccgccttcaacctcctatactttgcacgcttcgggttgtcataaaaggcacattttgcgtccctacgcatgtcgcatatgcgatcgttaatgtacgaatcgacgagctgagatccacaacgcatcttttgtcccattagtctcttggactctattgtgcgcatcacctcccctttgtcgtcgtaactctcccaactgcatttcctcgtctcctacaaaaaaaatagtaagtaccgctataacattacagctggtgcaaaaaaat

SEQ ID NO: 59000 - DNA, 489 bp, Zea Mays
ttgtgcgtacaggggtctggtgctttcttgcggaggtccggtccaactgatacatcctaggatgtatcaccttttctcgccacgtggtgccccttgagccgtccacgcggtggggacgggtgctgtttaccgtgcggctagagatcgtcgtacgggcaccgcatctccatactgtagcaaggggtacccctgattcagggtaccgactgtggcccccgggcccgcctcaggggcggttacgagcctgtaggtggggccaaagtttgactgattggctcgctgcttctgcgcgcccgtttgatgcaattactgtcggtccgcccttggtcacgctgactgccacgcctgtccccacggctgattgacccgtgacctccgcacttaatggctttgttgggccatgcacggggtgccttgagtcgctgcattggttttgaaatttaacttctccgtcttctgcggtggccccgaggaggcgtggtactggcg

SEQ ID NO: 59001 - DNA, 759 bp, Zea Mays
cattagcgtagcataccactgttgaagccgggtgcgggcaattgctcgccgtggtgagagctccgccgtaaatccgcctctcgccgtggatagtctccctcggaccggtcacctgctcgttgcggtggcgccaccgtaaaagtgtagcgcgccgtggactgagcactgtgctcgtcgacggtagaaattggtagaggggatgagttcataacatcgtcaattgggcgaggagcgaaggaatttggagatggaggtcaggttggccggaatcgcggcgcgctggtggagggcagccgcgggcctctgctccaccttcgctggtcgtcgtcggaggaagagcgtacgcgcgccgttggatctagatgtaggggcaagattagctctccgcgtaatgtcttaagcaccattggattagaatccaatgaatctcgtgacgtaccggtttgtgggagatggggatcggatctggtccgtgcgatcttgatccggcgtatgtggatcgatctcagctacttaaaacctggaccgttgatttcccatcctgtggctgcggctgggtaccggttggcggataggccgatctaatcagggcgctccgtagtcgatctgacggcccctatcaacatataccccttcgccaagtcgattttgtaaaagagccctcctggaattcaggaactaacccgcagtctagtgaatagtgttctgagtctaggatttattacaccgaggcccctgggtttctgtttaatcatgcgc

SEQ ID NO: 59002 - DNA, 590 bp, Zea Mays
cgggaggtcaggttgagatgaataaataaggacaaagacagaggcaggttctaagacttactagggatatgttgccccgctcggggcacattgggaaagggacggtgtaatcagccttccccaccgtacccttgacccgcttgaggagatcatcggtggtgagggtggtcggcgccatccgagaactctctaaggaggcctcgagcgtcatctcgtccttgcgcatgcgtcgctccaccaatgacaacaccctctaatgatggaaggcagcgacgacctcgaccgaggcaagccctcagtcgtgaagcttccgtagggcgtccagaaggggctacagctaggcctggtgctccaacgttgtgccccaccgctagtgctccccacagcggtcatgacctgcttcgtgtacgccggtagcctcccgtcatcattacagaggtagaaccaatgactctgtcatcccttgttcgaagatgtaagggaggcagggatgtacagctgcacccgattcaagcacagttggagcgtgcagccgtcgacccctcaccgtgtggcagaccttcttcacctccaaagggagggagaatggc

SEQ ID NO: 59003 - DNA, 1065 bp, Zea Mays
atcaatatgatgtagcctcgagtaatccgttgaggatttcctgggggttttatttggttcctggtgaagccataggtctgttttttgccaacctctcctcacctcttggctgtgtttgatgtattcatgtttgatgtcgtggctcttgactcagcccttcgggttggtcgtggaacgacgatagtctctcaggacagaaccgtatggagttacccagaggtgatgcccgctggaacgtggtctgaatgcgcgtaagcgcattagtatgatgtagcccccgagcccccgagtagtccgttgaggattacttgggggttttctagttcttgggcgaagattaggactggcctcctgttgttctttccttattcgtccttccgagttggctattgacgcttatcgatcctttgctttgcatgcatctcccctgaaaaggcttttgggccctttttggggatagggccatcttccccaacctagtcggtgtcagggaaggggccatcgagctacaaatgagttatccaagtgagattcgatcaccccttttatagggtttatttttggtgagcggtcccactagggggctcgacctgttgggggcatctcatttagtccttccttattctatcatgtatcagccctctggtcagtctggtcgaccggaggggggcacgttgccaccccatcagccgggttgtcgcaggagaacgtgaggtacgaccttggacgtgggaccgagcaaatgacctatgggccgaccacctaacttgcgactcactgggagcttgcttggcccacccctcgctctgcgtggggaggtagagtgaaactaggatagaatggaatttgattcttacccgacgctaggtatttgaagtggcgtggtagaaatggaaccatcatggcattgtccacgtgggcggcttgatgggacgtaaaacgacttgctccccttatcgcgcgcagttggcgtggcagcgtggttaattgttttgtttgccattgacgcctttccgaggcatacgagacctacaagatgtacctacgtatagtcttccccacggc

SEQ ID NO: 59004 - DNA, 427 bp, Zea Mays
gcgatattccttctccagctctatctgctcttgttggtctgcaagaataatccatagcaaattttgatcaagctctcgaggatgttgttcctgaagatctgctgtccgagccaactgatggtgatatgatggacgtctgctctaacattccagatgtgggattagaggtatcctgggtagcgtctcgtgcctcgtcgaccttggaaggtggtcttcggagccaagaggttggtcaaggttgttcaattcccatggaggtgactgagagtccttcagccttagaggtggctgttgcggagaacctagtcctcaaggatggtgccagcggttgcccagcccccgagggtgttgccggtaatgatccggctcgggtgggtagcgcaagctgcaacccagccctcgagggtgttgccggtggtgatccggc

SEQ ID NO: 59005 - DNA, 317 bp, Zea Mays
ggggacctagtgctctgccgggtgctgacgggagaatagcgacacaaattgtcacctccatgggaaggaccattcatcattgcagaggccactcggctaggatcctaccaacttacccaaatggacggaaccgaagtgggaaactcgtggaatattgagcaactcaggaaattctacccgtagcattacatcaaaactctagtcggcaagccgcactttgtaaacaaaaggtttcattatcaataaagcttttgtgttcgtccgcatacaaactctcaactagcaagcagtttaagttggaaacgacttaaaccaac

SEQ ID NO: 59006 - DNA, 594 bp, Zea Mays
ccaccattgaagcagcccgttaaggagctagggaggatggggaaacgagcaccaggggcactcggctgacttgttgaagtaggggcagtggtagggcagatgaagacaggttgtttgaaggggtaggagggtggacgaggtgaagaacggttttgattgaaaggtcggattaccaacctttgtcgcttttcaggcccctatttggacttgtaacctccgaatcccttcgacttccctaggcctgtgtgcttagcttctactgccagcgctgtgctgacagccctgctgtaggagagatcgaggcaggtggccatctttctttgaagccagtcgtcgaggcctcgcatgaagcaattcttcttttttaggtcagtattgacctggtcaattgcatactgggacaaataattgaatttgttgagatactgcataataatatctcctccttgcttgagtcgcatgaattccaactgtttcatgtgcagcactccttctggaatatagtgctcacgaaaacacaaatttaaatttcgtcccatgtgacctcatgcccgacagattgaatggccacataatttccccaccaagtactgg

SEQ ID NO: 59007 - DNA, 1341 bp, Zea Mays
tcattattttcaaactaaaaaaggggtaagacaaggcgaccccctctcaccaattcattttaatatagtggtggatatgctggccatcttgattaatagagcaaaagataggggacatttccaaggtcttattccacatattgttgatgatggtttatccatcctccaatatgctgatgacactcttattttcttagatgatgatatcgagggggcgaaaaatatgaagttactactttgtgcgtttgaacatctttcgggtctcaaaataaattttcataagagccagcttttctgttatggtgctgctaaagaacgagaattggaatactcagaaatttttggatgtaataaagggcattatcctttcaaatatctgggcattccaatgcatcacagaaagcttagtaatgaagattggaatgatatcatagaaagatttaagaaaagacttagtgggtggaaaggaaaaatgttgtctgttggtggtcgactagtgctaattaactccatcttaacgagtattacgatgtttatgttgtccttcttcaaaattccaaggaaggttctagagaaattagatcaaattagatctcgtttcttttgggaaggagaggggcataaaaagaagtatagattaactaagtggagtatagtttgcacaccaaaagacatgggagggttaggaattatagaccttgatcttcaaaataaatgtctactaagtaaatggcttttcaaattaattaatgaagagggtatgtggcagtcaattcttcgtaataagtacctgataaataaaacaatcacccaggtggatcatatgcctggagattcacatttttgggcaggcctgttaggtgttaaggatacctttcttcgcctaggccttttcaaaattggggatgggactcaagttcgtttttgggaggacaaatggcgtggtaacgcaacgttcaaggaacttttccctggactctatgatatagtccgcaaaaagaaagcttctgttgcttatgttttaagatcaaatacaataaatgtggcctttcgtcgatccttggtgggtaataatcttatggcttggcagcagctcatagccttgattaccaatactcaactaaatgatcaaagggatatttttatttggtccttacatcagcatgggaagttcactgtgtgttctatgtataggactcttgttaggccacatgtggttccaaaaaatcatcccatttggaaaatcaaaattcctctcaagattaaaatctttatgtggtaccttataaataatttagttctaacaactgataatttagtgaagaaacaatggaaaggctg

SEQ ID NO: 59008 - DNA, 1078 bp, Zea Mays
ctgctgaagaagttagcgccttggttgcctcgctcggggagattcctgatgatgaacggcaggtccattttgaggtgcccctgaatcctagtgatgcagagataagtgctatgcttgatttgctggctaaggactcttctgatgctgctcctgctgggacattggtggtggcgcccctcccagaggctggtacgaccttggatattcagaagcctgccagtactcacccgaggcgcccttgccgagccaatcaacctgatccttctgctgatgagcagaaaaagaaaaagagacgcctccggcgagtatccagtttggatctggacgttggtacttcggttcctactgctgaagaagtgcctgtgactgaatttattgacgctgaccccaatgggtgtgcccaatctgctgctgatcccgatgtgggtgttccatctgttgctgatcccaatgggggtgctgcctgtgttgctaatgaagacgacggggaggaagaggatgaagttcctttgactcggaaaaacagtcggcagttcatcgctagtggtgaaagtagtggagttccttctcctgctttgtctgctctcattggtctgcaagaattgtccctggcaaattttgatcagactcttgaggatatggttccagaggatttgttatcagagccagcagatgatggtgtgatggaggtttgtgctgatgtgcttgatgctggattgaggtcatcctgtgcctcgtcgaccttagagcgcgatttcgagggtcaggagactgacttggatcgtcctggtcccatggaagtaactgagggcccattagccttagaggtggctaccgcagagaacttggaccccaaggatggtgttgacacttgcccagccccggaggatgttgccgaggatgacttggttcgggtgggaagtgcaagccactgcccagcccccgagggtgctgccggggatgatccggctcaagtgggcagtgcaaattatgacccagcccccgagggtgtccgagcggggtctccctcttgtacttccatagacgttcatgcgggatcgcctccgcactctggctg

SEQ ID NO: 59009 - DNA, 401 bp, Zea Mays
ttttgaagctttatatgggaggaagtgcaggactcctttgtattgggatcagactggagaaagacaattctttgggcctgaattgattcaagaagcagaagaacaagttcgtataatccgagagaatttgagggtggctcaaaccagacaaaagagttatgctgataatagaaggagaccactggaatttgaagaaggagattatgtgtacctcaaggtgtcaccactgcgtggaatgaggagatttaaagttaagggcaaattgtcccctcgctatattggaccattcttgatctttagaagagttggggagatggcataccaactcgagttaccggatagtctatcggatgtgcataatgtgttccacgtgtctcaacttaagaagtgtctccgtgtcc

SEQ ID NO: 59010 - DNA, 619 bp, Zea Mays
cgggggctagaagggggaattaacccctcttctgtgtcattttttctcgttattttttcttaaaaacatgtttcgtacccttgccctaatcataatgtggacctctcaagaacaagggacatcccgattaggaaagatagctgagccgtgggaacacctatgcctcagggatacggtttcctcactcactattcccttcctaaagggtgactcacgttctaatacggacaccgcagtaagacggggcgacaggcacaaaacagcatggaaaaataacatggcaaactggcagaacttaaagaactgaagagttgacaatatggtttatacaaatttaaaacttcaaaaccccacaggtaggggttgggtctatgaagttggaggaggaaggatgccaccctcggagtcactagggggcacggcagcaacaggcgacaggattggcggaaccacctcagcctcgaagtggcgagccagcgaagaccctggcccctcgacggcattgacgagcctatgcatctcagtgtcggtgaggttgggctcgtcagggaggacatagccctcgcacacccgctcgagattgatctcgtagtgggaggtgactacggccagcgcccgc

SEQ ID NO: 59011 - DNA, 590 bp, Zea Mays
ctggacgcgtggcgccgagtaagggtgaaaacagtcggtaatggtcggaaaaatgggaaagtcgtaaacggataacggccggtaaattccggtatatcgaaaacggataaatccgagcaaaataactcgaaattgatcgggaaacggtaacttaatcggaaaagctcacaataaacaaatcctaaccacacagttgttcattcacatccacatacaagtctcattcacaaaagtacacaaaacacaatcttgtccgcatataattggtcatacactcatacatgtccactcttaaattttaacacacaacacataggcatgaccacacataaattatcatacatgttcactgaagttttaaccacatattccctccttcccatgaaacaaggcgtctaagattctcaattttttcccatgaaacaaggcgtgcggtggttttctagctaatgtggacacatgtgcccttgctctgcatatgattagagagtaaatgacagcgatgaagtttatggcggtttattccatgtacggtggttttctggctaatgtggatccactactgtttatgcatacacacacaaggcaag

SEQ ID NO: 59012 - DNA, 511 bp, Zea Mays
gtctcctagacaagatcgcaggaccggcaacgtcccgagggctcgttcaccggtttgtggatgaagacgaggatctactgctggctgaagaggatgagccgaggaccttcgagcaggcgcagcgcagcaacatgactgctggaggctcgccatgctggatgagtcgatgagatgacatccatcgaggcgaatggcacctgggaactggtggattcgccaccacatcaccgtccgatcgggctcaagtgggtgtacaaggcaaagaagaatgccatggggattgtcacgaagcacaaggctcgtctcgtcgcaaaggggtatgtgcagcgtcaaggcattgactttgaagatgcgtttgccccagtggtacgacttgagtccgtaagactcttgttagcgctggcggcgagcgaaggatggactgtccaccatatggacgtgaagtcagtctttctcaacggcgtgctgaaggaagaggtgtacgtcgctcagcctccggggttcgtcgtct

SEQ ID NO: 59013 - DNA, 497 bp, Zea Mays
caatagggttgttggtctcaatatagaactccgtcacctcctctaccgtaccggttacagcaccaacatcaaccacacgctgagatttaaacggcgagggaagatcacatcgtggtggtgatttggttcggccaattgattttttagtggatactagatcttatctatatcactatataatccgttagttaaactttgcagaatgtatccaaccaaaacgctcccacgtctataacctccactaaattcactaaataaattacatctagacttaacacatcattaaaataaacggttcagatcgctggataactctctctcgtttactcatataaattcaatgtacaatattatttagatcatccatcaatcctctccctctcctacgatatcgttgccctcgtgttctcaccgtctccccctcactcacgccactgtcgctaccaccatcaatactctctcccttccatcgccgccgccatcgtcgtcgacttctt

SEQ ID NO: 59014 - DNA, 803 bp, Zea Mays
ggggtctcggtgcaagtgtttccaagactcagaaaacccacccagtggactgcgggttgttttgacacaaaccgaggggcccaaatgcactttagacccgcgaaggggtatcgggccgttctggccgtccgatccataactaacggcgaggattagatcgggtccggcccgaaccggtacacacttagagccgtcgatcaaacgatctgcggcccgaagttaatgaatggaaacttgaatcctagacgcccgccgatggatcaacggtctggatcatgtctgtctgaaagggtacgctagcctaatctgagccatccaacatccatccaacggcgcacgcatgtcttccccatcacacacacaggtgcggcggcgcaccaaatctcacggcggagccctcaccggcgagtctcaatgtgacgcatcgggcgctaatccccctacccgtggtgatcaatacgatgctgtgagtaaggcgaaatgaaatggggaggacttactgtgaatcgcgcggcacagacctctgcccacggagcacggcggattaccgacgacggcgagcgattctggacgattggacgggtcaccgagcgcaatacttcacgcagacgatccccacgcaccgatgaacactcccgacaccaccctggccacccaccggcgataccgggccgggtcaacggcggcggccacaatccttccgcgagcgtagcaatggcggcgtcgattggctcaggggaaagctaggcttgtgcgagaaggtagtagggaaaggaacgagtcacggggcgtccctttatccc

SEQ ID NO: 59015 - DNA, 406 bp, Zea Mays
ccgagttatgacagacattgtcagtgttttagaggtaacaaccgagtggtgcttgatgctgttggcgttttagaggtaatagccgagttatgcttgaccccgtcagtgttttagagataacaaccgagttatggcagacactgtcgatgttttagaggtaacagccgagtggtgcttgatgttgttggcgttttagaggtaacagctgagttatgcttgaccccgtatgcgttttagagataacaaccgagttatgatagatattgtcggcgttttagaggtaacggtcgagtggtgcttgatgttatcggcgttttagaggtagcagccgagctatgtcggaaatctcgttttcccgagtgatgacttgacactttttagaaacggtgcccaacccgggaaaacc

SEQ ID NO: 59016 - DNA, 489 bp, Zea Mays
cagtctggacaccaccaatctgagtgtagtaatgaacctctttgctacaaatgcaagggatttgggcacatggctgcagagtgccacatgcagaggaaactgaggttgtttggatttggtatgccagaacagggtttctttggtattgatatttctgaaaacaaagagcagatggcgggtctggtggcttctatccatgttttggagggggaacctaatgaggaaaaattagaggaggaactaaaaaatttagtgcaagaaaattgggaattcagggtgagaagggtggataagtttgacttcattgcctccttcccagataaaggatcccttgagacttatgctaagctcaatagcctggagatgcctatctataggttcagagttaaaattggaaaaaccagtgtggatccaaaagcttcagcagaattacagagtgtttgggttaagattttcaacataccagagaaagcacgtgagaaaattatt

SEQ ID NO: 59017 - DNA, 719 bp, Zea Mays
gctgtacctaattttctttttctaagagccgcacccggagccttatcccttgaggggccttcatcggccgaggacttcacctgcttccctcggcgatcagcggtgtcaccggagtctccctccgggtaagaaccatacgacaaattattcagctcaaacacgcggttcaacctgacgttggaaccgcggatgtcccaactcctcaacgtcttagtctttagcgcgtatttgccaacaatcttgacggcttcgacctcgacttcacgcacaaatgcagccgcatctcggtcgcagatccacggcgaaggcaggacttcgcactagctggcacctaatgtcggcattcggcggagggtaatctcacccagtgcccaaccatgcgctaggagccacaccccacaggcaataaactcctcgaccaaatcgcgtccactactcaggcgggcgacatatcgaagggccccctcgtcttcatcttcttctgccaccccaaaatgtgggaacgccacatagcaataagagcataagatggcagggggcaaactcggcaacccttcgacatccccaggagacacataaaaccaaaatttccaccaattgccccacttatttctggcacatgggacaatctcaacaacttccaccgaagtcttcccagtcctaggcgtaaaagtgcacgatccaaattgagcaaccttatcacctattttcctcttctg

SEQ ID NO: 59018 - DNA, 482 bp, Zea Mays
aggttgtctggaactatccccgcacacatcgggaaactgacagagctgtttggcttgggcctggccaacaacgagctccatggccccataccagacagcatcgggaacctgagcaacctacaggtgttagagctatcaaacaaccacctcacctcagtgatacccccggggctatggggtctcgagaacattgtgggtcttgacctgtctcgcaacgccctgcgtggctcgttcccgccggaaggtactgaaattctgaaggcgataacgtttatggacctttcttccaaccaactccacggcaaaataccaccttcgctgggagcgctcagtacactgacctacctgaatctatcgaagaacctgctccaggatcgtgtcccaagtgcacttggcaacaagctaagtagcatgaaaacgttggatctctcgtacaactctctgtctggcacgattccagagtccctcgccaatctcagcta

SEQ ID NO: 59019 - DNA, 636 bp, Zea Mays
cgggcagccaggaagggagagaaaaggaagtaggagggtgcagggaggaagaaacgtagggaaccgtcagatctagggcatgcgatggtgatgagaggatgtcggtgtgtgctgggagtcgtggatccggtattgggcgacccagattagaagtagaaaagctattcgggcacgttagttctgggtcgtcgatcggggatcgaaaggctaagattaactcgcgatgtgggtggttttggtgcgcggattccggatctaacggccagggttgcgcgcggggttgacgtgtgccaaagctaatatgtgctcttagattttaatcgaacggtccacaggaaccgataccccttcgccgcatcattttgcagatgaaaccctcattttttaggaaaccaacctgcagtccaagcgactggggatctgtgtctggtggactttagcaagttaaacctcagactttctagtatttgacgctcagtccacaaaccagagaaataatattggaaattgatttttaatacaaacataatcccaaaattcatttaattcatgaaaaatcatattaaatcctttttgctccattccagttcccataattttgtattaatatttcctactacttggtaacactgtttt

SEQ ID NO: 59020 - DNA, 640 bp, Zea Mays
aaaaattattgcaactgaaacggattaaaaagaagtaaaaatggaatttctatgaattaaataagttctggatatatttttatacacaaaaatcatttcctaaatcatttgcctgaatttcctaagcttctgaactaggcgcataattatcagaaactacaggggctaacttgaaatatttcccagacccaggattccctcagtgtggactgcgggttgtttatagggttttacggggtctctttagcaaatgttacactacgaaggggtatccgctaaccacagtcgctcagatctaatcctaaggcccagatcttattagggcgagatccaaccggatctgtcaatccaaagatcaaccacctagagccgcacatcgactaggtaatggccaacctaatccacaccgcacgatggatatccaatggcccccacgcatcttctcccacacgacaaccaggacggcggcacacacccatcgcacacggcggagccaacaccggagcacaccagatcaacgccccgatgctccctgcactcaactggaccacgattcgcatcagggagagtggttcgagcatgattgggatacataccgcaactggaggccaatggagggggtcggccacaggtgacagtg

SEQ ID NO: 59021 - DNA, 404 bp, Zea Mays
ggacgatcaggagcgagagctagtgcactgggtgcgtaataacctagcggagctcactggggcatcaatttatagagtccatcagcggtggcgtctaatttggagaaggcgtgctgacggccggagagaggggaggttactggtgcgagttaccatggcattcactagagcaacgactctgatgatagacatgccatctattgtgacctatgacgatgtggtaacaaggcagtagcgtggcgtgctcgggttaacggcgatcatcaccgcgatgaccgcgcgaccacgtcgcagcgcaagtggatgaggtgatagagcggccacagtgctgcgacctcatcctgtgccaaagatctttcaccccgagtcgttatccgggcgttaccgggcgcgaatcacagcgc

SEQ ID NO: 59022 - DNA, 860 bp, Zea Mays
tggtagctgttgttataagcgaactcggccaaggcgagatgatcctcccagctacccttccaagacagaacacaagcacacaacatatcttccaaggtttggatagttcactacgactgaccatcagtctgagggtgaaaagcgacactaagagagagcttggtactcaaagcactgtgaagactctcccagaatttggatacaaatttggagtctcgatctgaaataatggacttaggcaccccgtgaaacctgattacttctttcatatacaagggaaccaactctgaagctgaatttgtgggctttatgggaataaagtgcacagacttagtcaagcgatccactaccacccatatagcatccctgcctcgaggagaacgaggtaagcccaccacaaaatccatggtgatatgctcccacttctactctggaatttccaatggcttcaataaacctacaggcctcttatgctcggtcttcacgcgctgacatacttcacaggcggccacatacttagaaacatcaaccttcatcctcttccaccaaaagtttttcttcaaatctctgtacattttggtttcgccagggtgaacggtgtaaggcgttttatgagcttctctaaagatattcatcttcacctttgatttctgaggcacacaaagatggcccctgaaacgaaccaaatcattctcatcaatggtgaactcacggggtttaccatcgccgaccctctttcgagcttccttgtaacacccagtttgtaatatataataaaagaggagaaaagtcatttcctatattttatgtgtgtgttgaatctacttgtcatcacatgtgaataccatattcaaacaaca

SEQ ID NO: 59023 - DNA, 483 bp, Zea Mays
tgatcttactgtcttttgagaccctttcctattctattgataagtcgctatctttatggcaatttgtactttttggtcttggtatgctcgtaccattggaatcttgcatactcttatttttatatatgcttacctttatgtcccaatatatgtttaagacatttcagttaacgtgcccttgaccacccttgtttcttaatgatccatgagcggtcattctactttgcatatccttggtgatcccattgtctccttgtaactccacttggtaatgaatctttacttcaacccttctgttggaaccttacctatctaacccttgattgttttctccactttgtcgtttcgcaagtcttgccttaactatatcctttgttatgcttttaattattatcatatgcacccttgacacctctatatcctacattgatgtttgtctcatacctgccctttaaaatcgcccctctttcgtctcataccttc

SEQ ID NO: 59024 - DNA, 361 bp, Zea Mays
acaccctctccccactgctagtgctgggattcgggcaattgggcggaaaggttcactaggaggggaagatcgcgtgcatgaaagatttggtgctcgggaaacctcggcgatgcggtgatttctcgcctgagttcatcttccaccgcggagccacggtctatcatggactgagctcgtcgcttggtgattcacggtgagaactccctcagtcgattggcaacgtatcgtgtgctcaaaccggtaccgtactcatatgcgcatattaaatctcagccatctatcttccatccaacgactgccggcaattttgcagagaactcctcccaccatccttggctggcgtggaaagttttacatctag

SEQ ID NO: 59025 - DNA, 823 bp, Zea Mays
gtcgttttccagggcgttgaaggatggatggcttctctggctccggcgagggattatgttgacggaggcgtagcgtatgtaacccggcccatctgatgcgtacgggacgcccgatcgtactatatataagggtgcccacaactccgatccaaaccaaactcagatacgtgcacggcatcatgtggagtggaggcggttctgatctcgtggacggatcgatcaggagggggctcccggcccagacgggaagctggtgagctgcgtacatcagagagcgtacttgagctgatggctttctatacgcgtacgtagtagcgtatctcaatacagagatggccagctttgcatgcatatatactacctaaatctgggtgactattgcggtgcgaagaagtcattagggtgaactcacggtcagatcgatctcgtggaccgacaaacgacatgtgaccattattaggttgctccccgaccttttgcaccgatcatcgacctcatggtcaggccgttaagttaatgttattggtttaggtttagacataacatttagtgaggtttgtatacctcttaccacgcttagtcaccgaaaagtccggagccgcccgtagcttttgcccgttgtcttgtcgccaagacatgatgcttccaaagtctctccgttggggtacggtgttccaactcacgctcggtttcggcacacgaatgaactgctgcgttgatcttgatccggtcgcgcgcgtttaatctggaacatgcattattaaaactcgagctccatattttcgtgtcttgcgtgtgtcacttcagttccgaatcggtgaac

SEQ ID NO: 59026 - DNA, 401 bp, Zea Mays
gtgatcaagtcgcactattgtttagtgcactagagaggacttaagtaccatgaatggtattcctcatcctattccgaggcctcaaagaaaaggataggaaatctagttactctaattccaagtatccggggacgcctggagaaaaatggataagagagcctatcacaaccttgtcacgaaacacccaacgaaataatggagaaccagttgagagctggtaactggagagcaagcctgctagcgaggtgccttcaagatatgaatatactggtaaatgaaaaagaagagaaagctgaaacaaatttgagctcgtcggctattaataaaggagcttgctaccgtattgagaaatattagagtaaagcaagataaagtgcataaagcactctcgttaattctga

SEQ ID NO: 59027 - DNA, 549 bp, Zea Mays
ataagaattacaacttcgtatggaatctttcactcggccaaaaaaaaggtgaacagtgcacgacactattccgctttttatagacctgagatatggctcaagtaaatttacaattatatccttgatccctatgcattcagactaatatatatgtcaggggtaaagttgtccttctccttcttttagcttggttcgtcaacctccaaaggtcctccggaatcagcttcatttgaagcatgtacacaatggtcatctgaagccttcatgcttgttctgcttggaacctaccttcggcattatcccttcgtcattagtacttcagcattaaccctgcagtatacacataacaaaacagaaggagcgatcacttagtgaatgttttgaggacctttgggaaaagaagacccacaatagtagccccttcgtggtgctagatcgttttttcataacgagctcgatctgcaaaacacgtgaaggattcttatgccaaaggtccaaaaaaactttctctgagcttgttattaagaaacggacaaaaaacttgagcgt

SEQ ID NO: 59028 - DNA, 1017 bp, Zea Mays
atgtttgttttgaaattttaatctagtgtatgcagtctaggtgtatcatacataatgtaatgccaatgcatatgatgtcatgccaaagttttagttctcgtaacactaagggtgttacacaataactacagtatgggcagcctctccctcgggggctcgagcgtatgaacaacccctcggcctctgccttggctctcagcagaaaaccagcaggcacaagtcaaccgcacagtgtgccgtcacgttggcttgcagggcgccaggacgtctctcctttggatacaacactcgacttcactgcggacactccccttcgtgtataaatagggcagtggtccctccaggaggacaaatgaccaagagaacacgtagacgaacattcactcccccactttgccttagatattggcacttgtctcaatcatcttatggacttggggacttcccctctcccgttgtgcttgtaacccctactacaggccattcagtgcgagtaatataagcctcacctcctttgttgaaagtagggctttgtgctgcccgaactaggataattgcttgtgtcttctcacacaccatctagagtcggccacgcggcacaatttactagttggttaaggacccatggtccaaacaccgacagttggtgcgccaggtaggggcttgtcacgtgaaacacttctagttctcgccaaaactctagatggcaggtttccaccatccactcaggcttgggacggtgatcaagttcgagagcctggagttcatgtctctcggcatcgagtatgacatgatacttctcccacttgtccctctcgagtgctcaagctctcgttgccacctctctcgtcgtaggaggcagagacagaacaatcgtgatcgtgccgctcatggcaccccgtgcactggaggagcccccgggatggcagatggcatagactccctctcgaagaacctagccaatgtcaacattgcacccagagtgccgccagtagtgcctgcaccaacattcccggc

SEQ ID NO: 59029 - DNA, 694 bp, Zea Mays
cgcctaaattgaagctaggttgagtttcactgattcaccacaggtcgggtacacgcacgaatttggacaaaacaggggtggaagagtgggtcaacgtgagtgtgcgctcggaggtgttcagcggcggcgagatgatgttctcgatgccctatcgcggtggcgttcaatcggttgggccgacgagctatgataacgtttaaggatgctaaaacatgacacagaaggggatgaacagacctagaaagggctgaacatggcaggatgcctcacgacagcgcaagtgacccaatttgggggaaatccggtgacattgggctatggtgcacgacagaggctaactgcatgtggtatgagtgcgtaatagagaggcggagcgagggtagtgctcaatttaaaggaaccagcaatgtgcttctccaatttgggccaaagacgatcacggcggcgatgggatattccacaggacgagctcgtcgtggcgtccgctggtacaaaggctcaaggacggtaattccaggcttgccatggttatagctacgttgaaagggtcatgacgtggcacaatcatggagaaaggtggcaactacgatgatgatcgtacagccacgttgctgcgcaagtgggtacggcgaactgagcagtaatagtgcccaagctcattccgacgccgagatcttttacctgaaaggcaaat

SEQ ID NO: 59030 - DNA, 421 bp, Zea Mays
ctctgctgtatttaagcttttttttttttgtggttggggtgggctgggttggtgagtggcgattatcgaccgaacgctcaatgcgtttaattgagtttttcactgtgctgattgagactgagccgtagtttggtcacgggagtttgatcgtctgtatgaatcacggcctttgacgctgattcctctcgatttcaatctcagttagcgactgataaactctttagctccgtgtcaacgtgtcttatcccacaactagatttacatgtttatctctctgctttattgagtgccgcccaaacatcacgttactgtcagaaatgttatctgatcttactgcgtggtagatttgttttcctattgtgtgaccatgatacaaaggcatgagcactccctgttgcttttaatatttgttagtttaaat

SEQ ID NO: 59031 - DNA, 754 bp, Zea Mays
ttttgatgatgaaggatgtatctctcctattgtcagtgtttggatctgaggacctaaccaactagtgaaataatattgttccctagaccaagatggtgatgcaagttgacacaagtcttttatcctggttcgggctagaagaggccctacttccagtagagggggatgagacttatattactcgcacctatgtgcttgcagtagggtttacaagcatagcgggagagggaaggatcccaagtactagaggatgattgaggcaagtgccaataccgagtggaggagaaagcttgtgaagtgttcgcccgtgtctcctgaagccgtaggatatcctatttataggcccagggggagctgcctggaggatgggagtaggtcgcgactgtgaggagacgtctttgtatccctgtagatggtatggcctgaggtatggtcttgtacttgttgttgacttgtgcctgcttggttcccgctgagagccgaggccgagggccggtcaagtacccgagcccccctggcgaggggccacccataccgtagtagttgacatagtgctaagtatggggaaaggcttcttaaggggcgcgtcagctccagaacatatgatgacgttggggcgtcctccatcatggataccgaggtcagagccaggctcagacgaggcggaagtcacaattgaaggaatgccctcctgcgggattcgcgggggagcaggtagccgaggcgaagttttgtctcgagggcgagttttgct

SEQ ID NO: 59032 - DNA, 748 bp, Zea Mays
ctgagttggagtaggtaggtcctggtgccttcaactgggggcagttattcttgaagtgactggggtctccgcagtgccaacaggcatttgctggcggttggttgcttgcgaccgagggggcctaaaaggagctctgactctactggctgaaatgtgacggagtgggtccagctagtctattgaagcttggtcccttgggtgaaagcccgaaggatcgagctctctggtgtcggtcttgctgctgagcttggagaacttggaatttcctcttgaggtgacctttttattcttcttttgccctttccacttgtatggctttgttggagaggtgcgagaagctgaggaaatcttggctggcaaggatggtcttgagttctggtcttagccctttcagaaaacgggccatcttcttggtttctatgctgacatcgtcaggcacgtaacgagccaattctgtgaatttgtgcacgtactcactgacagatcttccaccttgagttagttcccggaattcatcttccttgagctgaatgatcccctggggtacatggtgctcacggaaagcagtttcaaattccgcccaggtagcgtccctgacggtcgtgctgaaggtatcccaccatgctagggccatcccagaaagttgatgagcagccaattgaacacactgatttttggggcatccgatggcttctaatttcctcatgatcgtgcgcagctagtcgtcggcatcgaggggattgttgga

SEQ ID NO: 59033 - DNA, 656 bp, Zea Mays
caggatttcatccgtgaggaggtccagaagctgctggatgctggcttcatcgaagaggtccatcacccagtatggctggccaatccagtcatcattcccaaggctaacagaaagctttagatgtgcatcgactacaccaacctcaataaggcctgtcccaaggacccatatccacttcacgaatagatcaaatcatggattctacctccgggtgtgacctcctgtccttcctagatgcttattctggtttccatcagatccagatgtctaggcaagataggaagcataccgcttttgtaaccgtggatgggctctactgttatgttgtaatgccttacggtctgaaaaatgccttgccaacattggtacgggcgatgagtaagacttttggtgacctgattagggacagggtggaggtatacgttgatgacatcgtagtcaagactaagagagggtcgaccctagtggaagacttaaccctgttctttgacaagctgcgagcaacgtgcacgaagctgaacccggacaagtgcgtctttggtgtctctgcagggaagttgctgggattcctggtttcgcaccggggcattgaagcaaacccagagaagatcaaggcaattgagacaatgaggcctctggcccgcattaaggacgtc

SEQ ID NO: 59034 - DNA, 501 bp, Zea Mays
gccaggaggcaggaagtcaggaacaggtctgcagactacaacctacagcctacatgtttgctctattatgcctggtagaaagagacagcaaaattgcaaaatatgcctcgtagatgtgtaaatgcttatactacatcttgatattctgcttatcagtcaaaattcaaactcaagcatcatgactcatgagggatttatttttactgattgtagcctgcagatttgtaagtgatggagtcagctgtagaagggaaggggactgacagaaagtaattcatttgacaagagggatgacatgtctgaagatgaactgacagtgctaggtggaaaaattggttatgtggacaatgtcacaactgatgaatctgatgatagcaaaagtaaaaaggaggggccaaaagaaggcgcaagaaggtgaagactgattaaatgggcaaaaggggaaaatctaaagtttgggatgtctttactaaggtgaatgtgtcagatccatctgagaag

SEQ ID NO: 59035 - DNA, 890 bp, Zea Mays
cttatttctaaaagttgcttagcaaatgctagatcgagacgtctaggtgacattgtcatcaagaaaatgtagtgagatctagaggcagggagcctggatgctatgcgtgtgactcaacagaaagatcactgcttctctatgtcgtcggcatgcatgcacacccatacatgcatacaacacatgcctctatagagttaaaactaccatggcccaacctcctttggtataactgttctcttctctacgctactactataaagcaccaatttcccctgtcgtcgtgtgtcaacacttcgaaaaaacaatattttttgtaatcaacctatggtcaaggcctctgattcacccatcgctgttgcggcatccctatctgtccgcttacaggctctcactttctgtgcccatgcccacgatgagtccccgtcgtcgtagctccttctcctgtgcttctccagcattgcctccttggtcctccctacacatgcaggttcacgacgtgctccttcgttgccacttcgttcttcctgacgacctcacgtcgcttcgctcctctctcctcttactagcggttttcctcccacgtcgtgtcatcgcctttcctcccaacaagctctaagcttgttgtgctccccattttcctaaactaccccatgtctacccctcctactttctagaccttttatcacccacatcgtctcacaacccggccccaaggacatgttcacatgggttttaatctcccttgacaacgacctgctatactaggagtacccccatggttctaaagagactatcgatgctatgtgggcgaaggattccatgtgcgcatagtgcgtgtcctagattgccaaccactggcatgccatcactgtgaccctccgtacaactga

SEQ ID NO: 59036 - DNA, 358 bp, Zea Mays
gtgtatctcgggttgttaggatttgcttaattgcttgctctgccgtccgtgattcgtgctgacctcactgcggggatcctgacatcttaactctctttataatttcgacgacgagtgttttctgctagctcggagcaaagtccacatcacgtcgatctctgcgatcgtgtccgggccagtattttctcgacttttctttccccagcaggcagcagctatacagctcatcctttccggatcatttcttccagcgcggttgttgatctcgtgcaagttttgtcccaggtgcttcgtcggcaaatgatgtctggactaggaaattcaaaacgaaatccatttgtgatcacgctgagctggc

SEQ ID NO: 59037 - DNA, 984 bp, Zea Mays
gtggggaggcccatgcctttcatggctggacgaagacaacgagccaatgttcgtcctcaatgacagggaagagcaggagatgtggtccgagttttagatcatggtctgggtaggaggatcgagcatcttatatggctacgtattccttttcatagggcgtgtcttgatggtgtatactttcttcttagggtctcatggcgaagtccatggccatgttcgtcttccttcaccgcgggtgcggcatctaggacatgttgctgcgccagaagggcttgcttgatcgttctaacgagcagcttgcccagaaaagcgccaaggcggtagatctcctgatgttgtgcttggatcttagggatgaggccgcgaccacacgttgggaggtggcacccttggtgaagaaggtccgctcactagaggagaaccttcaaaaagtgtctggcgagtaggaggagcttcaacgccaagctggatccctcgccgaggatctcaaagccgagcgatccaaggcccagggtctgaggacccaaatgggaggtatgtgttgcttacccatacttcacatgctcaggtcactttggttgtgtctcatcgttcttgtttgatcatgtttagagcttaagtgatacctccatcggtacgtcctggacgctctctcaggccattgatgagaaggtcgtcgagctcaacaccttgtccaaggcggtggcggacttcggtctaaccttcgacgcagaagacatccccttgggtgggtcccctcggagtcacatgttggcctagagtggccatatgcagagcaaacttcgcaaggccgttcacatcggggttaagcgggcattggtagtcatagcatcccgctacgaggtagacctcaagcgggtgagcgacggctatatcctgcccgataaggatgatcttgccgaggcagaggttcggaggctcgccgacgttgtcaaaaggttgagcaccgtgctggctcgccac

SEQ ID NO: 59038 - DNA, 1040 bp, Zea Mays
ggcagccgcaaccgtagtgcctgccaatgacaatttatctgcttctggatctaggtgtttttcgtctgatggtgagtttgggagtccgttttcctggaccgaagagtcttcggatgaagacttggattattttgttgcgttagatgtggccgcggcggagtcctcgccgcgggtggaggttggcgaggtggctgatcttcctagtgcgaggaccaagtgccgacgacgaagggtggtgtcgaagcatagcgtgggcgaggtttcgcggagtggtaggtgccgtcggatggggatggagcgggaccgtcttcgagtagattgtattggtaaacgagaactattgtctttgccgattgggacgagcattggtgagggggatctgcggaacctttttgagggtgaggaattgaaaataatgttgttcaattatagggaggcaggcatcatcccgaaggttgagccgatgtagtatgtggtgccctcgctgagtctatgtaactgtaacttgtattgtaatgtggcctgttggccgttttcgcatacttgtgctaatctggctgcacccttaggcgacttttgcgtggagtgtcgattggcgtacttatcgcgcttatccggttgcatcctcgggcgacttttgcgcggagtgtctttttagtaaaagactttgattgacgcacttattgtgcttgtccggctgcacccttaggcgacttttgcatggagtgtctttttaataaaagacttcgattgacgcacttgttgtgctattccggctacacccttgggcgacttttgcatggagtgtctttttaataaaagactttgactgacgcatgcacttgttgtgctattccggctgcacccttgggcgacttttgcatggagtgtctttttaataaaagacttcgactgacgcacttgttgtgctattccgactgcacccttgggtgacttttgcgcggagtgtcacacgcgagggtagtctacgctacctgtcacggtgacttcgaattggttgaatgccaaagaccgtcgaa

SEQ ID NO: 59039 - DNA, 409 bp, Zea Mays
cgggcatttgcatgtagtgcttcaacgtctgcgagagcaccgtctttatgccaaattgtcaaaatgtgatttttggctaaaggaaatcaaattcttgggtcacactatctctcaggcaggcataactgttgatccggataaggtgcaagaggtgatgaactggaagccaccaacgactgtccgtcagattcgaagtttctgggattggctggttattaccgaagattcattctggatttctctcgaattgcgaagcccataactgaattgatgaagaaagaagccaagtttgtttggggtcagaagtgcgaagatgccttccatacattgaggcaacatctaaccaccgcaccggtgttagcgcaacccgacagcagcaagccatttgatgtgtattgtgatgcctctg

SEQ ID NO: 59040 - DNA, 1086 bp, Zea Mays
aatttattttagttataaaacatgagaaaggatggtggccactattattcgaaagttcagggttagttttgaataaaactggactgttccgtaataactcttcaatgtatatggacgacaggttattttctaggttttctagggctctttaacaagaacactcgcgacgaaggggtatgggaccatcacaactgttcgatcttgtgccgacgcatcggattagatctttctatcattcaagcagtacacaccgcagcacgtcagatcgcatatcaataatcgcgatttaaagaagcgcgatttaatcctagactccggttaatcgatcaacagctacggtgtgccctcctcaacttctaactacatccgacgatatatatccgaataggagattatggcgaaccagatggaagacatctcaccatggtttgatgcgctgacccgtctgcccacgacggggggtatccccgcgatgctgctcgcatctgttgagcaattagtggagctccaatataacctccgtccgagaagaccacgagcacgcccccgtgaactcgcacagcgcccagacccgttcgccggggatgaagcaatggtgtggcatgagatgaccgtggcggtgacccatctctcctcgccccgctctgtatctctctcttctcttgggtagcaggacggccatagaattaggagtagtatgagacttgggtgaggtggagggtcatgtgatagcttgatttatatacacccagaggctaaggagtttgccttggagtaaatactgacgatccgtggtggttacaacggagtctgcaactctggcggcgtcagctatacgaggtataattggtaggcggttacaacgaatgcagataatgcagtgaagatcctagcgagacgcagagcttcagggtagaaacaatcaccatgctcggtctgtaactaactaccaggtgaataaccattcaacgtcgtttatgggacacaccccgggagcctaagttcgagctaaaacgtgagaaagactatgtgcatgatgtttggccaagcaactaagtaatttgcttgttgatgtcagcaaccgtt

SEQ ID NO: 59041 - DNA, 402 bp, Zea Mays
cagttggcgcgcctggtaggggctcgtcgcgtgcaaaatatccagttcccatcaagacttcaaatggctagcttccaccaccccttgaggctaaacacgatgatcaggtttgtgagtctggagttcatgtcactcgagatcgagtatgatgtggtgctcctcccacctggtcccctagctgacactcaggaacaacaagatgcacgtccccgtccttctcgtcgcaggaggtagagacagaacaatctcaactgcaccaactgtggtgccccgtgctctcatgaagctcctgggctggctaatgacgtagactcccttgcgagggacttggccaccattagtgtcatgcttgaagcatcatcaacaacatgcgcacatccccagcaccaactctgctggctt

SEQ ID NO: 59042 - DNA, 862 bp, Zea Mays
ctgaaagctaagaattcttgcaccaaatcactagtgccaatatgctctgaaacaacttgacattcacccaaggcaatttggcatggtgattccggcaacatgttgcactggggcctagtttctccaaagactaactccaatgggctctgaactagcttctccttcttctcgtcaaccttaacataaaaccattcggtcttctagccggtgggccatttggtacgatagctaataactggagacttcgcatctttgcgataagcaaaattgtagcagccgaaattctcgtgcagcccatcttctctagcttttgtctgataatgaagctcatgtgccctgcagaaaccttcggcaagcggttccgctccctgacttcggagagcccaaacgaaaacactaagcctaacgatggcgttaggagttagctgatgaagataaatcccaaacttctccaacacatccgcaatcatctcatgcaaaggaaatctcaatcctgctttaaagaagcttttaaaaacaaccacctcatccttttctggcttcagagtaatttcctctccactaaaacgaactagcttcttcttggcttcactgatataacctagctttatcaacttaggcatatcatcttcagtaatagtagacttcccaaactctaggtggctaggtttagatggcatggcattgtactcatcttcagtttcaccttcttcaacatcaatctgctcagcttcggcagcgggggtaccttaagcttcctccggcactgccaaccctaaccgtttcatcacttcggaaatcggagcggtttcagcagctttggcttcctctccgtcacgtataaccctggccgtagaacgta

SEQ ID NO: 59043 - DNA, 355 bp, Zea Mays
ctcatacaataatagctaccaggccagtttgaaaatgccctgtttgaggctttgtatggcagaaagtgcaggaccccactgtattgggatcaaactggtgaaagacagttctttcggccagaaagtatacaggaggcagaagaacaagtacgacaaataagggagaatttgagaattgcacagtcaaggcagaaaagctatgtagatacccatagaaggctactagagtttaaggagggtgatcatgtatatttgaaggtgtcaccaatccggggcatgcgaagattcaaagttaaagggaagttgtctcctcgcttcattggacccttcgtaatcctaaagcgagtgggagagg

SEQ ID NO: 59044 - DNA, 707 bp, Zea Mays
gtgtgctgaggggacacaagagttatactggtagggacagaacgtccttactttcagtatttgtttgcttgtgctaccggcacatgattgctcgtagtagggttgcaagcgactgagagagggaaggatcccaagtctctatgagtcgtttgtctaaggtatgacctgatcgttagaggctctaagttgcttgtctgtttgttcactgtctatgagccaggggtttttggttgttctcctcaccccctctactagaggttgatcctattccatttataggccaagggaagggtggcttatagatatcttctctcagaagggagcataatgttagggtaaaagaaacggtttcacccctagttaaagtcttgtcgtgtgccgatatctcttcccgtgcggtcgcctatagtgcctctgaatttgccgaggagcttgtgatccgtgttggtgaaggaagctcgtgcgtcaccattatttgtcctcttctccccacacccaccttctgccttcgtggcccgaccgccgaccttctttgtcgttgagtgagctcgtaggacgtcgggggactcagacctagagtccataggtcatgagtggggctcggcctcaggtttggtaggacgtcggggggatcagacctagcatccataggtctcgagtgggcgtagaccaaagattcgtacgctacgagtgggaggaagaccgac

SEQ ID NO: 59045 - DNA, 330 bp, Zea Mays
tcagctttttcaatccgacagggtgatcatttgatagagtcctaatgcatagagtctgtttaggattacatctttctcggtcataaccacttgatcaatgagtcaataagcacaaaattatggttcccccatcccaaataagcaaagggattatacatgtaatacatgttcattgccccactactccatgtttgaacaagacaatatatcggcgatgaatgggctagtgaaaagtaccatggcatcattggagacgtatgaatggaagacacttgttgcgtcgccctttaggccgttttatttgaccgtgttgcctttgcgggtgcccgg

SEQ ID NO: 59046 - DNA, 520 bp, Zea Mays
cttcaccagggaggaaaacagagtaccttgacattcctctcaaggacagcatcaatggttggcgccttgagtggttcattgtggagaaccactgcaagtccctcccctcttggtcagggaggcagccagatgttcgcacaccgagctggatagaatctccgaccctttcgaagataacagaagctaaagtgctgcttgtcgagatctgcttgctgaaggatagaggtctgactgctgaagctatagttgctgacttcgtattcaagaacattcaacccttaaaggacatggcctacctcgcttacttgtacagcagtgtcaacgattctaccgggtcatgaacagaaaaattcctactaaaacctgctgagtcgattggacatgatcatgaggggcagagtttcaaatgctggtgctcctgtggcttattttgcatgaaacctgccgtcacttaagccgttctctgagtttgtgtccaaccctcctgctcgtgatggtagcctaggtcttagagtgcgac

SEQ ID NO: 59047 - DNA, 1047 bp, Zea Mays
aaggtgtggacacagatcactcgacggagagagatgagtgctccagacaaggcccagggagcgccaccgacaatcattccgactactctgccctaaagggagaacgagaaaggatgcaccgccgctcccccctctttcttcccatatgtcctcttcattcaaggaagagtggagacagtgcccatctatgatgacgagcccaccgtgctagggggaggagccctccagcgtgaggcacaacgacgacaaaataggcgtcgtaacgtacgatgtcaccacaaagctagagagcatgatccagcccaacccgtctctcgagacaaagcttctgagatgggggaaaccccaacgaaaggacacactgagagtgccacaattcccaccatcatgatcaccgccactctaaggagcacgagtaggaataggctgagcaggatgcccggatccgacgcgaaaacctgctcctcgctcggaacctataccctgacttcgctaaggcactaaatacaccgagcgaggttggaggggtcttggcgcagatcgccaatggcctaccatgcacgccagacgtgtagggctatcgacaagtgctcacccatacagcaaatcacctcctacctctcgcccacccaccaaacgacctgtgtcacaccatcaacatccaatgagaagcgcgaagcaacatcaatgcttcacgtgatcgccaacacaaggacgagataaggcaacaagaggagtatgatcgggaccacggtgcaccagcgcgcagccgtgcgaccagaaccgagtcagtagcagcttccaccagcagcccgaccctgggatgatagagccgacatgatgcttgctcacctccccaggaccgacgacacgatcactaacgagaggacaggggggtatgcggagtctctgcactcacccctcgactccgagcaatccagtggcctccaaacttcaaagtctccaatgtcgacaagtacgagcccaagcaagacccgggaggctggttggcagtctacacgactgccgctcagaccgccggggcaa

SEQ ID NO: 59048 - DNA, 1232 bp, Zea Mays
cttttctctgattttccaaatctccggactgggcgccaaataccagagagaacaggggtctcggtgcaataaatcccaagactcagaataatccctgctgtggactgtgggttattacccctaaaacccaaggtctctttagtaaaaggggcgcgacgatgggtataagcagcccctggctgttggatcgcaagcctagcgcccagattagatttattacccagcgaaccggtacacgattctgaccctaagatccaacatcaacggcgcagatcatatttgccccgaaatcaccctcatccgcacgatctgacctgaacggtcctgattcccttgcctccaatcgttacgccaggatccaattacagctgtcgatgaacaatcctatggtacacacgacttcttccctccccagcgctacggacaaaggcgccatgcccgcatggcggcggatcacaccggcaacatggtacgaccgcacccaccgagactatacctagatctgatagcgtctaatcgaagcggaggttaaagcggattcatggatgcactacataccgccactaatgccgatgaagtacccagtcacggaagaaggggatccgaggaggattctggtcgacggcgagaaattgacgttgctccacagcctcacgacccaattgcttggcacatacggcttccccaggcgaagacaatactccaaaagccaactccgagagcagagaccccccagcgacggctatccctggcggtggcgcgaatctctctctctctcaccagcgaggctctcagtaggcgatggcggctaggttttcggtgatttggaacatggcgagcacggccgagggcccttccccaagttttatatgcgccaggaaaagccagcggattccaagggtgcgcgacgaaggttgttgcgcgaattccggcgagcgaccagggagtcgttgcttctaccgcgagctggaggatgaccctggagtgtggggtccaccgagcggtgagtggagtgggacgcgtgggtgctgtctaaagggccccaccagacgatgagacacatagcgcggcgcgggtgctagcggcaaccggctagtaggtggggcctacccgccagtgtggggttggcgtggttgatcgcgtttagatgggctggcggctgtagattagttactgggcccaaagctaggaacattggcccagctagagcttttattctttttcttttctat

SEQ ID NO: 59049 - DNA, 428 bp, Zea Mays
cttagtcagtcttagttagagttagtttgtttatcatatgttgggatgcttgtcgtgatgaacatgtaatgaagttgaatctttgtaatgattgtcaccaaggtgtggatatcccctgcaagttgttgtggttattaataaagatagctatttagttgggtagtccctttatttccactttcctctttatctgagaagctgtcagtgaagttgatcagttgtttagtgctatgaagatttccatatatcttttcttatgctgaaagattgcagagtcagatctgatttgtgtgtgctttctacatctgagaacaggcgtagaggtgcaaggcgtgctcaactggagcagcaggcaccccaggaggaggcagcttagcagcagcagttgccaccgtcacccccgataaccgttgagcagatgttcctaa

SEQ ID NO: 59050 - DNA, 459 bp, Zea Mays
tcagggagaatcttaggatgttctctagtgtaactgaatcgtaatagaatagagagaaacttgcatgagactcctaataccgtcgctctgatcggggcgtgatctaactaaatgattgcatatcctagtcatggtgctctatattaacaacgataggggccaacttagaaggccaacacaactagcctcctaaaaaccctagccgccctaatacttgggaattgatctacctagtgcactcagcgatcggagaagctacagtccatggcaacggcggcctctggcataccaatggagccgatctctgatgccccctccatgccccaatgtgctgaaggagaccagaccaggtagggatggcaacaggtcggattcagataggatattagaaatatttgcccgcaatcatatccacggtcatagataatatccgcccacgactatactcgcgagtaaaaa

SEQ ID NO: 59051 - DNA, 732 bp, Zea Mays
aacgcattcattcattactgcatcatgggtagaagcacataatcttccaataactaccatgtcaacccccattcaaattgactcagccagtggtagaattcgagccgatagcatttgtttgaatgtatgtgtggaaataagggggatagcgtttcccgctaacctcatagtaatgggtactcagggaatagatgtcatcctagggatgaattggctagataaatatcaggcagttatcagttgtgataagaggacaatcaagttggtgtccccactaggagaggaagtggtgaccgagttagtctcgcctgagccgaagaaaggaagttgttatcagatggctgttgatagcagtgaagcagacccactagaaatcatcaaggttgtgtccgagttcccagatgtgttccccaaggacttaccaggtatgccacctgagcgaaaagttgagtttgccatagagcttcttcctggaaccgcccctatctttaagagagcttacagaatatccggaccagagttggttgagcttaagaagcagattgatgagctgtcagagaaaggttacatccggctaagcacctcgccttgggccgcccttatcttattcgtggagaagaaagatggcaccaaaaggatgtgtatcggttatcgagctctggatgaggtcaccatcaaaaacaagtaccccttgcccagaatagaagatctgtttgaccagttgagaggagc

SEQ ID NO: 59052 - DNA, 1369 bp, Zea Mays
actagaacaggcaacagagagacttgaactaacctgagttgagctggccgcggtgaggtgttcttcacggtgttcttgcgtggttttggggaaagttcaaaattcgcacactctggtgaacgatcgaggctaattcttggtgactggatacttaactaccttacggagcttgcggcggggtcaatttatactacagaagggcggtggccgagaatttgaacggtgacgcgtggcggtcagagaaagggaaagtttactggcgcaatggcttggtgtccagcgccatggcaattgctccggcaatcaacagggagctagcgtgagtcacggtgatgcggcagacaggtagaaacacgcggcggacggcagtgagggcttaacagcgatgagaaccttatccgaaggatcagtgcgcaagggagaggcacggcgacgagccggagtggcgtccagctcaccggcggcgaagagcttttgaccccgcgacgttatcgacttaccccgagtacgaatcgggacgccggcggcatgaatctttgcgcagagaggtcgccggcgacgaggctgtcgcactggcaatctgatctgattctggcactgtaccatggcaagttataatctgatgaactgacagtcaatctttgagcttgattttctcccaaatctctatggcaactcataccaagttctgcagcaaagttgagctacaaaccagttgcatttcgactataaggattgaactcagttaagcactaaatcagggttgaatcctaggccaaagatggctctattacactgtaagtctgaagttcagagttcaatcagcctgacagccatactttagacttaattatctccaatttttccataacaaccttgcttacactcttaagcaaaattgttcccctatgttaggtctacaaatttgatgtggtgccctaaggtgaattctcactgatttgaaagttataaagctccaaagttgagcttataacactaatttcagatttagcatagaactcaaatgaggtccattttgcaaataggtccaaaatccaaggtttagcttacaaatccacatatttatgaaccatagtacttaatatgctttattaacatggtttttgcactttagtccacaagtgcactatttttgcacataggcccctagggtttggatgtagggttttctagggtctcaattagggtttctggtatttcaagggtgtaaatgtaacttaaacccatccttagtaatattttatgactatttctcttaagctttagggttttctccatttggtccctgttttgcccttctaatccccatttaggcttaagtcccctattccagggttctatttgcaaa

SEQ ID NO: 59053 - DNA, 427 bp, Zea Mays
atttggagagatgggcctcatccaagattttcttcttgagatctttatttttaggaaccaccaatctgctttcgaaccataatataccctttccgtcttggcagaaacatttatatttctctgtcttttgatggaggttctatttaatgatttgcactcccttgtcactgagttgggccatgatgatctggtcttgcaaaattggctcaacggaaatgtgagacaaagcaccagaaggaatcacttcaatcttcattttgctcaactcatcacacagggtgttgatgcgagaatccatcataacatagttgcattgcaatttccgactcaaggcatctgataccacattggctttccctgggtgataatgcacctctaggtcatagtccttgatccgctctagccatcttcactgcctcatgttgag

SEQ ID NO: 59054 - DNA, 404 bp, Zea Mays
ccaccagctgttgagagcgctacagctaccgaagctgcacctaccgaagccgcaattgccgaagctgcaacggccaaggatgcaaacttagaaagcacactttctgatatagataaaatacttctggatatggccgcagaagaagctgctacagccgccgaagagaccatggccacagtgcctgggaaagagaaggaaatagccgtcgaagatagttcagaagaagaaaatttcaactttcaaaacttaattggacaagaattgacaaaggctgagaaagaagagttgagagattatgccatatcctgcgggtatcagccaggggctctactcttcggcggtatcgacgatgaaagcttaggttgcctccgagaccggactggagcgaaggtcgtcggtattct

SEQ ID NO: 59055 - DNA, 843 bp, Zea Mays
gaaggggtcagagattctatctagctaggtgtgcgaacatctggctgcctccctggctgagggggagagatttgcagtggttctccacaatgaaccactcaaggcgccactccttgatgctctccttgagagggatgtcaagatactctgctttcctcccccggcgaagctccagacttgcgccgtcaacaagctggtgctgtcccccagccatcccaggccgacaatgataaaggtatttccagagaccgaagtgggggagaatcccgagaaaggcctcgcatagatgtacgaaaatggaaatttgcagaatggaattagggttcagatgcatcaagttcagctcatagaaatcaaggagaccgcggaaaaagggggagatgggaagagcaaacccacgaataagaaaaggaacgtaaatgacagattcatgggtatcctctatcggaacggtgacgccgcagcaaatccgccaagagcaaagctcttttggaagcaaaaccccaatttcaacgagatgaaggaggtcgaattcagaaacgatagacatatggttaacagcgaatggtaggtggctgttggggtcgataggcgggatgattgcaacaatggtgctctgcctcttccgctttggcgccatcgtgatctttctggcggagcgagcaggatcgaaattttagggaagcagaggagtggttcgaagagagaaagtgaaattagggctcagaaataaaaaaggcacgttggcgcgagtataaatggggtttcctgggtcgggcactatttctaaagtgccaagtcattactcgggaaagcaaagtaccaggcatcactcggcggtta

SEQ ID NO: 59056 - DNA, 393 bp, Zea Mays
aaagagaggatatacgccaggagttgcgccaggagagagatgagatacgccaagaaaggagggcgcaacaacagcaacaacagcagcaagtaccattgcctccaccaccaccaccagttccacctcgtgataaacaccgggagtttatgagtcataagccaccgaccttcgccagttcgccagatccacttgatgcagatgattggctgaaagcaattgagaagatgctcaacattgcacaatgcactgaccgggagaaggttttatatgcttcgggacgtctgactggtcctgctgctgactggtgggattcttataccgctgcccatgatgctgcggatactattacttgggcagagttcagtacacaattcaggaactaccatattccag

SEQ ID NO: 59057 - DNA, 528 bp, Zea Mays
caaactttttcaagacttcaaccaacatcttgtgtaaggggaaccgtagcccagccttcatgaagcttcaaaaaaccactacctcatatttctcaggaagaggaacattattatcaccaccgattctcactataaatacatcatggaaatatctacccttcatagcctcaacatgacctttcttcacaattgatttaccaaagaccacgtgactcggcctccacggccgatcttcgacatcatcattatcactctcaatatccaagtcctcgctatcaccagaatctttagacagtgagctaaaatctcattagttattttctcaacattagtcctctccatagcttcataaaaccaggctagtgctgggtcctcactccttttatcttcggccatctcatatttgggtaaaacaaaacaccgaagctcaaaactagtcgtggttacaatatcagcaagccagacaacaaagctaacacaagcttgatagcacgaaaaatattttatcacaaccctcatatatatatg

SEQ ID NO: 59058 - DNA, 743 bp, Zea Mays
tttcaagaaataatgagaatagcttcaatttattagaatggattaaccccttctaaggctatatataaaatattcctttatgtggtaaagtgactcatatagaaaacaaatatacaatattttctcctaaaataattaagtaatgaatattcacctttaaatgaaattttaactacaatacctaacaccatatctccttaaacatttcatgggtgcattgcatatttgaaataatttcacaaataatagggtgagaaaattggtaaaacaatagtgacatcacatgctggagttttgttgtacttgtgcatatgaacttgaattttgaattcagatttaaatgggtattcaaaataagaaatctgaaaataaattgaaaaaatgtaaaaatggagtcagttggcacctgggccaaatcgcctagaatcggcctagcttcaaaattgtttccccgccggcccatcattcccacgtgcttttctttttctcctatgtgtatggcgtgtggggccctttagtcagcaccacctctttgcctcaagccgatgggcttctgttctagcgcctgtgaactccacagaatgtggacacgggaaactgagtcgtgatcgtcggggttgttgagatcggtcgagtccctcaacgccaaactctgcgaaatccgcggctctagtgattaactaccgcgtcggctgcctctctctcctctccattcctctccccatgaccgagctcttccccgg

SEQ ID NO: 59059 - DNA, 498 bp, Zea Mays
cagaaaattgtagcggatccgaaggattcggctcccaagaaatgaaagcttatcaggataactcctgtagagacgaaggtacaagatgtgccagacaagactgcaggtgcttcttcgacttcgtttgctgatgtttcagaaattttgaaggtaatgactgaacccatcccatttgcaatgctaagtcctctaaggtcagatctgactagcctattgcagtcaaaggagaccgcttcggctaccggggaacgccgggggcagaagaaatagtgaatgatgaatgtgatgcagaccattgaacagaccccgcccccagcttcggtggaaaaaactattgtgtctatcgatgctgaagatactgtcagagccgaagctaatgaagctatgcctgaaacaaataatctcgctaccacaatgtcgaaaattgacagacttatatcagatgtggttcctgagaaaaacgtagtcgtggccaaagcgtctcctgataagggaaag

SEQ ID NO: 59060 - DNA, 622 bp, Zea Mays
gtcggttggggcctctatccaacttggcacacgcacatctagctgccttctagcatgagcaggcaaggagttgttgtgattctccatagtgaaccactcaaagcgccatcccttgatgttgtcctttagagggatatctaggtagtcgaccttcctaccccgacgatgttcaaggctggccccaccaactacttgatgatgtccacctgccatccccgacttgcaatggtagacatacttccacagtccaaagtgtgggctaatcccaagataggctttgcaaagatgcacgaagatggcaatttgaagaacataattagggtttagatgagttagattgagggagtggaaatcaaggaaggcatgaaaaaagggggaatgaacaaacctaggcctcaaattaagaaagggacaaaaaccacggattcatgggtatcctccatgggcacggtaatcccttgccaaatccgctaggcacacaattccttcaatggaagaacaccaatttaaactagatggagtaagtcagattcagaaacaacagaagcataattatacagaagggaagttggctgttgggatcgataggggggtgatgggcacaacaccccccagtttcttc

SEQ ID NO: 59061 - DNA, 824 bp, Zea Mays
aatcactaatttaacccgaacgtgcactgccctaaagctcagtccacgcacaaccatggagctagcgactttctcgacaacttcccgatgacacagtgcagtaacatacaaattgggggcgtggtaagctttagcaacataccaggactcaagaacggcagctaggaagacaggtggagggacaggacagtgggttgacaaagggggtgctcacggcggtgcagagagtggatttggggaaaattccaaattagggcgctatggtggacaatcgagggcgaggattggtagtctggcttcgcaacaacctagcagagctagctgtgcactcaatttatagcatccgagagcggtggctctgaatttggaagaggaaagctggcggccggagagagggggtgagtcaccgacgcgaactaccgtggctttcaccgaggcaatgtctcaggcgatggacaggctacctacgacgatctacagcgacgtggtaactcttctaagtacatggcatggctacgaagggcggcgaactctggcgaggcctcagtcaattgcgcggcgagtggcacggtgaacagtctagtgataaggctccaactcttccctgcgatgagatctttcaccgccagccattatccgcacacccgggcgcacgaatcacgacgccagcgaggattatggcgtggagttcaccggcggcacactcactgcatctgaagatctttttgttcactgtaccatggctatcttcatcagtctgtctgaacgagcaacttgcagggctttgttcttcaatttttgtgtggcgactcactcacccgcct

SEQ ID NO: 59062 - DNA, 435 bp, Zea Mays
ctcaggcgttgctccggtcgtggccgtcagtgacgcctcagtcgctcgacagcctccactaattctcatacccttaatcgtgctacatgcgccgcgtgcatgccctatcacacaaccatcattgcctcgccacctcatcatgcagccaccaccgctaatctgtgataatctataaatgcaatatccctcgtgtcataaaatctgttgcaatccattccagtcgtgatacttgtttgaccttaacctttgagctattcttccttgcatggttagtcaagcaacaagtagcatgatattttaaacaatatttacatgtgctagtgttggaggagctaccattagaatctaccactaagggtgaagtggtgtagttcttgcacttgtcaatttgcacttgaagttcttggttttgaaccttcaaacttgatatgcttg

SEQ ID NO: 59063 - DNA, 712 bp, Zea Mays
cagtttgccttcttctcctgcggggctatataaacagacaagctggtgagaagttaccacaacattcattgctattgcatcgttgtgctgctaaaaatttttactaaagccaaagcttgctgctttacgcttcggacaaacgctccaacgattaagtctaagatctactgctagggtggcatgcgaaggagatgaggctgggacttctgaggcagcccccatctttgagatgatgaagcgttttgggttggttgtgcaagaagagacaaaactaattccaacagatgttgttgatgccgaagctgaaccgaccatcgccgaacctagtagtgaaaatgaagatgaggatgatgacaacatcttaagcccaagcaaacccagccatatcgaatttgggaaatcatagttaaggcagaggatctaattttaatgaaaaaactaggatactctggagaaaatgacgacagactggttcgttttgctagagaagaggttattctagagctaaaagatgatgaagttgtagtctttaaaatcttcttcagggcaggactttggttccccctttacgagatgatcggtgaggttctgaagaagttcaaaatttacctacatcagctgacccccaaagccatagttagacttagtgtgtacatttgggctcttcgaagccaaggaaagagtgccaatgccgaagggttttgtcggatgc

SEQ ID NO: 59064 - DNA, 654 bp, Zea Mays
aaacagtttagactgaagcagttttagtatacaattccagttttagttggtagcattttgcggatggcatcttttagttggtgtatatccagttttagattatgagactggaatagtatacaatttgaagactgttttatgctgtataaattgtgtacagactgttttagttggtaattgtgtacagaactgtgtaaattgtgtcccaatttgaagactgttttatgatgctcggtgtgagaatagatatacatgtgttcttgtattaacagaaatcctgtagcacttacaagtgtgttctggcaaagatctgttctttgttaaattatcagccgacttgtagtatctggcaaagatctgttatttgatatcaaagaacagatatacatgtgttcttgtattaacagaaatcatgtagcacttacaagtgtgttctggcaaagatctgttttttgttaaattatcagccgacttgtatttctactacctaaggtataggcagtagcacttacaagtgtgtcctatattacttacatccagttatacatgtgcccaccaaacacgtgcccaccaaatcctggctagttacgtgcagtcaaccaaacaaccacacaaattattacttgcatccactaatacaggcttggcttggct

SEQ ID NO: 59065 - DNA, 1419 bp, Zea Mays
tttgaatttcattgtgcaacatgcttcgggaaagcaactatcaatagagcaagctgccgaaacgaaacattacgctaaagagctgaagtacccccatggatcattggtatatggaggggataatgacgatgatttcctttactatctacctgatggtaatgagatcaatgtttgtcgcgaaatgatggatcatatggggtatccgaagctcgaactcggcttgtctgcgatgaccaaagatcagcttgcagatagcctcgcctacaacagcctgaaggtgcctatattttgatttgtcattctgccatttgtgttacgacaaactatttttgtggtttttcttatcgccgctatgtgtccactcttcattttctagggcttgattttagcaaggctttgaaagccaagaaagatgcagaagatgagagctgccgaatagcacttggaaaccttcgttcggaggttattacattaagaaatgaagctattgagaaggataaaattttactctctttagtggaaagattgaaatctagcgaggccaagctttccgctcaaactgaagctcatgaagtcgaagtacaagaactaaagaggaaggttgctgaagcaactgagaactttgaagttgaagtggtgaagcatgagatatgtgaaattgaaagatcaagagcgcaaaagaatgtcgatgagatcgtgcctccaaagaaaaatgttatgaaatatccatggaatgcgctaagaatttaaggaacaactttgctaaggttggagcctattccttcgagcagaaatttgttcgtggaaatcctaatgaagtcattcaatggataaatggtgaagttgaagttttggagaagttcttagtgatcgaggagatttttgtgtcgttgctggtgcctttggggccacatccatcttggagaaggctggttgcgatcatgctaaggctgtagcacaaccagacttcgccttctcagctgatgatatcagaaacccttcagccgaagctactaccctaggtgggaaattttattccgaagtatggctgaagggcggacgagaaatcatcgatgaagccatcaaaagaaatgaaaaggaatgtcatgatgcttcagaggaggcaaaaagagctgaagaagctgttgagcgggctagacttataggtatgtatttttaacttatttttgtaagtttttcagcttcgacactgacagatatttgtgcctcaatgcagctgaactctctccacctcccgagccatacaatcctaaagttgacccatccgtcaaagaggcgttggacactattaaaattgctaacgacggtattgatgaagctgtcgacagacttctgaatgaagcttccgataaagtcctcaaggaggactaaaaagtttgtatctctattagcttaatg

SEQ ID NO: 59066 - DNA, 545 bp, Zea Mays
cccgagggtgtgatcaaatggattgagggcgaaatcgaagcatttgacgaagttctcactggcaggggggatttttgtgcctacgtgggcgctcggggagctgtatctttgcttgaaaaagctggctatgatcatgcgaagtgtgtaattcagccagacttctcagtttcagctactgacatcaaagagccttcatccgaagctactgcccttggtgggaaattctattctaatgtgtggatgaacggcgaccgagagatagtagacgaagctatcaggcaaagcgaagaagagtctcattttgcctcagaagaagcaagaaaagctgaagaggtcgctgagcgcgaaagacgtataggtacgtttgtcatgttttagctttgtaagtattttagctttgtatctgagaaaaacttatatttttataaagctgaactctctacttctccagagccatacaaccatgacattgatccaaccctaaagggtactctcgatgaaatcagaatagcgaatgcagcgattgatgaagttgtagaaaaaat

SEQ ID NO: 59067 - DNA, 452 bp, Zea Mays
aaaaaacaagaattacatgttttttgaatggagagcggagcatgtcatagcaaaagtatagcaactcgagcacctaaaaactcttcgggaacatagcgccattcacaaggctctaagactatctccaggaatttacacatcctcatacacatattcaatctccactccgcgaacggtacggtctacagtacagaactgtgcaaaacagtggttttggttaaactataggtagactgctacaaacggtctaacacacgatcatgctgttgaaatacagaataaacgtaataacacaagtagcaacacaatatccaaccatgtcatgcaagacaaaaaccaccacctgaacgcatacatcgcttatccgaccatgtcaaacacagacaaacgcaatatccgaccctgtcataggatcccagtcctgctctacctggacttgagctaaagcatgc

SEQ ID NO: 59068 - DNA, 515 bp, Zea Mays
gcggaggaggtcccttcaccaaatttaggcactacggtcgtttcaatatattgaggcctgtgggtcaaaacctttattttcttgcccttcggcacatcagtggtgaccgaagtgatagttttcctcttttttccttgccttctcaaggggtagcagtaatcaggatatatgaagccaattgcatcaaaacctctgttcaatcttttcttgccccgacccccgaaggctgaggacaaggcatcatcttcggccatggtatatgtcccaagcaattcgtcgctagtagcctcaatgcatttcaactagtcatcatttggtttgtcgaacttctctctatatctgaaggtatatttcaatcgaactaatccaccttcgttggattcaacagtagtctccttcagcatctcctagccatccacaagaggccacaccctataggctatgtgctcttggattatatctcttgtgccaatgaaagcacagacaatgctaaaagccttctgacacacttcgac

SEQ ID NO: 59069 - DNA, 416 bp, Zea Mays
agtagagtaggatatttaatattcaagagagcaagatttaacattcaacagtgaaaaagtgaatcaatatttaatattcaacagtgaaacaatattcactctcacacataacagagagtagcaggcagtgaaacagtgataatgatattcaatacactcgaccagacaccagatgcagtgaaaccgtgataatgaaacactatttgttctcagtccatagttccatacgtgtagtctgtagagtagcaggcagcagcacggatagtaggtaggcaatcctttctgcaaaaccagagccaccgagccagactagcttttgataaattctgaaacttatttctacagagtgcaaacgagaagctagcttccggcgaagactgtatttacgaaacgaacctagctatgcgatgaactgc

SEQ ID NO: 59070 - DNA, 328 bp, Zea Mays
agcatccaaatggaagcaacctatcaatgtcagtgaaatcaaaagctttctaggaatggcaagatattaccgccgcttcattgaaggattttctagtatcgccaagccatcgatagatctctttaagaaagaaaacaagtttatatggaccaaggaatgtgaagagagtttccaagagataaagaaaagtctcacaacctcccctttgctgacattaccagatatccaccaaggtttcgttattttctgcgatgcatccaggcaaggcttgggatgtctgcttacgcaggatcagaaagtcattgcttatgcatcccgactactcaag

SEQ ID NO: 59071 - DNA, 658 bp, Zea Mays
cttgagatgatccgattgcacgagcaaaccaaacactcaaatcatctaacttttttccaattccttgtgtatcctgataactgaagatggtcgtttggttttcactttgtcagttatatgttaaagtgaattggttctcacgcaacatgccaaggccaagatgaactctgttctgcaaggaaccctaagaaaaaccacatgcaagtttatctgattaacaacatccaactcatctgatgcacatcaacagatgactccacgtattcattcgcaactttaatttgttagaaaagctatacaaaaaaacacatcaacgaagaagaaaacgctacttttaggctactactagattgacaatgatgaactatctgcacaggcaaaaaaaatacatctcgcaccaaattagaacgtgttttatttatttattttatatttcccttatattctctacccctataaaacaactgtttctatggtcccacggttgccatttatcgtcaagtgacgtggatcgatttggcgcaaaactcgtatcttttcggtcttttggctaaagtgcaatatttgttcttatcaatatatgatacatgagacatatgtccactttacttttaaatttattttttgtgtggggtccatcacactagcttgtcactat

SEQ ID NO: 59072 - DNA, 620 bp, Zea Mays
ccaagatcaaacttgagcctcctttccttttttaatgtggagatcaagtctccacaaggtgctccacaatcttggaggctcttgcccgctttacaaatcccaatgggagcgtagctccaaatattacgatcacaacacactcttcttgcaactcaaacacaagtgctatatcacttatcaccccaaatggatgatctctcaaagaaaactacacaatttaaggcacttgtatcacttggatgtgttggagatgttgttataacttgtgtgagttgttgctctactcttggatgtctaacacgtaaattggggtcatatataggccccaagtccacacatcgccgttggaactccactcccaattctgcacagaaaacatactaattgaacctcttactgtagcaagtccagtgcaaactggacctctaattgtgtctgccacatcaatgaccattgggtaaagttgtcagttgatagaactcacaggaccatctggtgacccactgaccttgctacatcaatgccacatcatcagactgttgtggtatccaatctaactgttgagcgattattcttggtctagtgcattaactgcctgagccacactttcaccctttttg

SEQ ID NO: 59073 - DNA, 295 bp, Zea Mays
ctgagattaactcgtgcataccgtttcggcagcgtgcgatgtggttcgtccaaatctgatcgggcacttgagagtagatttgagagtttgaaatcttggcgttggtttggaatcagagggatgtcagttgtgtaccggttcgtgggggcaggatctaatccgaacctccggattgtaatccaacagctccgctttacccgtaccccttcggcgcgctagtttgtcaaaagaaaccctcggattctaacaaactaacctgcagtcctaggctaatgtaaaataattacaaccaggc

SEQ ID NO: 59074 - DNA, 538 bp, Zea Mays
ctaggtagcaatcacatggttaataaatttgctagctgacatatcaggagtggcctcaccagcagatagaaaggatatgaggcgtgggtggccgccataaccatgaatacctatacacgccgagggggtgagtcaagaggggacgcgtgccagccgccgaggagacagagccacgacatgacctctacctgggctcaatctggagcggagaaactccaccacctgagtccaaaatacgtgatccctctacgcgaccttcccgaattacatcgctgggacggttcggatgacatcaggccagcctagatgcagccagacaatcaaaatctcctttaccagtgcggatccgacaatctgcctgtcatggtagcaggaagagagagacagaggcagcaccgtggggcggcggcgggggaggggcaggagagaggggcggtgcatatgtaggggaaggatataggagccatagatagtagagagagaaagagtgtttgttcgatgggctatccatccgtctattcctttgggtgaggcagag

SEQ ID NO: 59075 - DNA, 793 bp, Zea Mays
agatgaagaacagaacggccgcgatgtgtggaggagaaagaaatgacttagggtttttaacatcgtccgattttttatatgcagggggcggagctaaagcttagtacatgtgtcagctgacatcgatgaattcggaaaaatccagtgtagaatattatttaagcactggttatagtattgatgagatccgttataaacgatagtgacaccagcaaacttggatgctatgcttcaaccctgtttatatgttaacagtaacccgtcggaccccgacgcgacggccacagtaggtgcggacgaatgacgcgcacgagtggtgctgaattggcggctcggatacgcctccgaggcttcaggcaaccaccaacgaggccataatattcggacggagagagtagcacgtgctgaatacgcggtgtccaatttggagtcgagcaagagctggctggctggctggtcgccaacggaaactcccctagctaaaagtgtaaagtcgacgacgagtaccaggcacgcgctgcagactactccaacgaaagacgattcggcttggtgcaactccgagctgaaagcacaccggagacggagaaaaaacggacaccatcaccatcccggcccatcccccatccacgtacgtatacatgtggccggccggccggccaccgcatctatcggccgttccgagcaggtggccaccccgttcatcttctaaccaaacttgggtccggctccgttttcttgtttccccgtctcccctcccgcttctgctccacaccgaaaagaagtcatcaac

SEQ ID NO: 59076 - DNA, 412 bp, Zea Mays
gtgcaatacaatgttgaggattgggtttggctacgtttgcaacaacagtcagcagttggtgtcacaacagcagcatcctgcaaactaggacctaagttttatggtccttatcaaattctgcagcatatcggggatgtcttgtacaagctccagttgccggcaaatgctaggatccatgaagtgtttcatgtagcacttctcaagaagtttcaaggggatcctccggcagcaccagtgcccttaccggcggtcctccgtggcaagatgctccctgttctatcaaaagtggtgaaggctcgcttgaacagaggtgtctgggagcttctggtacagtggatggggcgcgcgccatctgatgctacctgggaacaatgtacttaattgaagaggcgttatccagaagtccaactcg

SEQ ID NO: 59077 - DNA, 536 bp, Zea Mays
gcctgctgagtgcacttgtcaacaaggaggagattttttgggtccctcataaaggggagagttttggaggctttggggggagaatttcatgcaagggggagagttttctgtttttggaggaacctcttggagatgtgcatttgtggaagattttggggaattcttcttatatacacattttttaggatgtcttactttctgtgagggttttcagatgtgcttcatggcgatacatttttctcagggggagcctttcagccattcaggagctctcgctagttgtgttgagcctttggcttttatggaggaactagctttgattttagcttttgtactgattttgtgctctggctcctttctgcctcttcttgagggctagccaatttctcgcttggtcgtgttgagtcactgcccatttatttggggaccaagctttgctcactctagatgactagtttggcttttatcttgcttttgatcattaaggcaagcttctctacttcttccttctttctgctaatatatattcatgtggt

SEQ ID NO: 59078 - DNA, 1787 bp, Zea Mays
aattagtccacttttgggctaaagtgcaaaaaccaagccaaataagtattttaagtcaattggttcacaaatatgtggacttgaaagccaaaccctaagttttggacttaaatgcaaaatggacttcatttgagttctattctaagtctgaaaatcagagaatgggctcaactttggagcattgtatcttgcaaattctagggtttttgccctaggtcaccacatcaaaattgtagcccaattataggagcataactttgcttaagagtgtcagcagagttgttaagaaaattgtggagataattaagcctaaagattggctgtcaggctgattcagtctgaaattcagatattcagtgtagcagagccaactttgagtatggattccaccttgatttagtgctcaaatgtgttcaagtcctatagttgagttgtagctggtatgtagcactacaactttgatgcagagccttggatgagttgctaaggaaaatttagagaaaatgtgacctgaacttgctctgtcagtcaagctctttcttggattcagagcactgttcatcatcttcagaaatatcgcgctgtggatcaccccgccggcgataagaacgccaccgcggcgtgaccggtcgtcggtggtcgcggtaaagttccttggcaccgtggcaaaagttaccgaggtggcgacctctggttaagcggcgaccccgtgccctcaccggaagccgccgcgcggaaagcttgccagcgccttcttctccctttccggccgccgcgcgtcctcaaaattcaccggccaccgcccttgaagcctataaattgagggcaggggtagttgcgccatataatcgccaagctatagcacccactctcatctcctctcgctcgccgtagccccgcaattcgggtttgcccccaaattggtttccgccaccgtaaaacaccacctccccgtggactgtccgttctggtaaggcaccatccaaattgcgcgttgttcttatgtccctatatgctagtgatgctctccaaaccctctaattaaactagaagtccaccaatcattgggaacacgaatgaacttccatagccttcgctgtcctcgtggacagagggttgtagaactccaatcccgaaattaatttggggaaaatggtcggggtagtgttaatttcgtgtccgctgctcggagaaccctgccgttgccctaatcggccggcgtagatgctcgccggagcacggctgcgcttgaacgacgtcgtggacttccaatcgtgaattagtagaagtgcaggggcctttttgtgatcggtcagcgacacacaggaacagtgaagaaactcgttttcatttagtcaaaaactcggggtctcttctgcaaagccgccagggcgcgggtgcgcgcgggcgcctttcctccctggaactgggccgcggggctgaaaccgacccagttctgtttaatcctttttccttttctttttcaggaaaactttagaaatatgtagaaaaatgtagaaaaatgctaaaaatgtgaaactaattttcctaggtttgttattttccatagaatttagtaaaaatagttttatgatttttagtggaaataagaaattttaaggtatttaaagtggctaaaagtcttggttatagattttagaaaataattggtaagtccaaaaatgcccaaaatttttatatgagtgttatacactatttagagaccttgggtaaagtttgaattgatttggaccttgtttgatcaccaaaccccaaaacacccccct

SEQ ID NO: 59079 - DNA, 406 bp, Zea Mays
tctcaacatatcttccaacacttggtttattctttctgtttgtccatctatttgcggatgataggctgagctgaagtttagcttggtatccatggactcatgtaatcttttccaaaagcgcgaggtaaattgggttcctcgatctgatatgatcttcttcggtactccatgcaaaaaacaatccttgacatgtataactctgctaactgggctcccgagtaagttgtcttcacaggtataaagtgtgccactttagtccctgtccactataacccatatggaagcatagccatcacgaatacggggtagtccaactatgaaatccataccgatttcttcccatttccattccagtactttgataggttgtagcaatcctgctggtctttggtgttcggctttaact

SEQ ID NO: 59080 - DNA, 689 bp, Zea Mays
gagaagctcaagctgctgcgctttgccacgccggtgctgccacctctgagctttctgggaggagcaatgccgaagcttgagagccttgagcttacgttcgtgacgatggcgggcgtgtacggcctggaaaaccttgcgagccttcggcaggtgctcctcacagtcagcagccacgcaccccaggttgccaagatgaaggtgtctcaaataaaggcgttgacgagaaagaatcccgaacaagcccagcgtggtcgttgacgagtacaacgacctataatataagcagatacacatctccaagccaagcgagcatgcacgtatagcgtgtacttgtctattacttgcttttgtgtcgttttcccccaaattaatatgcagtatagcgtgttcattcattgtaatgtgtaagtatcgtacttaattagtttattatgtaacacccaaaatttggtgagaacaaaggaaaaaatgttgggatcatgtgaaagtttttatttatttgatcccgtatttctttttagataacagtaacacaatgtaccgcccttcaccaccactgttccggccaacaaaatacgagcaaaggaaaaaaaaaagaaacatccgaagaaaccacgcagggtgcaataaaaacgaatactagtaaacaaaattaggacgatacaatactataatagaaacacatctgc

SEQ ID NO: 59081 - DNA, 311 bp, Zea Mays
catgcatgcaacaaccattctgcggaagtgcagatatccttaaggtgttagacattagtgaaaagcgtgtcatgatgtgctaacaaaacaagttcaagtaaacaaatactgaaaatagaagatttaagatctgataattgttatatcatatgtgcctttgttggctcggcggcgttgttcgacgacaagcacaagcacgttaagaagggcattttgttctaggttcaggatacttgaagacatcaattaaggtggcgcggcactatctagaggacatcttcatcaccttcgagcaccaacatcaccgggac

SEQ ID NO: 59082 - DNA, 435 bp, Zea Mays
cttcctgaggtgttctatattccaggagttcccaatttctgtgccgtacatttgagtgagacggtatgatcccggccgagtgacttctgctactatgaatggtccttcccataagggtggcaacttgtgccgtccctcccccgttagaattcggcggaggatgagatctcccactgaaaaggatcgtcgtcgtacggccttgtcgtgatagcatctcagagtctgctggtatcgtgctgattgaattactgtgttcaactgttcttcttcgagtacatcaatgtcctccagcctagtagcttcggcttctgctatgctttcgaagaccaaccttggcgccccaaacttgagatcagcgggtaatactgcctctgacccatagaccatgaagaaaggagtgtttccatgcagagctcggctaggttgggttcttag

SEQ ID NO: 59083 - DNA, 1047 bp, Zea Mays
gtaagcacataatctagttaagcaataaataaagtatggaagataaatttagatagagatgcaaactcctattaatgactctgatatttttagtgtgaagtcctcgttggagcccctcacaaagatgccctcgcaagggccaatctctcgatccagtgattccatggatagccccttgcccacaagtaggtggatcttcaagatggcctctcccagacctctccccgtgtatttactattgattctggtcaaaccaccacatgcattcttttttccggtaccacaacataaacccatatggtgtgatcttgcaagactttaagcccctctgagtataataatggtgcacataagtatcaaaaggtaagagttaaacaaacatcactgaaccttagctctaagcctagagaaagcacataaacaacagtctaaataacatgtgtggtggtagcaccatgcatcacactagtcttctaacaatttgaccattgaaatttggccatcgtgttgctttttttgtgagcaccagacctatgcaccgcaccggataggagcaccacacatgtctggtggttcaatagaaaataatgttttgtcctatgtgcactacataggaacatcaaaatgtggtacagtgggtaactccaaggaatattaagcaagttcatgtttctttggactcgcaggttactaccactgatttgtaccttattttccaagataactaagccattatcaagaatctaatatgctgatgagatgagtgttcctgatctttcgtctggttcacgttaactatcgatttgttgggtatgcgacacactgatccagcttcggaatacaaagacctgaacccttcaaccttagcaccacttcttctctagttatcaaccttgtcacaatttggttgaccacgccaggaaggctaatccctgcatgtgaatcaaaaaacacaagcaagaacttaaaagtgcatagctcaattgaagtgacaactgtagacatataataaagatctcgaatgtggggtttcacaaattgatgaac

SEQ ID NO: 59084 - DNA, 758 bp, Zea Mays
ggaggaatgcacccgcctaatcctaagaacaaggggccgcctagagctaacttgtggtgatggatgaacacaagaacacacaaggatttagagtggttcgagccaccaaaacgtaataccctatatccaccatgagttgtattgttttagagcttgagtgtaagcctaagtaccagggagcatgagtgagcgtgtccccttgtatcgtatgtgacatcccttttatagtccaatggttgcacgatacaagggagctggaccccgacaggtgggttgagtgttcccgtattaaatatatacaatatggagctataagtgcaacagtgggctaagatctccttctcctccaccgtcacgcgcatcttctgtccagatatgttcttcatcctgttttgtcagcatgggcccatagcgggatgttcctggtatgcttacatcatcggggctgggcaggctgacgagcgaaggagttaatgcgatatctctatgctgtcaactccagtaagtgatgcctcatgatgtcgtcgtgcactcatatgagataaccgcctcagtaactcgagttatcctgagtaggcattaaatgcgcatagcatggctacatcgttgtgtgcctcggtagcgcactatgatgatacctcccaatctataggagcacaagtaccaaaaacatctgcttccatagttgtttgaacatacttgagcccatataaacccggtagatcgccgagcatcccaaaggacctcagtaaatcaac

SEQ ID NO: 59085 - DNA, 430 bp, Zea Mays
aattaatgctacttaatatgtaggtacttctaatgcggagctaacacaactagaacagactaaatccgagttagaacgaataagatatgaattttctaatcttttaggaattatttttatactgaaaacaatttctaatttccatttactgattccagtgaatgctttggactacgaccacaatttaataaagatacaagggctaacgtgctaaaaataggacctactttaaaggttccctaacagcgctgggacgacgggttgaaatcgagaaaccctagggtctccatagaaaaataaaccttggttgtgttacacgatgcactgtgggcaatagcccagatcaagtgacgaagaggtatgcatccaaagccattagatctgggatccatggtccaaaatccaatgacgatgcgacccgatctaagcc

SEQ ID NO: 59086 - DNA, 691 bp, Zea Mays
taagtctagctgagtaccttctcgtactcagggttctattcccattgttgttgcagatggacagatgtactatggctactgtgccaactgcctctacccggctatgggtgattatttgaccatgggcgcggtctatcgtttatctcatccactgcttttgtgggattgacccgtgaactggcactgtatcagactaagtgtgtgagtgggtgtggtttcaaaactatttgctttcgcttcttaaattcgaaatggtattgcaataactctgcttgatacactgatgtattcgaattatctgcgaatctatgtatcatgtgaacggtgacggttaaactattacgatcctggttgtgttactgaaaagtttgaaatccttcgtggtttcacggactaccgggtttatatgggctcaagtatgcaaaatcaattgtctaagtggatgattttcatacttgtgttcttataaattggtcggttctgtcgtagctggcatcagagcatggtttagcgtgttactgttcacgtgtgtacttaaaaacaaaaggggtttgttttacaaaactaattgccaacttatagctatattggtattcaaaacatataattccaaaacgtaagtgtgttccagtggtcatatcctttatgcccagttaaggaatctaggtggcttatttaagtactaacttgg

SEQ ID NO: 59087 - DNA, 691 bp, Zea Mays
atttccagcaatgtcctctaaattcgatcctctatatctacggtactaacagatttcataaattacattgttttttagccatttagcgtacaaacaaaattttaatttcatgtcatgaaaaaaacatgttacaattttttttgttcaacggacaaattattcaccgttcataattacgaacacaatttacgtaaactttgaattctacatttactcttttttgcacacaaacagaaaaaaacgttcgtgtgtgcctcaattgaattatggagaacttcaaaattttaaaattcgttacatacagtagacatcaattaagctaataaaatagttcccacatttatttctatattatattaatgtacgtcaaatgaaaagatcgttcataggtcatcataagcctaaacaaaagctgtattcatccaaatgcaaaaaatgaatagtacggcggaggagcccatgggccacaggaagcaacgaacgaaggcggcggaggggagcgaagagcgtagaggacactccacatttggagaacgtcggctgcctccgctatcgtagcgggcggtttacaatgcattgctggacgtatagaggagctcatgatccgctaaatatagcgaacaggacggtttgcaggtccttgctggagacaggcacgagcgtggcctaggaggtgaggaccgagaggtgt

SEQ ID NO: 59088 - DNA, 583 bp, Zea Mays
cccttttggatatttcagtctttgggcataatattgagcttctcgcttttcttctgcagataacctttttcccgaagcatgtcgtacaatataatcgagagcttcgaaagatgcttcgggtgtgggagtggcagtttgttcagacagaagttgttctgaagcttctctttccgtttctttatctccaatttctagggatttctttttggcgggctctgagggcccagttttgggtttggcatgactctttgcagcttcggcttcagtttgctttgtttcaatttgtgtttttgaagcttcggttgttttccctggagtagagcttgaagtctttatttcttccagtacatctagtacgtggaccatccttttcctcttaggggtaactgtaagatctttttgtgccttcggcactgtcacccctgccgaaggacttgtaacttttgatatctttgttctctcgaccttcggctcacccaatttggccaatggtgccttcggcgttgcagccggctcttcagtcttctgcataagcgcagtttctttggcttcgttagccgaagaggtctcaccgccaaattca

SEQ ID NO: 59089 - DNA, 577 bp, Zea Mays
aacaggtgcccctcacatggtacaataggtttgcctcccaccccctgtagcttggttttgctaaggctatgtcagcacatcacacatccctcatcgtctatcgtcctggagtagatagaacctatctcctattttatgttgacgacattgtgtcgactgcttcctctacgggcccacactttggtgtattattgctgccctttagcgggagttctgcatgaaggatttgggtgctcttcatcattttctaaggatgcacatctagcacacaggctctggtctctttctctctcaatggtagatatgattgagatccatgaacatgctgacatggctgactgcaagctctgctccatgctggacgctcttcaatatctagcggaaggcgcaccaaatctacagaatttcacaatctagcggacgctcttcaatatattacctttactagaccagatatctcttatgcgcttcagcaagtctgtctccatatgcatgatccatgggagcctcatcttgccactctcaaacgtatcccatgctacgcccgcagcaccttgcatatgggcttgtttgtgtg

SEQ ID NO: 59090 - DNA, 601 bp, Zea Mays
taaggacagtctgaatgattgctagttgcactttaatattgcctactgtatttcgtctccagatctttagagctttagccatgcgggccattttcacatgcagccaaaggatggcatctgtggatctaacactagacatccaagcttgctgaaccacctcattgaacccatcaatttttgtccaaaaaacttcaaatctaaaccccctatagaaactaaaggcggacagaccttgcataattaaagggcaatggtccgaggtcatggtcccaatggcctgcagatcggcctgaggaaaaatatcatgccacttcgtagtcgctaaaaatctatcaatcctagacatcgtagggtcatcttgttcaattgtccatgtgaataatttaccattgaggtcaagctctaaaagctgaaggtagtcaattgtgtggttgaattgtctcatcaatcttctattaattgatcctttgtttttctcccttgctctccttatcatgttaaaatcacctagaatcaaccattcaggcttcatcatattacgtatattgcgcagctctgccaggaagctcattttatcattttcaggttgagggccatatac

SEQ ID NO: 59091 - DNA, 663 bp, Zea Mays
taagaaatactactctgggtggtccgtatagagagtacttactctagtccagggcaggttccttattcaataattcaaaaccatctcatgcatgcacgtttggctagctcttacgtacgtcacgtactcctaataagaaatacagtacatacagcagtagttgagggaaaaaaaaaacagattcctagctacgtacgtagtagagtagtcacgtcagctctttcaggtcgtcgcaagcagtattcagtttccagtgcgaaaagcaaaaccaaacagcttgactgacttgagagatgctccatcctcgatcggtccagccagtccacgtcccgccgtctcgtagcaaacagcctatacggccatgcacatgaataagcgctggatcgtatgttctcaacttctcatgccattagaacattcacacaattctcttcttattaacaactcatatacgatagtaccgtggtttgtttcactgttaacccacgtggattctagcaagttaaaagtcatcccagtctattccaatacactttgatccacgtagaattaaaataaccaaacaatgctttatttaggtggtagaccgaacgtactgcagttccaaagtccgagagtggtactgcagctagcggtcagcgtcacagtcgttacttacctacc

SEQ ID NO: 59092 - DNA, 556 bp, Zea Mays
caaagattgagtttacggatcattttgtcgagttgtctaaactcactttagttcaacccaccctaaggaagtacttgcaagaatcaagtcaagccgactggtaacaacctagtcatcactctagtcgcgcctcgatcgcctcccatgtgattatccaacatgtgtgattaggcggagtcacactagtgcaagatgaggttggttcattgtgaagccaacatttgttgctaaccttcactgatgtttcctcgagtctccattatcatctttggacttggattttctggctagccacgggtcagccatgatgttgttcgacatccacacccgtctcgtgtgctatggacttccaatgacgatttatcgacaaatttctttcgatgtgttttacccaagaggttgcatccaacttaatttggatatcatctcttttgtggacatcttaaagtggtacatgctatatccactagagaaacaacatctgagatccttgatcccgcctagagtggtcttgtgctactgctgatatggacagtagttacatgcttctttactc

SEQ ID NO: 59093 - DNA, 381 bp, Zea Mays
taaagattgtggcattttcatgatgttattataacttcttggatgttgttgctgttgggatctattcttgaatttgtcccttcaatatatgcaggacaagcaggccataaaacaaactttggaagaagaagctaggagatgccagtggctggtgctatggcttgattgtgatagagagggtgagaacatagcatatgaagtgatcgatgtttgtacacgtgccaacagtcatcttaacatttggagggctcgcttctcagctttgattgataggtattgatttttctggatgttgatggtctccttccctctatacgttacaaggattttctaaaaacattatgaaactgcagggagatacatgaatctgtgcaacatctt

SEQ ID NO: 59094 - DNA, 794 bp, Zea Mays
tatttatataggccataaaggctattactactactattaggatgctgaagaagcatccgaaaaattagttaggtctgagaagacgactagaatgagcatgcatcatgattgtcgcatcataattgtctcttgcacatcaacatgcttctcttacctttattccaataataaaaacttgtgaataatgtgatgtactgctatgttagaaatgccttacctcgtgtcagatgggtatgtcttgttaggattgtgttatgtgtttctcttgtcttgctatctaggtggtattgtgattattcaacccttcttcccaaaactagcaaaaaaaatttgttgcttgttctgttcatgaaaagaaccccctccaaacaaccttgagtttagcaagtgaaacctccttaaaaaaacaaatcctacttgtgttggtattttctagcccctttacctttgaagttaaacctgcacaacttgtagacccccatagcttaactgctagccaaactaaaacttccttgtgcacttgttgtgtaaaaaaaattattgttggtgtctagttgcacaaaccctatcaaggccatgtttctttccataaatccttgcccctaaaacttcatagcattcctgttgatcatccagctgatcttgttgcctacctctcctttcacctcgatccgataatccttttcctggtgaatcatgctggctgtatcatccgaatctctggatcctttaattattctgccctattatctggttatctgctataacccgttctcaagtatcgcatgttgatt

SEQ ID NO: 59095 - DNA, 530 bp, Zea Mays
cgtggccgtcagataagcatagcccagtaaaaatcttggcgtctgatccacttgtgctcggattgtggctaagttcgccgtacccccctagccatcggtcgaccggataaatctcaccaccgtcgagctgccgccgttgcgcgccacatgcctcaacgcgggacttcatcgcggtgactcactggatgcatgtccggcgatcaccggagccactgccacggtgaaagccacttttcccccacactgagctcgccttccctctccagccgccagcacccctcggccgaattcatcactgtcgctcgatgcgcctataaattgagtgcgccacaagctccgtagggcagtaagctatccagccaccacgaatcagcctcgaccattcgctagaatccacgaattttgaattcgccccaaatcagtctccgccgccatgaagaacagctcgctgcggccagcttgattccggttagctcgtgtccctttgttgcttgttctagcatccgtaagcaccccacgaacccctcgac

SEQ ID NO: 59096 - DNA, 588 bp, Zea Mays
tatctttgtgaccattatctgactgattaatttgattgatggagtttcatcaccattatttttattattttatttctggttttggcctatatatttcaccacccggttagggttcgagttatgcatttcactttcagcatcatagtcttcctcgcatacgttgctcgcacccatctccattcttgttgtagagctctgactaaagccttgcctgcgctggctcacatcaagcaaacaacccaactatgccaccggtacgtgatgtcttcatcctccacattgagttctaacagtgatccagttggacgactaccaatgcacactattctagcaaaaggcatgtcctcctcagaggctgtgacatctggcacatcatcaccagttggggttccttgggaaggtgaaatgacataagaggggagtcatatgtttttgggaggtcatggattagggcgggccacatgaaagatatggagtagcttcattactttgctgcgggagctaggcatgccccagttcagagacgataccagagccgcaaggtgaagtcatggtctttgaggtgtttatttgtgatcatactttgac

SEQ ID NO: 59097 - DNA, 405 bp, Zea Mays
gagaaattctacgagggtaacgatcatgtgaaaaccagtcactttgagatgttccagcgtgagtatgtgaactttgttcagttaactagagagaccattgacaccatattttctctgttctagacgattgtgaacaagatacacgcaaacaaggcgcagctgccctatggcgaccatgagagagcactcaagttacttcaggctctagaccaaagggtttgggagatgaaggtctcagcgatcatcgagtcaccaaactatgagactctcaccatggatgatctctttagcaagctcaagtctactgagattgaccatcaaactcaggccaaaattgagaaccctggtgcacccaccatgacccttgtcataggaggtggttcttcttctaacctttcatccgct

SEQ ID NO: 59098 - DNA, 533 bp, Zea Mays
tcagaggtagtaaccgaatggttcttttttacgacgcctgcgttttagaggtaacggccgagtccttttgagccacgtcgtcgttttaggaataacggccgagtgattactggtgacgccgacgtttaagaaataacagccgagtgataacgggccacgtcggtgttttagaaataacgaccgagtgaagactggtaacgtcagcgttttagaaataacagctgagttatattgggccacgtcgactgttttggaaataacggccgagtgatgacttggcacgtcagcattttagaaataacagctgagttatattgggccacgtcggcgtttttggaaacaacgaccgagtgatgaccgggcactttttagaaatggcatctggcctgggaaaaccccatttgtaccgcgccgtcgcatgcctctgcattctgagccctagccctgcttttctgcttccagaccttctttgcttccttgtgatctcacttccgctcagtttgccagcgagattgagatggcgtccaagcgga

SEQ ID NO: 59099 - DNA, 472 bp, Zea Mays
gatggatctcagacatcaagggagctctatctgttggagtaatagtggattatattcagttgtcagattttcacagtttggttggagctcttcaatatctcacattcactcgccctgacattgcttatgcacttcagtagatctgcctccacatgcatgatcctcgagagcctcatttgacagcactcaaacatattctacgatacctccgaggcactactaatgaaggcctccttcgatgttcttcctcctgtggtcacgtcactatctacacagattgggttggatgccctgacatgcgatgctccacttctggttatgcggtatttattggcgaaaatctgatttcctggtcatccaagcgtcagaatgttgtttccagctccaacgcagaagtagagtattgcgttgttgcaaatggagtagctgaggcttgttggctgtgacaactcttgcatgaactgcatagctc

SEQ ID NO: 59100 - DNA, 429 bp, Zea Mays
aaaatattttcctctgttagtgcaacttcaagggccagctcctttgtcaatggtaacatcgaaggggcacttgattggattaaaaaggaattaaacgaagttgaaaacattatcaatgcccgaagtgattattgtgctatgatcggatctagtggcatggtgtctgttcttgagaaggctagctgtgaacatgtgaaggctatgggaaaaaatgactttgacatggccatggttgatatcaagactccctcgaagagcgtacttagtgctgccaaaagattttctttgaactatgggggtggccgacaatttgccgcttcgaaggccaaataatatacaagaaaggtttatctctaaacttgtgcttatttgaagcttcattcataatctttctttactaaacagttttttttattttctcaatgatca

SEQ ID NO: 59101 - DNA, 537 bp, Zea Mays
taaattttgtactaaaatttgattttcggattcattttattaatatccgaaagaccagggactagactgctaaaaccaaggtcttaagtttaataatttaacattacatacagactgcgggttgatttcatagtaatccgagggtttatttgtaacagagatcagtgaaggggtatcgtactatcgcagcggtccgattagcctcggacggtcacgattagatcgccacattggaatattcctacgccattacagccacacgcgatagaatcaatggctttgatttaatgtgtgggagagaatacagaaacgatcgattcggccctccgtttcaagatctaacggcccagagtcaagcatgaagcggtacgtggcttctaatctgcactgttaattcacatccgacggtcacccgcattcttcctcccagctaactcccaggcagccgcgcgcctgctcctgcggcggcgccatggccggcctatctgccccgcgcacaccgcgcggtgatgggcacgccggagtaaatgcgccaag

SEQ ID NO: 59102 - DNA, 753 bp, Zea Mays
ataaaaggaggaggttgaccacgaggataaggggttagacccagacggaccaagatgaaccaaagaagacccaagacaaaagacactggcaaccgcatatgcccggaaagacctagaggccagagccaaggcttagcgagcataggactctagttctgtagtctttagggtcactccctcataagagacttggaagactttcttccctttctcgcccacttataacccctactacgagcatcgggcaacagaggtgctggtagcatgagccaccaaagaccggatgtagggacgttctgcccgaaccagtataaatcttgcgcccaccgagcacaccatctgaagcccagaacacacacatagaaatttacttatcggcgcggaggatcgaaacatcgacagttggcacgctatgtagggggcttgcgcgttctcgataaactttctagtctctagatggccagccacgacgctgatcggatccttaaggcagcgattcgcttcgggaaccttaacttcgtccttgacagcgatgaggggagggtcagaacccaaaaagcccgaccccttcctcctaggaatcttgacgctaccatcagggcacatggcggccttgtgtcgttctcactcccggagtgatcccccgtttcaggagtctcgacttcgtcatcaacaacaacggtgatgtggtctgggtgccgcctgcccagccctctccacccgagagcccatacactgttgcagaagcactca

SEQ ID NO: 59103 - DNA, 502 bp, Zea Mays
gcccgtagttcaaattggtggttcagcaagcatcgtaggcatgcgagaaagcttaaaagagagagagagcgatgagctaacctggaaagggctggccgcggtgaggtcgagtttcgggtggcggagaacgaaattgggggaaatgagcaattctccggctatgggggctaatcggaggcgggagtgggggctatagcttcggtatgacctagcgcagctggccgagggctcaatttataggcggagcgagcggtggtcgcgaattttggacgagacacacggtggtcggaagtgaggaagaacggtggtgcagtgaacacgtgttcaccgccgtggcagtaactccgatggtcgacggggagtttagagggtgtcacggcgatgcgatggcgcggttaggacacgcggtggccaatggcgatggcacgacgacggtgagcactttacccgcaggcggtgagccaggggagatgaactacggctagccggagtggcttccagg

SEQ ID NO: 59104 - DNA, 443 bp, Zea Mays
aacggagggagtatctcagaagcactaagatacgtgtttcttctaattaatttagtaagacaacttttcatctttataataattaggacagggcatatttggttgagctctctctgttctatatctttttgaaagctggttttttaattaaaaatgttgacgtgtaggtgtatttcttcggtgacgccttgatggccgtgtgttgtgtagtctggtgaggcgtcttggtcagctactgctgttatcctaaaacgacttttacatgctgctctgacgggatcagcctcagaaaaatctgaggcgtggcgagacaaaatggcatcgcattgtttaaagtccccgtcatgggttagcatcttctgactgactgaccgatctccctggtctgtcaaattcagattacttttccgcctgcaccgctgcactcgatcctggccgtcggt

SEQ ID NO: 59105 - DNA, 376 bp, Zea Mays
ttttagcgtgcctcacctgcgtaggcctcgggtagcgcgcagcggcggtaccgtacgccggagtatcactacctcgtccaaaacgccattagcgcaccagtcaggggaaatcgagggccgccgcgggctgagggcgttcggtggcgcgaagcttgtggaaggttgtaacgttcctggggtcggcgaacgggcggtgttcccctgttgggtcttggccagcgctggattgcctgtcatggtgggggaagtagtttgggcatggacggccatgcacaacgtcgcgaggttgaagaagccagggggccctagattctgtgatggacggctaggatttggttgatgatagagtttgatcagatccaatatccaccgttag

SEQ ID NO: 59106 - DNA, 685 bp, Zea Mays
aattatttggattaaatggcctttttcatgaagtattggcaatggtattgatttgcagccttcaattgggttttgcatttttctctggtggcttatctcatcattgatctagtataattttatttgcccattattgcattatttttgggttcctcatgatttatttggaataggacccaatatcaagttttatttgtttaccctacttaaaatgatgggctggggtggttatcatttttgcagtggggttctagtggttataagtccactggatttttattaacaattttggatttgttttcataattccaataattgttttctagttggaataatgctaaataaaacatttcaccttgattctgttctggactaggggtccctttgtttttcctagattctctgttacttaagtaagctaggaaaaataatttcatttattgctccttattttctaatatttctctgattttcttaagttctgggcaaaaatggcttttattggataactatacttaaacttccaatactggtgtgtctagtatttttaaacagtgtctaattggggtttgaacatctacaaattttctcaagcctagcacagaagcataacaaactttctttaattaaatagggtttggtcagtttctgtttttaattccaaactctaaaatttagaacaaaa

SEQ ID NO: 59107 - DNA, 302 bp, Zea Mays
cgaaggggtacgggcgagtattggccatccgatcaggaaacaagggcacagattaaatctgccccacttgaaccggtaagcaatacgagccctcggatccaatttctacgcctaggatttaatgtgactacgatctaatccggtccgttcattacgatctaacggcgcggacataatcatgctgaggtctaatcctggcccttggccgaagatccagtgacacacgttcaatgcatcgaaggggtatctcagttttaatctcaaccgttctcccgagatctaacgacgcgagcctatctccc

SEQ ID NO: 59108 - DNA, 652 bp, Zea Mays
caaacatctttgtctcaccttttgaagcaaacacaaatcaaaccctgtgacttgtaccatttcaccatatatgagttcaaatcatggcttcaagtcaccttactgatgcatcaacatattataactcttcatagctgattacttcatcaacttagtgcaagtactcttcttcaccttagccatggtacctcggtccacaagtcgtcgcttggccttcaccttcgcttagttcctcgaagccctttccttgctatcttcgccttatcaagccattcttgactcacatcatattgagcatccattgagagaatcatttctttgatattgtgaaccttgcttgaatgtcatctagatataaatgctaagatcaatcaagctctagtttgattctcatagaagcatatatggactaatagtaatatggtcaagccaattgatgattcctcatatctcatacactttagcttgaccaatcatcttaatcacttcatcctctattctaatcatatttatgcatagtgatttctcaggtcttgtccatatattcaaaccaatatagagaccatattatatccatttgcattgtctcactggttattaaccttgtgttgaacatttgttcactgatcattatacactattcaagtatgtt

SEQ ID NO: 59109 - DNA, 445 bp, Zea Mays
aaacagagcaatcggattaagtcggcaacgacttaagacgatgcaacatgctcgctcttacttaactcgaggtgaccactatgccctgccaacggagcaatcggcttaagtcggcaacgacttaaggcggtgcaacatgctcgcgcttacttaactcggggtgaccactatgccctgctaacggagcgatcggcttaagtcggcaacgacctaagatggtgccacatacttgcacttacttaactcggggcggccacagtcggtctgagttaatactaacttagactggcgcagcacactcggcgcgcacacagttactcatctaggggcgacctctatgtcccatgaagaagtctcgaaatcattacacgacattttacttctgcaaaatgtgacactatcgaattctaaataacagtagcattcaagtcttaagcaggtgtcc

SEQ ID NO: 59110 - DNA, 681 bp, Zea Mays
tgccttctaaaaccgggtgtgacagtgccggtggaatcttggggccattcaccgagttggagtgggttggtcctggtgccttcagctgagggcagttgttcttgaagtgactggggtccccgcagtgccaacaggcgtttgctggcggctgattgcttgcaacggagggtgcctggtgggagctctgactctgctgactgtagcgcgatggagagggtccagatgtcttaaggaagcttggacccctgggtgggagcccaaagggtcgagctctctggtgacgttcttgctgttgtgctcggaggacctggaactttctcttgatgtgcccctttttcttcctcttttgctctttccacttggatagctttgttggacaggtgagagaagctgtggaagtcttggctggcaagtatggtcttaagctcgggtcttaaccctctcagaaaacgggccattttcctggcctcggtgctgacatcctcgggcgcgtagcgggccagctctgtgaacttgtgcacatattcactgacggttctcccgccttgggttagctcccggaactcatcctccttgagttgaactatcccctgggtacgtggtgctcgcggaaggctgcttcgaaatctgcccatgtagcatctctgacggcttcactgaaagtgtcccaccatgctaaag

SEQ ID NO: 59111 - DNA, 489 bp, Zea Mays
tgtttccagacgatttgaattgcttattgaatatttgcgactgttcagtgaccgtggtaggagatgagtggttgcctactctgcttggaatttgccacctcctaagtcctttttcaattttgtgtccaatcctcctgctggtgatagtggtctaggtcttagagtgcaaccctctcccgaagatattgaggtcttggttgcttctctttgtgatcttcccaatgatgagaggcaagttcattttgagatgccagcgagtccagatgatgtagaaatgaatgttgtgctcgacatgttggttggggaatcttctgattcggcccctactgaaacaatggctgttgcggttataccaaagactgtcaaaacagtggatacccggaagcctgggggtactcgcccaaagcgtcttcgccaagtcagtcgtccagctgcgcctgctgaggagaagaagaaaaagagacagcttcagcgactgtcgtgcttgga

SEQ ID NO: 59112 - DNA, 544 bp, Zea Mays
gcggatttgggggcgcgccggtggggatctccgccgtggggcgggccgctgtgtccctggtgtcttgtggaggaagaagaacgggcgtgggtcgttgatattgcagggaggggtcgggattaggtcatcaggggcgatgcgtcaggatgcatcacaaccgtaaatcagtagaggaacgaatgagagtggactatgggtattcatcgtctggaccgttggatcgggtgggatcgaatccaaccgggatgaatcgggcaccgtcggattcagatccgagggctacggctgcttaccggttcggtattaggcgatccaatctaggccattgaatttagattgtgcggctcagatgcgatcttaccccttcacgggcgtagattaaaacaatggcccctgagtattagagaaaccaacccgccatcccttgtcgcggtgcactgtgttttaggatctttgcgcagagacccctgcgttttttagatttcatgcacgcagtcccaagccgtgtgataatgggcaaaggaatataggagatagtttttaa

SEQ ID NO: 59113 - DNA, 454 bp, Zea Mays
aaatatttaggttaaacgtgcttgacctagagcaattaattttaggatatgtgaccgaccgagaagccttctcgggtccacaagaagggcaaagttattaccattattcacttggcttgtgtcaacatccgaacacatgtttgatgccacctaaatttggcagatgtctctctctaaaaaaactgataaaacgcagacaccacagagagtttccacacggttacgtataaaacactgtacgtagctggagcctgtcctgttcaaaacattgatgtgtgtatttcgtggctcatgagctcagaaggtgacaggagtatagtgtgggcacaccggcacacataccacaacttgagccaacatattgccaaacactttagcggtcccttctcggcgtcacacattcaagcccttgcactatttggttggtctcctcctaagtgatacatgtgccctg

SEQ ID NO: 59114 - DNA, 647 bp, Zea Mays
ggtgaaaagtgcgtggtaatctggtcggtccgtcattcgggatggaggaaagcagatgggacactgaccttgcagtttctgtacccatcctgtcttcagtggcattcgcgggagggtcggcggtgtcgtgcgtttctctgttagtgttgttggccgaggcctagcttgggcgagacaaagactcctcccgaggacgaggccgaggtcgggtcggcgcacgggtacacagttatgcctggagtggttggaacagcagtcggagtgatctcctgcgggattcacgtgacagttggtggcatttagtgcacccctgctagggaagttggctgaggctgagctcaggagcggcggagttttctcccgaggtcgaggccatgcctagacgtcatatgtcccacttggagttgttgaaacagtgaccgtagtgggggaatagtgcccagtattcgcgcacgtgcgtcattgtgggcggtgaaagtggatttaaccgcagtcgccttgctctttgatggcctagtatcaattatgactttaagctgaatcagttcgtagaaaacttgcaattcaaggtagtctattgttgaagttgtagattgacatagcttggagttctagacataagttcaacttaactaactctactgaaa

SEQ ID NO: 59115 - DNA, 455 bp, Zea Mays
cgtccctacaaacctggcctgttggtttacgctcatgaagctatgaagagaaaattcaccccaccctcagatctatcttgtggtggtcttatcctgtttaattttgcagccattatttttatctaacccacccactaaggtaccctcgattgctggtatatcgcatctggactatataaccaggccatgtagcctgggggctagtccaagagaacggataatcgcccgtggggaggtccagagccgtgtggctgcttagcttggtccagtaccctaagcccacacgccccaccacccagtggcgggtatcctagtatccggaaccataagtcccgtggcgggtatcctagtatccagaaccataagtcccgtagggccgaaaacccgactgcgtcatgattacgtaagtcaaaggatgaagggtaccagctaatgggtccgatgggtgcactact

SEQ ID NO: 59116 - DNA, 386 bp, Zea Mays
tgtctcggattgcgataataagaggaaagccgacgtgtaggatgtatagcggcctatgttgttgcgctagttagccgaattaatagatgggtttgggtaagctcgtagtcacggtaaattgcttgttgtcgtctaaacgtgtatggttatgacacggatgacaactattagtgctcatgtgatggctaagttaaaatgcaaattattgggtgaaaagcgcttcgatattgattttcgtggagaatgtgttgttaattgagtatggaaattctaggcacgaaatgacttggataaaaagtagtaagtcgacttgttggtcctaatttgattaatttaactctaacaaatggtaaagcgttggaataattcaagtctctataacgcag

SEQ ID NO: 59117 - DNA, 594 bp, Zea Mays
cgacagtaccgaaggtacaaacgggttctattgtgactcctaaaaagagaaggatggtaaatgtattagatgtgttggagataaccgactccacaagtctcgctcccatagggaaggttgctgaagttgacaaaacgcaacccaatactgatactaagaaaatagaagctgaaacccaggctgaaacctaagcagggcccaaaatgcctgttgagacaaagcctgccacaacgaagcagagggccgaaggaataactccagatagtaatatagcttttgagaaaagtgcggccaaagaagccaaatcccttgctcccgaagcactctccgaagattttgattatatcattcgacatgcttcgggaaaaagattatccaaagaagaaatttttgaagccaaacactatgcccgggaactgaagtatccgaagggggccttagtgtttaatggtatggatgaagatgatttcctgtactgcctcccagacaacaaagaattatctgtctgccgggagatggccagaagtatgggttttccgaagctcgaaggtggcctctgtgccatgacgaaggacaatctcgcatatagtcttg

SEQ ID NO: 59118 - DNA, 560 bp, Zea Mays
gcagaaggtcactgaggtggcgggctccggttaaacggcgaccccccgtgccatcaccggaatccgccgtgtggaaagcttgccagcacatctgaaatccgcacttcttctccaattccggccgttggcctataaattgcgctcgggcttggcttcttctccacattccgcacctcagtgcttaagcaattgactcaattctatcagagaacttgtgcagcccacaatttctccccttccctgttcttgctccgccgcaaggaactctaccgtaatcagcaacctcgggttagtaattcccccaattgctccttgttttagcatgcttatggtttcttatagttctcggaatcggccaattgaagttcggccgaagcctttcaccagaacacgtgcctgttctgtagaacgccgctgtaacccaccctcaccgtcgacctgctcttcggctcatattctgcccaaaccaaagtgtgtgcataactcctagtgaacccgtgaacccttcctcagcctcaatttggtcgtccctgccgtcgtttggccggaacgtgttcgtc

SEQ ID NO: 59119 - DNA, 507 bp, Zea Mays
atggatgaaaaactgtaaaaggtaatatcatgtgcatatgtggtcatatcgttcatactgtttttcaaaagctaatatgtactatttaatttccagagaacatgtgtatgatagcacagggaatttattagtggagaaggtcaatacttccatggatgaaactatgagaaggaagatgtcaattgcgcacaccaaatttgaagatgtttttcaaatggccaaaacttcagaagaagacatggacatattgatacaggatctggaatctctatccttgttgtttcagccaacctctcacacaagacaacacgaacaagaaaactttattggcatgaccattccaaatgacgtacaagtttatccacctagtgacatttgttccaggggaaggtgcaagagaatatcaggacatgcagacaagaacaaaaagaagaagaattctggtccacgaaagtgcacgtcatgcaaagatgttggacatgataggcgcaattgtcctaataaaaa

SEQ ID NO: 59120 - DNA, 314 bp, Zea Mays
caaaagtacgctgctgctctgcccccatgtgaaattggcattatccttaagccggagaatgggagtaaaatcatcaaccttcccggtaagattagaaatgaatcttcgtaaataatttactttgctattgcatttcaagcctcctagttcgagtcatcatggtttgaaggtacaaaatcattgttgtcttcggccgctaccggatcgtccaccctctctggtggaccatccacacctttgggtcggaccatccgcgatgcgcagaataggagccttggccccgctgccaccatgcgcctaccacctagtgttgg

SEQ ID NO: 59121 - DNA, 663 bp, Zea Mays
gctgcgccgttcggggctcggttattgctctacggggatcggcgtcgggccacgaagcgctaggtgtcgtcggtgggcgacgaggaacctcgtggccaccagaatttctcgccgtcgccataaacccgcgctgcaccgtcggcgggcgttctcgtggcccaactgctggtaagaaacttcccttcatgttcagcgtcatctcggctttgcgtagaacgtattggtgggggttggggggcactcgagcgccggggcgcggtctctggtgagcgcgccgccgtgggagggatgatggtccgccaccgtggcgtgcttccggggaggaagaaagcccttgcgccgttcatctatggatgggcgatcaagattagatcaggaaaccattaagcccagaccgtccgatgctagttgaacgcttgggatcatgcccgtacttaccccttcgcgttatagaatctgaacccttgatatcaaatcctgcgtccagggtcacatacccctttcacgatctaatcctgaccgcagaacgtgatccaacggctcacatccaaccgtacccctttggccaggaagtttttgttaaagagcccctgcagaaaatagaaataaacccgccgtccactttagggtttggctgagtctgtggattacttatgttttcac

SEQ ID NO: 59122 - DNA, 417 bp, Zea Mays
cgcatgcatagagggcgttaggccgtcagcgcatgcatcgctctgttcgcacgtccagcgcaaacatgcaggagtgggcgcccatcagtgcatgcaccgctttgaccgcatccaggctgatcctcactaatccgtgatccgctttctttggaggtgcgaccatcgagccttggccccatacatgccgggtggggtgagcgatgttgtgcggttcgcactgctagtgctagaccaccagaaatgaaagatattggatctgcatgcatgccattccagatcatcggcctcgacggcactgttggctattccatcgcaccgtcgtgcgagcaagacccttttctccacccttcacccagctatcatggctaagggcacgtcttccctagccgcgaacacacatatgtgagtaggctgtcg

SEQ ID NO: 59123 - DNA, 566 bp, Zea Mays
cccgcccatccgtgaggagggttgaaaatctggtcatagagtgcgaccttctcaagacgaaatagaagctataatcatcgcgcatcgagacctatgtgaagaggaaaagcagacttatttcttgatacaaccacctgccaatgattctgagatcgatgttgttcttggtatgctggccagggagtcatctgaatcagcgtgacttgagtcagggtgtggagcccctgagcagtcgagcagtgaagggaagaaggtaggtaatcttgagggtccatggtgcaagcgatcatgccaagtagatgctgaggccgagtccacaaaagtaaagaagaagaataagaaacttcgacgtttgtcagacttgcagccaatgactacccaggtcgagccgaaccccaatgataacctagtggatgctgccctgaaggatgttatggaagatggaagtggggtgaaaacagctagatatgtggtggtggaggaagatgatgaggaagaagaaaaagtgcttcccctggttcgcgcgagcggctctaaggctcgcggtaacaccccaagccttgctg

SEQ ID NO: 59124 - DNA, 481 bp, Zea Mays
agcggctcggtggtaagggcacaaaggggagagcggcaggccaaggcgggtaaggcaacactgtggctcccaactcaccttcatgtgttccagcttgggttcatggtgttggcataggaaaaacgaatgcaagtatcaattatcaaccatctgttttccagatatgtaaaagcattgcgcctttatttttttccaatgatgtagatctgttgtataagttgaaaatagaacggtgataggtgatcatttattttttgttgagcaatgcaacccaactgtcgtgcttacaaggtgtgtcaaacattggtagttatgaattattttgttgtcgtccaattacattgtaagatgatgcattattagtggatgctaccatctcaagcactagaaaattgtaaatccttttgatcgagaaacataaaacaattgctcatctaccacaaatattgggttctttcatagtgtgttttttaccatctgc

SEQ ID NO: 59125 - DNA, 556 bp, Zea Mays
cgaagaagtgagtgagggtggtaaacgtgtcggatttcattcgaaaaggaaaagtccataggaaatgggaaaaatcgtccaaaatcaccaaatagtatttgtatcctgacagactgagtaccggggaggtccatagatcacaatgaaccaggtcaaaagcctgttcagccctagaagaagatgtagtgaaaggaagacgggtatgtcggtcaagctgacatgcatgacagaggccctcaaaatgtcccctattacaagaagaatctaaagtgctggaaagcttggtcatgacctagatcctgggtggccgagacgacgatgccaagtggtggaggtggtggtggagaccaggacgggaggtggagacacgccggtggacgacgaccggagtgtgtagaggggcccgacgctgtcacatcgggcgagtggggtcctggtggccagatcctttacagaaaaaccagtagggtcaaactcaatggaacacgaattgtcggtggtgaaccaacggacagaaagaagattgtgagtgatgtgaggggctacgagaacgtcg

SEQ ID NO: 59126 - DNA, 590 bp, Zea Mays
gtaaatccaagaacagagtacacaccgaagcagtgaagtgaaccctgcatctgcctgggaatcaagtctcctgactgttgaaccaacatgccatgtccccattgagggattggtgctgaatttttagttaattgtaatcaaataggtgttagcaaaaaagaaggtagggcctgaatcatttagaaataattgcttttgagtgaacctaaccggcttatctctgaaccacttcaaacaggacactgaaacagatatgagcagctaggccataaaagcagaacccaggatgattgcactatgtctcagcccaattcagcagctagtactgtagtacatatctcattgcccaaccactagtccactatctttgccttcaaagtggagtaagtgatggcccagcaaatcagatctgaatctcaagtgtcaacatctgcagctagcaatgcacgtacccagctcatggccatgtcccctgacaatcagtctgagaagagcacaactgcactcaagacatggaccatttcttcacctatatatacaggagctagcaaccaagacaccatcactacaatcacagccacaaactaaac

SEQ ID NO: 59127 - DNA, 534 bp, Zea Mays
gctcgctctccctataaattgaagcccccaccagctccgcaaggtcatcatccaccccgccaccaagaatcgctagcaaccgtgcatccgagagcttgaattccggttttcccccaaatcaagcttctgccacccgaaaccaacctcatcgcggccagccccctttccggtcagttcatccctttctctccctcgtttgagcattcttatagctctgtgatgcttgccgagccaccaatttggactacgggctcaccaatcaccgggaacgcacccaattgtccgccacccattcggttcacgtggacagagcttgatagctcaccaactgtgcaattgacttaggggaaatgctcaaggcagggttgattcggtgtctgcttcttgagagcgccagtcttggctccctccggccggtccaggtgctcgccggagtacgtccctatgcggttcgccgtcgtggacttcgaacggagaaaggatagaagcgcgaggttgtttttgtagatgtcagtgagacgttgaacagtagcc

SEQ ID NO: 59128 - DNA, 338 bp, Zea Mays
ttctcccactatggactccagctgtttgcaagtgagttgggatagggataacttggtctcagggaggggttgataccttggaatatgccttggtgcccatgggtgagttggagaaggagtgaagctaatctgttgctgactgtgctgtgtgtctgtttgtgtgttggcacacatgcagtgaactaagccatgtgtttccctgtgtttgtagcctttgtggagctggggaaggctgtccacgtgcttttgtgcatgtagtactggtcttcaagctcacttttcctatggacatgtggagatcaaaagggtttatctccttgttctttttctttgcaaac

SEQ ID NO: 59129 - DNA, 470 bp, Zea Mays
ctggactgcgcctcaataactgagaagcacaggggctacggggtaaaattccagagacacagcgaacagtaaaaatggacggcgggttgattctctggtttccagggggttctttaacaaaactgcaagccgaagaggtatgaagccaactcggccgtcagatcggacatgggcgttccagattagatctggagtggatcgaaacggtacgcgtcggccaccgcacgatcaaatctcaacgcttcttattcaaaacgctcgctacacctgtcatccgtctgatctaaatcggacggccagaagaagatcaggccgaaccggtatactgcgagggtcgttggatctaggatcgaggatccggatttaattacctctagatctagtaacaaccgtacgatgcgagatcaacgaccaccacttcctcggccgaaacggtacactaggatttaatcccaaccgcacactaccgg

SEQ ID NO: 59130 - DNA, 513 bp, Zea Mays
ttcaaaaacatttacactgacattaatcatgctaatatttattataaaagtataaactaaaactacaaattagttttaatcagactaacaaataattaattaacgcgactgactcgtacgcgacgaggttacaaagttaacgcgactgaaactagtcaaataatgtttgcgacgtaaaatatattaaaaaaattaatattttgcgcatttaatgtgatgctgcgtattttcattggttaaaactcaccacacggatggccacgggtttgaagacacagaaaaaccgaccggatctagtgtggccatacacggaacggcgttgcacatggccaaccaggcattaatacgtagcagtcagttttctttcccacacacattacgttcaatgaggatatcgtataggaaggaacatgcaggggcctatgatggttctcctttccgtgctgcgatcgtgtgtgtagtgagaagattgcgccacggcgctaggcaaacgaatgggcatgcaggtggcgc

SEQ ID NO: 59131 - DNA, 504 bp, Zea Mays
ccggggcagggaacaccctgtcctaggtcaagggcaggctaaggtccggtacagacatgtgcccaggctttatccggtgcgcttccactccccgctcaggcggaggcccgatgctgccacgtggactatcgcctgtgacgtaagccagcggacggagcctgacataaggcctctgggctgcactgccactgcatatattgcggagaagatgcaccgcctgtctatcccactgacaggcgatgtgccccctcggcatttaatgtgtcctgtccactcagctagcaggcggcgtccaggccatcctgcaggcggtgtgcctgtccaatccattgtcaaacagtacgcccgtgctgcgaggtgcactgtgtccatcatcacttatatggtgccagggaagcttcccctgcacgccgatactacgcagatctcggatgtcagggcgcaagaagattgctccagcaacgaacaatagttgctccaagtattacatccgttatgttactg

SEQ ID NO: 59132 - DNA, 571 bp, Zea Mays
ttattcaaatttggggattcataggtttttctctctaatctagaattgggcagtggaattacaattttgattggtggaatttgctcgtgttactcattgtgaatatgatgcaaaaatttgaaaggatttggatggttattttctgtcaaatcaatgattggatggatgggggcggctagggttctagaaaaaatcgcctctggacggtcgcggaccgtccgccaggatggcgtggacagtccggccccctagcgcggatagttcggtccctaacagaaacttacacttcctttctctatgttgtgacatcatcaactattaaccagtggatattcctcatatatattgcagtggtctgggtggtcttaagaagaagcttgcaggtcgttttcagtcaaagcgccgtcgtgtagatgatgcagattataatccagctacagactctgaggcccaatcattagctgggggcagcatttctatggacacaaaggatgctccacacgctcatccagattatccaattgatgtcacaggatggacctatcccaagagaagattctctatggctgag

SEQ ID NO: 59133 - DNA, 349 bp, Zea Mays
caacttcggctgctgtagcgggtattacctccgaagttgggaggatatctttggcagtatcaacaacctctgtctttgactttggtcaatgagttacaacttccattttctttggtttcggcgtggtagaaggggtcgttgatgcaattctctttttgtcccttgctacctagccggaaagcagtaatcaggataggcaaaaccaatgacatcaaataccctattcagccttttcattccacgggcaccgaaggcgatattcatagcttcatcttcaacttttgtataagctcccaacaaatcatcactagtcacctcaatggcctcaagccattcatcatctggctcc

SEQ ID NO: 59134 - DNA, 675 bp, Zea Mays
cgcgggaggccgtcagctatctaggccagcagtcctccgacttcactcggcgtgtccattgcacgggcgaagtcagagtataggttccgagcaaagagagggttctctcggcgcagccttgcaccttgctcggcttgctctcgttctcggtcctgagcttgtcgacgatcgcagcggcaagagtttcgcctttcccggtgtactcgctcgttgggagattctcctacttctgaggcttcgtcccgggatacgggctgcgctggatcccgttccttagcttcgtaatgtcgtcgcacgttccggcgtctgttcctccgttgtcgtgcttcacgctgggtaggttcttccccttgcatggtagactcatcgtcggagatgggtgatgactctaatctcccccgatgaagaggacgtcggggtagaaaggagtcgtcgcgatggcgctcttctttccgtcctcctttgagggtgaaggtgtcggaaagacggctcagcgtgctctcgtcccctaactcagaatgtttgcttccttctttcgagtgatccgtgtccactcctttgtgggcgaggtggacatcagagtttttcgggtaggtgagctccggccttcggtttgtaagaggtcatcttcgcttgagatgtgggtggtggcaccacccgctattctgctctggc

SEQ ID NO: 59135 - DNA, 569 bp, Zea Mays
cgaccctcggccttgccctctcgcacgcccatatcctttcaccggcgaccgagcgccggtaatcacctgaaaaccgagcacggcgtcccgcaaaacttgccaacacgacgaccactgtagaccagtcgctctagcccaactccacccaatccagttcctcgaccagtctctctaggggctagcaaagctccccagccgctcggaccaaccgaaatcttgccggagaaacctggacgcctcgctggacttgctctgtcctccggcctccgtggactaggtaatctacccatccattcttcaattccttgtgcacacaccctcatggccaccccatgaacctccctatgcggtttgattgagctctaccatcgtggtttgtttagtacaggttgcaccgacgagctctaccatcgggattcgtggccagaccaactcagggcactagagacgatgacccatacctcaacgtgaccgccagagaatccccttcctcgcccgaaccttcgccagaaccccaccatcaccggtaagccgctccgccaccttctttgccgcgatgactatgtagc

SEQ ID NO: 59136 - DNA, 329 bp, Zea Mays
cattccccctgtcttgaaaggacgcttgcccccaagcgaccgcacatggaaagcgacgacggacatcacattcatcttcccaagaatccatagcagcatcacaccccgaccacctgatcaaaacctgatcgatagaagcacctccgcgggaaaccactcgacgctgcagcacttggacaggaacacgaagagcgtcaggcactgagggaagagatgcactcaccaacacatgttgtttgacagaaggtttcaactgggacacatggaacaccggatgcacatgagaagaatccggtagcttcagtttataagcaacagcgcccacacgt

SEQ ID NO: 59137 - DNA, 369 bp, Zea Mays
aaacaaatagatgtacgcttggtgtagaagctcctacatagtttaagatggggatgttgatctgagttctaggcagtggaacttaattaagaaagcagaggatgcttaccgctgtgaagcagaatgcaccagggcagcatgtttagagaggaggcagatcgtcttgtggtctatggggaacaaaatttctgaaggattccaggtccaaacagacggccaaggaagttccatcgaataatggtataggaatgaacactgctagcttgcatgatggcttggatggtagttgagaggatgatgagctgaacagggcaaatgtgtggtgcctgctgaggaattatgagcaggatagagaggagcagattgaat

SEQ ID NO: 59138 - DNA, 577 bp, Zea Mays
ctgtgatgcagtatctcaacaagtttaatcatttatcccaatatgcgattgaccaagtaaacactgacctgaagaagaaaaattgcttcatgagaggacttaacgaccgactccaatggaaaatggccacttgcctggatcttacgtacatcaaagctctcagcacggcgctggcagtagaagccaagaatacaggccaaggaaaatcaaagggatttggaggtgacaggtccaatcagggacctaagaagcgaaccaggttggtaatccgacctttcaatcagaatcgttcttcgcctcgtccaccctcgtatccgttcaaacagcctgttttaatttgtcctaccactgcccccacttcgacaaatcagccgagtgcccctggtgctcgtttccccgccctccctagttcttcaactggctgcttcaactgtgggaagtctggtcattttttaaaagattgtccatatccgaagcagaataagttcaacaatcaacagaattctaggagttccaatcaaggcaaagggaacatggctcataattcagcgagcaaaaatgtcaagaagactgggcg

SEQ ID NO: 59139 - DNA, 641 bp, Zea Mays
cacgacgaaaacagtgcgtacaatcctaactacgacaatatttcacttcattttccacctagcctttacaattaccatccacttgctactctagctgtttttaatacttaattatagttatttaaccgatagcgtgatggttacgaagtcatgccgtcacttcaccttacaattcaaattaactaaataattccaatcgaacttgccaactagccaattgcgtgctaacctatttttcataccaccactacaccacatactgcatactcagaacaactcattcacatttcacatatatctttactaaaatctttcctgcatcgcttgcaacttaaaactaagctttactacgcaaacacatgacttccagtttaatcacgaatatcatcatcacaccacattgactcgattcaaaataaccctacatgttcatctcatgaacggagcatttcaacaatcattctaaaatgaactaactccattacacaacttgtattaggagcctacttgaccactcgatgtgtctactcgaaatcgagagcacaaccaacactgttcacgcaggaatttcagtttgcaagtacgagaggactcaactaaattaccaaacaaaatcatagagaggtactaccaccaatttc

SEQ ID NO: 59140 - DNA, 710 bp, Zea Mays
ccgccgccatacccattctccacgggtgtagcagagtgaagcttgaggatagccggagaccgttgtggtgctcccatgagtgaaatagatgcttccctggtgcggattggcgctagagtccgacgggaattcctcatcgaagaagttgtggccgttgtggacgtgactcaccgtggatgaggctcatcacaacggaatccccggtaagaacatcatgcccagaatcgccttcatacccgtatcatgtggaccgatttaattgagatttagtgtgcgtaattcggaggttagcctatcggcgtgagacctcaccgtggcggcggtagtgccgtgacctggtctgcccgtggagaagatgtgcctccgccgtccgattttcttcgaatggccaggattagaagatagacaccccttcgcccatttgaagcttagtcgttggatcacgggtgtggggtttagatcgagctaggacgtggctgtcccttaaccgttgatatcggatctgatggtcagggcgggttgcaacgtgttactgcgccgtgttctaatctcgtccgatcgggtgtgatcggacggctctggcctaccgatacccctttgcggttgttgctttgcgaatgagcccccgcgaaagatataaattaaaccgcagtcccacgcctgaagttttgtgtcttaaggtcttttgcatagtaacccctgcctttctc

SEQ ID NO: 59141 - DNA, 466 bp, Zea Mays
cttgactacgaaaggcttgatgaaggggccagaggagtcaagaggaaaaagattgtcagtattctaagtaggcaggctatctggcctgtcaaagaagacaaagagacttcaaagaagagaaaaactgtgccagagccaaaagtatcggctcccgaaaaacggaagcttgccgagaaatccttagagaagacgaagatgcaatatataccgaagcagactgcaagcccttcttcatcttctgctgccgaggtctcggaaatattgaaggtaatgatcgagtcttttccatttgcaccgctaagtcctctagggttggaactgactagcctcttacagaaaatggaaatctcttcggctgctgaggggagagacaggggccagaagaaacgacgtatgatgaatatattagaagccattgaacagaccccgccctcagcctcagcagaaaaagctactaaatcgactg

SEQ ID NO: 59142 - DNA, 429 bp, Zea Mays
tgatgagctgcttggagcctactcgaaggctgaagacaaagctatgacggtcgcctttggtgctcgagggagaaagaggctgaacagggtatttgatgttatcaggtttgtttaccctgattaccgttttcctgttcgaaaataagggagaaaaaggaaaactgctgctttggcatcctctaatgcgtcgaaggcgaagaaagtgaagaaggtcttgacacgtagaccgagacacattgagacggccgatgtgccaaagcttattgaaggtgtagagactgccccatcggtcgcagaaccaggtcatgtcatgccaatcgaaacttgtacagatctggccaaagagccgaaattagagaaggcagcagaacagctgaaggtactgagcccagcaactacaacagaactgccgaagccaccaagtgtttc

SEQ ID NO: 59143 - DNA, 304 bp, Zea Mays
gggtgatacaatttatcatgtgccatctcatcctttttagccccacatatgtctagatagtagtactgtataagtttgtggaatcatatacttctgtagttcgtcaatattgttttttcatgtagcctacaatcagtagtgtatataactaccgtaggctacccttgctttgttttactaggtgctgtttcaacaagcaacaagcatatttgtgcttgtcgagactggctagattctataactgatactgtaggtttctagtgtggtgttcctttggcctatatactgccaaggaattcggcct

SEQ ID NO: 59144 - DNA, 929 bp, Zea Mays
gttgggaaccttcacattacagaacagattttaatctatatatttcatagctcgtcgtaagaacgattccgtagcctccgaatgattttagtattgctcgatgtttccttcaggaggggggctgtagggtcgtaacctagcagcatggcacaatctgatagctctattgacaaatgttactttggatgaggctacacaatttgctgcgttatgctgggcgatatgacttagtagaaatgatatagtctttgaaaaaatgttcgcctaaaatatatatgcatgtgctttacaggggggaagcactggtcccggttttgggcgcagttgtagtggcgtgacgaggaaaaggaagccccttgagcaacgcatgtcgaaccttgaagacgatagttatgcatatcttcacatcctctggatgacatttttgttataggattgctttgttctaatttttggtttccagtcttcgcctagtttgcaccctgcgtggtcgcttcggatgttcttttttaattgcttgatttgctggccggtactacgtgttaccgttgtctaagaagaaggtacgatgatagtcaactattctgaattaaatgatgttgagtgtaggggacgggagatggtccggtttcatagtactttgatttgatgcacaagcggatacatatgtacggccaatttgaagtattcggtgcgattaattaatgcagatctatctgcttccacaagctcatgtatagatcaatagatgtgtctccattttgctaagttcatatggaaagcagtgcatatttcttttggcatggcagccccgaagagtataaatcatatgtagggtgattagttacatgtcctcaatagcaaggccaaatcacactgttaatggtagaggttgttgtgttttgttgggcgatatggcttagtagaaa

SEQ ID NO: 59145 - DNA, 1356 bp, Zea Mays
cgaaatccaaatattttgagtcaaagcatcaagaaccgttcggctgttggctcttcgtttgggaaccagccggaatagcagcggtgcaaggtccgcgatacactgtccatggagccatttatctgtccaaaaaaatgtattggctccattcccaatctcgctacaaatagcgattgagaagaaggactgcaccatatttggggcatgaactggaagtgaatcccaaggcttatcaggctcagttttttgaagccaaagccatctcatgcgcaatgcctagctaagcttctgaagatcagtgatgcccagaccaccaagctcctggggtcgacaaactttttgtccaagcaagcagactatgactaccgttgagctatttccttcctctccacaaaaatctcctcctgatcttatctatttctttgaaagcccacggcggaagctctacagccattagcaaatataccaacatggaggtcagaactgattgcaccagaattctcctaccttcccgagataacaggtcggccttccaaccaggtagacggtccgcaatccggtcaacaaacagctgaatttggtcccttgtcaacttaagcagggaaagaggtacacctagatatctaaaggggaattctttcagctcacatggaagaacgttctgaaccactgccacatccgtttctgtgcattggattgggaaaacattactcttaagcaggttggcctttaaaccagaggcatcaccaaagagttccaacatatccatggttaggttcaaatccaagtcagcaggatgaagaaaaataaccacatcgtcggcataaagggacaccctgtgttgcaacgcccttgtggataggggttgtagcagtccagcagcggaagctttagcaaaaatcagactgaggacatccataactaggatgaataacataggggagagggggcccccttgtcgcagccctcttctatgaaatatggtgaatccggggattccattcagtaagacctgtgtagttgaggatgacagcagaccactgagaacatcccgccagatcagcccaaagcttagcttctggaggacctccagtaaaaatgactaggatactgaatcaaaggcttttgtaatgtctagtttgaggagaatacgagcctgcttctgaaggtggaggaacctggctgtttgtttaacaagcaaaaaattgtcttgaatggatcagcccttgatgaaagcactttgattcggtttgaatttcttaactgatttgcatgcccccatgtcagactattgaaagttacgtcaccaaatggaagtgtcttgtcagactattgaaagttattatcaccagttgg

SEQ ID NO: 59146 - DNA, 779 bp, Zea Mays
cacttattatcttgttattgccatgactctagatatagagagatgctccaagttcctaaaaagaataggatgtcatgtaaggaattcaaatccccacgacatctacaaaaggaacattctctctataactagaatagtgagactaatacttgcatctaagtaacccatgtagtctcactaatatgtttctctgtggagatgcgtaatctaacataaaaagaaaagtcaatccaataatttatgttgttttgcttcttgcctatattggatgtgattcttctacttttatcgctctccatgttatgaattagatttattcccgtaatcttaaagaactaactatgcttgttccatgagtttaaaactaaagcatactttaaggaataatctagttcatattacacagtttccatgctttagtaatccgcttttcattccttatcaaaaatgattacaaaaggaaaactagtgcttgtgttgctattaacatctctcttgagctcacttatgaaaatctacaagagagtaagcgcaagtttgaaaccacaagcctcaaagggttgctcttcacccaaaggaagaaaggtaaaagcaaaggtatgggaactcatcccctaaatcaaatatagttcccatcaatggttgtttactctaacatatcatattctacccgtgtaaagaatagattctttattggacatagcttagctagatatgaactcaaatctctttcataaatgcacttgtccattagaatctaattcatgcctttgctatat

SEQ ID NO: 59147 - DNA, 662 bp, Zea Mays
ggatggtgagcacagtgcgccgcatggcacgggcgcactgtttgacaacagactggacaggcgcgccgtctgcagggtgaccctgacgccgtctgccagcggagtggataggacgcattaaatgttgagagggcacatcgtctgtcagtatggtggcaggcaacacattctctccgcaataaatgcagagaccgcgcggctttagaggccttacgtcaggctccgctcgtcggcttatgtcacggggcacaagccacgcggcagcagcagatcttcgcctgagcggggagcgcagggcaaggcctagacacatgccagcaccagacccctactcatgccatggttccccctgtcccgagaccttgctgcggtccgaacctttctcggagggacctggggcccattcgagggacccggcatgccttcttgggagtccgggtctgtaatcgaggatccgggttgtgcgtacagaggttcggtgttcctccgtggaggtccggagccaatgatgcaccctggggtgtatcatctttccttgccacgtggtgcccctagacctgcccatgtggtggggtcgggtgccgttctccgtgtggccaggagacgccgtacgtgtacagcgtctttatagtgtagtagggggtacccctgattcagggtac

SEQ ID NO: 59148 - DNA, 665 bp, Zea Mays
agatctcagactcttccctcctctttctctctggtttatctcctatgaagctcatctcccacatttttgaatttatctcaaatcctctgaaatcttgtgaatccctgtgtgcctatgtgtccctagagcttccctgcatgttgccctctccctttgggaggtttcacatctacaaatagccatttcaccattgttccaaaaacccgcacaccacgtgttcggtgaaatgcccaaaccagtcaaaatagctcaaatcgaccccaatttttccaacacactccaactactaccagtacctctcacgccagatttcacgcctatctgaaatcccagacacctgttacaccacctctttacctttatagcgatccttttgagccaagtgccaaaaatattcttcctccgccaaacttcaaaccaaacacccacttcactcattttcatacatatatacctattcgtgaagtatcgactcaattcctagtcatttcatgcctcatttcgaatttcaaactctctatggcacaattcgccgttcaaacgtcgttctcacgccgtttgatctctgtttctccaaatcactacgttgttgtgtcataactctctgtgtatgtatttattcgcatttcatatacctatgactatgtgactagtacatgctcacc

SEQ ID NO: 59149 - DNA, 463 bp, Zea Mays
caaaagctgactattgtctgaaacctaagcaacggaaagaagtgatgaagtggatgaaggatattaaattccccgatggttatgttgctagttttagaagatctgtgaacttgaagacaatgaagatgaatgaactgaagaacaatgacttccacataattatggaaaggctcatgcctataatgtttcgtgggtacatttccgaaactgtgtggaaaacgttagctgaagttagctatttctacagacagttgtgtgctaaagaaatcagaagtgatgtgatggaatagctggagaaagaggcaccagtgcttttgtgcaaattgggaaaaatatttccaccgggtttcttcaatcctatgcagcatctctttatacatcttccatatgaggctaaggtcggtggtcctgttcagtacaggtggatgtttcatatagaaagagcattaaagaagcttagagc

SEQ ID NO: 59150 - DNA, 902 bp, Zea Mays
tgccaaatctctgagacttcaataaaacatcgaggagtcttctaacccttttcttactttacacatttatatttgagcaattcaattcaagtatttacaatcctagaattatcatgctagtataagattgaaaattaggttacaaaactctttatcatatctttatgcactcgggtgaagttgacttgtgcttaggatttaatttatgtaagaaaatttagagatgccaaattcactccccctcctcttggatatcttgatccttccacacataacctactaaaaaccatatatagattcattgactaccattagagaatactaaagtggctcctgcatcaagggactctgcaaaacatattgatcggtgctacgtcaacatcaccccctattcatatccatcgcctccaatgccatcaaaagatgacaaatcctccttcttgtgtccattctccaccccaccttaggcaatgtcatgcttgatccttcgactatgattttgtagcacaatcaatgggcctcactgcataagggcattgccacatagtgtgccctaccttttccactatccaacctctccttcaatgtgaaatcgccttgcaacttctccttaacccgcaaaacaagatcactaaagctaggaggcatatcaaatatgtcaacttcatattccatattctcaaacacctcatcttcttgtctaataattcatccataaaacaaatagactaaacaatccatctgcaaaactaatcaccaaactacgttcaatatttgaattcatatataacatataacctactaatatgacctaaaatgtaagtaaatataaataaaaactaacacaactaagtaatataacctaacctaactaactaaatataacctaatactaataaaac

SEQ ID NO: 59151 - DNA, 776 bp, Zea Mays
gaggcacaggggctcgtatatatgctcaacgccgagagccctaacagaaaccactaggaggtaatctcggcggtagactcggtctacggtttgttttggtgccagtgttatttagcatccggttcggcgaaggagatacggctggaacgtgggtctcgcgtggcagttacgagcgattcaacctcaacttcggctctgtttgttacgcaggtggtggtaggaattagcttgcttatgtcacccatgatgatgtggtgatgtcattttctgcaaggaaataaagaaaggggaaaatcatgtatggcaaggacgtgtgggctagtttgagccaaggagatggcccaacggatggagattttttttctcatttctattctatttgctaattctattttcatatttgaactcaaaagttaaatcccttttaatctaagttggagttttaacttcaatccaaatgcacaaacaaaaaccctagaatgacatgaaaggtttaattttattatttatcattttatccatgtatataattgcttctatttatatatgtaaaccaataggaatagtcttatgtaataaccgatctacttaattaaaggaaattctttattacaaaacattttaatttaaaatcttttatggagagtttttcctaatccccaaaatagtattttgggcgttacaaattctaccccccttaacagaaatctcgtcctcgagattagtaagataggggatgcaacaagtttggtttgtagtctatgtttcaatttcta

SEQ ID NO: 59152 - DNA, 1071 bp, Zea Mays
atctattagcttctagagtgagttgtaacgtgtttacaagtaaccaagctgataatagttgagtagtattaacatctgcacaccattttaattcactttaattcaccagagcacattacagtttggtagtagttgcttgctaagttttttagggaaaatagttggaattaaaaaatttatctatttttagtattcatttgaatatgaggaaggggtgagaactgagaagtgcacaattcaggggtttcctagggtgggaaaaagcccacgatccaatggctatgttccattgttcaattatccatgttaagtctatttgtcattcgatgagccttttctttttcttcatcagtccaagttgatagagtgtcatgttttgttttatgtgcaaacaatgaatattccatttttactgtttcaggtaagattccactctcaaattggattaggtttccatgaactgagcaccgagttctttatgtcttctctaattaagctgacaggataaaaaactcatttttcatttggtggtctcaaatgtctaatgcagtaggtgatctgaaactaagtttctttttgtcctgtagtttgactatggcaatggtctttgttagtccataggatcgttagctgtggcctacggatatgttagctactttctttctttataaacatcaggtactatttgtgattgagtttgccatgcaattaagccttctaggcttctagcaacaccattgttaaccttttttcccctttagagtacattgatttcgtttatttttgttccaaatagtttctcagaagttgaaagacttttcaaatcctacactgctgaggcagaaacatggaaagatggaagttgtacgtaaagggtagtgatgctctttctgagaatcttgcaggaaaggagatgaccccatagttaaacatattgattctaaacttatttctaaactgttatttgtgagctaaccttatttgtcaccgagtataacaatgcaacactcttttaattctttaaacagcatcagttaaagactcgcgcggggcgcgaacgagttactagtt

SEQ ID NO: 59153 - DNA, 3229 bp, Zea Mays
cgacaagtaaatttattgtgcacggtctgggctccagaaggtgtgcgcagagggcgcaagatttatactgattcgagcagaatgtccctacttccagtcatcgatggtttgcactaatggcaccattgatgatcaaactcgtagtagggattccaagcagtcgagagagggaggagaggctcctagatcacttatcgtggtggaagtggagcttagaagctacaaggtggactcgtagctaagtcttggcttggcgggactccggcctactgttcctcgtcggcgctccacctcatgttcgtccttgtgggttcgtctccgtataaaggcgtccggtcgtctccaagtcctctttggtccgtccttctgtccctccatcccccgttgccttgaggcgagcctcttccttttataggccgggacaggggtcgaccagcgatggcttccctaggaaggagccgtaaggcaagggtaaaacaatcgttttaccccgggtgagtccacgcatacttgtggggcccggggctgcctggctatcgtgtatttatcgttccggctacgccgacccctggcttccgtagcctggggctcggcgcagcacgtcatgtagttccctgcgagaggtctgcgccctcaggcctagttcgataggccataagtgtgtcacaggccgaggggcgtgtgggccattaatgcgcctctggagactcgtaggtcatgagcgctatgcggaccgaggagtacgtaggtcatgagtggcaagcggatcggcgcccatgctgtgactcggtgccaggcgtagttaatgcgaccagtcatttatggtgggtcagtatgggggccgagtgcgggatccactcgagtggttcctttccgacacgcccagcttcccttgttaggttttgccaccctgggctcggtgtcgcggtgttcgaccgagggtgggtcctttcagggttgacgtatctgcctcttccgactgactaacgagccccagcaatcaggggctcttaacttagcgcgcttactgaccggtgggtcccagggtccgggggtcattcccccgacagtagtccccgaggggagagtgtgagtgtctcccttcgggggctgatgaagggtcggcaatgccttttgtctcggcgcgtacttccatatttcaaacccttggtgtcaagccatcgctttattttatacgcggcgtttggcttgtgtcctatttcgtcatgcctcacgccttcttataaataatcactccctcgagcggtttggtcgcgccttgcttttgtcttcttcgggacgattcttccacgaccccatatgtactcaggcaagcgtccgacagaagagcaccccccagtgttgtgccgtctccgtcagaagatgattgactcaaggcacgtgctcttccttctcttgtccctagattctcgtgacggtgcatgtctcattttcttccttgcacagccaagtgatctcgacgggacaggtgaaagacttcgggatgtcctttagctagggcgggatgccgactctttcgtcacatacctccttagacctccgagagagtttggccgccaccaacattgcgctcgaggttgctgacggcgaggtggccaatctccgtgctcgcctggatgaggcagaccgttgcgtcggtggtgtcagggcgggctccatttctgtttgtctaactccctctctctgattgtcctgcgccgttttcagagttagagctggacgccgccgaccttcgtgatggtgtggaccaggtggttgcctttgttcgtgcctagggcgccgatcgaggagagcacctcctcgatgtcgccaatcgggtgcaattggtcgtccgtcgtggtgctcgtcgttgtgctgccagagccctggctttcgtgcagttccggttgggctacgagctcggcactgtgacctgccggaggacgtcgcgactggtgccctggaggatttcaaagatgacttcggcattgctgccgaggtcatggtcgacatcctcccgctaatggatgtagtcaacggatccccctagttaggaagcgttcgtatgtggctttagccgtgggacggcccgggcgtgtcggcctctatgcttttgtaatgttccctatggactccgtgaaaatggttcccttccctttcctgtccccatttttcttggtacttagcgcaaggaacaaattttagcatacttatttcgaggcctcttttactccctgatcacgcaccaagcggctttggcatggctcatgggttccgggaagcggtttcgcaaccttctggcctacctcggcgctaaggcagtcatctctaattttcggtgtctcgcacgtctctgaggtaataggaagtgtcgcattgggggtagcagagttcgatcgcggcgttgcctgggtttcttgctggtgattatgggttcgccttgggagggtgcatcgtcccttcccacgcatttcgaccaccagaaggggaagagcgagttgtctcatgctcctttttgacgacggaggttacgacgagcctccttttttgcgagacgagccctcgggtcccctgcctgttacggaggatctgtctgggggcgtgtcccatcttttctctatttcttcccacacatcccgaccgccaggaggggaagggcgagctgtaccatgatcccctcggtggatgaggtcatggcgctcagcgagcccggatcgactgatccaaacaagcccttctttttggcggggcgagcccccgagtcccccgttcgttacgggggatccgtgtgggggtgcatgcttcgtctttttaatactcttccccgcattccgttcgccggaagggggaggttgagtcgtaccatgcttccctcgatgttcgagatcagggtgctcggtgagctacaaacgggtaatccgagtgaggcctcggctccttcagcaggagccaggcgtgaggtccgctgatgaccatactcatgctctcaggtttcgtctcatagttgtcgaccccgttcgactggttccgacggctcgttgcctctccacgataaactatgagtcagacgttccctaggactcgaacacgatttagaaatgcccttggcgctagtgcactagggtgctggccgctacggtgcccatctcataatcacccttgctctagggttttaggagcggtcgcgaaccctttacgagccgaccttcgactccaaaaaatcttttcg

SEQ ID NO: 59154 - DNA, 665 bp, Zea Mays
ttctgacagtcgtccatataaagtaagggtttgaagcgaatttggaaatgtcgaatcatccagctgtagcgcttcatcttcattgcatgctcttatcattaatcgtgacagctgacacatctttgacaaagagccacacaattgtgcacagaagttactccttacatcataaattgtaaggctcctcagttgggataagtttccaagttttgcaactaatacttcacttgcagtaatggcaaacagagtttgcagttcaaccaaactccacaagcccttaaatggctccacagcttcccaatatttgaaactgctgtaaattacatctcgcaaccgtgaaaccataagatgtcgcaatttcttcaggtttgaaaacccttgtgggaacttcactaactctgcctgctcaaggctcgatgtttgtaggttttgaagctttgttatagatttagggagctctttcactttggtgtcatcgaggcacaaaagcctaaggttgaatagctccccaattgaatttggaatagtctcaataggcaagcctgataagtctaatactgcaaggtactttggtttggaggaaatagaagaataccacaaagataatgtcgtgctggtgtcgaacgttatgaaggtgcgaagcctggatggatcaatggttgata

SEQ ID NO: 59155 - DNA, 378 bp, Zea Mays
gtgatgttaaagatgtgttgcacctatccgacggaatatgcatgacagttgcaacatcatgtccactccctagtagtcaggccccaacattccggggcattgcactagcgtggcattgtggcagtgtgtgcaacatgcgctacgacctaacatgaccccagtgcgcgacgtgaacagtacatgacatggcttgtcacattatagaccatctgcaccatacaccacagtgtacacgaccccagtcatccacaacatgcatcatagcttctgaaggctcctgtagcagcatggagggtctgctcctctacctaccacatcctaggaatctggcaacgtgcgcatgccccactcacgcctgagtcattcggtacaggcaag

SEQ ID NO: 59156 - DNA, 419 bp, Zea Mays
ggcaattcacggttcgccgccggggcgctccatcgcgctgatcttccgtgggcgactcggactacgctactggcggcggtaggttggagttcaccatcattcctaagttatgtggattcaggtcgtgctccaaacggtagactagagttccacccgatcgccgctcgccgggcctgaccggcttatgaccatggcgcgagctcagggaagaagaagatggcgcatccgttgatcttcgcgcgtacgggcaagattagaattagggtagcgattcacccagttaaagcccagccgtccaattgtggatagacgttcgtgatgggatcgcgtagtattgaactcgtggccgttagatctggatcctaaggtttagatggcgtaccggttcactgcgcttaaagatctaatctggcgcgttg

SEQ ID NO: 59157 - DNA, 632 bp, Zea Mays
tctacgcccaggatataatcctatcgttcacgccccatccgacggcacatattctaccaacgaagggataaaccaggacctaatctacaccgtcgatttcgccatccacgaccgagacgccttcttctatctctcgttaatggaaaaactgggcagcgacactcggcccacgacggcgtggtgtgtcagcatcgtggcatgacggtccacgggcacccacccatactgccgcccccaacagcatgtcgcaacggtgcgaccctctagggcgagccccaccgcaccctcgagtgtcaacatcctacaacggcgagcgcgataatgaagggacggtgaagcaatggtatgaggtgttccttaccgatggtgatgaggtgtagattccagcccaaggcgctacgcgttcacacggcggaggagtttcaccggcgaaggtcaatagtggcagccatcaaactggcccgtacccacctcccccgcaatggtcgcgctccagcgagcgatgacatccacggtggcgtagctctcttcttgtggcggtggaaggaagaggagtctagggttcggtgtcactctttatggcctccaggaaggtcggttggggctccaactgcggacttgctagcggcaat

SEQ ID NO: 59158 - DNA, 494 bp, Zea Mays
gccactaccaacgccccagcaggagcagcgtcggaagaatcctcagccagcaaatcaagcatagcacttatctccgcatcactagggttcaagggcacctcaaaatggacctgccgttcatcatcaggaatctccccaagcgaagcaaccaaggcactaacttcatcagcagagggtcgcactctaaggcccaaactgccatcagtaataggtggattcgacacaaaaagggtgaaggctttgggaggaggcaggttccaggccgagtatgccactggagcaccaacatttgacactttgcccctaaggatcatctctagtcggctcaccaagtctgcagaagaaattctcctgttggtaacccgagttgagtcggctagccctcgatacagataagctgggtaggccctgtctttcaacggctaaatattcttgaaaacaaaatcagtaaccacggcttcagcagtcagacccctctctttcagcagtccaac

SEQ ID NO: 59159 - DNA, 343 bp, Zea Mays
atctattccaatgcccacgaggttcattggtgctgatccatacaagatgtgagtagagggcaggcttcggcgtcaaggccaaggcggcgtggcgaccggtagcagcagggtgactacctagctcgcctatgtgggtcgccctagacagtcgtgctggcttcgctagcggtcgcgaccttgatatcgaggagcttgcccgggtaagtgcattcgatcaccctctcttcgttccctttcccaggctcaacacactaatcataggacggacggatgtagctcgccataaccaacaatggcggtggcgcgggcggttgatgcatgaacaaagaccgaaaaataatag

SEQ ID NO: 59160 - DNA, 473 bp, Zea Mays
gttgaatgcaagggcagtgttaataccttgattcgatgtgctgaacgccctggccacggcagcgagcacggtcacggcggcactccgacgtcgttgacgaattcgttggacgccagcccccaattccccgcagagagctcggaaacgccaacagtggactaaccgaagcacctagggtcgattaatggctgcggtagcggggtattttcgatatgcgcgctcggcggtaatggcggcttgaagatttgcgcggctgggaaaatgtagaggagcagcgatgaggagggaaggcgcaggggaaacacgatgcccgatttgtatagcccaggggactggagttcgtgctgaccaaaggatgcggcagcacgcttcgttgcaacggatccccgaagaagccgcgacggatacgggtagtgcgcgaggtctgttgaagtcgtagggagaggaggcaacagcacaccgggtcaatccat

SEQ ID NO: 59161 - DNA, 549 bp, Zea Mays
ctcccgccgctcggagcgctgaagggtctattgtagtgccgaaggtgcctacagtcgggccaaccgaagccaaagatgatgcggccaaagagccaaaattggaaaaaatagtgataatgctagaaattctgagcccaccagcaaaggcagaattgccaaaagtgccaaaggctcctgccgcaactcccaagagaaggaggatggcagcgtgctagatgctgtcatggagaccacaaaagccttgacccctgctcctactaagaaagttgtcgaagctgtcaaagtacaggccgaagccgaagctgggccttcagtgcccattgagacgaaggctgtcgcacctaaggataaagctgagcaacaaactccagataccggcatggcagcggggcaagatatgatagaaaaagctaaatctcctgcccccgaagctccggctgaagatgttgattacattattcgacatgctttggggaaaaagttatccaaagaagaaattttagaagccagacactacgctcagaaactaaaatatccgaagggggcctt

SEQ ID NO: 59162 - DNA, 370 bp, Zea Mays
gagaaatcccggaatccaccgtcagatcgatgcaccatcgggtgattcctctcacaatcgaagatgggatgccagaggatgtgcgaaatggaagccaattcgatggtgagttctactttattgctaaatgcaaattatttcagaagctgttcagtctgtattgccattgtgttcatgtatttaaaggaacctgataatttatagcattccttattataaatctctagctggtaactgcaacagcggcgccatttgtttgttaaagtaaagtaatcggtctgcacttgcttgcgcgtcaggcaaggagtgggcggggcacttttttagctggtgatgtgaggtttgctggtggtggcctgaagcgacaggg

SEQ ID NO: 59163 - DNA, 504 bp, Zea Mays
cttagtggtatgtagttaccataagctagtatgatgtaaggaattctctagtctgtctagtatgatggctcttatgtcttcaagttgtgctgttcctagtgaaacagttcatcagaacatttgattattattatgcttatataaatgcttcgtctgttctcaggtttacctttttatgtgacatctgattgtacatttcaatgtccactgcattcagtttacaccatttcacttcatttctgccatgtgcacaaataatagaatgaacccagcaaacaatgccacatcttcgcagccgatgtcaaatagttcaattggtcagcaatttccccctgcacccccgttatggcctacggccttcatgcaccagcaacctatggattgcaacatgatgggaaacctgaattttcctaatcctgctcaaggtccaacaacaatgtgggctcccattcagacatgaaatactagttcccaatctaccatgattctagcctcacaatctgc

SEQ ID NO: 59164 - DNA, 669 bp, Zea Mays
gttttgaagccctttcgaggggccaaccttcgaatcccagatcagtattgggctcggggccctgaagtcctgaggtggttcgtcttagtcctgtcgagggccgagcctttgaacctctaaatagtatctatttttccttttttcctcccgaagcgacacgccgaggtagaatacgactctctctgattcgctgctccttttccgaaggtggtcgcccgaggcagatgacgcttctttctagttcggatgccgaggggagtatgaggcggtatagtcgagaggagagggcataccttttgaggcggagtgcggaacggtgctcggtgtgttttttcctcggaggggacatggtcatttattgcgacgagacgttctgcctgccaaccgaccgttcgtggcacgtgtgctcgtgggatccgaaacgactgtcgtccggctgcttttcaaatcgcaccttggtggctctgtccgtcctataaagctgaccgagagggagggcttcagaccattacctttgcagtctcaatcctttgccttcaaacaccgttttcaccttttgccaagagagctcttcgtcttcttttcacccctcggtttgttttgatggcagaaaagatcaccgtccttcctccccgcgactcatggtctatgtcttccatcaccgatgcg

SEQ ID NO: 59165 - DNA, 314 bp, Zea Mays
cggggttcttgggaacaaccaatcggtctccaaaccatagaatccctttgttgtcctgacggaaacatttgtatttatccaccttctgttcgatcatttccttaatgacttgaacacccttgtcaccaatctgtgccatgactatttgctaatgtaaggtgggctccactgaaacataacttaaagcaccagaggaaacaacttctatgttcagtctgcacaactcatcacatagggtggtgatttttgcatccatattcatacagttgcactgggctttcctgcttaaggcatctgccacaacattggctttg

SEQ ID NO: 59166 - DNA, 985 bp, Zea Mays
ggtggataaattgaccaagtggattgaggccaagccaatcaccaaactcaaatcatcgaaagccaccattttcttccgcgacattgtctactgcttcaaggtacccaactccatcattactgacaacgggacctaatttactagggagccgttccttcagttctgcgatgacttcaacatttgagtcgattgggtagtagttgctcaccccaagtcaaatggtcaggtcgagcgggcgtacggcttgatcctgtatggccccaagccgcagattttttacaggctcgaaagattcaccggacagtgggcagtcgagctacatgtagtactctggagtctaggaaccacaccatctagagcaaccggttgcacaccattcttcttgacattcgtcatagaagttgtgctccccgcggagttagaatatggctctccgaggactgaaggattcgacgacgagcgagcaatgaccgaagcacaactcgctattgacctgattgacgaagcgcacaacgaggtcgtgcttcgctccgccaaatatcaacaagatttacgtcactaccacaaccggcaggtgcaaggcaaatcgttcaatgtcgaagacctagtgttgcgaagggtgatgaccaccaaagataagcataagttctcgccgccatgggagggaccctacattatcgcccagaccctagcccgggagaataccacctcaaagacagtgacgacaacctactgaccaacgcatggaaaattaagaacctaagaagtttctacccgtaaggagcaagttgtgctcccctcgtctcagggcgaaagcaagcaggacctaccgaccaggtcgccatgtgtcgctctggggctggcaaacactctggtcacaacacacccaaaacacaacaaattattgagattatgatcaacactcacaatttacgggaagcaattcaggggcatcagacatttgtttcaagagttcattacaaag

SEQ ID NO: 59167 - DNA, 387 bp, Zea Mays
gacatatccgaggcccccgggagcgatttgtgacggtattccattggcgggaggaaatctagccctcggaccccatcgaacgggaccgagaccaggcaaatcacctgtggtacctttttgggtcacgtctctaaaccactagtcgactcctaccaaacggagctcgggcctccacttagattacctattaatagctccgtggaaacatcatgcttgttgcccaccgagggtagcatgatgtgctccccctcttcctcctcgtggagaggcgacgaagtggcataaaaacaaagaagtcaaggtaccccttgatcatcctttcgccctgtgcgaaggatcaggggctacacatgcaaaactatggtacgacgaataagttgaaagttc

SEQ ID NO: 59168 - DNA, 487 bp, Zea Mays
ggttcctcttagcacaagaatagttattcctaaggtaggggtgttttctccttaggattattttcttatgatttttcaaagttttctcagtttttcatgaataattgtgattacaatttcctctcactggactatggttcaatggatttttcttgtgaactacataacttaggcatgctaggaaaaatatggttgccctctggttttcatttttaattccttttcttaattttcctaagtttgagcataaacaagctttagtgaataaatcctcctcaaccttgtatactggggggtttattaattttaaacaggataaccactaggttagggtctccactatttttctcaaccctggtctaacaatatttctattttctctttattaatgaactttgggcagttttcttatttaattcaaaactctgtaaaacattacagaaactgtggggtttatgatttttgcctgatagtttatatttcacaa

SEQ ID NO: 59169 - DNA, 550 bp, Zea Mays
aaaaagggactcatcaaatgtgacatcacgagagatatatactctaccagaatccgggtcaagacacttgaaacccttgtgagaaagactatatccgaggaaggtgcactgttttgatcgaaactggagtttgtgattattatatggtcgtaggttgggccagcacgcacatccaaaagtacgaagaagagaataatctggttgtttttgaaacaggtgatgtagaggcgtgtcataagagagcactttgctggggatgcggttaattaaatatgtggctgagatgaaagcatccccccagaattttagtggcataaaggcatgtgcaaggagagcgagcccaacctcgacgatgtggcgatgcttacgctcagctacgccattctgctgatgcgtgtgagggcaggaaatatggtgtgtgatgccgacttgagcaaagaaaggatggagtttctgatactcaccccccaatctgtctgtatagtgatgatttttcggttaaagaggcgctcaacaagggattgaaattctcgaaacttcgaaaagactt

SEQ ID NO: 59170 - DNA, 546 bp, Zea Mays
cagggctgcaatccttgcatgtgcatcctctagctctaagtactctagagaggtccagggtagcactatccaggtcggtgttaagacctgccaccacaccaactagggtgttgaggcgatcttcttcagctccacctggaacaatgttgatctggctttctccacaaagacgtggaggaagatgcatgtactttgtgttgtgcagctgctgccggtaggtgttgctgagggaccacagagttcgcctagcagcatcgctgaccgaagcagcgtaggtggatagcgatgtaagagactcatgagctgacatagtcctgaaccctctatcacctgcatccctcaccctgacatgaatgcgagcgatgtagtagcaaacccgagggggctcgtacactcgccttgtctcatacaggggtcggacataggttcccaacgcatgcagaacatctcgcagcaggttagggaagtaccccgtctcgaacattgatgtataatgttcggtgacaggccataaccctacttagtgatcccgttgttcatcgttgg

SEQ ID NO: 59171 - DNA, 644 bp, Zea Mays
ctcctccctcacacccgtgcctcacagcatcgtggggccaccgtgtaagacccatcacccacctccgttcatagcgcaggttccagcggagttgttgacgaaaaatcagggcgagattcatctataccctcctctccctattcgggctcgcgcataaaaataggctaggctacattccctcccgtcgtccatcccaatgtagcgtcgggcacttgcgcatgccgtggagacaaaccctgggtggagcagagagaccgctgagggctcgatctgaaccatgtcgtcagcaagactatggtgaagcattaggttattcgcgggcgacctacaaagtttggcatggcctcgccgggcacaatcggggacctatgtgatggcaatttctcgccatcggctcggtgccgccgtgggccgcatcacgccataggcagcgatctgcgctacgtaactgtcggtgagtcctggacggccgcattcaccttttccccctctttcgatcgcgcttgggatcagcctgcatgctccgttgttccatggggtgagcaatcaacggcgagggcactatcgtctgcctcgtcgtgccgccgtgtgcggtagctggaggttggggaaggtgactggttccgtagagaggttgattcgtg

SEQ ID NO: 59172 - DNA, 477 bp, Zea Mays
ctcaggagaatctctgtcccgaccgaggtcctctcaccctaggacagcggtgttcgcctcgcccgagcctgcctcgggcaagaaggacaagctcagggcaagacccatctgaagtctgctgagggacaaccgcattcaatgcgtatacctaacccacgaagacctgcaggtgtacgggaacaacaagaccgcagtcttgtcaaagattcagcaactgtgattatgcgtgcgaccacagtacatgcacgccgtataccaacttcggatgggacgcataatacgacaggggcacacactagccctcgggcgcaaactctgtctcgcctgaagcggaactcaccctcggggcaaaactccgtctcgcccgagctcggctacctgctcccccacaaatcccacaggagaccactccatcaaccgtggcgcacgtcttcgaatctcggaacgagttcggtcgcagcctcagaaggacttctg

SEQ ID NO: 59173 - DNA, 272 bp, Zea Mays
cttttattttcccaataatattatcatgtagagggtttaaggttgtgtgttttactgtttttctttgttttacagtagtgctagtgctgtatatggctggtgggtggatttagtaatctgatatatttagtgcaatgatatgtagctatcctgcaatattcgagacaatttctcatctggagtaacagaacaaagatattctcttatgactaacgatgctctttctaagcttggaacagatcactgccactatattcacagttcaatgctac

SEQ ID NO: 59174 - DNA, 370 bp, Zea Mays
caaaggcaccagtcctcagctatcgcacaaagtggtcaaccggctggaaaaatgaatggttctatatgaagactggtgagaaaaacagggagaagctaatgacgatggtcatgagtccactgagtttaagctttggaatgacccggcccttatgtaatatgcaactggggtcaccctgtcagctggccgaagtggaatttagagtggtagctgagcaaatcagtaccagggacttagtagaagaatacttggcgaacagaacatatcctatgtcaagtggctggggaatgccgaagaagaaggaagtggggaagaagcatgaacttgttcgtcttgcttaccgtttcaaatttgaaaaacaattcaagaa

SEQ ID NO: 59175 - DNA, 793 bp, Zea Mays
aactcctaatcttggacacatctgtgggttgtttccaatttagtatttcacttattttaccggggtctactttgattcctccattggtgataatatgacctaggaaagcaacttcctttagccagaaatcacatttcgaaaattttgcatacaactaattgtcgcgaagcttctgtagaaccaatcttagatgatcttcatgtgcttcttcattctgagagtatactagtatgtcgtcaacgaataccaccacaaactggtcgaggtattccatgaatactttattcatcatgttcataaagtacgctggtgcattagtcagtccaaaagacatgactaaaaactcatatagtccatatcttgtagtgaaagctgttttaggtatatcttcagtctgaatttttaactgatgatagcctgatcttagatctatctttgagaatattatagctcctctcatctgatcaaacagatcttcaatctgaggtaacgggtagttgttcttaatcgttactttgttcaaacttctatagtccacacacattcttcttgaaccatctttcttgttcacaaatagaactggggctccccatggtgatgaactggggcgaataaaatcattttctaataattcttctatttgtttcttcagttcaattacatcttttacatccattcgataggctctttttgaaattggtgcggttccgggtaatagttcaatagaaaaccctatatcacgatcaggtggcatacctggtaattcctccggaaatacgtctaggtattcgca

SEQ ID NO: 59176 - DNA, 747 bp, Zea Mays
ggtggttctggaatgtctttggagccagggagcatgtagtctccctcacgaaggaacccacgggaaataagcgcatctaggtgaccttgatcgaccaaggagcagctctagaattccatgatcatccgaggacggagggcagcaacaaggactcgtggcaagcgaggggtggcggcgatggaacgcaagacgcgtggaacactagaggacgaatagggaggcgaagcggaggagtgcctctaccccaaattgagagtggttgacccaccaagacgcaatcgccagatcgaaggcacaccccgataagcaataagtgtcagaactaatgtatttcggaccttggtgaataggcccaggccgaatatgatgcctaccccgagaacggatgacacccgaatctgacctaggcactaggtgacaactacatgacatagccgaggctcgatagccatgcgaccattctcgggtaagacgactcatcccgccttgtgaattcacaagactatctcccctacaaggaaggaactagtgggcccatgccaacccccgaccacaagaggtctaatcaaggccaaaaatttggagttcgaaggccagccagcgaaaggttcgcggctactccaaaaactatagagcaacatgcgatcaggaggtggccacctagcggctaggaccctagcacacgagtgcaaagggcacttctaaatcattttcgagttttgtaaatgtctgactcatgatttatcg

SEQ ID NO: 59177 - DNA, 512 bp, Zea Mays
tctccaccaaatccaagtttaatgaagttgaagaaaattattcaccatgtcacttgttacacacattttttgttctaaactgttacattcttatttcttccttccaccgctcttccccgttgttgtccacaagttttgtcttacttgcatgcacccgaccatggccataccacacgtgttgtggccatggattcacccgccactggcaacatgtcgtgctcagttgccctagagtcgccatgcatgtgcccttccatgcatgccctgaagctgccccacatgccattgtcatgcccactcgcgcccacatgtgctcggtcttgaccacctaccccttcaaccttgcatcgaccgtactcaagtcggtagttgcatgcatccctagccattcgcactcaggacaccccctctcaccggtttctagggttgcgcccgttgatactcctgcacacacgagttctcaagagaagaaggtcacgtgaaccgaggaagaagtagtttttccattttgt

SEQ ID NO: 59178 - DNA, 579 bp, Zea Mays
ctctctctctctcttactcccttccttatcctctccatttctcccttccccatccagtcatccttgctggtagtggtggaggacaaaaagaaaataaggtatggcaaatctactagaaaaaaagaaaagagagaaaatgatgcacactaggaaccaagcgcacaacctcttattccaaacactgcaccacaaccaccatagaacacatgccttagtattaacggtggaagttataaaggttttaaaattgaggtatgacagctaccatactgagccatattgggtcctctgccattgctcgctagtattgatctctatttgtcgtcctcagcggctactctggtgtcatctcgtcatctcctaaactagatacgtggttcattaaccttattgcacgctttggtgctccaggttcggaggtaacatctttgaacactaactctaaccctagttcttgagttctctattcttgttcttgacttcttgttcgttattctttgtttctcacatcttcttctaccttgtgcaagtcatcaattgttgttaagccatcgaggaactagggttcagatctgtggt

SEQ ID NO: 59179 - DNA, 1040 bp, Zea Mays
ctcaaacgagggagaaggcgacatgagctgacctgaacggtgctggccacgacgagctcggttcttgcggtgcggctgaccgatttgggggaaaacagcgattctccagctgggggggctaatcggggatggcagtggttgctatagcttcgcaatttggagacggaggttggagctcggttgatttgagcgaagggagcgaggatgtggtgaatttatagccgcggtgagtcacacctgcggccatggtgataaccatcgccggtcttagctagcgatcaacggcgacgtcaagtgctacccttttcttacgacttgccacgtctctgctgtgacagtaatatggccgaatcgatatggcatggaagaatgacggtgaacggcgtcgatgatcggacacggcctagaggagggatggtcgtgaggcagccggagttagtgccctccaccacggcggtcttacccggagcaaaaagatcttcgcacggacatgctcaccacctgatcatcccgatcccgacgcagatcacggcgcggacaggtcgtcggcggcgaggaactgtcgtgctggcagtctaatccacatgggacactgtaccatggcgaatgctcttcagtcggtctgacagacagagtttgggcctcattttctctcaaatttctgtggcaacacatccagatctctgcagcaatattatagtgctataaactagctacaactcgactatagggattaaacttagttgagcactggatcaaggttgaatccaagtccaaagttagctctgttacactgcaattctgaatttcagagttcatcagcctgacagtccaactttgggcttaattatctccaatatcttcttaacaactatgcttacactcttaagcaaagttgttctcctttgttcgatctacaagtttgatgtggtgacctagggcaaaaaccctagaatttgaaagatacaagggctcaaagttgaagcaatttcactgaaattcagacttggagtgaaatcacaatttgtggtcttttttgc

SEQ ID NO: 59180 - DNA, 277 bp, Zea Mays
atgagagcacagttgaaggtgatagagcagggaagaagaggtctaaagcttggaatgacttcgaagaggtcaaagatttggtgaatgataagagggtaagggtctctgccatatgcatccactgtaaggctacattttctgctaaatcctctggtggcactggacatttgctacgccatgttgatacttgtgctgctaagaaagaaaaggaacgatctggtagaattcaatctgttcttaaatataatcctgatggttcactaatgcgttgggagta

SEQ ID NO: 59181 - DNA, 848 bp, Zea Mays
gatgtagtgcagcaggcgcctacaactaaagacgacgagttgctatcggtcacaaaggtcaacgaactagaggttggcaacagagtgaagaagtcgcctgcaactaaagaaccaagaaggctgttgtggacaaagtaaaaaatcgagcatacttttggttgaagtaatgaataaattgagtagaaaagcttatacaacctgttggttgcctaggacttctatagctgcctcgtagagttcgcgtggacattctaggtatattggtagaatgttcaaggcccccaatctgtctttgttcatgtggaggattgttgcgatttccaccatttaacttcatcacttcaatcaagcatgattggagtgttaagaacaccctcctctgagatgccaggtttgtagtcctcatattctttctcaacaatatgtatcaggtcatccaccatttctaggtgcttttctataggtcaaggaatgtaaagaagaagaaaaacccaagtccaaaatgtttatatctggtgagttagaaggttgatacatgatcctggtgtcaagaccagtttgggctaacaaaacttggaaatccacatcattaggttgcacatgactcgtagcgttatcatgttgtatccaaatcgttcgatgatgatcattcataggccaccttctaacaatagctgggagtagcttcgtgatgaagtaggacctcattatatcacgaccaacgttgatggatttggtaacaagggtacctttaggtttgttcctgttattcctttgggcaggctcctgaaaaatggaaatagttagtataaatacctatttttccaaaggtatgtctacactagaaa

SEQ ID NO: 59182 - DNA, 477 bp, Zea Mays
cttaatccccatgggtatagatttgagagaaatcatttccccatcaggtatggcgggtataggtttgggagggttaaacccgaacccgattacccatgggactgttttatccgatttaccacagcattgaggcttaaatgataaaacatgtactaagagatatttctatttactgtttgaccatatttgtgatatgtggacatgtggctactaaaagacactatttattaatgaaactacaaaatatgcatgctgaaatgctgaattgtgtcgtgtccatatgctgaaattctgaaatgctgaatagtcggttgggttcgggtccccatgggtatttggtacccggtcgggatgggtatgggaagattttcgtacccgaggtcgggttcggggatagaggcgggtctgtgctcatgggtacgggtctagggagttaatccccggtggggaattccccattgacatctctacccatta

SEQ ID NO: 59183 - DNA, 412 bp, Zea Mays
cgtacttgttgggattaaagcaatctggggcatagacttccgatcaaatggccctggatggatacgaggttatttaaatcttcgccgtagacctaagaaccaacggcctgcgttgcatacccgttcagttatggcttggtctaatcgaggccctcgattcaggatcgagtggctaagataagctagtacatcttcactgtgtcacttttgctaaaatgcccctgcgtttggtttaaatagaacccaccgtccacctccactgtttactgtgtcttaagaatttttaccccgagccccctgcactttctgaaatttgacgctcagtcgagagaagaataaaaatagagaaataaatatagaaattggtttttaatacaaaaataattctagaaacttggaaaattcatattta

SEQ ID NO: 59184 - DNA, 426 bp, Zea Mays
cttatatggaaaagcgcgcctgtgaaggggtatcagccatgatagaccatccgatctgaaacggctggctaggattacacctgtgttcgatcgaaccggtacgctacgtcgtccacaggatctagattctacggcgcagattttattacaacccgaagcctcccagatccgcccggtcggatcttgacggctccgtttccttgctcgaatcggtatgcccctgttctaatcgcaaccgttcaacccgcgatcgacggtcccagactcctcccctaaccaggctgtcaacacggcggcgccgccccgccaatcaacgacgaagtttgcgggccatgccccaaccccattttccggtgcaccataccacaattgcgactacctacgtgatgcggacaagaaggcgaactgggctatggctaacttacc

SEQ ID NO: 59185 - DNA, 407 bp, Zea Mays
tggggtcagcttcagcaagtgcaggcaccggcatttcctcagcagcaggaacagaaggaccagcatcctgatccaagctagacactcgacggagacgtctcttcttctgtttcttcccctcagcaggagaagcaggctgattggcttggcgagaacgctttgggcgaacactgtcagacttctgaatatccaaaagctttgctagcctctgggatgggcgctaccaccagtgtttcagcagggactgcatcagaagaatcttcagctaacatatccaacatggcacttatctctgcatcactcagattcaaaggcacctcaaaatgaacctgcctctcgtcgtcaggaatttcctcaagtgaggcaaccaaagcactaacttctttgggagagggtcgcactctaag

SEQ ID NO: 59186 - DNA, 395 bp, Zea Mays
cgaagaccatccaggtcggcgcagacccctcccagaccacccgcatcgcggggaatctgggggaaaaataggaactcgcgctcgttgccttcctccaagtaaatgccgacatgttcgcttgggagccgtcgcagatgcctgggatccccagggaggtgattgagcaccatctaaagatctacccggacgccaagccggtgagccagaagccacagagacagtctgtggagcgacatgacttcatccgtgaggaggtccggaagttgttgcatgctggcttcatcgaagaggttcatcaccccgtgtggctggccaacccagtcatcgtgccaaaggcaaacgggaagcttcggatgtgcatcgactacaccagcctgaataaggcatgtcccaag

SEQ ID NO: 59187 - DNA, 415 bp, Zea Mays
gatatttgaagtaggagacttagtataccttaaagtttcaccgatgagaggaatgaaaagatttaaggttaagggaaaattatctcctcgctatattggcccattcaagattttggaaagaaacgatgaagtagcgtactagttagagctacctgatagtttgtcgaatgtgcatgacgtatttcacgtgtcacaactcaagaagtgcttgagagtaccggaggaacaattacccatggaagaactgaatgttaatgaggatttgacttattcggagtaccctgtcagaattctggaaacatctcgcagaattacacggagtaaagtcattaacatgtgcaaagttcagtggagtcatcattcagaagatgaggccacttgggaaagagaagatgaactcagagcagaattcccc

SEQ ID NO: 59188 - DNA, 1057 bp, Zea Mays
aattattaatgctcctttatgctgtatcagatggtttttaaatctttttgtacgaaattccttgtttcttttaggtatttccatgtgcttcttcaacttgtggtcacttctatcatgcgatgtgtgttactcagttactcttccctgaaaacgaggccaaagcaactgagtatacagcaaagatagccagtggggcaaaatttgcatgtcccctccacaaatgtggcatctgcaagcatggggagaacaaagaggatagggagctacagtttgctgtctgtcggcggtgcccaaagtcataccacagaagatgcttgccaaggcattaaagactatttgcattgttcatatttgttttccatagtagtttgcattccaccaatagaaacttcaatatacgtctacctgtccacagggaaattgtctttgaggacttcactgagaatggtcaacatgttttccaaagggcgtgggatgaccttcttcccaacaatcgcatcttgatatattgcttgtatgatatgtttcctgctgttaaatagctctgctgatttgattattatccaacaaaattctgaatggaccttgttatttggccaggaagcatgatattaatccagaatatcgaaccgccacgagaaatcatattaagtttcctaaggaccctactgctctcaagaaacccctcaattgtgtcaatggaatgaacacaaagacattgaagatacgacgtcttgaggagcttccttctgcgccattgtctaatgttaaaagattttcttactcagtgaaaagttctactttaagcaatttgaggaataaaagaaggaaagtgattgtgcctgaagaaaaacctgtggttatgacaaaactccctgagattgacagtgacactgagatgaggcaagtctatatctctttgtttagtgctatttgtttaccttttcttccgaccactttgttcttcatatgcatttcttctgctatgaaataaagttttgatggtgtaggcttcccacaaggaaaataacaataatttcagtaaaatagaaactcc

SEQ ID NO: 59189 - DNA, 1306 bp, Zea Mays
gtgaaatcatgaatgcacaatactttccttataggcttaacgtttggtgctttcatatagtcaaacgtgtcagtattttttctagtaaactgcaaagttggtaactctatagttatttaatagtataattaataatatcggaacttaagagcacgctcttgaagacaggaaggtgaaatgaggtgttgtagatacttttgtgggccacaagagaaaatgtcggcccagctcccacaacaacagcaggatcttgttggttaggatcattgcttgagggataagttagttcagtttgtcaatgagacagtgagtttgttagattggatttttaggtgccaaccctatatcaagggctttgtcaaagagttaatctagcataacataaaccatgttccacctaataactgttcagagcctctaacgagggtgaacacactccctctttccgctagtcccaaccaatccattagccatatcatgattcatacatgattaaaagatctcaagaagtaaaggttgtttgtgcatgctaactgcaaaggaaattataatttaccttaaaaatacaagcctgtggttttacatcatttgggtccccgtcacggtcaacaacgttaaaagtaatcattattggaacttttgcagcagactggagaggaataccgctgtccaactgtataccccgtactagcttgtttgttgcagtaggtaggtagaggtcatcacctggaatagaaatcttctccagttccctgcgtgaaaattataatagaagttctcaaatcttttctttttgaaacattgcaataactctagaattaccttcttatacccgctctccgctcgtccttggggagagggaaaagaacaccagaaatagatgtgactttgtcaaagaaatcaaattctctttcaaacatgtcacgagcctctggagtaaaactctctataattttgtccttaacagctgggagcaaggactggaatgcactgccctggaaaaaaataatgaaacatgaataatatttgtgacaccaatactttggcctcctggggtcctgacatcctcttcagctaaaatatcatgttacaacgtatcaaaaagtcaacacaaaacatgtacgtatacacctaaagctaagttgagccacaacaatgcagtttaaaattcttcagattcagaaaacacaagtgtcatttcagcacatgatgaaccgtgccaggttgactgcctgtctattttgtttcttgacatctagaatgaatttgaaactgaatttttgtaaccatacttaactttatgcac

SEQ ID NO: 59190 - DNA, 372 bp, Zea Mays
gttttttatttctgagtcgtaacttcacttttccacctagaaccactcctctgcttccctgagatctcgatcctgctcgttccgccagcaagactgcgatggcaccgaagcggaagaggcagagcaccgttgctgcaatcatcccgcctatcgaccccaacagccagctgtcatttgcgggtaaccacatgtccatcatctcggaattcgacctccttcatcttgttgacgttggggttttgcttccaaaagagctctgctcttggtgaatttgccacggcatcaccgttccaacagaggatacccgtaaatctgtcgtttacgttccttttcttattcgtggtcttgctcttcccgtctccccctttttcc

SEQ ID NO: 59191 - DNA, 444 bp, Zea Mays
tagttttttcgtgaggtaaggatggtatgcaccaactaagtttatccgcttcaaatttcttgttttgaaaagttgtgaagtcaccatttgctttcttcccctctcccttctaaatctgagtttttctgtgcataccggttcagccgagttctatgtcggttcaaccgtaattctttaggttcttctctgaaaattttaggttcaactggaattttaaattcaggttcaaccgggaatttacaaagagttctctcttgaataccggttcaatcgagattagtgtcggttcaacctggatttgcacagtcgcccagaatcagccagatctgatttgtgggggctataaaaaccttcctcccccacttctaaaccctaaggctctcgaacctaaaccctgtgatggctgctctccttcatttcaaagtgcttccactttgatctcgc

SEQ ID NO: 59192 - DNA, 704 bp, Zea Mays
cgatgataatcgaagtaagtgatctttccaccatgagcaacacagaagcaatatgtatctgaaccgcaatatggacatgtcaactacaatgtgtactacaactggtaaaaatagaatacaccatgaagtcatgcaccaaccacaaatacacaactcaaagtttgaatatctgttttttaaaaacatcgtatgtttcgactcctttccaaagctccttcaactcttcaatcaagggttttaacatgacattgagtttctttccgggatagtccgagtcaggaatgattaagcaaagaaatataaattcatatttcatacaaagagaaggtggaaggttgtgtcgaataacaaagacgggccaacatgagtatgatgatgccatttgaccaaaacgtgtgaagccatcgatcgggaggctgattcgaacattcctcggtttagctgcaaagtctggatcaaacgtgtcgagagccttccaagcatccccatctgaagggtgcacgattagctcatcgttctcacggacaccttctttgtgccatcgcatgtgcatagcgggttttttagatagaaacaaccgttgcactcgaggagttagtggcaagtagcgaagctgcttatgtgcaacatctatcatcaccttgtcaccctcatcattaacaacttccacaagtttagattgtccacattttagacattttttc

SEQ ID NO: 59193 - DNA, 466 bp, Zea Mays
gtttccgtccactctatcagatgggatctggcctgggttccacgcggttataaagggtggggcgtcggggcttttgctccattcttgcggccgccggatccttgtgccaggatggccgagcgcatggcgcgttggggaagaagacctggggtgcgtcggatcggaaggaagtgccaagattggaacatgtgaagcgcttcgttcgtgatcgtggatcctggatctaaggactagtatgtcttgcatgcatggggatcctcggtcgtcggttgtagatccaattctcaagattgcataccggtttgatgaggtaacgatctaatctgggccgcccactacatatcttatggctaaggtttacccataccctttcaccgtgggaatttcgcttaaaagaccctagaagattacagaatcaacctgtcgtccacgcgcggttgaaaacagatacaaataggtccctaga

SEQ ID NO: 59194 - DNA, 344 bp, Zea Mays
tgccaaacgaaagaacatcttaagggttgggatgttgtgtataaggtatcgccgcacgggaggttacctattcctaacaatgaagattacaacttagacccggacacatatgatggagagttcttccaagaagatgggctagaagggcgatttgagatagacttaactgaagctattggaatggacgtagatattgaaatggttgttgatgaggaggatgatgaggtgcaaaatgataatgacttagtaatccttgaaggcaatgacattaatgacgaggttgcgtctttcgatggtgttgagattgaaatggttgatagtgatgatgagagttataatccggc

SEQ ID NO: 59195 - DNA, 858 bp, Zea Mays
tattgtgctcaattgctacgtgtaaaggcaaccatgatggattttttgtttgaattgaggaagcacctctcctatatgacatggggaacatcatgatgattgtaagcaacctagtccaacactgaagaaccaagcacattgatacaagcgtaacatcaatattgaaagtattggcaccaatgagtagtgagacgacatcttctgatgtattctctatgtcctaatgtataggtttggaacctaggttgcaaacctcatttgcgatagagatatcaacacttagtcaaaacctttgttgcatgtatgaacaatcagttatctacataggttttgattaagagaaaaatagaggtcatagtttaaagagaaattagatttcctaattcaccctctcttacgcatcaacgttccctactctagtgtttgccattgatagtcgtccgaagatccatataatatgctacagaatctcttaatttagcttgaatctagcatgcccatcaacctcacaacactaggcacacttgatccaaaccaaccgatatgtttaggccaccgtatgggaagacctgaagcatccacaattttgctctagaaccacatacataatatttttaaatcaatcacatagataggcactttgaatagagagtttacatcaaggttaaacgaaagagtatagaatacatcagaagaataaaataatatacttgttgaagcaattaagttcttacatcaagatcacgtagtggccaggtacaaaaatacataagcatctctataactaattcataatttataggacttgaatggctaataagtgcacatttgtgtctagtctacatacagaaaaggaac

SEQ ID NO: 59196 - DNA, 522 bp, Zea Mays
agactgagaaaatgaaggatgttgtgaatgtggttgggtttagcaaaactcctaagaatcgggctgagtcaggtagcaacaactagtgggcgaataagaagaataataagaagggtggaaagaacaggtttacacataataattagcataataatgataagagcaagatgttgtgcctgtttagtaagtcgtcaaaacacaagcaaaagaattgtgctggttttaagaagtggctgaagaacaaatgtataaataatgttgatgttgtttcatttatcgatgagttattcttagtaaaatttcaccatgacatggtggattgatttaggtgccaccgtgcacatttccaattcactgcaggcatttggttcgacgagaactataagaaatggggagcgaagactaagagtggctgatggggacgaagtggaagttcaagacatgagaagcttctccttggagttactgagtggcttccaacttaaattggatgatgttctttatgttcattgtttaaaaaac

SEQ ID NO: 59197 - DNA, 415 bp, Zea Mays
taaatctaatgtataaagaaataaggtaaaaactggtttgtagatcgattgttggttgatttaactgaccataccccttcatatatattggggaggctggctacattcctaggcgaaatccaatagtttcctgtgagctttttaggataaccccacaagggataaggactccagcctaaattaatttgttcgtggactatctgggctaacacatcggactttctagggcgtggattatccgggccacaaggtcgaatcgtccgaccatctaggtgccaaatctagtgctcaacaagatgttgtgatctaaccaagacaaggttaggaatcttttatcatgcttagaacttgaacataaagaatgattcacccacattctaaacatgtcccgattattggatctatcatctcaagc

SEQ ID NO: 59198 - DNA, 443 bp, Zea Mays
gggttaatctgcgatctctttcagtcactgtacaatggaatccctattcagtgcgcctgacagcctaatttgcagggcctagatctcaaatctttacataacaacttgctattctgcctgtaacaaagttgttgcccgatgatccagctacaatcttgctatagcaaccatagccaaacactcactagatcatggttgaattctagtccaaagattgctcaatctcactgttagtctgaattcagacctagggcagtctgatagcccaactttgggctcaatttactccaaattgttcatgtgaccaaggcttaatccctatagcaaagttgttctcctttagtagctttacaaacttgatgtgttgaccctaggtaaattcttaatatttttggatctacagagtcctaaagtcagctctatcccactattttcagacttaa

SEQ ID NO: 59199 - DNA, 607 bp, Zea Mays
cgacgagtaagcgtcgtctagctcatttagttgagccgacaagcatcacaagcatgcgagggtgctaaaacacgaataaggagggtgagtgcggacttgagagcggctagccccgacgggggtgattcacggcggcgcagatgaccaatttgggggaaaacccaaattctacggctatagtggctaatcggagctgagagttagtgtctcgggttcgtgataacttggcaaagcagagtggggcatcaatttataggagctttaggcggcggctccgaatttgggagaagagtggagcttatcttcctggtgaggcaatcaccaaggctcaccgtggagcgcatgcgttcacctagcgactgccactatctcggggatgccacgatcacggcaatgtggtgaatcaagcgactacgtgtcccttgctgcaatcacgacgagcaccgatggcgatattttaccgaccacgcggccaagtgggtacggcggtgactcagcttcggctaagaccttcttccccgagatctttttaaccctcacggttatctactcttcatgggcacgaatcgtgacatcggcgtgaatcgcagtgcgaaggtcactggcg

SEQ ID NO: 59200 - DNA, 539 bp, Zea Mays
ctatctcatttggaactgttggtgcctaagcccaaagctgaaggaaccttcaaacataagcttgcagatattctttatggtcttgtgtgcattggaataaggcctagggagtgactgacttcatctaaaatccttgagaacttgtaatcaacatgtctttaaacttttgccaggaggtcattgtctctagatggagggaggaataccatgtctgggcaacattcttgactaccagacgtgttgctgccatacgaagatattgtggcctcatagctcatgaagaactgctttgggtcagaatggccatcatacattagtaactggggtggtttgtagaaaggtggccaaggcagtgcctacaactccatagccacaggaagcatcatcatagagaaaatcattgtggttgagagcttcataccgaagattgtcttggttttggtcttcattccaagggtctctatgttggtactggtggtctggctactctgtgttctgcataatgttgcgcatttcttcggttggatcgtcgatcttct

SEQ ID NO: 59201 - DNA, 635 bp, Zea Mays
tccaccactctgcgacgggtgtcctagtatttggaactgtgattcaaggggtccgggcatacggcttggcttcccatactaaatcgtgcaggtcttgttgcatgaatcaaaggatggtagataccagacgatgggtcctatgggtgtgctactaacacttcaaagccgaagctgtgtgcaagtccaggtcccaatccagacgtaggtagtctcaaaccgtagagactacctcctgggggtcaggcaactaatttacccttaggtatactggtatccagcctcgacacgtcgagcctacatcctaggggggccaagtaccagggaggagttagtaacgctacacacagcgaggacaaatagcatacagataagtgatgtttgattagtagttctcaaaagtatcttacaaaaccaaagattattacatccgccttcaagcggaaccctagtcttatctctgcaggtacgagctactcgacatcggcagggtcgcgctggaagcgcgcggccactgtctccacggcgtcttggacgttctcccgggcggcgtcttctatggcggccaccggaccttcgagcaccggcgccaaggacatgtccgggtcgtgactcctgttgggggccttcgtcttccg

SEQ ID NO: 59202 - DNA, 385 bp, Zea Mays
aggaaattccacgttttttttaaagcatagctgattgaagttggctgcggcacttcgacctcaacctgccggccgaggccgagggtgcgatgccggagacctagcgctcgttccaacggcggcggggtgtttggtagtttagtttcggttgttattgaaatcgatgcttgattgatcgctttcttaatttcggttgcgctgcgttcgtcggctgcaatcgatctgatgagcacaaacagttgcggttttttcagtgggtagatagtatgcaagaaaatttctgctttccttttcaatttcagtatgaaagtgaaagttgtagattaatttctgagcgagttgcacatcttgttgcagccctgcggatgatgataacggatcggac

SEQ ID NO: 59203 - DNA, 410 bp, Zea Mays
ctggaggtagactgtgatcctctatccaaaatgatcttctacgatacactgtgtagagacataatccaagacatgtataacttagccaattgtgatcccttataaatagtcttgaccggaataaaatgagccacttgggtcagtctatccacaataacccatatagaatcgtatcctttcaagttgcgaggcaatccagtaatgaagtccataccaatctcttcccactttcactcgggtatctttagtgggtgcaatagtccaactagtctttggtgttcaaccttaactctttggcacacgtcgcacatagccacatgtgcagccacatctctcttcaaaccataccaccaatacttttgcttcaaatcttgatacatcttggtgcttccaggatggatagaataaat

SEQ ID NO: 59204 - DNA, 1043 bp, Zea Mays
tgaatataatacaacgatatagggtaatgctaatataaccaaaatattatgaagaatatatactgacagaatttcggggtggagttacttctgtgatagcaatattatcggtaatgggtgccttatgaaaaaataaataaaaacattcagatatatgagggttactataacatattgtaattataaggataatcgttgggaataaaataaaacaaacatttgatattggagttttgtcaaagattggagcatccatgaccgattcttcgataccaacgtttacaccggatacctgtatgggaaacatatgaagttggtgtatatcatcatgtgaactagtatgctctatttgatatagatatgtgtatatgcctacacctaagtttttatatgacaaaactactgacctagtcggatcctttaatatcagcaattggaatctgagtggggcgatcgtgatgctgattatcagaggttccaacaggaggcgtggatacagggtcatttattggtggcgatgtgcttgttggtagtttatctcgatctgcacaataacatgataaaattagttgctgttgatgtgaaccaaaaattaaaatgtatagttataaaataatggtaatgcatgaatattattaccaactagatccgcataataacatggtatgtaaaaaatgatagtttacatgtaaaataaaatgaaattcatcaaacgaggtatgagacatatttaaatctaatcatacaggaaaggtattggtgatgatgtaatacaactgaaggcataagtattatataatatgttgcataaattaatctataaaaaatataaaactaaatgaactttagttatgcattattggtgagctgaataatgtaagtgaaaaagaagcataactattagtacattcatgctgtggatcatgcttcgtcgcagcccttagaactttgtctatcatttctccaaatgcctcagatagttcaatctgcttggacacaagcatgtgatggctttgttgaagagaagcgcagtacttgtcaac

SEQ ID NO: 59205 - DNA, 650 bp, Zea Mays
ttaaaaactatagccttgcgtgacaatggtagcctcatcggctgaggtctgagggctgattcgttgttccctgactggatgatcctgttgccctgcgttgtgaatatgtactccctagcgggtatgtgtatttacactgtgtccgttcgccgtcccgcgtgtgttgtttatgtgcctccatgttcctgagtttggcaccagcctacagctgcatgtagtcgtagtccactagttatatactcctgtatggtatatggggtggggcccctgggatctgggggcctaggtcggttgccccgctcgccctgccccaggcacgggcctgagtgccaatgaaagcatgcaaataatgaagtgtttacagcaaagcgcatgtaccatgaggtcgatcgagtgctcattatacacgtcctccacgctctgccggaaggtgaatagcagaacgcgggcgcgcaaaaaaacacacatgcgagacgggttgcgagtactgctggagatagccttactgatcagtgacatggcggcgctcacagtcactaaagaccgatgcagcctcatcaacagctggttcgaccaactaatcggtaagccagttgatcggtcagccttattgataccaaccatgttaggaccatatcggtctataccaa

SEQ ID NO: 59206 - DNA, 695 bp, Zea Mays
gcagtttagttcaattcggtggttcggcaagcatcactgggttatgagaatactcaaacgagaaagaggggaggatgaactgaccggagttgtactggccgcggtgaggttggtttcacggtggcggaaacccgaattgggggaaatccagaattagagctcgctggtggagggtttggggtgcaggtaggtgcagaagctgcttgattacatgacggagctgagggtgcggtcaatttatagagcccgcaagcggtggccgcgaatttgggtgacgacgcgcgacggtcggagggacagggagttactggcgcgcgtgaactcgtgtctaccgtcgtggcgacctcactggcgatgattagatggctatagggagtcatggtgacgcgacggaggtaccagagcacgtggcgcaagatcggaagacgactgtcgccggcgagcttatcagctcaggccgtagtgcaaaaaggggagtacggcggctagccggggtgacatccagctcaacggcggcgaagatcttttgaccccgcgatgttatcgacttaccccgagtacgaatcggtacgccggcggcacgaatcttcgtgcagagaggtcgccggcggcgaggctgtcgcgctggcggtctgatctgattctggcactgtaccatggcgagcccctttcagtgcatctgacagtcagaattt

SEQ ID NO: 59207 - DNA, 403 bp, Zea Mays
tgctttagcactctttcatgcaatctttcttcttatgagttcaaaagtacaaacgtaccttcggttttacacgaatgatagctcaaagatacttcaaaggctaagacaaacgaagcttaaggccctccaaaaggtgttgtgtgcatggtattgttcacctatctataggggagggatacagcttcatgtggaattacatacatgcacacaaggtttacaatcatggattacaaatatcacatgggtatcatcatccttttattcttcattcttgccgctcaagtcctggaccccttcgtcattctatgaacgaagctctccctacttcaaggatggcttgtatcttcgtcatgcgtgtgttcagccaaagtttctttatgcgctgcttcggctgaagtctgtc

SEQ ID NO: 59208 - DNA, 572 bp, Zea Mays
cacgataacgctcgcactagtgactttcccccctctccggccgccagcgcgctctctccaaattggacgccaccgctgataaattctataaattgaatgatcaatcaagtctgctaggatattacgcacccagtacaccagctctcacctctgatcatccacgagagcctaccaattttgcatttcccccaaaactgttttccgcgccaccgtgaacggctcaccgtggccagctctctgcaggttagttcaagcctccctcaagcctcttgttgctcgtagacccctctgattgagcaagaccgcaccaaatcgtcatgaacacctcggattgtctctgactttcgccgtcatcgtggacaaagagattccggcctggattcgtgcaattaattgagggattagtgtcgccaagggtggaattaggtgtcggctaagctagggctctggtcgttgagtgtctcggccgatacaggttcgccggagggtgtgctcaccgacgttcaccatcggggagttgttgttgagaagaaacagaagtatagggacctaactgtgattgtcagagagac

SEQ ID NO: 59209 - DNA, 798 bp, Zea Mays
agagaatgagcttggtactgtataggattgtgagtaaattgtactccaaagtgcactcccagactgttttggactgcaactggttcaataactgaacatttgtttcagtgtagtgtgctctactttagagcactgtaacttgtgatctgtgtacttttggccttggaatgttatggcaaagtgaaaagacatacaaaggtgaataagtctcttgaagtaattatgccttggggttgtatcgaagttggattataagccccaagatgtccactgtcaggtgtgtagtgtaggtgtcgtttctgttaattgaagccagttttcagtgttgtcctcaccattttgtttggaccttgtaactattgatccctgcacccttggtcttgggcaattgtgtcaagttgatagtgctatggtcgggggacatgtttggctaactgacttgatttggtgccattgaagatgtggagcaagatgaggggtaaaactgtgggttcagtcgggctaaagtaattgggttcagagttagaaatatctgtaaaagatcctatcccactaccatctccaggtgattctggacaaactgcagataagggtaactcgatcttggaaaagggaggtaccataggatatttttcaccgagcagaagatgaggttgaaccatttgaaccctatccaagtggtgactcagctacctgtctgttgttttcatgtcaggcatgcaacaagctgatttctgttctctccttccccttcctgtgtttggagctggcgtggtctggagtaagtgtgtccacgtg

SEQ ID NO: 59210 - DNA, 898 bp, Zea Mays
gacgcatcgtttttgctggtctggtgtttggcactgataagatcatcaatcactatgatacggatcggcgacgatgctctctgcggcagtgtggatggtttgaggctaagggtcggacggtcagtgatctggcgcaggaattagggttctgcctgacaagttagacggttcgcgtctaatggccagatggtccacgcgtgcgcagaggcgacagagttcgctaacagcacatcgatcttgctctcggaagggatcccgtcgggaaggagaggttttagggtttatcttgggatcggcaggcctctaagacgcctctaaatgacgtagtgctggagaggtaaattttagaggaagaaaagtatgttactatctagtccttgggcaaaaggtaagaacagaagataaattgattattgattcgattgttggtgttttaattagtcgtaccccttcaaatatataaggacgaggtctatacgagattagagaagataacacgtaagaagatagaagtttaatcacataatctaatcctatcacggatccgccgtggctctagccggaccgtccggccatgcctggataccgcgccaaaaatctcatctttctatctatggcgccgtttccttctgaaacagatcaaaaatgtcatagtaaaaaatctcgtcccatccagttcactccacggatgagcatggctgccacaagcagatggaagagagcaacaaaaagaatgctgcaagtaagagaagggaagaatgtagcaggattgccaacaaaacagtagagaataggaagaaagcaacggaaagaaagcaaggaagagagcaacggatagtaaaaggaagggagaacggagagcaacactgcacacgggacacggccgttagcccgttac

SEQ ID NO: 59211 - DNA, 986 bp, Zea Mays
ggaggggtgacgtccaagaggaaggggaggggaagggggcggctgcaaaaatcccaaggggaaagagggggcggctagggttaggggagactaatgggccggatcaaggttcaaggcccaactcgctcatgtgacagcttccgaccccgtcgcaaacaactaaccaaagaaattctactgtcttacaggtgaatattttccacaaattccaaattcccaaagcgcatcacccgaatgaggaaaaagaacaaaaagaataacctccacttctcctctttgcaaaccgggtatcacactctacctcccttaaaaagaattcgacctcgaattctgacgcttctatcagaacgacaaaagggaaaaaaattaatgaatcaacaacacttacccacaacaaaaagttccggatatttctgccgcatcagctcctcaagttcccacgtagcctcgcactcaaactgattagtccataagaccttgacatacttaattgatctcttcctcaaaacacgctccgaggattccaagatacgcaccggacgacactccaaggtcagatcctgctgcaccgcaattggttccatctcaatctgatggttcggatcccgcaagaacttcctcagcatagagacatgaaaaactgggtgtacccctgccatggaatccggcaattgcaagtgataagccaagctgcccacctgggccaagatagtgaacggtccaatatatctcgggctaagcttttcggagacaccgaaccgaacaactcctttagtgggtgataccctgagaaggacttggtcacccactgcaaatcccaaatcccgcctcctcacatcagcataactcttctgacagctctgagcggccaaaatattctgacgaatttcctgaaccttttcagaagtctgctgtacccaatcaggaccaaccagggatctctctcccaaggtctcccagcacagaggggagacacaccgcctgcc

SEQ ID NO: 59212 - DNA, 432 bp, Zea Mays
cccgtgttctctgggaggtgtattgctcgatgatggatgattacaagaggtttttggaggtggaagatgactatggtatgagggtctaccattttcatacgggtttcctctcgtccttatatccgattgaagagggatcaccccacacaatctcgaagcacgatcctatctaccaacttccgttagaagagcaccacgtcctctgaatgttagttggtatttgtgaggcctacacgtatgctgcatgcgtgggacatgatcttgggaaccttcgctcccatccatgagtctcttttagtcgtctttagttgcaccctactgatgcccgttgggcgcctttcgggcgacccattgggggccttgtaggtgcctcatgaatgaaagcaatgccatggttacctgatggatatctatcccacacaagcccttgag

SEQ ID NO: 59213 - DNA, 733 bp, Zea Mays
gaatgtgctggcaggaatacaatacagcaaatcaccaaagagtgaacaaattactctgtccccccaccgccaaaatatggagccaagcgccaagccaactccacgcaccaaatggaagcttgcgcgcgagtgcgcgtcacatccatgtccatgttgggggtggtttgggccatggctgccttctgactgtgcctggggtaggggtttgcgtttgtccaacaaagtagtgaagtacaccagcagctgaggtcgagtagatagatttctgtgtctgcgccgcggtcagcctgcacgaaatgtgtacgcaaaaaataaaattcagtgaaaggagaaagcagaggtggattgggatcgagaaatagtgtcatacactcactccaggtcacatcacatcaggtcagtctcagacaccagggtcgtgtcgtgttgacacagattttccacaggtgaactgaaacatgcagcaggagaaggccgaaaggagccggtgccgcaaacccgcacaagaaagcttaatttacagccgcattacgtgaacattataatcgcatttttttacatataatagagtagttgcttcacctaatggaatagacctacgtgcgcgcgagcgcaatgacgatgatgtcgatgagcacgctagtctaggcctctaggggtgagacatggcggaggtggcagcggcagcggtgccgtgggagtgggactgcgacggcaggtcggataagacggc

SEQ ID NO: 59214 - DNA, 845 bp, Zea Mays
atccagggcggtctagttcaattgaattggtcgaggagcttgaggaggacttaaggatgctagaacaaaagagcagggagtacgaacagacctggaatacgctgatcgcggtgagggctcttttacggtggtggagaatagatttggggaaatgagaaattagcgagctgtggtgaacaattggaggcacgacttggtggcttggtgcgtgattaccctacggactcgacgatgtgctcaatttatagcgtccgcgagcggtggccggtgaattggacgaagacgcgcggcggccggagaggaagaggggcactggcgcaagcgcttagtggctttcaccgcggcggaccctccggcgatcactggatatgcctaacacgactaaccgcgacgtggtaagacgcctggggcatgtggcaaacgatcgacaggatgccaacgccggtgagcttatctgcgctggccgcaagacaagggggtacggcggccagccaccggagttatccccaagcgaagatctttttacctaggagcattatccggtcaccggtgagcacgaatcgcaacggcggcgtggatctaggcgcacgatcgccggcggtcaggtgcgctgcagcagcgatcttgttcagggcactgtaccattggaatcccctattcagtcagcctgacagatcaactttgagttcaattttctcctaaatttacatggcaacttgctgatcggctagtagcaaagttgttgtctaatgatccgtttacaaccttgctatagcaaccacaaccaaactctcactagatcatggttgaattccagttcaaagatggctcaatcacactgtcag

SEQ ID NO: 59215 - DNA, 644 bp, Zea Mays
acatcgagacgaccacagtgctgaagcttggtgaagggacatcttccactgccgaggcaagacagattgaattgccgaaggtgcctatagccgagccagccgaagccaaagaagaggcggccaaaaagccagagctagaaaaagcaatagtgctgccaaaaatcttgagcccaccggcagaagtagaattgtcgaaggttgcaaaggctcccgcaacaactcccaagaggaggagaatggctagcgtgcttgacgctgtcatggagtcaacaaaggcattaactcctgctcctgcaaaaaaggttgccgaagctgtggcggcttgtgctgaaaccaaagctaagccctcagctgacggaggcagagcctgctgcaactgagagagctaagcaaaaatctccagataccagcatggctctagaaaaggaggcgcccgagaaggctaaaactcctattcccgaagcaccgtccaaagattttgactttattattcgacatgcttcaggaaaaagactatctgaagaagaaattgcagaagccagacactacgcccgagaactaaaatacccgaagggggccttggtgtacaatggcacggaggaagatgacttcctatattgtctcccagacaataaggaaatatc

SEQ ID NO: 59216 - DNA, 714 bp, Zea Mays
gccaagtggtgtgtaggcgttggtcagataaatgggacagactgcgatggtcagtccgaatgatgaattctccatattgtaaataggggcgccactgctcgacagctagcaatatagcaagatactctttttcataagcggagagtcccaagtttcgagggctgagagctttactcacaaaagcaattggatgttcatgttgcagcaagacaacacctactcctttgccactagcatcagtttccacacaaaatggttgggaaaaatctgacaacgataataccggagctgactgcaaagctgatttgagagcttgaaaggcttcttcatgttcgctggtccacacatagagagtgtgtttccgaagcaaattagtcaagggcttgcttataacgccaaagtggcgaacaaattttcggtagtaaccagcgaggccgaggaaactacggagctccttcacattggtgggaggtggccaagacatgatggcatcaaccttactagggtcagtacaaataccagcagcactaataatgtgacccaggtaagacaactgctgttgggcaaaagaacacttagacagcttgattttctaatcatcttgttgtaacaaatccaatacccgacgagtatcaacagtgtgctgagtataagatgggctgtatatcaaaatataatcaaaaaaaccataacgcaccgacgcaacaagggttt

SEQ ID NO: 59217 - DNA, 360 bp, Zea Mays
cggttttgtcctagcttcgactgacataaagcgacttggttttgcaataggagcggccccctcaattagcttcagcacgtcagctgtttcaatgcgcctgggccgacatgttaaaactttaaccttttttgacctcgacgcactagaagtcgccgaggtagcagctttccaatttttcccttgtttccgcgaaggataatagtagtccgggtacacaaacccgataacatcgaacactctatttaatctctttttgccatgagccccgaaggcagttgtcatggcttcatcttcggcctttgaatatgctccaagcagcttgtcactagtcgcttctatggcatttcgccagtcatcatt

SEQ ID NO: 59218 - DNA, 302 bp, Zea Mays
gccatctttgagcttcaacaccctgcaatggttacaaagaacttttccaaacataagaatgactcaaactataagtcaaagtgtgcttagctcttttgggctcttctaggttctgactttgatacttctccaccttattgtgaccatgttctactgtttgagctaggatcttgagccctatgacatgaaccataaaccataggatatacctcaatggttccaagtcacgttcttatattgtggtcttcaatgcaccatgcttcttgacaacttcaccaaccttgacctcttggaagagcctc

SEQ ID NO: 59219 - DNA, 515 bp, Zea Mays
atagaattgccctatgtggtttggagcttgagaactcaacctagtcgagccctacatggaaatacgtcgttcttcatggtctatggttcgaaagcagtgctacccgctgacctcaagttcggggcgccaaggctagtcttcgaaagcatagctgaagcagaagcaaccatgctagaggatattgatgtactagagaaagagcgattgaacatagtaattcagtcagctagataccagcacaccttgaggcgctatcatgataaagctatacgacatggatcttttgtagtgggagacttggtccttcgctgaattctaacaggggaaggacgacacaagttgtcaccactatgggaagggccattcattgtatcgaaggtcacttgggcaggatcatatcggcttactcaaatggatggtacggaagtggggaattcatggaacatagagcatcttagaaagttttacccttagcaagacctcgaaagctatcgaagcaacattgtactctataa

SEQ ID NO: 59220 - DNA, 624 bp, Zea Mays
tttgagtttcatcttcaaaaacaaatgcgcaaacaaaacttcagcatgtcatacaatatacacatatacatatgtgtgcatatatatatattaattacttgtttaggcaaaatgcgtccaatatgtaacgcccactattcattttttaaggaaaaacattatagtattgccatgcatttactttaggagaatataactttaaaaagtgaggaacacatattaaaagacattttaattcttaatctttttggagaaacttttataaatctcaaaataagattttgggtgttacagagcaccatcaacgtttcgcacgaccgacgacatgaaaatgagataaggcgccgggaggagtatgaccgggatcacgtcgtactagcacggagttgcgccacctgagttgagtcggtggcaacctcaaccagtggcccattccggggacggtcgagacaacatactaccgattcccctccctgggaccgatgacatgaacaccggcaggaggacacgtgcggagtttccgcgctcactgcgcgtctctgggccatccagtggcctcccaacttcaaggtctccaacgtcgacaagtacgagcctaagcaggacccaggtggctggttggcc

SEQ ID NO: 59221 - DNA, 951 bp, Zea Mays
aaagattttgcctagggtcaatacatcaaaagtctagagctataatagaagtacaactttgcttaagggattaagcattgttgttatacaaagttgggagaaaactaagcccaaagttgtgatgtcagccagccttaagtctgaattttcagtaacagtgaagttggatgaacttagagctcgattttgagtaagatcctgcgactatttgatggtgaacattataacaaagttaaagctggtttgttaggctacaactttgaaatagtgagatgatcgagtcactgcatgaaatctggagcaaatctccttgccattcgctctgtcaggctgactgaagaaattcttgatggtatagtaaccgaaaagatctgctggttcagtgaacttgccgtcggcgacccccgcacgtggattcacgccgccgaggtgattcgtgctcactagtgcccggataacccctcggggtggaaagatcttcaccgctattgagcttatggcattgttccgccccggccatcgtgtccgcttggctcacggccgaatgcagataagttcaccggagtgagccgcctgccgctcggacgacacgtgcctagacgcagtacttcgtcgtagtgactcgctctagcacatcatgtcatcgccagtgagcttgccacgataattgccaccaatcgattgcgttaatgcccctccttctctccggccgccgcgcgtttccttcaaattagctgccaccgctcaagggccttataaattgagcacacccttggctccgttaggtatttcagcatccaatccacccgcttgtgcctccaattactcatcagagagcctcaatttgggatttcccccaaaacggtccgaaataccgcgcgtagtgacctcatcgtggctagctcgttccaggtctgttcatgctctccactcttctgttttagtgtcctt

SEQ ID NO: 59222 - DNA, 375 bp, Zea Mays
ctttcaaaattctccatgcaccctggcagcaacaagatgaccatgatctcagatccttatactggtggaccagaatgaagaggaaaattgccaagtacatatccgagtgtgacacctgccagaggatcaaagccagtcatttgaaggcagcaggccctttgcaaccccttcccataccatcttggaaatgggaggacatttgcatggactttatcgtgggattgcccaatacctccaggcaccatgattcaatttgggttattgtggacagattgaccaagaccactcatttcttaccagtgcataccacccacaagaccgagaggtatgcagaaatttatgttgatcaaatagtgcggttgcatggtattccaa

SEQ ID NO: 59223 - DNA, 441 bp, Zea Mays
atgtaatctaagactacaccatcgagtgtagtgggaaaaaagagatgatcccaaagaccttcgtacgaaggtaggatcaaagcaccaagtaaaggcgcctaagactcagaactaattcctaagagaatgcagggttagagagaaaaacaatggactaaaggtgccaaagacttagaagtcgttcctaagggaatgtagagtcagaaagaaaagcactaaagtaaaggtgtcgaagacacagaaatcgttcctaagggaatgaagagtaaaaaagaaaagcactagagtaaaggtgtcgaagactcagaagtcattcctaaggaaatgtagagtcagatcctgaagaccttcagatggaaggcgggatcagttatatttcgatgtatcttcgtcattacatctttggtaacatgtacttttgcatcatagcatacatttgca

SEQ ID NO: 59224 - DNA, 723 bp, Zea Mays
tcaattgctccgttagtagggtatagtagtcaccctaagtcaagtaagtgtgctgactggtaataaacagttcgagtgcccttgagaatgaaatcttttattgatgaggtatttatcgattacagaataaaatgctcccccgatagcttttgaaatcttgctaagggtaaaacttcctgagatgctctatattccatgaattccctatttccgtgccatccatttgagtaagcctatatgatcctggacgagtgaactctgctactacaaatggcccttcccatagtggtgataattttgccgtccttcccccgttagaattcgacgaaggaccaagtctcccactataaaggattgttgtcgtataaccttgtcatgatagcgcctcagggtttgctggtatctagctgactgaattactgtattcaatcgctcttcctccaatacgtcaatgtcctctaatctggtagcctctgcttcagctatgctttcaaagaccaaccttggtgccccaaacctgagatcagcaggtagcgctgcctccgaaccatagaccatgaagaaaggagtatttccatgcagagctcggctaggttgagttcttaagctccaaaccacatacgacaactctctgatccattttcccacaaacttttcattcttgtcaaaaactttctttcttagtgcttccagtatcattccattagccctttctacctgact

SEQ ID NO: 59225 - DNA, 522 bp, Zea Mays
tctttttgaatgttaataaattcaacacggtcccaaacacagcacaatctatattaatttcttcggctctttttgaaggaaatagattaattagatgcaaaccaaacacttggtgcaaaaccctaaatccctaaaccctaaaaccctaaaccaacacatccgtaaaggtgcgaggggccaagggtgtatttaaaaatgcaccaagggaagtgaaagtgtcattttgaaaaccgatacgtggtggaagggtttattttgtaaaattatcataactgcttgcacagtttgcaccaaagtgcttggtttatgtacatttgttctgtttccctttgtgaatgttaaaaattcatcgttctacaataacctcaagtacacgtacacatgcataatgtaaacaaattctatacatgtcagaatgctcgaaagtccttttttccttgacgagatgcctcacatttgaccgtgatgcggtaataagttacccaaaaccaagaatgatgacaacttagaataatgacgtcc

SEQ ID NO: 59226 - DNA, 778 bp, Zea Mays
ctcagcttaagcctgaacctgaacccgcttgtgcttgctcatgctgccacctaatctgccatttctcgctgggttcctgctccatctgaccatctatctcgctctccttatctgcatataacaattgcatctcatcctggtgtggctcatggccatggaggcaattgcatgcgacctttgcgtcgactaaacctgttgtcagtgaggcttagcctaaacctagccaccaatccacctactcctggctttgcaaagctgcagatccaccttctctgctgctttcggcacaagcaacgacacagatttgcaagtgacaccagctgcagctgatcctataagtttctttgctcatgacctggcaacacaacacttgagcaattgtacgtgtagaatctctactgattttgggcattccatacagtttcttattttctttttgagaaaagtcagttttacatctgccagcgatgggcttattctaggattgttgcactccattcatttttttataggaaagatagttgcacgtgtgattgtttagaacctaaatcagtttgatatggaatgcagttttgttggtttgacgttgtggaaaagggttagcttactctttagatagtatttgttttgttgtactgttacactttcttttacttataaaaaacttacttagatggtttcaaaatcttaaagccatgcataagttttttaagattcaaatactatttagctgcaaagtgaacttttctctttcattcttcgctttgaatagtaggcg

SEQ ID NO: 59227 - DNA, 468 bp, Zea Mays
aggtcactcggttgtcgcatctgagagcgaagacgtggtcaacagttattctgatgcgggcacggtttcatcatcactcggactctaattcaaacacgtaaatatcgacagtagtaagctcggccatcacccctgaagcggcgatacgatgcccgagttattcagttactattccgaatgaatcaactccacaaataagagatcgacctactatgaagcacagtaactagtaccagaggaggcaaagtcgttcttcattaagggaagtaacagtacttacaaatcaactcatcaagagttgataacttccctattgataccactatactactctacattactaatactactacattatttcactatactacttctaatctatactaatatttaaaaaccagtggcatttagccactagccttgttgccgcccctgccgtcgtcgtcgctgccgcccctgctgccgccg

SEQ ID NO: 59228 - DNA, 296 bp, Zea Mays
cacgtttactactacgcggtaaagagctacgacgtgacataattgaggtcgctggagtaccacggcgacaccggcggtccggccacgtcgcacggctacaggcgcaggtgataagcttcaccccgcgaccaaatccactcccccgtgagttctttttacttccccgttgatatccactgcgcgcctagcacgaatcatggcgaccgacgcgaatccgggcgcaagatcaccggtggtgaggggggtgaatatgaagatctttctgcagacactgtaccagcagacttcttattagg

SEQ ID NO: 59229 - DNA, 301 bp, Zea Mays
cagaactccagtgttacgtgtggctgcacgaggacgagacttttcaaattggtctgaacgaaaatggaagccattcacatcgtatcgaccaaaggttttgcaagtcaccgtcgcataagatagttgtctcaagtcctcgtgtatgttaggagtctttgtgcactacaaataatatacagttaaaatgactacctcacgtaaaaggctaaatgacatcaaggtaaggaatataaagagtttacatgctcccgaaaccactcaacaaaattaggtcttccttgcctcccatgtcgtcgcattg

SEQ ID NO: 59230 - DNA, 906 bp, Zea Mays
gccttcattacagccatcatccatcgtttcttttgaccccccacatttcctccaattgtcgaagcagtcttcttctcttcccagcttttttcaacccccttctcctttgactgcaataggctagtcagatccgaccctaggggacttagcatagcaaatgggaagggtttagtcattaccttcaatatttctgtaacacaagtggaggaagacgaagaggtgccgcaatcttctctagtacatcttgtaccttcgcctcggtaggagccaatattgaggactttcattttcgggagccgaatccttcggctccactgaaattttttgtcttttagtagcccgctgatctttttcaatggaccgtatggcttgccttttaaaatacttacaaccctcttttttttttgctccctggctccttcgtcaagcctttcgtaatctgggtattcgaagttaatagcgtccatcactcggttcagtcttcattttttccaggtaccgaaggcagctgtcattaattgatcttacttcttcgtataattactaaagatttcattgcacattgtctctatcatttccaaccattcagcacaagtgtcgaggaaagaatcatgaaacttaaaatggtatggcgactgaacgagctcaaagtttttcccttcttttttcatcggcatcccccacccaccaaacgttggaaaggttttgttagccaggtattcttgcaccaaataccgagtactaatatgctccgccacaactctaaattccactttggctaactggcagggggactcgagttgcatgttgcacaatggccatgtcatgccgaagctcagtctcaggggacttatcaccatactcataagcttctctctcttcttctcatcagctttcatgtaaaac

SEQ ID NO: 59231 - DNA, 707 bp, Zea Mays
gctcactagcatattgttccaccggtctccccatctgctttattgcatctgccttgctctgaatttccatcatcaccatcacattcccctttcgagagtatatattactcaaggtcttccagatttgtgatgcagtacgcatggcttccacccttcatgctaacagtagaagacatggatgccaataaccatgcaactatcacagagtttgtcgcatgccagattctccattctgcgtcgagcttatcaatcggctcaacacatgtctcctccaaataatgctccactcccttgcctcataggagtacacgcactcttctagaccagcttagataattcttactaacttctaacttcacatcattaggcacaagttccaacttcaactcagatgtacctgtattgtccttagcaccaatcaaccctaaccccatgagctcatggatcatacttctcatttcactcatcatctcactctttgtaatccctcttgaaccactaccatcaatttctgtcttcttcgcagcctcctcagtactcattttcacagaagcacagataagcagcagaagaagctagctccaactcctcaggtggataaatgcagccactccaacttcgatggacaaacagcagaacaagctggatgcagctccagctccgatggacagatgtcagagagtaagcaccccggttctcgactcctt

SEQ ID NO: 59232 - DNA, 690 bp, Zea Mays
gtgccaccatccaccaataccacctccatgtcccctaccgacaccaccaagtgagaagcagcggcccgcatctttcgttgtgcttatggatttctcaaatactgaaatagtgttggtttcatttattttgaatgttgtaatctcatttggaattaaagatatcatcctttagtgtggtaatgagaccaggaaggtgaccatattcagttcatcattcattcatcccttatcacgaaaccaaacaagagacaatgcagcttcaacccacttcaaccctgtaatcaaacaagaaattgggttcaacccgtcacttaaccaaacaaggaacggttcctacccaaccaacaaaaatgggtcggtttcgacccaacccacttcgttccaaaaccaaacgcactataaaagatggcgagggactctggtttatagtgcccaaaacattctcactcttaaaactgaggtcctgtttggtttcattctacctaacactagtacgaggtggttcggaacccatttacgctggcatttttcagaaccgtgagtggtagaaacctgtagaaataattatttttatagtcggaaataagaacagccagtgaaaatcgatttccactggcggtttagttaagacaaccgacagtactaatctttttctgaaaacataaacaaggttttaaaaaatagcagttc

SEQ ID NO: 59233 - DNA, 504 bp, Zea Mays
cgtggccccggcagcccgagcgacagtcgtgtagacggccaaccagccacctgggtccttcttaggcacgtacttgttgatgttggagaccttgaagttgggaggccaccggatggcccggagacgcggagtgagtgctgaaactccacaagtgtcctcctgccgatgttcgtgtcgttggtagtgggtcgtctcgatcatccccggaacaggcaactggttgaggctgtcgctgactcaactctggtggcgcaactcagggcaggtacgccgtgaacccggtcgtactcctcccggtgcctttatctcgttttcgtaccgtcgatcgcacgaagcgttgatggagctccgcgcgtcccgccggctgttgatggcatgacacaggtcgttcgcaggatgagcgaggggtaggagatgattggctggctgagtaagcagtcactgatagccttccgcgtctggagttcgcgggagaccgtcagctatctgtgccagtacccctcc

SEQ ID NO: 59234 - DNA, 820 bp, Zea Mays
cacggttttataccggattgatggaactagttgcgaacctgctgaaagaggatcttcaacatcatctaaaataaacattcaataatttgtgctcacgccttgtcttcttttcagtaatttgtgctatttcagtcatttatcgtttaatttcagtaattatcagcaaccacattaattgttagttgcatcgacgtcacgaatcttagcgcaggtggccatgacatttttttcccggacgcatggtttacattgtaggctttcgaattaattatccctggctttatgacattatggcgctttgttacctgtagttggttatgtgtattagacggaggctggaagtttgtaccaggacatacgatacaagcttccgttatctggaaaaaaagttccccagactgacttgtgctgtttggataaatatttatgaagcggtggtttttttccccgtcccagtgttactgatgcagaacggagtgcggcaagagtagtgtttcaggtccagaatttgctccagtggaaacaaacgtattgaagcgacagggagagaaaaaaaagaaaagaaaagaaaggaatgctgtattattgaaactctcaagtattagtacaatacaatctgtaacattctgttacatgagctactagatgtttaatgggaaggcattctgaagcctatcaacgtcacctttgcgtcatttctgatgctacccggagcatccaatcgtccgctagatcatcatccttggcgatgaaacttgcaaatttgcaatcaatcagactgcccgtgggccgtggcgcgtgctcatcagtcaagaggaat

SEQ ID NO: 59235 - DNA, 272 bp, Zea Mays
tgaaggatggacactaactaagtgggactcagtgtgcatggcttggaggcagtagattgaaccatggacgaaggcaagaaggacttcaaggtactagagcaaggaagaaggcaaagaggactaagatatctaaagccaaggtcaagaagaggttcttgcaagacgtcaagattgatcaacttgtgatgaggcatggtgcattatagaccacaatataagaacgtgacttgaagccattgaggtaattcatatggttttatggtttaagtcgt

SEQ ID NO: 59236 - DNA, 297 bp, Zea Mays
cacagcttattctgtgtctcggattctgtgcaggccaaataaaatccaagaatcaaggttgcaatggatttcctcgggtaacatgctggctgtggattataaaatctggtgaaaaccaaacgcggccttagattgagcacaggttgtcaatcaggatcaggtttgctgaaatccggcttacataatttgtccttctgtaaatatgtccgtgcctagatcatttccccctctgtctgtcggcagatggcagtggcatgctgatggaaaatgcagtgccttcatgggtgtggtccaaat

SEQ ID NO: 59237 - DNA, 1144 bp, Zea Mays
gccgaaggttgaaattgatgaagccgccgaagcatgtcagaaggcatttggtactgtctgcttctttattggtacgagagatttaattcaagagcacatagcattcagagtatggccgcttgtagagagctaggaaacgccgaaggagaccatcaccaagtctagcgaaggtgaactggtccggctgaagtatacattcagatatggggataaattcgatgaaccaaacgatgactggctaaaatgcatcgaagttacaagtgatgaactgcttggatcatattccaaggctgaagataatgcattatccatagccttcggaagtcggggaaagaagagattgaacagagtttttgatgctattggcttcgtctaccccgactaccgctacccgctgcgggggcaagggaagaagaggaaagctgctgctttggccgccccggctgaacctgtgccgaaggctgcgggcaaaaagatgaaggtacttacccaccggccacgttatattgaactggctacaatgccgaaggcaccttcggttgagctagttgaaacgaaggttgacaaagataaggttgaaaggtcaacaactgaagaggtgacaaagatgccagggattttaagtccttcatcaaaagcaacagcgctgaaggcacaaaagagttctgccataactcctaggagaaagaggatggtaaatgtattagatgtactagaaacaaccgactccataagtctcgctcccaaagggaagtttgccgaagctgacaaaatgcaacctaaagctgatactaagcaaatagatgttgaggctacaacaacccaggctaaaaccgaggcgaggccctcagtgtcttctgagacgaagcttgccccaaccgagcagggggccgaaggaataactccagatactaatatagcttttgagaaaagcacagccaaagaagtcgaatcccttacacctgaagcactctccgaaagttttgattatatagttagacatgcttcgggaaaaagactatccgtagaagaaatttctaaagccaaacattatgcccgggaattgcagtatccgaagggagccttggtatttaatggtacaaccgaggatgactttttgtaccacctcctggacaacaaagaa

SEQ ID NO: 59238 - DNA, 363 bp, Zea Mays
caggtctttgactattacataaacctcgacaacatgcaacagttccattttaatgatagctgtgccgccgtcgacaaagtggatctgactccggcgggggctgacgaaatgagacatcatcagcacttcgacgagaactgccagattgaccacaaggattatttcgagattaaagcggccgcactcgtcgacgacgcgtttgacatgcgacaggaggtggtggacgtgtgcgccgaggttgacatggacaccaagacggtggatgtgaatgccggcatcggcggcgtcgatatcaaggcgatgggcatgaacgccaacgtcgatgtcaatgtctccacaccacaaatggcagctgagtcatcg

SEQ ID NO: 59239 - DNA, 779 bp, Zea Mays
ctcgaattagaagtgaatttgctcaatttgtataagcacgaaatagctcgtttatagacacaaaatagtcagtttattcatttggtatagtactagtgtaatagttccactatgtctgcagtctcagtttcacggtgccaccgtctattgaaaggcccaccaccacagcaccaacgaaagcccaagtgaccaactaaagcggcccctcaggatatctccaacagctctactatcctatctcctatttaaaactccactccataaacaatgttgtctacagtacaaaactgtattttgcagtatcatatacatgatctgttgtacatatcttcatggcctcactcagcagagcgccagagcataggtcacaatacgtcacgtcaacactcatcagcacctagcgagtcctcaggaccaggaaccctaaaccactaaaacatacttaccgtcctcatccctaggcctagctgacacccgccgcatcatagagcctttcccttcttccccatctcagctgcatcccgcactacaaccacgggccacagaacacccggcatccctctcggcagacggtagccacacaccccaatccccatcctaagccacgtcctggcatcccaacaactgcatgtccatcgatgagctggagcaatgctcgacgactcgaagtcgccacctcctccgcccctccacgttgtgatatcctaccctaaatagattgtgcaatatcctagtccaacactgtcagggaccataattagggttacctccaagactcc

SEQ ID NO: 59240 - DNA, 794 bp, Zea Mays
gaactatgggcttgttactttccgcgaagtggctttgctttttgatgaggagtcttcaatggaatccagcaaacagagtgtacctttcgttactcagactctttgttcacaactttccaccatctagctttcacttgttataaatgacaagttgctaccatatttgggaatcagataatattatttctgtaataaaaatacaggattgcattgaattcatagttagattggtcatttcaggcgatcaaataccagatgtagagaagtccttgctttaaccacctcaaatttctttgttttagattgcaattactgtagcacatgagctggctcatcagtggtttggcaatcttgtaaccatggagtggtggacccacttgtggctaaatgaaggttttgctacatgggtaatcaattttagaacctaacatttcgatgtttcagttcgtaggctgccactatatattgagtaaatagaattttcttttaacagatgagtaatctagctgtaaattctttctttccgcaatggaatatctggacacaatttcttgatgacacaaccgctggtctcaaattggattcacttgaagagtctcaccctattgaggtaaccctcctttgggatttactatgagctatggccctgtccaatagtttgaaagttaactgtttttcatacgttctgctttttcatcgctttgtatacaactaaagacattacatgcttttaagtttgaccacaatctagtggtaaatgtttactgaggtccagcagaaatatacgagttcat

SEQ ID NO: 59241 - DNA, 496 bp, Zea Mays
atcacatccatacagtggcgaaagacacagtagggctaagtattgcggctttggtagttgtcatatctaaacttttgatagtcttatatgttagagtactcgttagggttttgattgtctcctgtgtatttaccctctcgcacttattgtaatgggcctggcccaactatcgagtgtatcaatacaacgccgcccaaccccactcaagggttagggtttcccacattatatcttctatgttagaataaaaccatgtctattgcagtgattgtggtgtttcaattagcatgtcttgagtacgattcctatagtgtgcgttatttccccatttttctaccagctactacaatgttcgattccagcatgcaccatttcctcaattttgtttcttttttctagtagctattagttatattatcatatcttatatttcttttgtccttcgccactgcaaccatacaatggataaggatcaagtgtcgtagttagcgtttac

SEQ ID NO: 59242 - DNA, 1231 bp, Zea Mays
caaacatgtagagccactataggagtacaactttgcttaagtgattaagcattgttgttatacaaaaagtggagataattagccctaaagtctggctgtcagactcctctgagactgaacattgactgacagtgagttctaaggaactttgggctcgattcttgtgcaaggagataagcaaatgggcaagattcctatagcaaaattgtagctggtatatagggctacaagtttgttacagatggattggcaagttcttgcacaaaaatccaagatcggcgttgcaaatatgtctgtcaggcgctctgaatctggttttcgatggtacagtgttcggatcagatcgccaggttctgttcatctcgctgccggtgatcccgcgccatgatcttcgtcgccgttgcgattcatgctctgtggggtgcagataactcataagggtaagaaatatcgcatcgtggatgaactcacgccactattccgctccggcctccgtactcgcctgagtcacgaccgcttcggataaactcaccggagttagccacctcgcgaccttgcaccatgttctttggtgctttaaccatgtcgcagtgagtcaccttagccacccgttcatcgccggtgagtttgccatggtgaacgccacgaattgcttgcgctagtaacctcttccctctccggccgccaccgcgccaactccaaatcacaagccaccgtctccgaatcctataagttgagcacaccctcggctccgctatgtaagtatgcacccaacacacccactcgtgccgccaattactcaccagagagcctcaatttgaaactttccccaattcggtctagagcaccacgcttcgtgagctcactgtggccagcgtgctacaggtctgttcatgccctctgctctcctgatgctcctcggcctgttcaattaagctagaccatgctagatcatcgggaacgcctctgttcatccatagtttgagctgtcaccgtggacagtgtgattaagagcttagatcatgcaattgatcgaggggaaatgattattaggtgttgaattaggagtcaaccaagttagagcactggtcgttgcatattccggccagaacgagcttgctggagctactgctccgccgctccacatcgtggacctgactttatgaaagaatagaaggggagggaccttgatgcgaatgtcagtgagacaaaaccatagtgttgcggactc

SEQ ID NO: 59243 - DNA, 1174 bp, Zea Mays
cttggaagatgttcctgatccacccgtgggcttcgtggtctcgtttttgcatttccacgagtgcggcctgacgatgcctcccaccccttgttggtggggcttctttaccactacaggatccagctacatcatctgaaccctaatggggttcaacacatgtccgtttttgttgccctgtgtgagggatacctcgggatgtcccccatttttttcctttggtgttactttttctcgatcgagttgctctgcaagcgaccgacgctcggacgctccggctagggtgatacaaatcgggtgcacaaccatccatctctgagaggcgcgatccaaggggtccatcccatggtggaggtggttacagagcgaagtcctagctaagtcttggcttggtggtgggactgtgacctgtaggtcctcgttggtgcatcctcctcctgtctgtcgatccttctaggtgtcttctcgtctagggcccatccttgcatccgcccgtgtcttcggagatccaagagtctcctagcctcgggttggcctcctccttttataggccaaggaggggggtcggccagcggtggcttccttaagagcgttctaccatggggtcaagccacgcgtgctcatgggacccagggtcgcctgactatctcgtattctttatggtggacggcgtgggcagcgtggggcccaagcaccatcattcgagctatgccgacccctggccttcgtagcctggggctcagcatggttcgtcgtgttgtgccctgctagatgtctccgcactcaggcctagtttcggtaggtcacgagtgcgccgcaggtcagggggtgcgcaggccataaatgtgtcgcagtttgagcggtttgtaagtcatgagtgctctgtggttcgaggggctcgtaggctaagagtggaaggtggaccggtgcctccgccgtggctcgacactagacacatttaatgcggtcgatcacttatgactggtcggtcttaggctaggcgatggatccactcgagtgggttcccttcggtacgcatggccctgctgttagactcctccacgcccgaccccgggctaagtgtcacggggctcgtctgggggcgggttcctccagggtagacgctacatgtctcctctagctgaccgataggccgcagttgccagcgaccttcttc

SEQ ID NO: 59244 - DNA, 498 bp, Zea Mays
ctcggtggccgtggaccggggtgtgggtgacgtgatgctgaccgttgatcggtccatgtgcggtcgcgattggttgtcgcgtatcgctttggcacgtttgatcccagccgtggatcgaggagtgagccggttagatcgaatctcgttactgtaaagcgatgaccgtatattgtggatcaaacagaacgtggcgcgcatcagctcgtttattagagcgacctaatctggggcgtctgttagagatcagacgaattagatttaaaatgtacttcgtcagatcatgactgtatatcttggattcgagagtcacgagagggtaccggttcgagatgaacagttctaatctagatcatccgggggtgatcggatggttaggaggacccgataccctttcagccgagcatatattcgaaagagccctcgtaaaactaccaaataaacacgcagtcctctcctagtgtaaactagttgcagttgtaccctcggtattcgcaaaac

SEQ ID NO: 59245 - DNA, 434 bp, Zea Mays
taagcaaatcggcttcatcccaccatatttcgaaaccaaatactactaaatagatcaaccttgcaaagatttggggtaggtagccaaaagtacaatgatatatcaagaagtagctgccccaggagagtatgtacagtagcaacttacaaaggaacccgagcctaaaaaaatgacgttacttcagcagatcaactgcaactatagccagcagtgaagtggtcaagtagaagcagccagaaacaacatcataccagaagcctagactttatgcttgtcccagagaaacctaaccgcaaagttacacatgaactgttgcgcacccaaatctgaagcaaggccaccaccgccagcccccgagctaggtcatagcctgattgtatcaatgattgacgcgatcagacactctgaaacttggataaaagagcgtgcttggg

SEQ ID NO: 59246 - DNA, 661 bp, Zea Mays
cgacgacggaggcgatggtgtaacccgactgaggctgatcccaatgggtatgacttagatgatgctgaccccaatgggtgtgatccggtcaaagctgaccccaatgggtgtaccgtccgcattgttgatggagatgaggaagaggaggatgaaatccctctagttcggaagaacagtcgaagctacatagccagcggggaaagcagtggtgttccttctccagctttgtctgccctcattggtctgcaagaattgtctctagcaaactttgatcagactcttgaagatatggtcctagaagatctgttgtcagagccggcggatggtggaatgatggatatttgtgctgatgtgcctgatgccgggctggaattatctcgagcagcatctcgtgcctcgtcgaccttatagcgcagtcttaagggtcaggaggctggtctggattgttctgctcccatggaagtggatgaaggtccttcagccttagaggtggctgttatagagagctcaaccctcaaggatggcgctagcgcttacccagcccccgagggtgtcgccggggatgatccggctcggatgggtagcgcgagctatgacccagcccccgagggtgtccgagttggttctccctctcacacttccatggatgttcacgtagggt

SEQ ID NO: 59247 - DNA, 432 bp, Zea Mays
cggaaatgggtgtgccttccactcttccctagatgaagaggacgtccgggaagaaggagctcagtgcggtggtgcgtactccctccatctcctttgagggcggagcgatcgagatgaccacttatggtacctccatggcctcgctaggcccaggagcatttgcttctctccgtcgagtgatccatgtccacacctgggtgggtgaggtggataatggagttcgtcatgctggaggagaggtattgatcgaccgagccacacacatcagggcgctcctaggaccgcccaattttggcgcgatcttgtgcgagatgaaaacccttcgaggttctcgcactgctggcaggatccttgttggtgttgttcgtggcttccttgcagctacctttggtgtccccagggaaggtttttcctggatgggtccgctatgcg

SEQ ID NO: 59248 - DNA, 424 bp, Zea Mays
tacaatttcactgtagttatgaaaactgatcagtcaatgatgatgaatcatacgagcctttttttacttcagcacgttctttgataggggacgaatttgcatgatgtgttatgaactgcaggcagaggtgagcagtgggagcgtttgcgtattaaagtgcactgcactacaatacttgtttgtggatgttgagcgtttactttagcttaatcaatcttatagttttttaattaattaatgttatctttgtcgtccatgcaagaggatctctattgtgtttcacaagatagaagccgccaagcacctgttcggttttgtgtagaacttcacgctccttcatatcctgatacttatatccttattcggatgatggtgcctagcaacaatgatagcctgccatggacttagacgactagccatagat

SEQ ID NO: 59249 - DNA, 1170 bp, Zea Mays
cagcttttggtttgcctccgttttctctaacacttgggttggacgatcacatatcactgctaagtccatgcatgccttgtcattgtctttcattttatcagggaaatcccatgcatgtatttataagggcttggcaaaagttactctcttgatgcatgacgttgatgttgtgcatcaaaattaatgacttagcataaggaagctcccacaagccacatatgtgagtccagttatgctcctcaccaaaaccttgataccttttcccattctcgtcaaggacaagtttcctatgctcttctataatttctatcccattacgtcgcttgggcggtcccttcgtgacgatggtgcccttcctagattcctttctctgccttctgaaggggtgattgaagggtagaaaacatctatggcaatcaaagtaacatatcttgccaccagcactaagacaaaaacaatctgtatctttagcacaataaggacacgtcaatctaccatgcacgctccatccagagaaaataacatacgccataaaaccatgaaccgagaacagatatgcaacacgaagattgaatttttgcttcttgaagcagtcataggcttccacacctttccataacttctttaactcttcaatcagtggttaaagcatcacattgaggcatacgccaggatgctcaggcccaggtataacaagacataggaacataaactcatatttcatgcaaagagcaggtggaaggttgtacggtatggcaatgacaggccaacatgaatacgacgcagcagtcatattgaacagcgtgaaaccatcaattgccaagtcgacacgaacatttcttgcatcgctggcaaaatttggatcaaagttgtcaagagccttccatgcatcaccatctgacgggtgcgccattaacccatcttttctgtccgtacaatctttatgccacctcatgtgcatagcggtcttcctcgagagaaacaaacgtttcactctaggagtgagaggcatgtactgaagctgtttatgtgcaacctttgtcaccaccttctcaccatcttcatttacaagctccacgtaccttgacttcccacattttaagcatttctgctctctgccatgttccttccaaaaaagcatacagttgtcctggcaaacatcaatcttct

SEQ ID NO: 59250 - DNA, 828 bp, Zea Mays
tcttgaatgaactccacttcttttgttgaagtcaaagaggcgattggtttgtactctatccactttgtaaatttattaatggcaacgagcacatgagtgtatcctccctgagctttcttgaatggcctgatcatatccagcccctagcatgcaaaaggccaggttacagggatagtttgcagatgttgggcgggtaagtgctgttcctttgataagaactagcacgcttcgcacttctggaataagtccgctgcatccttctttgctgttggccaatagaaacctgacctgaaagcctttcctaccaatgtctttgatgctgcgtgtattccacgtagccgagtgaacacatttcatgatcaacacaagcatcatgaagaacattacgagaagcattcttgacataagcatatataaagcacggttctttgtatcatgtgatgaatgagagctactagccataggcgccttccccttctccttaatgaagttgggaccttatggcttctttgtgtccttggctcccccatggaagccaagtccatccattatggatgtatgtctaccaatggtttaggcactcctagcaaattttattttttcacacacatctttgcaagttttaagttgagcatggagtttagcaatatcattattcaactttgaaatagtagaagcatgattaacataagcatcaatatcatgatctttacatctagtacaaattgatacatgctccaaagaagaacttagaaacattcaacttttatattctagcatttaaatcaacatttgtattctcaaggctagaaatagaagcatgacatg

SEQ ID NO: 59251 - DNA, 480 bp, Zea Mays
gttgggaggagctcggccatgggaacaagggagggctgagccatccacatggtgcaggtaaaatggagaaaaggagatggtgtgatggaggggggctgtagcacgccaacagagggggcgccatggcaaacctacaaccggaaggggcgaccatggaagaaaatctctatgcgcagatcagagggggaatgtgggggcgaggtcggccaccagggagatggctggtgtccagggtgccatggttggggcatcggcttggaggggaaaatagtggcagaggagatagggagctcctgtgccatggacaactatggctgggcacctggctggggagggaggagatagaagagaggcggccatgggagggacgccgaggtgagtgatagggaggagagggcgctgaccagccatggttgagggggaagaaacttggacgtggggagtgggaggagggagggagcaacagtggataaggccaag

SEQ ID NO: 59252 - DNA, 537 bp, Zea Mays
ataaattaaaatgcgctaaacgactctaaggctagtacgaaccggatgggaggaagttcaccggaattggtgcgataaagaccactggccataggatagccttgatccgcggtggagttaatcttcggggagaaattcgttgagcaccgatcgctctagcccccccaactccacacagtgacgcccacaggatatcaatgaagcacccccagcacatatgcgcccaaccaacgacaccgacgagctgctccactgaccctccccatcttccccttctctgttctcgcagcaacgacgatgtttccactgtggtctgtgtccgcggctttgtaacgacataccacgagttcggctttatacacctggcgcgaagacggtacggccggcgaggatatcggccaggcataacaacccgatccaggcgccacgtttgacgcgaagaagaaggtgagtccgacgccttggccccacatgtcattgccacggaatttgggtggggtgtcggcagtcactgccagatgggacccggccgaccac

SEQ ID NO: 59253 - DNA, 1010 bp, Zea Mays
gtttgggaggattaatgggccgaaacaccaattgcggcccaactaacccacgcgacagctcccgaccgcaacgcaagcgtcaaaccaaataaattctactgccctagttgtgaatgttttccacaaaaattccaaatccccaaaacaacaaccggatgagggaaaaaacaaaaagaacaacccccaacttctcttctttgcaacccgggtatcacactctacccctcttaaaaagaattcgacctcaaattctgacgcttctatcggaatgacaaaagaaaagattaataaatcaacaacgcttacccacaacgaaaagttccgggtacttctgccgcatcagctcctcaagttcccacgtagcctcgtgctcagactgattagtccataagaccttgacatacttaattgatctcttcctcagcacacgctccgagaattccaatatacgcaccggacgacactccagagtcagatcctgctgcaccgcaattggttccatctcaatctgatggtccggatcccgcaagaacttgctcaacatagagacatgaaaaaccgggtgtacccctgccatggaattcggcagtagcaaacgataagccaggctacccactcgggctaagatagtgaacggtccaatgtatctcgggctgagcttcccagagacaccgaaccgaacaactcccttagtgggtgataccctgagaaggacttggtcacccacagcaaattctagatcccgcctcctcacatcagcataactcttctgacgactctgagctgccaaaaatattctgacgaatttcccgaaccttttcagaagtttgctgaacccaatcaggaccaaccagggatctctctcccaaagtctcccaacacagaggagagatacatcgcctgccatacaaagcctcaaatggtgccatcttgatgctagcctgatagctgttgttataagcaaactttgccagtgcaagatgatcctcccagctacccttccatgacag

SEQ ID NO: 59254 - DNA, 884 bp, Zea Mays
gttagggtttgggtggtcggcggccaaggagagggctcattcctttgataccatattggaagggagagaataccccaaccctaacagggattggagaatgtatattaggaatagttgggcctatgcccattacaaaacacagttctaacacctttaaatggaaaaactattataatcaaactagtcaagggtgttttagactttgggtatgccattatgaaagtgacgacctctataaatatcccctaaatatattgttcatagatattgaatcaatacccaatagagcttattcttgcagttttggtgtttgagcaaatttgtttgcccaatatttggcaccaccatatgtgtgactgttaacacctacgaccatgggcacatggtcagactcgtgaagaaaacaacatgtagtggaacatagaatagtctactccacactaatggaaaccaaggctttgtccaaacataatcagaccaagataaagttgaagaacaaatgtttaaagaattgtaagatcaattacaaactaagcaaagagaaataaaaaaatgccaaagaagatcaagagaaaagtcattggagctaaaaaatgaagaggccaaagccactctatggtggctaaacgaagatattcataatattaaccaagacaacatatatgtcgatgacctaggttctatagcaaaagcttcgcaagaaaaatgctcccaacgatcgttcatctttgttgatccaaactcaacattataaacaagtttgcagtttgcacgatgactctaggctacaaatcaacatgctcccaacttatgatgtccaatctaatccaaaacaatttttatgagcttttaagaggtagtcatctctagaggaggtgaggaag

SEQ ID NO: 59255 - DNA, 276 bp, Zea Mays
tgaaaagcgtcaatagcgtttcttggaagggttgattggaccgctaaaatttcagctgcaaagtcataccttccccaacttccagactctgctgaacaaggcaattggccttgagagcaaaagaagagaactatctgaccataaaaggaagatgcaaggtcagtctagcagaaatattcactagaacaactcgtagggttctcagtttcgctctggaaatcagggtggaaacaactatcaaatgcaacgctctagacaataaggtcagagaagcaa

SEQ ID NO: 59256 - DNA, 655 bp, Zea Mays
tgagaatcgaggtaccaaggctaaggtgaagaagtaagtacttacatttagttgaggtgctaatcaagctcaagagacatcatgcaatgattgggcgatctttgttggaagaacgatgtgaagaaaggatggacattgattaagttggttttcaatgttatatgacttggagacaatctgatagggtaaagacaggcaaaaaaagggcttcgaaggaccaagtgaaggtgaacaaccaagaagatggcttgtggacctataccatggctagggtgaagaagagagtacttgcaagatgtcgacggactaatcagattgtgaagagtcatgttgtgctgaggatcacaacattagaagacgtgatttcaaaccactggtttaactcatatgcgatgtgatggttcaaatcataaggctcaaggtatgctagctcaagagaagtgaagaagcatggtcacaagtccaaaaataaaggtatcaaataagaagaaccaataaggacccactgattgtgcaaattttggtagaaaaggccagaagtgagaatcaagaaggaatggactttgggttattccaatgtttggataggttcttgatgaccatagaaacatattgaaactcaattgagtaatagggttgctcgaaatgggaaatt

SEQ ID NO: 59257 - DNA, 299 bp, Zea Mays
aaagagggagaagttgatgaccatggtcatgagtccactaagtttgagcttcggaatgacccgacccttatgaaacatgcaactggggtcaccctgtcagctggccgaagtagaatttagagtggtagctgagcagatcagtaccagggacttggtgcaagaatacttggcgaatagaacatattcgacatcaagtggctggggaatgccgaagaggaaagaagcggggaagaagcatgaatttgttcgtcttgcttaccgtttcaaatttgaaaaacaattcaagaagccttgcaaag

SEQ ID NO: 59258 - DNA, 300 bp, Zea Mays
ctggatccgtgcctggagttgatggatagcatcgcggggtaaaagatcatcaccccatgcactggacgccactccggtgactcaccgtcgtacccccctgctttgcggcttgagcagataagctcgccggtgaaccgccgtcttccggccttgtgccacgtacttgagtgtttccaccgtgtcaccgtgaatctttgctactctccgtggctcgccggagtaactgccacgacgttagacaccaagccgctgcaccagtgctcttcccctcctccgatcgtcgcgcgtcctctgcaaatt

SEQ ID NO: 59259 - DNA, 538 bp, Zea Mays
atctgctttaacaaacactccagcatcgtcagcataaagagaacagcgaagctttgccgctcttggcagaacccgccccagaaacccaacatctgccgccatctcaatcatcctctgtagcgggtccatagctaaaataaacaggaacggcgatagcggatccccttgatgaacgccacgcatgtgcctgattgcatttgtttgttggctattgattaagattctggaggaggaagagcccaaaattgtggcgatccaattcctccacttctgagaaaatcctaaagctcttaaaacctctaacaaatatgcccagttgacggagtcaaacgcttttgatatgtcgagcttgacaaaaagtgctggttgtttgctcttatgaagtttctgaataactttttgaacgtagaggaaattatcatgaattgaacgtttctgaatgaacgcgttttgggctgtggagacaatctcattcattcttggcgcgagtctatttgctaaaattttggttaaaattttcataaaactgttgatgaga

SEQ ID NO: 59260 - DNA, 397 bp, Zea Mays
cgacgtgattaactcttcgataatattttgtttctctaccttttgttttcaaagtctgcactagatcctccaaaggtcatgtttattacgtcatagacatctggttgcgaaaatcgtcttcgtctttaggtggtggaggggggagttgatgggacaggtgtattatttatgctggtgcctgcgagagggtagaatttattagtgtgagagctaagggaggtaattatgtgggtattatggatatagtggtttgatgtgttggtagcaaggggttattggtgttggactgttggtagcaagggggtattggtgttggattgttggtaggtgtggactatggcctttgttagttgttctggtgccattcttgccattgttttttggcctcctttgtgat

SEQ ID NO: 59261 - DNA, 951 bp, Zea Mays
agaagaccatatttccgaccttgcagaaacattcactaacatacgtgaagccagaccacgcttgaacccggagaaatgtatattcggagtccgataaggcaagatactcggttaccttgtatcacacagaggcatcgaagcaaatccaagcaagatacaggctataatggacatggctccaccacagtcgacatgagacatccaacggttgataggaagattagcagcgctgaatagatttatttcacggtccgctgagcgaagccttccattcctgaaaacgctgcacggagccaaggacttcgcctggggcccagagcaggttgcagccttcgagtccttaaaacagtatttatctgatctagcgacacttactagtccggatcctgcgctacccctcctatcctacatcgcagcatcacccagtgcagtcagcgctgccctagtacaagaaaggtgcaaagacagcaagacccagcaatgcccagtatattttgtctgcgaggtagtcaccagctccaagtgcaatatgacagagctagagaagatagcctgcgcggtcaccatggcttcgcgcaaactaaggcactacttcgaggcgcacagagtgcgggtcaccacagaccggggtcttggagacctattcagatatcctgaagcatcagctagaatagacaaatgggtagccaagctctctggatacaacgtcacattcgaaccaaggacaaaaataaaatcccaggtcttggctgagttcatagtagactagataggtccttcggaaccacaccagcatcgcatagaaaatatttggactatccactgcgatagtgcatggtgtcatgcgagagcaggcgctgcaatagttattacatcacccacaggccttaaatacagatatgccacgcgctccatttcgcacttgaatcagacgaatgcacgaacaatata

SEQ ID NO: 59262 - DNA, 764 bp, Zea Mays
gagaggcccctcggcctccagtgccagagcgccctccaaggcgccgaaggtacagccgtctgaagcagacgacgggccaacgaagaccatccaggtcagcgcagacccctcccagaccacccgcatcgtggggaatctaggagaaaaataggaactcacgctcgtcgccttccttcaagcaaatgccgacgtgttcgcttgggaaccgtcgcagatgcctgggatccctagggaggtgattgaacaccatctaaagatctacccagacgccaagctggtaagccagaagccacggagacagtctgtagagcgacaagacttcatctgtgaggaggtccggaagctgttgcactccggcttcatcgaagaggttcatcaccccgtgtggctggccaacccagtcatcgtgccaaaggcaaacgggaagcttcggatgtgcatcgactacaccagcctgaataaggcatgtcccaaggacccgtatccactgccacgtatagatcagatcgtggactctacctcggggtgcgaccttttgtccttcttggatgcctactccggtttccatcaaatcaggatgtctagggaggataggaagcataccgcttttgtgacggtggatgggctgtactgttatgttgtaatgccctacagtctaaaaaatgccttgccaacatttgttcgggcgatgagtaagacctttggggacctgattcgggacaaggtggaaatctacgtcgatgacatcgcggtcaagactagag

SEQ ID NO: 59263 - DNA, 541 bp, Zea Mays
ccctaataaatcttttcgaaggattataaggataaattagttatatttccttattattaaagcagctccaaaccgccagcaactaacctatccacgtcgttaaaaaatttcagatcattcgatcgtcaatcaacggagcgatacataatcaagtgctttcgttgtatccacgtcgctctatctattttaaatcgttcgatcgcagatcaatatctgtcgctccttcctccatctgtgtctgccattcgttgctcctagaagcatcgtgttgcgttttaaaaaaagaacatagaggagagcattctccggccgccggtttacccatgttgggcagcgaccaccgcgtcggcgaaggcgaggaagagataattcctccttcgtattccccattcaacctagagttctaggttttctctcttcttttctttcttttcgttcgccgctaacactgccgcctaagcctcacaccccgactgttgctgcactgcggcttggccttgccctcgatgcatcacttcgctcatcgtcatccttgtcttcg

SEQ ID NO: 59264 - DNA, 378 bp, Zea Mays
aattcggctaactagagcaacaatataggccgctatacatcatacacgtcggcttgcctattattatcgcaatccgagacacaacatatatataacaatctcttaacaaaatcgactcctacttaacagaagttggagaacacagtataaaacttagcaactatttcagacatcgcaactcaaaaacatgggttggagcagattaatcagcttttcctaatcattgctcaacttaaatttgttaacacacaagtcacctaaaatagcacattattgggggtctaacatagaggcattaacacaaggcataaaactccataagactacatttgctactgaaggacctaaagcacttatgtgcatatcttatcggattgt

SEQ ID NO: 59265 - DNA, 509 bp, Zea Mays
cgcgtgatgcggcaaccgcacggcctccccttcacagaagcagttgacgccatggggcttcgtgctgccgaattccccacatattctggggtcaactgaactgccatgcctgacaacaccgtgagttgcttcctgtatcctgtcccaaatttccctgggaattacgcttcttttattggggctatgtttttgcttgcttacttctttcttccgtaggattggtggtgcagagtctttgcttcggactgggtttttccacttcctatatgggagacgaattaaagtagtcagtcgtgctccattttgttgcccgttatgttttgcattgtccggaattcctcaatcatgtatgagtaggtttaaagtagggtttatggcagaccatgttgttagttggtttgccatttcatgaactctagatgggagaaacaacggagtttgatcatctgatgatcttctgcaggggcttgaaattggccttaaaggctccaagggagccccaatgccag

SEQ ID NO: 59266 - DNA, 396 bp, Zea Mays
tgaaagaagtccctatggagctgcaccaccttcatgtgaggaatggtgtgatcttggaggacaactctgaggagattctggcgacacccaccctgttatcagagtctcatgcctttgctactagagcttaatctttagtgccaccggtgccagtagcttaagtccctgctcctagaggtgatgaccctaatgattctggtgatggtggagacgatgatgatgatgcagaagaagaagaagaaaacaacgatgaagatgccaacgataaacaagaggacaactttgttggaatgtggcctgtcacagagcattacacctcaatgttcgagacgggacacttcccaaacttgttgcaggatgtgctgcatgtgctaggaacctatgtttgacctcttt

SEQ ID NO: 59267 - DNA, 298 bp, Zea Mays
gcccaagtcatgaaaatgtggtttacatagcccttttgctataatcccatctagggctccgtttgcctaaagggatttgaattagggtttgagcccttctctcctctttaggtgcatgatatggccaaggcatgacctctaagatgggttacacctacttaggatcttgacccccatgtttggtgtcttttgctcaaactaaaccacatgtgatgatgggttcaatagtgtaggcttcggtgaattccctaagtaacacctggggtgttacagcctcggccgtttgacatgatttggc

SEQ ID NO: 59268 - DNA, 292 bp, Zea Mays
ggatcatccgtaatactgtcttttcgctgtggtagatgttcggtcttaaagtccgaacagttttgtgaaagaccggaccatccggctttgagagccgaattgtccgtgaccaacgactcatgaactttgtgtgtattcatcatttaaactttatttaggattcacccgattctccatcggctctagcattacaggaatgaaacctttcttatctatacttatgaattgataatcaaaaaaatctactcatgtgagacatgtagcagtctcataagtccagagtacaggggca

SEQ ID NO: 59269 - DNA, 1152 bp, Zea Mays
ttccaacagagatttttttacggatccattgggaaacaatttaaacacaaccaacaaaatacacataaaagatcaaaccgacagagatgctaccacactctgcaggtcctctgggatggaccaatcggaaagagtcgccaaagctttaagttgcagatcagaaagccatttgttgaagaccttggcataatactcaagaatgttggaggacaacaactcaacctgttctgacctcaggagaccaagctcctttgtaattccaaatttgcctttattgacatatttaggagttgacacactctccaccccaacccctgcgacacgcctgctgcggtgagggagggcactacaagtaggggggtctggggcgacgcttcctcttctgcggcacaccaaggatagaatcgacgggctttgacatcctatcagcgaagcactaataaagcacatgaagaaaaaatcatctaaattgtgttgtcaaattggatccctcccggtctgagctcatctcaacagaccatgaagtttagatttgcacatataaccatatacatgacacaacttctagacaatgatttcacatacagaaaagagcatgcttacatccagtcagattttgactactgtgttgtacgttaatctctctgtttgagtaaagggcactgtttagataatctttgttaaaagaaaaggcgttcaccaagagcacatgaggattcataagtcgaacatgtttactcaatctttatttctttgtttcaatctcactaattcgtggatttatgcatgatcatattgcacatatatatatatctggtcccgtcctcgtgagccagcaaagactgatcgttcgctttcgacccggccgagtccactacgtgatgcttgacgccgcaccgggacaatcctcgtcgtggaccacggaacaccacgttttgtagcgttctggatctttccccaagcgagtcatgagttaacgggatcacggctaggcagcacaccaccatcgtttctagtggctgggcaggccagaggttgatgaaggagtgtgacagctcgcaatagcataattgcataaatatgcgtccggagacatagatgcctgtccatgatggatcgaactagcgttaggacattctactgcaacttaat

SEQ ID NO: 59270 - DNA, 386 bp, Zea Mays
ccggggaggaacaaggtcggaggtggggggagatataggtctggtggcgatttgaacttgaggagggggctcagcagccatggaagtggtaccctgttgctggcgtccatggtggaaagggggtgtctgcacttccctgtgcacaaacagggagaggcgcggccaaggcctggtgctggagctagctcgaccgtgagaagggcgccgagtgggggagaacagggggagatgagcaggacgcgtgctgctctgaagggagcgccgagctagagaaggatatggcatgggggagaagggagaggggtgggctgccatttatagagaagacgctctggacatgctagccaacattgaacacttggtgggtgcaatagtgtcgatattgg

SEQ ID NO: 59271 - DNA, 1227 bp, Zea Mays
ccctagggggttatctgtaaaaatatgcacacttttggacctaagtgcaaaaatcatgacattagggtacctcaagtcatatggttcacatatttggggatttgcaaaagaacccatgagatttgggcctaaatgcaaaaaggccacttttgtgatcatatagctaagtctgaaaatcagtgcatttggaccaactttagaaccctgtatcttccaaattataaggaatttgcctagggtcaacacatcaagtttgtagagctactataggataacaaatttgctataggcattatgccttggtgccatgagaaattttgagaaaatttgatccaaagtcgggctgtcaggtcactttaagtctgaactttcagtgatagtgagattggatgaacttagggctcaattttaagtaagattctgtgatttttgtgggtgcacaatataacaaagttagagctggtttatcaagcttcgacattgatgcagagtattggttgagtcaccaataaaatatggagcaaatttgatcccaagcatgctctgtcaggccaactgatgaagctttgcgatggtacagtatactgatcagatcgccagctcagagacctcaccgccggcgaccacgcgcgcggatttgtgctattgccgtgattcacgccgaattaaacgcggataatgatcacggggtgaaagatcttgccgcgagtgagctaggatgtactgtgttcttgatggttcatcagtgcaccccggcgacgtggccaagcagctatcaccgacgtgttcgccattcaccgtgagggcgccatgccttaggaagtttatcgcatcggtatgagctgtagtgaccatccagtgaccgccgtagttcagtcgctctgcggttgccacggtagatcgccgccgtgactcattcccctctcggccgctagagcaattcgtccaaattaaacgccaccgctcaagcacactataaattgagctcaccgacgggtccgtagggtaatcaagcactaatccaccaagccgtgcccccaattactcaccaacaagacccaatttcggtttccccccaaatcaatcccaagcatcgcacaatgtgatctcaccgtggtcagcgtgctccaggtctattcgtgctccctgctctcttatttcagcatccttaggttctcctgatgctttttcttgaccagtttgattgaattatgttgccctagatca

SEQ ID NO: 59272 - DNA, 853 bp, Zea Mays
tgttaggagaacaactttgtttaagggattaaacattgttgttatgaaaaattggagaaaaaggtgcccaaagtcgtgctgtcagactaacagtgggattgcatgaacttagagctcaattctaagcatgatccagtggggatctgattagtgatgctatagcaaaagtgaagatggtttgtagggctacaactttgatacagagtgttggtcgggtcactacacaaaatctggcacgaattgccctcaaaggagctctgtcagaccaactgaatggaattcaccatagtacagtaactgaagaagattccaagttcatcccccttcaccgccgacgaccgtcgcgccatgattcacgttggtcgttgtgattcgtgcgttgtgacttgtggataaaggtgagcgggtaaagatctgggcgcctagatcaacttgggtccggtcgcggctaagctccccgtaccacttgctcatcgatcgatcgggatagacctcgctgccgttggccgattaccgtcgtgcgccacgtgctaaagcgttagaccacatcgctgtgaatcgcgtcttgcatgcacggtgatcgccggtgtgctgccacggtgaaagccactaacccaagcaccagtgacctcccacccctccgaccgccacgcatctcaaacccaaattcaccggccaccgcttagcgatcctataaattgatggtcgggtctgttgcgccatgttatcacgaagccaacgcacccacacttgcctccagttgtccaccagagaccacgaattgctcacttcccccaaactgagtttccgccaccgtgaaagaatcctcaccgcggccagctcgattcaggtc

SEQ ID NO: 59273 - DNA, 290 bp, Zea Mays
ctgaggcaggggttctattagtagaagttggattgttgaaagaaagggttctgactgcagaagctgtggtcgctgactttgttttcaagaacattcagccactgaaagacagagcatatccggcctatctataccgaggcttggctgattcaacccgggtgaccaacagaagaattcctgctgtggacttggtgagccggctcgagatgatactcagaggcaaagtgtcgaacatcgacgctcctgttgcatactcggcctggaatttgcctccttcccaggcctttacc

SEQ ID NO: 59274 - DNA, 1045 bp, Zea Mays
atcaaatgttgtcaaatcctccttcagatttgatgtagcaatagtgcgatgtttgttcaccagatgaccactcgagctcaacatatgcagctaattcaacaactcaaccgccatcttccacacattgtgtaactgtcccaagctctatcgcatcaataggaaataaggatcgatatccagttgatgacatcacaaggcttttggtctgcaccctagttataagatatggtattaacaatcttcatacgaaaaaagtagccacaagccttgagatcgcaggacgccggttccatggaatcaaaattccataagattattgcggggtagaagtgacaacgatcgtccaaggatccgaggatgacatgctagacatccctgggcccaaaggtattgagacacctgtacatgctatcaagaatttcatcctttagccacgacgggatgtccaattggctgatccaccaatgtcatcgtcccatgcccaaaacccctaacgcaagagtcatcacatgcagatcctattgcgaaattgtcatcacctccttaaacttcacatgttgcccagtctattccttttcaacaaccgtggccagctcctcatctgttttctgacccatagtctccgccataagcatcgccattaagggctccacaaccttcaccccatacacatcctctatgtgacccatctactccactagcaccgccttcaaggaatccaccttctccacaggcaaagaatactaaattttctataccaaaattggtttccctgttccagaaaaagaagactaaaacgattgctggcatagtgagatttttgtcagggattacacggagtcgcatgacacatactgttgatttacccgagcatgagaagtctgcaaaaaaaggctgatataatgaacataaagataaagaagccaactaaagaggattataaaaatgtgcctacaaatatgtgtcgggcaaacccctacccacttggagaaattaagaaaggtcccggctggtattaaaaggttgcatgactggtatataaatg

SEQ ID NO: 59275 - DNA, 502 bp, Zea Mays
caccatagctaggatttggctgagatctggctcgaataagtgaccacacataaaataaaatggacaaacactcggtcgccaggtgtttgatgttggcaggcagaagtcaagcaggctctgccccccgtgcgctcccgtgcagttgatcggccaccaccgtgccccatgcctataaaggccgctcgagcactcagtcacccccttcattcctcactaagtccaacgcttaacttccctgagccattgcctaactccggtcagctctacgcgcgtcgcaaccgcctccgtgagccggccacaaggcctaccctctctggccatcctctgctcaatctagccccacaatcatcttccccgagggcccgtagaaccttcccgagcttgagccagagctctaccatgccagagaagggagattgacctcgccgaaatcctcacgcccgcaggtgaatgtggaccgagctccacagtttgtcgccgtccaattacttggaccagcaac

SEQ ID NO: 59276 - DNA, 637 bp, Zea Mays
cattttaaagttggtgccatttgactgattattactctaatgttatgtagatagtgttataataatggttactgttgcattcatatttcaaagtactttactattatcatgattttattgttgtgaacaacatggtattttttttaaagttagctttggagaactgcactaagccaagcaagcttaaatcatgaaacctatgcttgtagtttaaactccaaacattaaagcgctattcataacattagagtacatcatagctggtatttttgaatttcctgccttctaatcgttgctagctgctgcatggttgctaaatattaatgttttctctattactttgaacagacgtgtgaacttgatttgtgttgctgagtggtgcttgctagacattactggatttttaggtaaccactgaaacatcagcgccttctttctctaataaaaatctaatgttcaccatatattgcattttgacttactagggtatcctagaattggttatagatgcttgattcaataggatatctctcttttcgttatagctctatggcatgcatgatttatggtaaaatgcatatacagggacaaccataggttcaaatgttcaaaaacaaaaaacttgaaaagaagacca

SEQ ID NO: 59277 - DNA, 645 bp, Zea Mays
tcaaatttgcacttttggcccttcaatttagctcatatggacttgtttccttcaacttgcttttgttgtatcttgtgctcatgtccatatccaagtggttagtccagtatggtgtgttgagcatttaatcaccaaaataactaaaaatgacccaagggcacattttccctttcacccgagtcgaggaggaaaacttcaaatggtaaacttggtgttattctctcccaacatactatatgtgctttgttaaactcccaattggtgtcattaaacaaattgataagtactgaagatattatctatggagaggatctaatctaaatgataataagtcatctttagcttcatggaaaatggtagagacataaaaataaaggggattcatgaatttttaatataagatgccagaatgatgctttgctcatgaagcccattcacaaaattttcaacaaagaatgtatcgcttgggtcaatcgtgtttgggagaaatattatatcaatggcacccttgagctgaaaaactcaaagttttcgccatggtggaaaaagatttgttctttggaaacaatgtataaagattgtaccaagacatcaccagttgacggatctacaattttgctatggaaagaatagtggcatacccag

SEQ ID NO: 59278 - DNA, 1116 bp, Zea Mays
atgattgcacccggccttcataaatgatgcagctgtgccgcatgaagccaccagggcacagaaatcttcgtgcccggttataacttcatcaagggcttcaacttcatttccaatatgttcgaaggcccctgggatatctttggccgaagggttagtctcttcagaagcagctccaaccgagttaaatattcccttcaaccgattaatgcaccgagtggcaaagtcagagcacttgttccgaaggttctcaatagctttgtgtagcttcaaatttctttcaccttcagcttcgacctttgctttgggctcctttgtctcgtggtcaaagcgctgtgaactttcgttcaaaattgtccgagcttcatctagttcctcgctcaacttagtattctgagatcgtgcttctgcgagggagccttcggctgattgcagcaggacgtctttttcctttaaagaagcttcaagttccttgattttatcctgtaagcctttaattataactttgtttcttctatcctcattatcctgcttcattttcaaggccttgcttaataacatgctctacaaaacaagttaaaattagaacactcaatccactactaaggtaataaaaaatctagacaaaactctcaccttgaagttggaataaaataggctaccgataatatgttgccgtcgatagcaactaatgtcagtctccaacttcgggaatccaacactcttggatagggtgccaactatcttcgccccgctgcggtcacgaatgcatcctaagatttcctaatcgaccccgccgaagagcttggaccccggttggtaaccacaagatatagcaaattcttttaattccaacttgtcctcgttagaaagttcttggccgcctaggtgacgaagatcaaaacctttctcgtccgaaggagtattatcaattttctttcatttatctggcactgcggccattttttcctctatgactacacttgtctcctctgcaaccacatctgatacaagcctgtcaatttctgacaatgtggctgcaagttcttcatcttcggctttgccagtatcttcggcattcgcaggaattgttgctttcgtcgccgaagctcaaggcgg

SEQ ID NO: 59279 - DNA, 453 bp, Zea Mays
caactgcatacgggcctgggggcatgcagctgccaatgctttcctgccctgcactgccggagtctacaggactgcactgacacctcgtggggcaactcgcagcgcttttatctgttgctaatgctaatggcgcatcaagctgccattagagaattaaaagaggtcgtcgtttctacggtctcacgtgaaggtggtttcatgcgtacaacaataaggccaggccttgtgttttaagttgttcctaagattgttttccgtggtggatcgattcgttcgtgcgtgactgtgcgtgtaaagtccaaacaaatcaacctggaaccagaatgaacgtacgtagtactggttcatggaagaagttagaagtgcgcatagtttaagcagacgaaacaaaatcctaggtccaaaacacgcatggccgtcctctcaccacctcgtaagctatgcacgtactgc

SEQ ID NO: 59280 - DNA, 303 bp, Zea Mays
attgaattgtgatatttgattgtcttatgcttttgagtgcatctttgtttcgcctttgcatccattgggtgtagccccaaacttcaagttgacttgagtaacaatcagcttgaaggtccaaaatctattttctgttggtaccccccatgcagcccccgagcatcaagctaattaacataatcaggttgaggatcaagcaacttattccttcgagtgtcttggtgaggtaggcggcagcactcgagctcacgaagtggttggcaaggtgtacgataatgcagcccccgagctgacgaggcagtg

SEQ ID NO: 59281 - DNA, 528 bp, Zea Mays
tgggggctctggcttcataacaacttagcgaagctaatggtgcaatcaatttatagtctccgagagcggtcgctccgaattttggagaagagagcttgcggccggggagaaggggaactcactggcgcgagctaccgtggtggtcactggttaacgagctacgacagttactgctgagtccctgtggcttggaacaacatggtgaatcgactatggcgtggagcgatgacggtgaacggcgatttccatggcgacggccgtccggccacgtcgcggcgcaagtgggtacgatgactggtcagtaacagtgccctgacttcatccctgggcaagatcttttcaccctgtgtcattatctgcgcgccattgggcacgaatcacagcccggtaaggatcacggcgcgagatcaccggtggcggtgcactgaacctggtgatctgattcagttactgtaccatcgcaattttcctcagttgctctgacagagcgacttgtagtgcttggttcttcaatttttgtgtggcaac

SEQ ID NO: 59282 - DNA, 331 bp, Zea Mays
gtttatttagttgtttcttctttccattatataattgttttgccattgtcctctttgaacaactcaaatggccgcggaaatgcggattgagcagcaagaaaatctattcatttcacacgtctccatctcgttgagcatttaattatttttgggcaggaaagaacacataccagagatgaggttgttggtttaatttgattctaagtcctaatgaagaagattgtgagctccggcccggcggtgccgccctcggggttgtgcatgtagtacgtctcggagtccttggaaccgacgaggcggtcgaaatgcgcgcgcatgtaggtgagctcgc

SEQ ID NO: 59283 - DNA, 576 bp, Zea Mays
gtgcttttcccaccttcaccagaaaatttagagaagtctggtattctagttccgtgtggatatggcacgatgtcgaatcggtggctataaggcttccgatacgattgccctgtacctgacacactaacaccgagtttgaccctgaacatcccagctaccttgtctctgatcctctccgccatgtctggcgaccatccattgagtttgtgggtgcaaatctcaggttgcttgacatcactctgtcggctttcctcccaggggtgtttgaggtgtgtgttaggtgtcctattaatgtcaccagctcctgccctatacctctcaggctctctagtggccgaacaatatgcaaccctatgtccatgaggtggtatggcatgattataatgcgttgctggtggggcaccataatgttgctgcgatgaatgtgggaactatgtgtattgcgcaactctcggctctgcgtacacatatccggatggtctagcgtaagaggtcggatggtccgcgatcgggccaaacggtccgaaggtatatccagattgtccagccgtatatggtgctacctaggtggtctcg

SEQ ID NO: 59284 - DNA, 455 bp, Zea Mays
ttaacacaaaggatagttcacataagaatcttttaggtaatctattatttgaaaacacatttatttaaatcatgaaatgagttttcttaatttatccagaataggattttggagtgttacaaatcctacccccttaaaaataatctcgtcctcgagattagtaagaaagggatgtaaaaagccttatttatagtttagcttttagtttctaattagtttaagaataagaagtttcatgttaattagaaagtgattaggaaagcatgggtatcttctatgcctatccactttttaggcaatatgaggtttggttagagcaaggatagatgacggtaagaagtactgggtaaggaaagactacatcctggtgggtggatcatgactactttcgcgatccagttgactcttatatcctttgctgatgaggttaatctctttccttcttgggtattggt

SEQ ID NO: 59285 - DNA, 502 bp, Zea Mays
tatctcaaccgacccaaccaccaaggtgggagatattcctcttggaagggagtttgcacaagtttttgtgactcgcgtgctaaaaagggaaactactctaccacaaccatacataggtgtagagactatgggggatgccctttttatgcccgttacatggccaacgaacaaggtaattctacaacattgtattttatttatgtaattaatggaactagcttctaatgttttgtattctaaggttttgcaacagccggtaaatattttcttcccaccatatatagttgtgtataagtgtggagtataatttatttgtaaactacgcaacacttttctcttcattttcagtccttttcccttcattttcccttcactttcagctagcagtttctgatatttgaaactttgaatacatatgaacactccataaattttcagccagcattttccctatagaaactgaagcatacatggcatacatatcatatattcccttcaagaa

SEQ ID NO: 59286 - DNA, 681 bp, Zea Mays
gtcgagtaggaggactccccttcttcttgtcaccctcgcaggcctcccactgctcccgattgagatgtagcttcccaccgatggtgataggcccagagagggcatgtggttcgtcgccgtcgacgaccttgagacgaccaattgcttcttcgatcgtcatcgtggagaggtctagcagagactcgattgagcgagcgatctgcttgtacttctcgggaatgcaacgaaagagcttctcgacggctctctcctcatcgtaggtgtcgttgccgaactgcaccatcttctgcaacagagtgttgaggcgaagagcaaagtcatcaacatcctcacctggcttgaaggccaggttctcgcactccttgcgaagtgcctgcagtgtggtcttgcgggcacggtcgctgccgatgcgggtcgcagcgatgcgtcccatgcttccttggcagcccgcttctgcgaaagcgaaaactgcatctctggcaggacgcttctgggaaagcgaaaactgcatctagtgcccatcgatcctcgtagtagtcgacgacgccgtaccacactgcttcccacgtgacgaacctggagccgtaccctcatcaccgcggcccactcgacgtagttggtcttggtgagggtaggccacccaccgtcgggaccgatgtccctgacaacggcttgggcccc

SEQ ID NO: 59287 - DNA, 615 bp, Zea Mays
ggccggagaaaagcaccaccggcgacgtctaaggggcaggttgtcgtggcaccgcgcgagcacgcatgaagaggatggctgcacgacgggggagttgtggtggactggcgacgttggaagtgggggtgggggtgtatatttatatagagagggtagagggcttagggagctagttgcgcgcacgacgcgtggggcgttgcgcgacgagacgaggcaaaacgaggtggttatggctgcgtccgtgtcattagcgcgcgaaacggacgacagttggcgagacgaagctgacacgtggactcaagctagtaggatatgcaacaatgaggagcacacgtggccagagagaagaagttgcgcggcagagcgaggtaaggcggggttgatgggggtagacgaaggtagtgccgaggggtagacgaggtagatgtcgaggatcaccgtcgcgagcagcatgccgttcgcgagaagaagcggttcagtgatctcgcgaaaaagggcacgggatctaggacaagctcgacgagaggaagaaatatatatatatatatatatattatcgagtttccaaaattttatggtcctcgcaaatactaaattttaggtattactattaga

SEQ ID NO: 59288 - DNA, 332 bp, Zea Mays
ggtgtgacatgctcacgcttacttaacccagggtgaccactatgccctattaacggagcaatcggcttaagtcggcaatgacttaaggcggtgtgacatgctcacgcttactcaactcagggtgatcactagaccctaccaacggagcagtcggtttaagttagtaatgacgtaaatcggcacgacatgcttgcgactactcgattcaacataagcatgtttgcgattgctcgtcttagggcgatctctatgccccgtgaaataggaagaagtttcaaaaccatcacactacacttacttctgcaatcataacgactgttgaattcaaacaa

SEQ ID NO: 59289 - DNA, 638 bp, Zea Mays
atgatttctagacaaactagttagtccatgagtttatgttgacgatcaaccaccaaaattaattataggaaaaggttaaccctatttccctttcattaagcgtcttttttcacaggttttagtcaatcgtcagcttgtagtggaactagtgagctagaaaaggtgggtggtttgtggctcatgaactcacgatgtttgtctctacatggtggttggtgtgggtgatgctggtgttggggactatcacgtcgatgagctgacaggtggacccaaacacttgggggtaggtaagagctcatatgcacaacgaaacaaactggaggaactatagcttctcgttatccatgtcacatcctgccacagtacgggggtatttatatgtccatctggggtaggtggtacaaaatacggccctacccccggataccagctacattcggggaatatcccctcctacggggtaattatagcattgttcgtacagtaatctgcgcacaccagccaacacaccctcacgctacgatgacgggtgggcccttgtcgatgtcttctattgtgttggaggtgttcggggtcgacttgtggcctttgcccctaaggtctttgcatcttctctccctccagctgtgcctcgcctg

SEQ ID NO: 59290 - DNA, 907 bp, Zea Mays
ccacaaccagcaggcctgcttcaaccgttggaggtaccaacgcaaatatggacatatattgcaatggatttcgttgcggggttgccaaaagtccatggaaaatcagtcatattgacagtggtagaccggttctctaaatatgcacacttaattgcactaagtcacccgtacacagcagctacagtagcccgagcattttttgatggtatagtcagactacacggtttcccaagctcaatagtcagtgatcgggacccggtgtttataggacatgtttggaaggatctcttcaagctagcaggggtcacactgagaatgagtacaacatttcatccccaaacatatggtcagtctgaggtagtcaacaaaacaattgccatgtatctgaggtgcatcacaggggatcggcctagggcttgggtgaacttgctagcttgggcagagtattgctacaatacatcctaccattcagctctcaaaacaaccccattccgtgtagtttatggtagagatcctccaccactcatcccatatcagcttgggactgctgctacgcaagtcgtggaccagatgctccatgagcacgatctgttccttggggagctccgagacaggctactacaagctcaagaacatgcatgcaggttttatgatgggaagcaccgcgagctcgagttcagtgttgatgattgggtatggctccgtcttctacatcgacaggctcagtcaccagtcgaccgtcccaaaggaaaactgggaccacgctatgcaggacccttccgtgtgattgaaaaggtgggctttgtggcgtatagactcgaattgccaaaaggggcgcacatccacgatggctttcatgtgggactcctcaaaccctttcggtgcaccccacccttgctgcctccag

SEQ ID NO: 59291 - DNA, 656 bp, Zea Mays
gccccttgtcttattctacttggaatctacctccatagagtcccttttctaatttcatttccaaccctcctattcgagatggcagtccgggccatagagtgcgaccctcataagatgacatcgaggctttcatcgctccattctggggtctttccgaggctgagagataaacccactttgagatgcaaaccagtactgacgaggctgagatgaatgctgttctcatcatggtggcaggggaatcgtctgactctactcgcactgagtcaacgactgctacgattgggcagaaccttggtgaagacaaagaaattcagaaacctaaaggtgctcgtcacaagcgatcattgcgggtgaactatccagctgggcccgatggggagaaaaagtggaagaaacgactctggcggttatcatgcttagagcaagatgctggcccctcaacattactcctcagtgatggctcggtgagcaccaccctcgaggacaattttagaggttgtgaagatgctcgggttagcggttgtgtgcttgatgaggatgaggaggtggaggaagaagaaattcccttgattcgcaagaacagccgtcgtagtaggagcagtgacatcccaatgcaagccttatcaggacttgtcagccttctggggttgtcg

SEQ ID NO: 59292 - DNA, 769 bp, Zea Mays
acatatggaagcatactggtaaagccctgtaactaacatagtactccattgtttggcctgcagctatcaagttaagttccgttacttttttgccctcgatgaaaaataaaagttatcttactttcaacactcataacaacccccattagtcattacacttttagagacaagccatatgcatgagctgtgactataaatagttccatcaatcatattgttggactgtgaccacacatatgtgccaacagatgtcaaggcttgtagaaatatttgtattctggtaacctttgaacagctaggaagatcagcagccatgcaaaaaaaacaaagaaaaatcaaaacaaaaccctcaacccaagggagagagtgagagacatcctgaaggcattacttgaaaggtcaggaaaaggcacccaaaagctggttttttactgtaaagggacactgttgccgcaaactgggtctttacccatattttcaggaacgcgcagctagggcgcaatttccttttttgcgagaaccagagtttgagcactggtcggtagcctcacaagtcacaactggacaacttagcaccatgctacaagcatgtcctttccatagtgcataagtcacatgtatcacagtgatagccaggtcaaatagaagcaaacaatttacagagataaagccatattattgctaaggtcacatgaaatttgcactgtgtgccattgaatttgtgttaggtccagtaaatcataaaatcgtaagacagaattaaaaagca

SEQ ID NO: 59293 - DNA, 341 bp, Zea Mays
atcatagctaggaattttatatctcttgttgtattgataaaaatttccctagtgtctttgatattagttaaaaccgtctattcacccccctctagctagtgtcctagatcctacaatcgtgtctggttcgggcgagtcggagatgcgctcgggtgagtcatgactgcttgggcgagacgtgactgcctcgagcgagtcgtgactgtgttgtgcgggaactgatttccttaggcgagtcgtggcatcgggcgagctatggcctcaggcgagttatggccttgggtgcgctgctatctcgtgcgtgttgtggcctcggacgagttgtggcctcagacgagtcg

SEQ ID NO: 59294 - DNA, 529 bp, Zea Mays
ccagtgccgggcgacatggctggatcgaccgattgctcgccgagggacaaattccgccgtggtgcgtagtcgcgatggtctgtgtcataactacaggtaagaagctacccgattggtccgctatcgtatctagttcgcgtgggaccgattagttgtgagcttggagttctagctcgtcgggagggcctgcgccggcgatggtccaccgggcggatgtcggctgcgccgtagctctggaggattgcagggtagaagaagctagggagccatcggatccgagatggagggtggagattagatctgcgataacggttcgggtatggcgagcgtggattgctggatcgtgggcggacggccatgatcggatccctagtgtttaaagtaggcaccgttggatcttgatccgacgttgggtggcgcgtaccggttagatttataaaacatctaatctggaccgtacccttttaatccaacggcccaaatagcccgatacctcttcgccctggctttctttctaaagagcccctcg

SEQ ID NO: 59295 - DNA, 469 bp, Zea Mays
gttgtttccgagtcggaccttctccatcttgtctctgtcagagttcttcccctgaaggagctttgctctaggcggatctgtcatggggttactgtcccgactgaggatacccacgagtccttatttacattgcttttctcatccacggccttgctcttcctatttctcctttctttcgcggtctccttgatttctaccatctgaatctgactcatctgaatcccaactctattctgcaagtttctatttttgttcacttgtgcgaggcctgtcttggaattctgcctcattttggcttgtggaagtacttatatcattgtcggcctcgaatggccagggggcagcaccagctcgtgggtggcgcgagtttggagatgcgccgtgggaggaagacagagtatctcgacattccactcaaggacagtatcaaaggatggcgcttggagtggtttattgtagaaaatcatgg

SEQ ID NO: 59296 - DNA, 704 bp, Zea Mays
atatttagcaatttagagactaaaataaaatagagggactaaaaatttagctatagtacattcaaataacctctaactcatatagtcaagacagagaggtggattgagcatattgtaaatgtttaactggtgagttgaaggagcatattagatacaagacatgacatactctcatatggcaagatggagaagatcaagaggtatagtttggctacgaaggactagattgctagtgtaaaggccaagtcataggtttagttgcgaatggaccgtcggggtggtcaagctagagtaaagggtgtgacgccgatggaccggatacaatggtgaagagcaagcgaagctgtgatcaatggaccaataagttcataagaatgaagtggatcatatcatttatgtaagatcaagcaagatgctgatgtgtgttgattatcaagtggtttgatggagggtgacaaaagagcttcacgatacgagaaatgatcattgctcatcatttggtgaagatggaggttgtatggttgtgtagcattaccaatgatggagatgaaataggatacacaaggcaaaggtaaatttggagggtatatttcatttcatcggtctatggttgagttgaaaagtgcttgactaggtctatgataggtatacatactatcacgagaagcttttgtgagctaaatgattatataatgccactaagt

SEQ ID NO: 59297 - DNA, 401 bp, Zea Mays
ctaggtctcaaccctggaacatcttaaccttaaccttcttgttgtacggtttggcaactacgatcttgtccttcttgatctcccttagagacaccaagctcttgtcgatcacttcatcaatattgtccatcataagatcgaagtaatcaccaacaaatagatcattctgcctggcgaacctgatagcatttaagcttatctccacaggtgtcgagtactcgggaaccgggtacccaaaattggttcttcaaaaactaccaactccgtcgaccaactccgcgagacgaactggatgaccaactctccgatggccaactctgcaagaaggaccgaatgaccaactctccggtgatgaccaactctcggatgatgaccaactctcggataatgaccaactcttt

SEQ ID NO: 59298 - DNA, 946 bp, Zea Mays
gacaatttcatgctttttgctgactgtttttttgggtcatattgttattgaatcttttctgtaagacttattagctttggcatacatgtgtagattgtgaatttgcacacaaataaggtttcccgtatcctggggaaggtagagaacaatgagtggtttctgagaattgcactataccaaggagagaaaggcaacaagaaggttagaaaaattccttcagtagctgccaatgtcaatgatagcaaggaacctttatcagacccaacgctgctgtgttgtgctttcaagaagcatcggatatatctctttaggtatgatgtccaagtatatcttgataattctttattggctgctatatgattttgcaaaaactgttgaaaacttcactacccattttgtcggaatgattattcatgatttagactggtgatcctttgggggatggcactggtggacaatcaatctggggcacagaatttgaagatgaatttcacaatgggtagtagatcaaggattttgagcattgaagttactgggagactaattaaataaatgcaaacccagcataattccataagagtgatgccatttttttgagttgttgtgcttgtgttttgggctggacatagcacaaaatctctactggcattataacacaggttaacaataacaattatttgttttgactctggccaaaagcagaattccctgatttttgagtacaggcgcagaattcaaagtgcatcgcagaattccttacaatctgtagtatagttccattcaagtgagtgctttggtttataaatcccagagccagcggcaaactacacaacacagcgtcggcgcgacgagctggatcgcggatcgcggggtaattgcagcaaaggcgccatggatggaagtctttcctcaggaggatggaatccgcggctggcaggagggcgaa

SEQ ID NO: 59299 - DNA, 334 bp, Zea Mays
acccaccacgccaatgccatgtatgtgatttttttgacacagtagtacgataaattatgtattcttgtattacttcattgcacaacattatgtcacgtgaacgagggcatcacattcttccaaacgcaaatacgattgctttcccttggccgccgccgccgccaaagttggtggtgcctagtcacagtggacatcaagttgctacatttatacattggaaggctgttagctactgattggaggcagacgaggaaggaagaaggagcacggtatggagagggtggaaggaaacagaggcaggaactggagttatgttattttattacttgttcgt

SEQ ID NO: 59300 - DNA, 384 bp, Zea Mays
acagttcttgaagaaaaaaagtaagaaaatgcataagtggaatttaactcagtctggacaaaacatacctgaagattaggtcttagatttgttattcctttccctccctagaaaatatcagtaaaaatgctctgttagtgccttgaggaaattacggaggactaatcatagtgtatatagattctaatcaatagcaggtacagtgcaagcgtgaaatatgaaagacagaaaaccacaatgtgcaactaacaagcgctggacctaaatatcgagattagaatatgcagaacaccagtatgcacatttgcataggtgaagagtgtgaacctgattgcagacatgcaaataagaaaaatctggattacaagtaacaaggttcccaac

SEQ ID NO: 59301 - DNA, 328 bp, Zea Mays
aaactttcgagcaccctaccctagcgctcatgcgtggctggctcgtctcctctgctggagtcccctttactcctggaagacccacccgtctccctgtacaactacaacctcatagccagccatcattgtccgtccggtgctcccgattcagaggcagtgcagaaagacggccatcagaccgtcacatgccagctagctcttcctgccgcgctccgtggaatcgatggccgagagaacgcctttactcgaagtctgaaacggtggcacctatcctaggatcatggacacggacgtgaatcggtggaccgggcggcgggggctctcatgg

SEQ ID NO: 59302 - DNA, 565 bp, Zea Mays
gggaattgttcgccttgccggctggggtgagtgtaggtgcgggggagttgtgaagtcttttgaagaagacttcgattttgcgcacttgttgtgctagtccggctgcacccttaggcgacttttgtgcggagtgtcgcacgcgagggtagccagcgctgcccctcgcagtgactttgtgttggtcgaatgccgaagaccgtcgatgcggtcttttttcgacgtagatttttgcgggggatttttcgcgtgtatattacatggctctgcctcgttaaaaacctcaccccccaggaggaaaagagtgcgggccggaataaaactgttttgtgaattacaagggcgagctggccctaaggagtcaaacaaaaaatttgcgaagattatcaatgttccaagaatgctctaagtcttcgtcggatggcgttgtgagcctgtacgcgctgggggacgccttcgtcttgacgatgaaagggccctcccactttggctctagcttgccccgggactctgtccgtgctgttcgaacgagtacgaggtctccttcgctgaattccctcgggatgac

SEQ ID NO: 59303 - DNA, 713 bp, Zea Mays
ctccattgcactttacacattttgatcactttactcctcgtgacacgagtcaaggtatcaaggatcttgataggatactcagtataagtcaaatcattctgaacacgtagttcctccataggtagctgctcctcgggtaccctaagacacgtcttcaactgggatacatggaagacatcatgtacatccgcaagatggtcgggtaattccagttgataggcaacttcttccactctcttcaggatcaagaagggcccaataaagcgaggggacaactcccctttaactttaaacctcctcatacctcggatcggtgacacctttagatacacgtgatcaccctccttaaactctaacaatcttctccgggtattcacatagctcttctgtctcgactgtgcagttctcaagttctcccttatcaaccgtacttgttctcttgcctcttgaatcatttctggcccaaagaacctttttcaccagtttgatcctaatacaaaggagtcctgcattttctaccatataaagcctcaaacgggacatcttcaaactgaccttataactattattgtaagagaactccgcatagggcaaactcttatcccaactgtcaccatgtttaagagcataggctcttaacatatcttctagtacttggttggttctctcggtctgcccatcagtttgaggatggtaggccgagctgaaattca

SEQ ID NO: 59304 - DNA, 640 bp, Zea Mays
taccatcttagatcttaataaaactttaaccttacgtccctaagacctactataacatgtctatcacatatttaacacacacgttggacatggacgtgttttcatcacactcaccaatcaccaagtttaaaaaacatgatcatacatgcataatttttacgcacatatgcattgaacggggtgtccaaaaaaagcccaagaagtcttggctgagcaaccttgtgaggcagagcggacgaccaagtccctgccaagcaacctaacgaggtggagcgggcgagttcctgccaagcgatctcatcaaagactggtgtaagaaaaggccgacccaatgatacgagcccacgcccgcaggagaagacaagtcgtcacaaaactatgtttaggtctcgagtacggtgttgaaagatctaacggacgtcagacgacacctcaccacataccgtctcaagcgaaccaccactagaggataggaacagtcaatcccagttgaagggatctcaacatcgaaatgtctacattgactaggatatctggaaagatgtaacggatacaccataccgggtgtatgcctatgcacgacggcaagtaatgcatgcccaggacgacaggtgaagctacgatacgtgctaccatgccg

SEQ ID NO: 59305 - DNA, 282 bp, Zea Mays
aggatggctaatgttttggatgttgttttggaatcgatgaaaacgctaactcctgcttctgccgaagcttctggaagaaaattggagatgcaaggaaagtggttaatgcaagtgttgtttctattcatgttgaatcaaggtcttcggaagctgcgccagtaaagctggtggaagagagtcttctagaaaaaactatgtcatctgtccctggagcacctcctcagggtgacttgaattatattgttcgacatgcttcgcgaaagcagttatcagcagatcaaa

SEQ ID NO: 59306 - DNA, 498 bp, Zea Mays
gatttattagaatttttttagaaatattataaagtatcaaaaagagaaaagaagaaaaaaaagaaaacacactcacgtaccatccatatccataggccacacgcttgaacgaggaggccaggccgatccccttcccagcccatcccacggtccctctctctccgtgattgcatgacaagtggggtcatcatgtcagtgccctcatcttcaacccactgctcgttttctctatttggtaccgtgtgtcgttcattcgttcgggcagtcgccgctcacaggacgctgctgcactcgtcgattgctctaccccgccgcctcgcctaaccactgtggatgtgctgtaccgaccaaacccctacagaaccgccgcgaccctctccctctcactcgcgccttctcctctcccccactctttctctcatgtaacggctgccgacagccatcaatggagttcaatggccgtccgtcgcaactctctctctctcagcgtccctctgc

SEQ ID NO: 59307 - DNA, 1089 bp, Zea Mays
gttgcataggaaaaactggagggcggtcgagttgtgcttgtctgatttggcgacgagaattaaaaatgtctgtctcatttatgcggagggcgaatcggtggatgattgtgtgtgccaaaatgcgttatagtagtgatggcgttaagttaaacggtaatgtctcgagtacacgccacaatatggttgtatgtgagacaaggtaaaataaggtgtgctcgatatgaatgttcgatcgttgcaggtagaaattgtctttgcttgaatagagaggtggtgacatgccgaagtagtcatcgcttcctctatgtttataagtcgagtcaaaatgcggggtactagtggtacgctaggcaggcggtgtccaaataaattaacctgtcgatgtggtagctgtcgtgcgtgatttattgttagtgagtagtttgaattacgagttatatgaggattatgttagaaactagtatgcggcgtgtagctgtgctcatgatgtgaataatatatcagtaggtattgttggtgtcattagcaagtgtgatgaattcggttgtgcgataaattttgaagggcgaagaacatgtgtagtgtgtcgatcaagttaaccgataggttccgtaaatatgcttgtgatgcttttatgtgcatgataagatcgatgtcttgctttgtcaattattgcattccatttctattggataaataaatattttgttggttgattagaggtcttatatgagcgttatcgcggcccaataattattggaggcgagtagcgttcataagttggtccttgttaaaattgaagaacaatccgataacatatgcacataaatgctttaggtccttcagtagcaaatgtagtcttatggagttttacgccatgtgttaatgcctctatgttagacccccaaaaatgtgctattttaggtgacttgtgtgttaacaaatttaagttgagtaatgattagtaaaagctgattaatctgctccaacccatgtttttgagttgagatgtctaaaatagttgctaagttttatactgtgttggccaacatttgttaagaaagagtcgattacgttaagtgattgtta

SEQ ID NO: 59308 - DNA, 469 bp, Zea Mays
ggcggttgcacgctccttgtgcggcagtttgccttcttcgtgcttcaggccagcctgcatgacatgtggggcctggcccccctatcataggatgggaatcctggcgtgcatcaggtagtttatacctgcagagtagagatggaactaggactctgcttgaaagcagatgtaatacttttgctttttgtaaggtatttttgagtactatttaacaagcagtattagcacttatctgtgtaccgtctgttcttgttgtgtgttgcgatgttatgttgttgaacccctcccctggtacctggccccccgcctgggatgcaggcttgatgtgtcgaggttggataccagcatatctgaaaaggttgtcgacaactctcgggaggcaacctcgtcgggatctggatctgtacacagcttcagatagggagcgttagtggtacacccatagggtcccttgtctgatattagccat

SEQ ID NO: 59309 - DNA, 657 bp, Zea Mays
tgtccgagccaatagatggtggtatgatggacgtttgcactgacattccggatgtggggttagagttatcccgagcagcgtctcgagcctcaacgaccttggagtgcggtcttcagagtcaagaagctggtctaggttgctccattcccatggaggtaactgagaatccttcagccttagaggtggctgttgcaaagaacccagtccccaaggatggagccagcgattacccagcccctgagggtgttgtcggcaatgatcccgcccgggtgggtagtgcgagctacaacccagcccccgagggtgctgccggtggtgatctggcttcgatgggcaatgcaggctgcgacccagcccccgagggtgtccgagcgggctccccttctcatacctccatggatgtccacgtcgggtcttctcctccacattctgattgcatggcagcagcacgtgcttcaaatcaggaagtcaccttagagaccgacacacccaatgctagagttttgattccttctggtgatgttgagttgatccccaatgatgctcttaagattgcctcggctgatattccctcatcgagtcaccaactggtttctcatgatttggggcttccttcattcttctccaatcttcaggtaaccagatttttcctgatct

SEQ ID NO: 59310 - DNA, 445 bp, Zea Mays
caggtgtgggtgctgaaacaagagggcagggagcacgaacggacctggagtacgctgaccacggtgagcaaacacacggggcaaggactggtgcaatggatgcgtaattatcctacgaagctgcgggtgcactcaatttatacaaggcttgagcggtggccagtgaatttgagttgggcgcggtggcgatcggagaaagaatgagtcactggtgcggtgattcgtggccttcaccgtggcggcctcaccggcgacgaaccagtagcagagagtggcttacggtgactcactacgacatggtaaaacgttgaggcacgcagcctggccagataacggtgacttcggtgatgccagcgcgactaaccatggcgggacacggcgactggtccggccagcgaccggattcaccccgcgctggatattctcaccacacccgacgttatcc

SEQ ID NO: 59311 - DNA, 473 bp, Zea Mays
tgaagggtcacaggcggccagctcactgaatctgcggattgtttttggttactgtaccatcacgatctccttcaatcagtctgacagacagatttgtgacgccaaaatcttgaattttcgcataagaacttactaatccatttgtagcaaacctgtagccctatgatccagctataaaccgactgtggtaaccatgcttaaacatccacgtgatcatcttaaaaatggcccccaaagttcatcctatgccactgaataccataattcaggttttagacagactgacagcccaactttgggcacatttatctcaaaatacttcatggtaccagggcttaatctctataacaaagttgttcccttttatagctctacaaacttgatgtgttgacctagggcaaaatcttcataatttggaagatatagggccccaaagttgagccaattccactaaatttttgacttaactcaat

SEQ ID NO: 59312 - DNA, 371 bp, Zea Mays
ggtcccttctattgccccaagggacctatgagccgttggagctctatttggtagtctttagttgccttctgtccgcggttgcaccagactgtccagtgcacaccggataatgaacagtgcagcggcagagaatcgcgtgattggttggtttcctgttctgggggcaccagaccgtctgttgcaccatgtgatcgttggccctcggccgacgtggtagctagccattggctagctagcacaccggaccgtacagcgctccgcgtggacggtccggtgaattatagtcgatgtaggatgaaattcccgagagcaggcagtttggtggatcgtgcatcggactgtccggtgcacaccagacagtccaacaggtg

SEQ ID NO: 59313 - DNA, 406 bp, Zea Mays
caatgggtgtgttgttcgtattgttgacgaggatgaggaagaagaggaggaaatccccttaattcggaaaaacagtcggcgctacctagtcagtgtggggagtagtgatattccttctccagccttgtctgcactcgttggtctacaagagttgtccatagcaaattttgatcaggctctcgaggatatggttcctgaagatctgctgtcagagccaacagatggtggtatgatggacgtttgcactgacattctggatgtggggttagagttatctcgagcagcgtctcgagcctcatcgaccttggagtgcggtcttcagagtcaagaagctggtctaggttgctccattcccatggaggtaactgagaatcttttagccttagaggtggctgatgcagagaac

SEQ ID NO: 59314 - DNA, 842 bp, Zea Mays
gtccgattggtatggtggcaaataatgcgcatgatgcaacgcacttagcagtggaacggagcaaagtgatgagtacgcacacgccgcagttcatgggcctcgccttctcttagctcactgaaattctgagtacctccacggcttatacacacgctctaatcataattgccaaaacactctaggccggctcccacttcgagtaggtataattaaccatgaacataccagcgagggcggctatatggggtcagaccggaatcatggcaaccaagcatgcatggaggatcgatttcggtggataatttaactgaaaatcatggctatattggctaggcatgcagatagatatagatcttcttcgagcatgaaacacaaggtctccgttttatatactactcttggcttaggttgagttttagttgtctatagcatcttactcatcatatcttctatttcaaacataactctataaatagtgcagtctacagtgcaaaacaatacaatgtataatgtaaaaacagtgttttgccatatgagcaagctgctagaaacggtcttatggtgcatagatataaaacttaaaggtgattggcggtgaagataaagaccaatcatgttcgtgttgatgccttgctagattgagaacggaggaagacatatactgaggattagactgagggactagtcatcgataagaggagaaatacatatagctaaccatgttgactaagtcaaaattgtggccgatcaaatcaagtggagatcccaagtgacttaatggtcgaaggttgagtactcgcaacgtcgaaatcgtggagagagcgtgtcaaatatactcctcg

SEQ ID NO: 59315 - DNA, 588 bp, Zea Mays
cttttgcatggctgcgcagtactttgtaacaccctagtaattctcagagttcttctcagtgctaactcaagaacaattatttcatgtggatcaaattgagcaaaagacaccaaaaacttgagagcaaaaattcaactaattcttttgtcctaagactcatgcctaaatcatatcatgcattcaaaatgggaaaaatgtttaaaccctagaacaaccctaattaggccatttaagtagaaaggaagaaattggtaaaaagaccatgaaaaacatggaatcgtggcttaggccaattataaaagttgaaatgcactaattaagctacaataattgttataaaagtttggccaaaataattgattaaaatccccataagggccatccaagtggaagctctctagggaaaaatctgaaatttagattgctgaatttcagccctcacctagaacttgagcacgttcaccttgatacctagctcaaatccttcttaactccccattgacaaaattgttctaaactaacccctctgaaacatgtgtgaagatggcctcgagattcgtgccctagacacgtcaaatttgggatttt

SEQ ID NO: 59316 - DNA, 792 bp, Zea Mays
ctagatttagctgcagcggagtctctgttgagggtcgccccccttggggcgccggcgacttcggccggggaagcccctagtgaaccgcgggagcgaaaaagattggggtatcgaaataaagtgttgtgatgttaggagggtcttcgcaaggttttaaagtctcccgaagacatcgccgaatgggaatggagaggtcgcgccttcggattggaccgcggttggatcaagggacccgtcgtgtcatattggcgccgacgactgggtcgtgcttcggggagggggatctgcgggctcgttttgacggcgaagagttgagattgatgctatttaacttccgataagtcggtcttattccgaaacaagagccaatgtaacaatgtgtgttgctatcaccgttctttggtgacgataagcgaaaacgctgccctcgctccccttcgccaaaggacagctgtggggacatgtatgtggacaattttattgcgcacagtgcgcatcttgtaattgaaatatgatgtgtctttcattgtggtatatgctctaagttgcagatgttagcgtcttcgcgcgattgggtgtcgctaatacgtttatattgatctgaccgcaagtttaggcgactgttggtagggtattatcttctatataggtgatgacttcaccttttttgatgcacctattgtgtgaatctagctgcacccttaggagacttttgcgtggatagaactatgcgtcctggggacgacttcgcacccttgagtgttgttacgcatttgttgtgctgatccagct

SEQ ID NO: 59317 - DNA, 478 bp, Zea Mays
gaaatttggcctgttcacagctctcgcgtgattacaaccgacttttataaaggcggcagctgtaccacaagaagctaccagcgcatagtagtcttcatggccggttatgacttcgtcgcggacatcaacctccttttcaatacattcgagtgccccgggtatatcttcggcagagaggctggtttcctcggacgcagctccaactgaattgaaaatacttctcatccgagcggtgcattggcttgcaaactcaaagcatctctccttcagagcccttagcgcctcactaagcttcgtatttttctcagtctcaaccttaagtgttgctttcaaagcttcattttcctggttgaatcgatcagagttttccttcaaaagtgcctgagcgtctgacaggtctttgcttaacttcttgttctgagtttgcgcttcagtaagggacccttcggctgaacgtagcgttttgtctttctccttc

SEQ ID NO: 59318 - DNA, 501 bp, Zea Mays
gtcgtactctctctagtctcttcatgagcttataaagataataacttaaatctgacagactgcgaccgtccaacaatcaggctcacataagtgtattctttcaagaatgttctacaggacaacgtctttgctacttaaagccaacaaaatatgttaaggctattgccaacctgccatacatgaattgagagtcttgcatctttgttgagtgagttaattaggttactgtcatgctaacttctagcttattcttcctagaacttaattcataagatcttcaatcacattggttgggttaccacttgggaatagattatatgagtctcaaacccatctccttggatgtggcgtctatcacattacatgacaaaccccatagtgaaaggatgaaccagatttttctcaatgtggatgtaatttacgataattactctagagtttctaatttttttgacaggtttttaacaatctcttgatgtgtcttgatgacttcatattgta

SEQ ID NO: 59319 - DNA, 346 bp, Zea Mays
tttcttctgtttggttgcctgatcagcctcttcagcctgactcgcgggatgcaaaattcctcttgggcctggctcccgagatacgtaggaattggtcgtttctccagagccaggctctgccggtgcaaccattagtctttcctaatgacagattaacatgtaattagtgtctattaaataaatttaatttatttaaaagtggattgaggctttgtatggcatattatagactattgcaacatcatcacatgaaaatataataaacctttatagcttttaatccatgcatcaaccatttatgtaagcaaccaaacatcatctcacatgggccaagctaagcttatac

SEQ ID NO: 59320 - DNA, 563 bp, Zea Mays
gcgtattctcttgtccggtaccccaatgcaggtacattttggtctccctccacctacctaccacaaaatagaattgcacgcttatcctagaacaattgacttggaatttgctgtactcaatgttttctggtgctgcagaatgatttggaagaattcttttcaatggtgaatttcacaaatccaggggttttgggggacgcttcatattttcgtcgttattatgaagtaagtatggagcttgacatgaatcaggctgtactgccaaaatacaagttacagctgttcattcgaagataatcagtacttttcatgcatgcttagaggtatttttggtggaacctagaaaacatgatcagaactgttgttcactactatttcttgcgggcctatagccacttctttctttttaccttggtaccatctatccttaaatgaaggcaccaatcatctgtgggagagaacccactgcaagtgcagaagaaaagaaattgggatctgagagatctgcagagcttagtgcaaaagtaaatcaggcaagtctttcctgccaaagaagtttgtca

SEQ ID NO: 59321 - DNA, 713 bp, Zea Mays
ttaatctactctggactgggcgccaatttctggaaacgttagggggtctaggggtaagaatctgcagacatagagcaccgctcccacggatggcgggttcattctcaaatatcatagggtttcttatgtaaatgagcagagcgaaagggtatcgggtgatattggccatcagatctgagatgtacgcaccagattaaaacaacatccgcgtgaatcggtatgtaatcccgatcatcggatccaaatcctacggatcggattcgatcacctaaaaggggcttctgggtctgatccgagtcgttcaccagcgatccaacggtcgcgatatgatcgcatgaaggggggcacacattaactaatcctagccctccgtaacgatatcgccggttcgagctcatctctccccttcctgggccatccgcgtggcggcgccgccctcccgcggcggccgaacgccggcgagcatgccatttggtgttccgatgccccataagcgcacccgagggtaccaacacaatgcgcagttcacgacgactctaatcgtaagctcaatttcactaattgagctccaagtgctccagtcaccgcgatggtgcggtccccagatgccgaagccatcacggcaaccaattcccagcccccaagttctctacacggtcacacgcggcgcgatacgatactatgggcgattcgagcaagatgatagagttctt

SEQ ID NO: 59322 - DNA, 1332 bp, Zea Mays
gtgggagtaccgcgcgggtgcaccgggtcttggtgaggtcgagcgtggggtgttccacgtttatgcatacggattttgacggaaacagctgcgtaaatgggcatagtgggggtgtcgcgcgagtgcgtcgggatcgtggtgtggtcgggcgtgggtcgcgcgtttatgcatgcgtattttgacgatagtggctgcgtaaattggcatagttgtgcggtcgggacgtggtcggggtgtggttcggcgtttatgcttgtataaattgccgacaacaactgcatatccatctgacgcgacgtgtgtggtgagggcgggtagtgggggtgccgcgcgggtcaaccgggatcgtggtgggtcgcgcttgggggtgagccatgtttatggtgttgtaacacaattggcaggtaattgtaaccgtgtcgactcacagaaatctcgcgacatgcaaatcgcgcgggatatttggaacatgccatgaatatcggccaggacaattttggcgaatatagtaggataactccaaaaacaactgggctacacaccgccaacgcttttgttcgatgacctgggagaggtagggtatacacgatggcgacggccaggggattggtgcagtgtggagaggctacaacgacgatgttaccctgtgggtcagatgtcggtatgctgtaactccactggctgcgttactggcgccaggattccttgaagacagcaacgcagttcatccaagtttggtgggagcaactcaccggatacccatgaggacaattggtgatcatgagcaggacacaccacacattctccaaagccatgtaagttcagtaagataatgtcagattttgtgcatatttgttatactgtccgtgcaagttatgaagtcctagaaattcaacatgctgtaagattattttgtatatgtgcactacatgacgaatccattaattgaataggatgatagtatagatcaacgattggtaccgaaggtcggtatgacatttactaatgtggacgaggcgtaccaattctatagccgatatgcatatgaagttggattttcgttgaagagatatagggagagaaaaaattgcaagtggttgaattgttaaatggaagtcaagcgtgccgaaagaggatctggtaatccaaaagtgagtaatacaagttccaagcgaacacaatgcaaagttggaatgaaacttaaaaaaattatgacgatgccaaagagaatattatttcagtgcggattgatctgattcatttggaacataatcatgagttcttcaggaaggatacataaaagaatcagttacagtgcaacaagacacatga

SEQ ID NO: 59323 - DNA, 801 bp, Zea Mays
ggaaaaattattgggaaaaaacagttgtagaacttcgctcttcaaaataatgatgttatgaaaaatccatagaatgtgtggaaaagataaaaactagcttcgccaatgttggcgcatatttaagtgaagacaacttcgtacgcagcgatcccgaggggccaattgagtggatcagcagcgaggccgaagcctttgaggagattttaaatgaccatggggacgtctgcgctttctcaggtgcgaggggaattgctgctattttggagaagtcaggttgcgatcatgtgaaagctttggcccaagttgaagctactttatctattgatgacacgaaggacccctcggccgaagcgagcttagttggtggaaaattctttactgacatctgggaaaatggcggccgagggatggcccacgaaataataacaaagagcaaaaaagatactcacgatgcaagggaagcaacgaaggcagctgaaaaagctacggaactcgaaaggcggataggtattgcttaatagattttaactttattttgtttatttttgtgacttcaaacttatttacgttttctaccgcagccgaactatctcctcccccagagcccttcgagtcattgatcgagccagaggcaaaggaaccagcaggaattattaacatggccgaaagcattttggatgaagtcgttactcaactcctgaccgaagttgcagacagagttttgaaggaagaataatggatattgtaaaaacattgctagaatattaatgtaacatttgctggactatgcttgtaatattt

SEQ ID NO: 59324 - DNA, 624 bp, Zea Mays
gtcgggtacctcccctctttaagagcatacgcaagagggagagatagggagacagagagagagggagaaggaaaagtgttcccctctgtggatctcttgttagctcgtgctttccttcgctcatggatcgggacagctcctaaagaagcgaccacccgaggggaaggtgcgttcgtcccatctttcctcatgggttccctttcacccttctggcaactaacccttagcatactctccaagatgttgttcgcctctcttgaggcgcgaaggcgatgtgccttgatcagtcaccttgtcgatccctctagagaggaccgatgatgctcttttgagggatttaagtgtggtacattcaatcttagaggcagctaatgatgaggcgtggcatctacaatcgcggctagcggttcttaatgacctaggggcatgtaagctatcatggtccgacctctgggttctcgatgttttctagatccctgactacctagtggttcatcacaagtcctaggctcgaagtgttgcctttttcttatgcgttgatcgggctacaaggtccatttgtgtgcgggggaggaatcagatgtcgtgtctccttgacatcccggagtgtgttcatgaggcttt

SEQ ID NO: 59325 - DNA, 493 bp, Zea Mays
aggcatagggatgtatggggtgttctttttgcaaataagtccaaacttcatcatttggcttgcaaatcctcaaatgtgagaaacacatagtttgtgatgttgcactaccttggtatttgcacttgggtccaaaagtgtacaaattttacacttatccccctagggttcaaatctagggttttcagtggtctctttagggtatttagcacttctagggtttggatgttactcaagttcattaatggtgatattttatgaccatttcttatgagttttgaagttttcccatgtttgggctctatcatcacccctaagcctaatttagggttaagtaccctattctagggtttcacccatgacatgccacatccatacaacttgtttggaatttttgcctagtgaatgcactctaagtgtaacaatcacatgatatgctaatgctcatgatgttatgctcaatttttagtggtagtaacaccaggggtgttacagt

SEQ ID NO: 59326 - DNA, 1358 bp, Zea Mays
gtttaataggaatgtgatatagacaagagatatgaagatatatactattgaatatggatacaacaacattcattccaatcttgctgatggcagggtggtgggatctgaaaagaatacacccatccattattccattattttgctgtacatttgtaccaagcaaacagtttcgggaacattttaacgatacaaactcaaagccatgtacagaatctgcgtctggttgaaaccatccgaaccctgcttgacatataacaacataacttgatgcaatgtatttaacatacagaaatgctgttgcgaaggatgctgtttaataggaatgtgatatagacaagatatatgaagatatatacgattgaatatggatacaacaacattcattcaagtcttgctggtggcagggtggtgggatctgaaaagaatacacccatccattattctattattttgctgtacatttgtaccaagcaaacagtctcggaaacattttaacgatacaaacacaaagccatgaacaaaatttgtgtctggttgaaaccatccgaaccctacttgacatataacaacataaaattctccataacgggttgaggaacgaaagggagatgtacctcgatgacaaagcgagcccaaagcttgtcagaacgatgatgctccagcactcctttcagtatgctcaccttgaggcccttcaacacaagaaagacctcgtagtcctcgcacaatatctggatgaagcaaatcaccttgaatcatgcaactacaaaacagatgcaagcagcacggcaactcgatcagttagttacctcaatgagaagatgtccaggctgctgattaagctcttaaactcttagatctagtttggaaaccccattttactaagggattttcatttctccatcaaagttcttgaccacccaggatatcagaaattgacaattcattcaccctcaacaagtgatcttcttttttaacttgtgtttcacatgaaaatggcgaatcagctgagggacaagattcactgtttgatgtatggccaatctggtcgatcattgtatctagtaacaattccgcataattgttggttctgcacatagaaatcagcattgttgccattcactcgagggagggcagggcttgtaggttctagttgtttcaacctacaatgccacatgaagagctcatgttcttctctgtgaaactctaaatgaattgaagtattcgaaatcatcacaccatcatttagaacagtagtgctgccatgagtattctcttgattccaatatgccatatctgtcagagaaaagccttcgaaatattcatgcccaatagttccattatcacccaacagtcca

SEQ ID NO: 59327 - DNA, 833 bp, Zea Mays
atcctacaaaaaaattacatgtgtttccgaatgcgattcaataaatttcaaagatcggtgcgctttcacttgtcaatgaggcggtactacagacagtgatagataatgcgatacaatcggtggattatgcgaaattaaagcataaatgggagggatggggatggggtgtggcgaacctgaaggcgactgtactatgcgaaataatgtagggaaatggaacaaagaaggagagggggaaacgaaccagggcggagaacggcagagggcaaataatgaagcacagcgattagggtgagtgggggaggtgggggcggtcgtcgatggagatcgtaggagcgggtgacggcgaggagcggatttttttagggtttcggtggggccacgacgagtgggttgattgtggttgggtgggtctcggatattgaccatattggctcggtcggctagcgggagcgacgcgggactgtggggacccgtagtgtgcgcatgatcagttggtcagtgtgtgtacgtcgtgttcatatgaagcataaagtgttgtccaaaggatcgtaaacagtttatacaagcattaatcccgaaccacagcccgcacgtggtataaattgttgtgtgtacgttgtgttcatatggaggataatttgttgtgtaaaggatcgtaaacactgtgcgttcgattgatatgcagttgttatcatcaatttatacaagcataaaccccgaaccacaaccccacaacgacccgaccacaccgctatgtcgatttatgtaaccgttggcgtcaaaatacacatgcatacacggcacacccccacgcgcgaccccaccacgac

SEQ ID NO: 59328 - DNA, 439 bp, Zea Mays
cattaaatcaacatgttagaaataatatgtacaataagtagtgtgaaatagtatagcagttttcagagtctacattagttaattattgcattggttttctctatgtgctactttatttgatgtttttagttatgttgcagaatctgaactatatgtacttttattgggtgcattcactaaggatggtgcaaaagctagatcaatgttccattatctaaaaggtagacacttaatgtgggcataaattagttgggacgaaatgtcaaaataggaaaggtaaaattcataaggatatccatgatttcacttcaaacaataaagatagtacagtgcaatatcttcactattatgtgtgccttctgccattacaccgctattttgtgtcctcctatttttctcacgatcgatagtgtggtatcgaacaccatcaacaatacat

SEQ ID NO: 59329 - DNA, 596 bp, Zea Mays
acatacttggggatttgcaaatgaaaccctaggttttgggcctatttgcaaaaaaccacttttgtgaccatatagctaagtctgaaaacagttgatcagggctaactttggagctctgtagatcgagaaattcaaagaatttgccccgggtcaatgcaacaaagttgtagagccattgtagaagaacaactttgctacatgtattaagtcttggtgccatgaggaatttggagataatatgatccaaagatgggttgtcaggcgatttgtaactgaaactggcacactgttcatcgaacttcagaaagatctcaccggcgataagaacgccatcgcggatggggatgggtctgcggccacggtaaagatcatccacgacgtggcgttaaaatgttgcggtggcactgcccggttaatcggcggtcaccggaccatcgccgtggctctgcccgcgcgggtgagctcgccagcgcggttacagctccgtgattctcatccaattccggccatcagcctataaattgagctcagatcctgcttcttcaccacatcacgcacacaagcacttgagcaatcgactcaatttcaccagaaga

SEQ ID NO: 59330 - DNA, 551 bp, Zea Mays
tactggctttttttctttctttcttttctttcaacacatctcgcgaggctacatatgaaaaacggcggctttctcctcacttatctgcaagggaagtggaactaaaaaaactatgcaagccgccggatggaaaagaggtttggcatggcgtgcagtgcagatgaggagcagggaatggacatgttccaagtattcctgggaggtgagccgatgggccgtggtcagtggtgggtcttgttgtctgttctgttccacaagtcccgtggagtgcagtcaacaaacaactagaggtggtggcgtggtgctctcgtctcatccattcaccctcccggcaggcacacacatggaaaaactcgtaccaaatagcaatagctgactaagccttgtgtttccgtgtatgggttatgttaattgtgtgtgctttcagatgctacaacactgtctagctactgcactagttttggtttgcttcacacacatatataaagcccgccagcatcgtccgtagttaagttgttttggatactagtgaatatacgcggtatataaat

SEQ ID NO: 59331 - DNA, 433 bp, Zea Mays
agaacctgcagaagtacaaaaatccagtagtaaaaattcagcgcacaaccaccagaaccccaatcaccggaaaagaaaggaacaagacttggagatcaagtaatggatcttgtagctatggcgcagacttggaggagagtggatcttgtaccggatcttggagatcaagaacaaaaacatggtaacatgagaatgggaaaccctataagtacgtacgggagggtgaagtcattacctcgtgccgtagatgacaacagaagacatcaaaccgagggttgaacacggcggtggaggacactaaaccagcggaaatggacgacgatggagggcgtggtcgcctcatgtcctaatcgtgaccatgttgaaggcagagcgaacaacgggagatcagatagtggcgacacgtcgcctcgtttcgctcgcgtcctttcgg

SEQ ID NO: 59332 - DNA, 626 bp, Zea Mays
taggctacttctgcaactcgctttaggatttgaagggtccaatgaagcgaggggacaacttccctttgactttaaatcttctcataccccgaattggtgacaccttcaggtacatgtgatcaccttcctcaaactctagttgtcttcttcgggtgtccgcataacttttctgccttgactgtgcagttctcaggttctcccttatcattcgaacttgttcctctgcttcttggataatctccggtccaaagaaccatctttcaccagtctaatcctaatacagtgggagttctacacttcctctcatataatacctcgaacggggacatcttcaaattggtctgataactattattataggagaactttgcgtagggtaaacttttgtcccaactgccaccatgcttaagagcacaagctctcaacatatcctctagaacctgatttgttctcttggtctgcccatttgtttggggaataacaggcactattattcggttttctcgagtacaacagaagtttagatccccaaaagggggtaaaaagaaccaacatgcgtaaatatgaaaagaaactgatggatgaggacttactcttccttcgcaatgggatacatgtaacacctg

SEQ ID NO: 59333 - DNA, 614 bp, Zea Mays
gccactttagtcaacctgtctactatgacccatattgaatcatagccatcccgagtatggggtagtccaactatgaaatccatactgatttcttcccatttccattccggtaccttgagaggttgtagcaatcctgctggtctttggtgttcagctttaactcactgacacacgtcacataatgcaacatgagtagcaacatatcttttcaatccgtaccaccaatacttttccataagatcctggtacatctttgtacttctggggtgaatagagtaagctgaatcatgagcttctctcaaaataagttggcgcaagtgcttgatttcgggtacacagattctcttcttaaaccatactgtgccttgttcatcttccatgaaatttggggctttacctaaaccaatcaaagttttaatttccttaatcttctcatcggactcttgtcctttacaaatctcttcttccaaagtagattcaacttccataactgttgcttctacattattgagcataccaaggttgagttgttccatttcctagcataattcttgtgacatcaaatgagtagtgatgttgttcacctgacccttacggctcaaagcatcagctac

SEQ ID NO: 59334 - DNA, 829 bp, Zea Mays
ctccatggagattgcgaattccatatgactctagacactacaggaagcagagtgcttctttagagaaagatggttgttagggagtaggccctccttgcttgctcccaagatcttcaaattaatcaaaaggattttgatgacgagaaatagggccgatatagaagagtaagggtgttctagtctcaagaatagaaactaaaagcactagatcagaaattgttagcctgagatgtagtgatggggccctcccaaggctcgaggagcttggaggaaaaattaaacagttggaggatgatatctctgtgcattagatgtctcaaaaggaagagtgtacccttaggaggactgcttgaagaagtggtgacggtccttgaagaagtgatgaaggtcctgcttgatgtgggccttaggaggactgagaagggctcccatgatagggatagcatagggggcactagccttgatttcatgcaaattgtgaccaaaatgtcatagctttggggaaaattccatacccaactcgtctgatagggtcaatacctagcacttgaggtgccccttgacatcttagtggctctaaagatctagaacttgaacctataaatggaatccatctatgaagagccaaaagagaagcccctctcccccaagtcgaagaggaagtcagagatgcactagaggtagcagcaagccactagatctagaggcggctaacttcaacttggagtaggggtgctagacatggatgacgatatttgtcccgaacgttcctagtaatatgtagccttggcatgaagccatcttttgtaatatatgtataatatatttt

SEQ ID NO: 59335 - DNA, 399 bp, Zea Mays
cctttcggcctggcttctctagtcccaccacccaccctcacaggccggctcactactaggcccagttagccactccaccggacacccacgcgccatgtccaaattttaaccagacaagaagtatagtagtagattgcagaaagcaaatattgggttgagagttcactggtttataaagcttgcaaaatgaagaacaattgggttgatttccggactttgtgtgggatatgaggaagttgatgctactgtttgccacagctaatagtgtgggcttcgtgtagccaagacaaggaaggttctacaccagtgttctgctgctagcctcagaatcctacgtatcgttaaatctgctgtaccagtaactgatgagagttaggcccataatcaatccattccctc

SEQ ID NO: 59336 - DNA, 492 bp, Zea Mays
gaatcacataacatcctcatagaaccaatgatcccgcctttaagagttaattcagttgggggaaaagttcagttcgataggatttgtccgaatctaaggattgaaataagggggatagacttccccgctagcctagtagtaatgggaactcaagggttagatgtcatcctagggatgaattagctacacagaaatcaagccactgtcagttgtgacaagagaacagttaagttggtgtccccatccggaaaggaagtagtaactaaactgtacttacctgaactagaagaaggagcttgtcaccatttatcagtagatgataaggagtccaatccgattgaggcaattaggattgtgtcagaattccccgatgtattccctgaggagttaccaggcatgccacctgaaaggaaagttgaatttgctatagagcttatcccaggcaccgcccctatttccaagagagcttatcgagtgtccggaccagaattg

SEQ ID NO: 59337 - DNA, 1058 bp, Zea Mays
ttcggctgagaccaaattcaagccctaacaagagtttcccctcaactaatttcactaatggagctctagctcgctctgtccacggtgattgtgtgatcaatggacaatccaacgcgttcccggcaatctaagggttcctagcttaattggcggggtcgaggagcatcagggacacacaagtacactaaaacgaaagagcagagggtatgagcggacctgagatgagctagccacggcgaggtttctttcacagtggcgcaaagcagatttgggggaaatttggaattggcgagctctggtgaacaattgagggcacggcttggtggcttggtgcttgactaccctacggactcgtcggtgtgctcaatttatagtgtgcttgagcaatggtgttcaatttggacgaaatgcgctggcggtcgagaggggaactgagtcactagcgcggtgattcgtggccttcaccgtggcagacccaccggcgacgagccaagactaaggagcggtttatggtgactcaccgcgatgtggtaaagcgtcgaggcacgtagcctggccggataacggcgaacgccggtgatgccagcgcgaccgtccgcggcggggcacgatggccggagtgaacaggagctcaagttcatccacacgacgatctttaccaccctgagccacatccggtactttgctgagcccgactcgcaacggcgacaagaatcccggcgcaagatcaccgacggcgaggggggggggggtgaatctgtgatctctttcagtcactgtacaatggaatccctattcagtgcgcatgacagcctaatttgcagggcctagatctcaaatctttacataacaacttgatattctacctgtaacaaagttgttgcccgatgatccagctacaatcttgctatagcaaccatagccaaacactcactagatcatggtcgaattccagtccaaagattgcccaatctcactgttagtctgaattcagacctagggcagtctgacagcccaactttgggctcaatttactccaaaattttcatgtgaccaag

SEQ ID NO: 59338 - DNA, 506 bp, Zea Mays
aatttgttgaagggaaaattcctccggccgagtggcggagtgcaccgccctgatcctaaaatgaggaggggctagggattggctgattagctggaagagctcgagaacacaaggattagagtggttcggactgccggagcgtaatacccgacatccactgcgagttgtattgctttgagagtcgagagtctacagagagcctgagttggaactcactcgccccccctctaccgtgtgtgtgccctcccttttatagcccaagggaggcacgtacatggtgaccgagccccgacaagtgggcccaattacctattgctagatatagagtaagtgtagtggcggctcgtagagatcagatatctcctcttggtgtagatctcctggctcgtcctgcccttaccccgactaatcagagcaggcgcaggtgtaggttgcgacgtaggctgatgcgctacgatatgtaggggtgcttagacggcgtcatcctatcttctccgcctgtttcc

SEQ ID NO: 59339 - DNA, 424 bp, Zea Mays
aaaaaatctggtgtctctctatagccctattatttgttttcctttaaatagcttgtgattagtgaattagtattcatttctaacattgctattattgtctcctataagttgcttatttgttgtagctaggaaatttatatctcttgtcgtattgattaaatttctctagtgtcattgattttagtcaaaaccgtctatacaccccctctagctagtgtcctagatcctacactctcagtatgtgcttgtgcggtcatgcttgtggggttggggtatcctttatggcttcgccatttggtgctccaacaaactcagcttttctcatcttgatctagcagtggtgtagtcattgttgtgggcctgagttcattgttgttggtgttgctcaagacgcctctttccaccaattgccaccatccatgca

SEQ ID NO: 59340 - DNA, 324 bp, Zea Mays
ggccgactcataatgagttggcttcgaatttgtgttaattcccccattacgtatgaaggatgaagttactccacttaatcaccgctgcttgctttttttacgtgtgcttgaaagtttgttggcattttagaggtaatgcccgagtgatgattgcagtcctcacttttctgagttatgatctggcactttagaggtaatgcccgacttaaggagccaacttatactcatgctgacatgccttcttgagttccgaaccctaaatcttacttttcctctgccgcttcttcgttttctgaattctcgagcccgctcgttccacccgag

SEQ ID NO: 59341 - DNA, 449 bp, Zea Mays
gactcttaaggtgaccatcatgacctctagcgctgggggcaagcgcagaccaaggggcaggagcccgtgctgcgcatcttggacgatccgacgtagaggcgcagattgtccgggaccacgccggatggttcagagaattccagcggacagtccgatcatactcaagacccgcaacgactgcgtaccttcaaaccacgacgaccaaagataggtacgtggaaaacaaatacatttaaagcagctggtcggctggtcaaatccggcccgactttcgatcaattattgtccaaatatgtgaaaaagaaggtcgaccctagtgaccggccagcaaagcgacctcgctcgcccattcgtgagcaatattaggtaagaccgattggaccacctcaccaatcgaaaaaatggaaggtcatactgtccaattaagacctaacatacctacatggaca

SEQ ID NO: 59342 - DNA, 1676 bp, Zea Mays
tctaagtctagaaaacagtgttatgggctcaactttggagctttgtatcttccaaattctagggtttttgccctaggtcaccacatcaaaattgtagatcaaacaaaggagaacaactttgcttaagagagtaagcatagttattgagaagatgttggagataattaagcccaaagtaggactgtcaggctggtggaactctgaaattgagaacttcggtgtaacagagctaactttggacttggatttaaacatgatccagtgcaagtttgggcatgattcccataacaaatttgtagccggtatgtagctccacaattttgctgcagagatctggacgagttgctatatgaatctgagagaaaatgaggcccaaactctgtctgccagaccgactgatgaacatatcccatggtacagtactggaaatatcaccggagtggataactgtcgccgccgacgaccaccgtgcatggattcgcgtattgggtcgccgtgattcgtgctgaccgagtggataacacttgggatcaagcaagggtccccgccgtggataaactccagccgataaagaattccggccaccgtaccgtgttcaccgcggtggaaaccgataagaacgccggtgactcccgtcgcacggccttgcgccacgtatccgaacacctctgtcgcgtcgccgtgactctttacagccgtcaaatcgtcgccggtgagctcaccacgactgaggacacgaaccgactgcgccatgatccttccctgtttccggccgccagctctgcccggccaaattgagcaccaccgtcgaagccctctataaattgatggccgggggagctgcgctatgtcatcttgaagccgtagcacccgctcccacccttaatcattcacccgagcccgtgaatttcgaacttcccccaaattcgatccctgccaccgtgaagatcagctcgtcgcggccagcttgattcaggttagctcgagtccctctgctgcttgttctagcatccttaggtaccccgcaaacccctcgacccctttaattaatttggaccgccagggatcaccgggaacacactcatctgtccgccacaccctcggttcacgtggacagagcttgatagctcaccaaccgtgcaattagcctagggaaaatgctcggagtaggtcggatttggtgtccgccactcgggaacgccagtcattgccccgttaggccggtctgctagctcgccgaagctccaccgcgctcaccgtcgtcgtggaccttccccagcgaagaaatagaaaccggagggctcttctgcaaactgtcagcgactcagtgtaatagtaatagaacctagttatggttagccaaaaccctgagggcgtttctgcaaagcctccaccgcgggcgcgggcgcgtcccggtttcctgtgttgttgggccgcctgggctaaaaccggcccatcactgtttaatcttttcctttttctttttcattgaagctttaggaaattgtagaaaattgtagaaaaaccctaaaattgtcaaaccaattttcctagacttcttattttccatagtatttaataaaaatagtttcatgatttttaggacaaatagggaattttggagtatttaaagtagcttaaaacattaattctggatttttataaaataaatggta

SEQ ID NO: 59343 - DNA, 696 bp, Zea Mays
atttctaaatttatttcccggatttcctaattttctggactagcgcaatattacagagaaaggcagggtttaactcgtaaaatatcccagactcaaactactcccgcggggatggcgggttggtttcaaaggaactgagggacttatttgcaatctggcgcaaccgaagaggtatggtgacatgtggaccgttagatcaatgatcaacgtccccgattagatccgcctttaagtgaaccgttacgcgacatggaccgcccgatctgaatccaagggtcggaacccggatctaatcccacccctccatagccaatccaatgacttggattgcttcaaccgaagcggtacaatccaactaatcttggccacccattatgcatcaactgtcaccggttgtcttcctcccaccactccaaaccgcggaccaaacacggcgacgcacgtacgggcgtggtggcgccatcatcggggttacgtgaactcgtgacgcggtgactaatcctctagtccaaataaagatattcatagagggaaccgagggggacttaacggaggtgcttaacatcgccagaagatgaagtggggcttggccacaggaaggtgcggacttgcagcggtgatggagttacgacgagcaattgtcgtgctcccggtcgcccacaactcaagacaccgcaacaagtacgtcaggcacac

SEQ ID NO: 59344 - DNA, 625 bp, Zea Mays
attgtaacatattttctatagaagaggacggcgggttgaataagaaaaaatgcattggctctttagcaatctagcgtggccgaagcgatataggtcattcctagtcgttcgatctaattcaacggctcggattagatctacattaacacgaaccggtacgtgacataggccttaggatcccggatcaacggcagatcggccaccacgccataccccaaacctggtcgtccgatcggatccaaccactcagatcaaaacctgtgaaggggtatgcatcattctaatctaagccgttcataaaaatccaacgggcagtggccgacccccccatggaccccgagcccgacggcgccgcccgatatccacgacggaggcacgccagagcaccccaatccagtgcatgaatgcccaaaacctgaatccaaacggtgctacatggagagaagggcaaggcgaacagaatagagggtttatttaccaaggttgaagaccgtgaccgagctgcccacgatgggaagtggatccgcagcggtgctgggttctcggcgagaaatcgtcgccaacccatggcctctcgtgcttcactacttttgcgttcacgcactacaccccccggcgaacctcc

SEQ ID NO: 59345 - DNA, 520 bp, Zea Mays
ccagatgtggtggcgatggaggggtcatccatgggattaggcggccagcgacggctcctcagaccggtgagcaattgtgtcacctcccttgcttggatacatgcctcaaatatcccgcccgctccagcgatgatctagggctctctcctgagggctgaggcacagcctgactcacatggcgacgaccatatctcctctctcttctttctctgtagctcaggttagatggataaagggggcatggccctggctttatattctaagaagcgcgaggatcttggaatgagggagcacggtcataaagcacacgatggcatcaaccaattgttgaggtttcgcgcggacacggacatgagacacggttgaggattgttgcacgtcctgcgtggggaggagatgaccccgacgtcatggtcccacatgacagcgagaccggcgcatgaatctggcttcgcccgagggatggagagtgagacccggcgggtagagcgtggagtcacggtacgggcaccggtttgcg

SEQ ID NO: 59346 - DNA, 679 bp, Zea Mays
agaagatcgtgtcagaccgaggatcacagtttacttctcggttttggaagaagttgcatgagagcttggatacacagttgaattttagctcggcctaccatcctcaaaccgatgggcagaccgagaggactaaccaagtgctggaggatatgttaagagcttgtgctcttaaacatggttgtagttgggataagagcttaccatatgagaagttctcttacaataatagctaccaggtcagtttgaagatgtcaccatttgaggctttatatggcaggaagtgcaggactcctctatattgggatcagactggagaaagacagttctttgggcatgaacttattcaagaggcagaagaacaagtccgtataattcgggagaatttgagggtagctcaaaccaggcaaaagagctacgctgataatagaagaagactgctagagtttaaggtgggtgatcatgtgtatctgaaggtgtcaccgatccggggtatgaggagatttaaagttaaaggaaagttgtccccttgctttattggacctttcttgatcttaaagcgagtgggagaagttgcatatcaactagaaatacccgatcatcttgcggatgtacatgatgtcttccatgtatctcagctgaagaaatgtctcagggtacctgaagagcaactaccaatgga

SEQ ID NO: 59347 - DNA, 440 bp, Zea Mays
tttcctttaagctccaaattctctcttaattaataaacaaataccccaatggagaccaagcgaatacacacaaggaaaagatgcgtggttcggcatgatgcaacaaccaaagaaacccactactagggtttattattatcacacgacatagagttttggaaatgggtatggtttagcgaaaaggaatgggaaaagagaggtaacgcccgaatttagcgagtgaaggaaaaagaaaaattcaactccaaaattcggggcattacagcaaccaacccacgacatcagttgcttcggcaagtcattcacaagctgcatgggctcagttaccaccaccaccaccactggcgcctactttggttcataatcagcagccagaagggcatcgtcaagcgcaacaacagtgcgatactcaggaggagtccgaagctcgcacagtcaat

SEQ ID NO: 59348 - DNA, 736 bp, Zea Mays
tcaagaaccattatttcatgtgaaccaaattgggcaaaagacaccaatcaacttgagaataaaagttccactaagtcttttgtcttaaggatcatgcctaaatcatatggtgcattcaaaaaggaaagaacttgctaaaaccctagaaaccctaattgggccatttaagtagaaaggaagaaatgggtaaaaagatcatgaaaaacatggaatcatggcttaggccaattattaaagttgaaatacactaactaaactacaatagttgttataaaagtttggccaaaatagtttattaaaaactccaaaatggccctccaagtggaagctctctagggagaatctaaaattcagaattctgaatttcagccttcacctagaacttgagcgcgttaaccttaatccctagctcaaatccttaagcccccattgacaaatttattctaaacccctctgcaacgtgtgtgaagatggcatcgagatgcgtgccctagacacgtcaaacctaggattttctcttggagttcagcagtgagacaaacccaagttcatccctccatatctcttgatccagtcagcgaaacccataagcctcctcacacaaatgacaaaggaatgtcaggggaagagatctctcaacgggatcatggccataatcgcgaagatttggagccaatccgggcttgaacatgacctctctctctacgctgtctcgtgctcgagccatgcccaggcg

SEQ ID NO: 59349 - DNA, 434 bp, Zea Mays
ggggcacaaacctccctagtataagcaataggtaagcgcgagatgatgaaacaaggaggggctgcaatgcaatgcggcttgcaacctaatataaggctagtgtggcgagagttcacacaaggcggctagcgagggcaaatcgagtaatgtggtgtctcgacttgtaatctgggtaaggtggatgggatagcggcgggaacaaataacagcgatggagcggttgaactacgattatgacacgacctaaaccagcaacaagactcgacacggacacaaactcaacgaagtaatctgaaacgaaattgcaaggctaaacatggtttctaggacagcggaatattttttttgtatggcaattatctggagttataggatggaaaaaactaaactaaactagggtaagcctgacggtaatacctgagtctttgaatacc

SEQ ID NO: 59350 - DNA, 380 bp, Zea Mays
aaagttcacaggaaaatggatcagagagttgccatatgtagtttggagcctgagaactcaacctagccaagctctgcatggaaatacccccttctttatggtttatggctcggaggcagtgctacctgccgatctcaagttcggggcaccaaggttagtctttgataacatagcagaagctgaagctactaggctggaagacgttgacgtactcgaagaagagcgactgaatacggtgattcaatcagcgcgataccagcaaactctgaggcgttatcatgataaagccatacggcgtcgatccttcgcagtaggagatctcgtcctccgccgaattctaacgggggagggacgacataaattgtcaatgctatgggaag

SEQ ID NO: 59351 - DNA, 524 bp, Zea Mays
ctgatgtgggtggttgaggtaaggctcacctagccagagagtgacttgctgaggcaactgaagccgtaggctgttgaagtggctgttggttgcgtacatactctaggatgtatggagagtagtacgaagcagtatgaagaactttctttggcttcagctatttccttctgcttttgtattgtgacttagcaagtccttgttgtgtgtcccttatcctctccacataataggcagaatagtcttcttggttaagagttttatcttcctccgaagctatgtcctcttctgcctcttgggctggtggtctgaaggaattctggtgtgtccttgttgattgtgagtgactctgctgcccttgattatggcttttcttgtcttcactttggcgtgggttgtggattgttctaacatgtcttggatgaaatattcccccgaagccccttgtcatctcagagtatctgtaagcttcctctcttctttgacaaaactattatcagccctaatatactcatccattttttaaa

SEQ ID NO: 59352 - DNA, 546 bp, Zea Mays
ttgctggtggctcagtggctgtggttgtgctatgcctgttcgcttgctgtacgtcggtgtcagtgtgattcactgatgggtgatggttcactgtcgtggcctcctcaccgttgcttgtttggacatctatactgataactcagtcctgacctcctcactcgccctcctaattcctattcccatctggctgtctcccagtcctagactcctcacaagctagcacctagaatctagcctctttattgtcatctctggtgctccggctttcaaaggtatgtctttagtgtttactcgtctctggttaatgtagcctatttgtagaatttagtttaatttcagttttggtacattgcagtcgttgaggaaccggaggcgacagttcacaggtctagctggtttagctcctcgggctcgtggtcgaagtcggggtcatggaccttgacgcggctgcagaggaggaggagcaccgacttgaggatcacaatgaggcgcaggatgctaggtactttctggggttcggtgacacccatggggatcctattgaag

SEQ ID NO: 59353 - DNA, 922 bp, Zea Mays
caaatgctccttcaacttttatgcgtttaatgaatcatgttttgagggaatttattggcaaatttgtggttgtatactttgatgatatcttgatctacagtaaatcttttgatgaacatattgatcacattcgccaagtacttactattttgagagctgaaaagttatatggtaatatttctaagtgcactttttgcacagatcgtgttgttttccttggttttgttgtgactgcagagggcatccaggttgatgaagacaaaatcaaagcaataaaggactggcctgtaccaaaaaatgtgagtcaagttcgaagtttccatgggctagcaggtttctatcggaggtttgtcaaagattttagcacaattgctacaccactaaagaacttgacaaagaaagtagttccattcttgtggggagatgaacaagagagagccatccaagagctaaaaaccaaactatgtgaggcaccactcctacaattaccagattttggtaagacttttgagattgagtgtgatgcaagtggtattggcataggaggtgtgctacttcaagaaggtaaacccattgcttacttttctaaaaaactaaatggtccacacctgaactactctgtttatgacaaagagctttatgccttagttcgagttttagaaacatggcagcattacttattccctaaagaatttttcatacactctgatcatgaagctttgaaatatctgaaaagtcaaggtaaattgaaccgtcggcatgcgaaatggatcgagttcattgaaacattcccctatgttgtcaaacataagcgtggcaaagataatattgttgcagatgctttgtcaagaagatgtgctttggttacacaactacacacaaaagtgcttggtttggaatcaattaaaacactttatgctga

SEQ ID NO: 59354 - DNA, 964 bp, Zea Mays
gaaggattgtaactcatgctcagggcgacgcctagtggaatctcggctccaacagcacgcagtggatcctcaacacccggattactcacctctaaagtagccgggccggcaagagcagtaggaagatcaagacttgtcaccgcagcttcctcagactgaaccggtggtgacccaacatgaacaaccatagaagcagcagaagaagagccaagttcaagaccctcgggggctagaccaccttcagtaacaccctcgggggctgggttatcctcaatcgtaccctcgggggctggataaccctcacgtgtaacattagggaccgaagtgtcctcgcaaatcagacatccctcaaaggtcgaagatgcatgggaaactgcccgggttatttcttgcccagcaagaaggctagctgaaggaacatcatctgggacctctacacggatgccagcatccccagcttctggaagttccaataagagaccttctggaatgatctcctccagtgcatggtcaatagcagacatcatcatcccctagaggctaaccagccttgatagagcctgaattaggacatcgttgctggctttgctacaacgattcatgcgaaccaaaggaggaacatcctcctcaccctcatccacttcctcctcatctgaaacatgcccaccagctctgatgccaccacaactctcaatgtcatcttcgagatcggtactcgtcgggtcaccaccaaggtctagagcggcagagtcaacctccagctctaagccagatgagtgccaaagcttcctacccgttcaccaaacagtcacaagaattcaatagcggttcaagcctcccagaaatgagtcagatgtctggcgccgtttctcataacatggcaccagatggaatcaaaatcaaccgctaagacgcagtattacacctctccgtcgcatcaagttactatttcaggactacacga

SEQ ID NO: 59355 - DNA, 560 bp, Zea Mays
gactttgccacaaaaatatccaactgatgtgatgacaaatcccaattgcacagatgagggagtccagcttgaggagtcaactgatgcaactgaagcaaaatgaagcaaagtaaaacgacctaggactaggagtcaagtgtggaacaaaacgaagcaaagtaacacgccgccagggcgtttgttcaaccaagtgagctaactgtgttccaccgttggatgtccaagaggacggaagttgcctgatcatatatacatgaccaaggcataagtgggttctacgaattgctgattcttttccagtacatatgttgtgcaatttgctgtggaaacattttcgttgtctacctattggaaaagcagatacaggcagacttttacaaatggaaattggttgattcattgtagcacgcgtgttgcacttgcacaaataccactgcctttttgttagtatttgggaagaacccaggactgttttgacgaaaaaatataaatcagacgccatgaaaggatcacaatggaagggagatgtaaattgagcttcactaaaacttattgcaaag

SEQ ID NO: 59356 - DNA, 918 bp, Zea Mays
taaaaatcagcttactcagttaggacttgttaaattagatgaaaacgcagagagaattcaacttgcaaaaaagaattgtaataggttgttcagtagccaactcgctacataagggttgtctactgtactacctttaggtcttcacatatctccacagttctcagaagacaacttatgtcagaacgagcatcaatgaatccttgaagagtaaggtaaggattgatatgtcatagatagttcataagactgctgtgcatggtgttcttcaccacagcaggaaaaacacaggacagtacttcatgctggatgagattatatgcagtctgcaaaagatgattagagttcatgatagttaacaaatatgaattactcaaggatgcagcatacaaatatgattaattctgagacactatggactgaaaacatacattgatatggctaacaccaagaagtaacacttcaggataattgatcagaggataaccaagaattggctgaattgctcgcactggctttgaatagccaagttcagcaagctgacataacacctcaagaaggacaaggcagtaccaagcctgattgccctggttacaatttcccaagtctggaaaaacctaaagaatacgagaaaggttatataaatgcatgtttattaagaagcgaaagttggcaatatattaggatgagataccatcttccttgtacaatgtgcgaatgtgaatgtatcatttggcaaagccactgcatgtttcaagaatgacaactgtccttttatattattccatagtaacccacagatggcatgaagtgggaatggatcctacatgattccatgaacaagtcagctgaactgttcagaaacctagtacccagaacaagaaataatggtacataccttgcaggctcaataacatatag

SEQ ID NO: 59357 - DNA, 477 bp, Zea Mays
acagacgatgatgcttttgtccgcgtagatgagatccactccacggtgaagcagcttaatgtcagccgtggcctactttacggtcgcataaattccgattctggtccccacagaaatcccgaaagcaaatggtacataagccaagaggtaaattcttattaaattcctccctagacaatcgatgcatattccgttggatttatgttcatagaaaaatagaagaagagaccggcttatgtaccatttgcgatatttttttactgtatcaccatcaacatatgtaaatgccaacatttctgacatgttctccaggaatggcctgaagataaatacccaccatgggctcatggaccaggatatgtagtttcacaagacattgcaaggacaatcaacaattggtataaggcaagtcgtttaaaggtatgtatattcaagtgcatacataatctgtgacttgtacatccgaaatgaaaaaac

SEQ ID NO: 59358 - DNA, 427 bp, Zea Mays
cggcagcaaagcagtggttttgtgggttgtagcatgtggactagctgactagactatgaacacagctctatggtctattgagtctggatatgggttgctgcatgtattgtaggtttagattgggtctccctttcatgtgttgatgccatacatataagatggtgcacgcatggtctcacgagtcacgactgtgtactaagcactggcgcaatcgtttgtgcacgtcattggcatgaatgtcacctaataagtggtggcacaatcgtttgtgtgatggatcagtggttatgactgctttgtcttttgtatggcgagcggtcacgactcacgagtttgtgttttattcaggatttgttcagtcaaaatagtctgcttcgattttgtttcagagcaagaatcattgagcattttcactttcttatttgat

SEQ ID NO: 59359 - DNA, 866 bp, Zea Mays
gaaaaggtaagggtattccctcctcaaagagtcctcactctcccaggtagcttcctcttctccttctctgctccactgaactttacagagtctcacttctgagttgcgggtctttcagactgccgagtcaagaatctttactggcttttctcggtattgaagatccttctgaatctggattatctcttcttcgatgtgattttctggtacttgcaggcatttgcggagctgggatacgtgaaacacattgtggatatctgacatgaattctggcaattcaaggcggtatgctgcaggtcctattatgccaatgataggataggggccaacgaactgcggagctagctttcctttcacttgaaaccttttgactccacgcatcggggagaccttgaggtagatgaagtctccttcctcaaatctgagttctctccgcctattgtctgcataactcttctgccgactctgagcttcaagtaatcttttgcggatcagggcaaccttctcttctgcctctttaacgaaggcaagtccttgtagtgtcttttcccctacgttggaccacattagaggggtctggcacttccgtccatataatgcttcgaacggtgacatcttgatacgggcctggtagttgttgttatacgagaactctccatatggtaaactggactcccaatttatgtcaaacgtcaacacacaggctcttaataaatcctcgaggaccttgttgaccctttctgtctgaccatctaactaggggtgataggcggtgctgaagtctagcttggtgcccatagcttgctgaaggctcatccaaaattttgaggtgaactgtgtccccctgtctgacactatcttccgtg

SEQ ID NO: 59360 - DNA, 387 bp, Zea Mays
cacgggttctgacttggacagattttagcgtaaaacgtgaacaaaaacagcgtaaatgattacaaattttagcgtaaatcgtagatctgttttgaaccggcgaatgcggcccgaaaattacggcgtaaaaatctcgcgcgtcccatcgtgatcgggttctgactcggacagattttagcgtaaaacatgaaccaaaatagcgtaaatgagtacgaaatttagcataaatcgtatatttgtttcgtaaccgtaaatgggtcccgaaattacggcgtaataatcgtgtgcgtccgatcgtgcgcgggttttggctcaaatagattttagcgtaaaacgtgagctaaaacagcgtaaatgagtacataatttcgcgtaaatcgtatacct

SEQ ID NO: 59361 - DNA, 693 bp, Zea Mays
gaagaatcacatcgcatgaggaatgaagaagagcaagtataccactagggtcatcatgataaagggatttttcacccgcaagagcaagagcatgccacctttgtctacgacaacacatcccctctattagttgatctacaaataacaccataaccagctttgtacaggtcacccaaactccccacatatgaaggccaattagaacaagtttttttatgatctatgaaacaaccattgcttcattcggtgggaacacatcagtgatgttaaatccttcgtcttggtagtaagaggcataacacaaacatggtactcctctctttggccagggtcaattccatcttggtaaaagcttaaggatctgctactcacatattttcaagtgactgcccaagctctctttcagtgcgcccaagacccaaatgaatacctctaggcatatgtccgaaggtttcttcggctttgtgctcaggcaccatgtgtcctagatgacattgttatcgaggccatggtcaaggggcttcggctaggcctaacatctcagcattttgctagaaaaccacccccgtcgctggacaatccacatggtggtttccgttgtcctccagcaccaaaaggtcatgatagagaagaccgcaactttggaggaagactcaatgaaaatgcacaacatcaaaggtttttgttgttcac

SEQ ID NO: 59362 - DNA, 479 bp, Zea Mays
gtgatatataatctagctagaggtgtactaaacagaatattgattcttaattattgacaatgctaactagctaactagctagtaactatatattggcataacattccttacacttccatctcaatagttcaatagtaaccctaggatgcatgcttacgaatgctattgctagctccttgaattttaagcatttttttacagcaaagaagcaacacacttttatggtatacctaattgaatagctgcagtagatacagtgtagtattgtattgcaataggtaaatgcaagtgatcgaatgtggtgtctgatctgctggaagctgcgataacaataatgaaacatcatcaaatgcccaatcagtggctgctaggttttaggctctaggattaaccactataccccaggaattatttgcacatgaaaagtttctctacaggcagcagtaggctgacgtactagtgtcactaccggaattgtc

SEQ ID NO: 59363 - DNA, 631 bp, Zea Mays
aaaatcttggcaaagacacataagggtgtgaaagcgcctaagggtgtgaaggcgcctaagggcatagccagattaaaataaaatcttggcgaggacatctaagagtgtgaagatgcctaagggcacaaccatattataacaaaatcttggcgaggacacctgagggtgcgaagacactaagggcacaaccagattaaaaaatcttggtgaagacacctatggtgcgaaaacacaaaagggtgcagccagattaaacaaaatcttggtgaagacaccagagggtgcaaagtcatccaaagacaaatccgtgccaaagccaccgaagggtgcaaccgaactagcactaaaatgtgtgaaaatacctaaagacgcgaagacacccgagagacccaaccatttgaaaagtcactcaaggatgcagccagacgccacaacacgccaatgcgtaggaaaggcaaacgaagacctacatgacttcatgtttgtccccaatcaacaaaggggggaaagggcaacgttctgcatctaatttgccagttgaggacaactagcaatgttcaccaaactcgatcacaagtccaaacctctcacttgtagaccacacagtataccgaactcgggtgatttcgca

SEQ ID NO: 59364 - DNA, 316 bp, Zea Mays
gtttagactaaatcgaacgtgaactaattaaatctagaacaacggttagctgattcgctttcctatttaaaaatccgagataattagagctgatattgagtattcataatcaatctgttaaacgaatacgaatttggaagctcgatccgcagttgcaatctgtgtcccaaataaatttattagaactcgacgacaacaatattgatgcaaaaattaaatcggaccgagataactagaactaaactgagtactcataattaatctatttccctgtttaggcttcagataaaattatcggggtttgaatcgaatcaaa

SEQ ID NO: 59365 - DNA, 533 bp, Zea Mays
gtttggtgttacaaaacaaatataggatttacgctaaatttcgtactcatttacacagttttagatcacgttttacgctggaatccgcccgagccaaaacccgtgcacgatcggctgcacgcgattttcaacccgtaattttgggccccatttgctgttacaaaatagatataggatttacgctaaatttcatactcatttacgctgttttagctcacgttttacgctggaatcggcccaagccaggacccgcgcacgatcggttgcacgcgattttcacgctgtaattttaggccccgtttgctgttacaaaacagatataggatttacgctaaatttcgtactcatttacgctgttttagctcacggtttacgctggaatcggcccgagccagaaccagaaccacatactgcatgatttatgctgtcaagtacatgtcgttatgcagtcgtaaacgctgtccacagtgtcatattcgttccacgtgatccgggcgtcaaaagattcctttatgcatggtttacgcatcttt

SEQ ID NO: 59366 - DNA, 353 bp, Zea Mays
accaatggatttttgacacataagcaatctccaccaaataccaaataatgtggcttatgtcagggaaacatgtgtgtggtaagtaataagatcctatcatgaaaatcaatgggcatatgactagcagttttggacgaaaaggcccaaacatgggttttcgttaatatgtaaggctgacaccaatgtattttggaccgataaatggtctccaccaaaacccaaatattgtggtttatgtcaaggaaacatgtatggagtaagtaatagtagactcccactcatgatcaataggcttatggccagcaatttcggccaaaaacggccaaagcgtgagttttatccaatatcgaagg

SEQ ID NO: 59367 - DNA, 579 bp, Zea Mays
tgcatatcccctagtatattcctattgatggctctagtggccttttgctagggtttgggaccagaggatggaggtgttacccatgtgtagagaagtggtccaatggtttggctccaagggtgagcatctttgtgggtggatgaacacaagtttgatgttagatcatttgtagagatagtgaagaaaacatggagtggagcgttgactgtaaaatggtcatagttttgcatatcaaaaccaccattaacataccttacagtaaaatgaaatgaacatattttattaaataacaagatccacttgtacatggagtaggacaaagaaaaaggagaagttggagttagtgggtccatgctagggagtttatccaccaccctactaggccccactgcctccaatcttgtgtggagccatgaaacacatttttaagtgatttccacccttgtatacactttatgtttttttatatagcttacacacaattcacaagtattgaagtacagggatgagggtgtgatgaactttagtaccagtccatttttagaactgatactaaagatatatctgcatattagtatc

SEQ ID NO: 59368 - DNA, 552 bp, Zea Mays
aacagaaaacatggccacctttttgctagctgatcaagttccagtgatcaacattaagttcaaaaatctacaaaacagaaatccctcctcatagtattgctatcaagaatcaaacttcatcagtagttcagtacaggtcatacttcagcataatataaagaccggatgtgatcaacaaaaggacccatctttattacatgcagcagaaatccatgccatacctgtcagcatggtccacagcaagaaagcaggaaaaatcattcatgcacgcccgcaataccatcttgtctcgggcacactagatctgaccgcacatgcacagtgcacttgtccaaacgagaaacggcttgcgtttagctcgagcctaaattccaggatttctacactaatgatcagaactttcccataatttcagtgcatgcatcccaatcctgtgcattcccccgttccagaacctcgagcgcgccacgaaatctcgcctaccgaagaccaaggtgagcaccatgaatgcactaaccagcaaccacgcattgctctccattgcccatagca

SEQ ID NO: 59369 - DNA, 688 bp, Zea Mays
gtatgtgtacatacatgtaaatagtctaagaatgacttattttgcatccactcatgcagccatcgttcctcgcgtacagacaaccaaacagacactcaaagaaagtcaacacaacgtgatggtttaggatggaatggtgcgggtaaccaaccagctggaatgaaaacaacagagaagccgaagtctagagagcgccccggacctaaacttgatcaaacatcaaatcaagttctggacctccaggtcacttctggaccgtgcaaagcgaaccctggaatcacggcccgtgcactattggcctgattggttgccggtccgtcgtgcgtctgcctggtgcatgcggctgtacaatccgagggatgtggggcacaacaactaaacacccgttcagcacccggtcaacgcatgccatgagctttagatgggtaggacctggcaaccaatcatgcggtataggttgacaggagtctttcaggcctggtagtgaatctgcacttcagcagagctctaggtctgcgttgttcatggccgcagcgaggcccatatcctacctttccttactctttgctttaagaattaacaatctcaagatttggacatgaatcaaatgaccttcagtacaccaatgatatgatatcaacgttttgaaacaaatgaaatgaatagtcagtagtgaaccagagtgctg

SEQ ID NO: 59370 - DNA, 955 bp, Zea Mays
ccccgatgcgcgtaaaggggcgacgactggtgaccgccctatcaaaatcaaaggtcgcgatttaatgaataccgagttaaatgtcgttcgcctgatccgagatctacgatgcaaatctaacagcgtgaacgggtatgtgtccatctgatcactaccatctgccaacgatccaacgaccacaaatctctcacgtccctatctaatcttagcctaacatctctgcatcagcggtccatgctcttcccctatcactttgccgaatcacggcggcgccgcccagggaaacacggtggcccattgccggagccacgccaatcggtaccaggaagcgaaatccctctaccccatacttgccccataacttagcggacattgtgaacgtactggcagtgcacttaccaacgacggaggcaccggtagagccatccgtggcgcagcacagtcgcaaggtggagcttagtcgacggtgagaaattcccgcgcctccgccaattctttgggctcgccgaaccaccaacggcaccgcacgaggcttgcgatgcccccggttcactcaccaggccccggatgctaacgtgggtgagatctcatgtcggcaaggctacgctactggtctgactaatcttgcccctccaggttcggttcgtagggaagagttcagggcgagatcagagtgctttcctcgggtatataggcacacggagctcgaggcagcagctggcgcagcggttgagtccatgcgtaaaccgcggcgacagatacacgcgacgccggctagggaggagaaggagagacgtggctgacagccgggacccacccagtcagcgggcgattctagtggaagaggtgcacacatgtgtggatgacggggtgggcccgtgtgccagcgaaacgaagggagtagcgagcgcggcatgagggactgacaacggggaccatgcggtcggcaccaaga

SEQ ID NO: 59371 - DNA, 774 bp, Zea Mays
cgggagtgaggggtggtgcgttgggtttgtaacaagaaggtggagcaaggagaggcatcaatttatagggatcggtcaccgatgccacaaatttgagtgaggatgagcttacgacggtgagtggatgagtcactagagctcattcaccgtggcgctctggtaactcattgacccaggggcttcgatagccgccacgactactgcaaagtaatgaatggactaccgcgtggcacaatcgggagaaccgatggatcaacgacggtgatcctacagcctcgacatcgggcaagtggtgctacgacaagcttgttcgagggccaaagttcacccccttggcgatcttttcaccctccccgccgatatttttacgctccagcacgcacacatctcaaccattgcatggatcacggtgcatgatcatcgacggtcaagtgttctgaatccctgatctttttcagtcactgtacccagccacggccatttcagggtgcctgacagagcgactttagggcccttttctccaatttctatgtgatgagccactaatccgactacatcaaagttattctcctataaacctgcttcaacattgtcataaggatcttgagtagttactcactagatcaagcacaatttggctccaaagttgatcaaataccactaaccgtccaatttcataattctgcttgactgacagcccaactttcagggcgttttactccaaattctacaccattcatgggctaagtaacttaatctaatttttacttctat

SEQ ID NO: 59372 - DNA, 489 bp, Zea Mays
gctgaaccgaggacctcgaagcactttaccatcattaagaaccctcatttcagtttcttcattaggaaagaatagaagaaaatcctcaggctttgcagattggattgtcatgtcttccaacttaatgctgaaacaatgtgccacttcttctaatacctctgatccaaggacctccgacctagtaccagtaacggtgacaagcaaggcccttctcaagtttaattcttcccttgccataccatccgagaaggccaaaacccgagatgttaaatgcggtggggaaacttcaggaatgacttcagacgccgacagagaatgtgaaacagccttgccactgcccagagttcctctgccacctttggaacgtcttctttttttcttcttgttgcagagagagcgttgggaattaccactaggttccagcagacctttctccatcagggcttcaccagcaggggtaatcctgacccacaccgatttcttcttcag

SEQ ID NO: 59373 - DNA, 717 bp, Zea Mays
catttaaaaataatagaccctataccttctgttcaaaattttagagtttaaaattaaaaacagaaacccactaaaccttgtttaattaaggaaaattagtttttcttctgtgctgaacttaagaaaatttgtaggtgtttaaaccccatttagacactgtttaaaaataatgggaaccccagcattgaaaaatatgatatagtttctcatttaaagctgttttgtccaaaacttagagaaaatcagaaagacattagaaattaatgaacagtgattaagattatttttcctaatttacttgtgtaacagagaacctaggaaaaatacagagcctattaatttggaccagttttgaattaaaatgatttatttagccttatatagactgaaaatcaattattagagaggcaaaactataaccaaaatgcttaataaaaatccagtggacttacaaccaccagaaccccactacaaaaatacagagcacctcagcccaactttttaagtaaggaaaataaatataaagtgataataaagcattttccaaataattcttgaataacccctaatgatgcaataatgggcaaccaaaattttgctaagatcataatgtgatgaactaccagagaaaatgcaaacccatgaaaaagaagcaaactcatacctattgctaataatttaaaagaaaggccacttaattcaaataatgcataccac

SEQ ID NO: 59374 - DNA, 1133 bp, Zea Mays
gtccaggggcgggtgctttcagggtagacattacctatctcctttgactggccagtgggccctagttgctagaggcctcttccccagtgtgctcgctgaccaattggcccaagggaccagggtcgtatccccggtagtagccccaagcccttaggggagaatatttccccttgggggctttccctgggtcgggcgttgccttctatcctagcgtgtactttcgcggttttgcgtatttggtgtcgaaacgatgcctccttccatgtgcggcgcttggcatctgacccgttttgccacaccttgtgcctttctataaatgatccctcccttttgtcatgtcttgccttactttctttgttgaggggtgacttctttgatgctctctatggactcagacaagcacccagtggaagagcgcccctagtgttgcatcctctctagcaaaagatggttgattcggggtacgtgaccatcttccttctacttccatattatcgagactgtgttgtacctcatcttcttccttgtgcagctaagtgatctcaataggtcaaaggaaagactttgagatgtccttttgtcagggcggtatccctactctctcgtcgtagacctcctcggacctctaggagtgtttggccgctatccacacggtgctcgaggttgctgatgatgaggtggtcggtctccatgctcgtctagtggaggtggaccgttgtgtcgcgggtcagtattgccctttattttcgtagagatccctttttggttgccttgacctctttgtgtccttttcaaaactagaactagaggtcgcgggcctccgtgatggtgcgaatgagatggtcacctttgtttgagcccagggcaccgatcgaggtgagcgccttcttgatgtcataaactgggcatgcctagccatctatcgtggcgctcatcgtggcaatgttggggaactcgccttcgcgcagttccggtcgggcttcgagcttggtactagcgacctgtcgaaagacacgaccgctggcgccctggaggattttgaggatgactttggtatggccaccgaggtcgtggttgacatcttcccgctggaggatgtaatcaacagatctccttagttatgtcgcggtcgt

SEQ ID NO: 59375 - DNA, 427 bp, Zea Mays
aaccagttgttttctatcatcaatgtgactaagatacgagaaactaagatgtttttcattgtcatcattaagaaaaaacataaatccaaatttaagtacaaatgaaagaaaaagtctctgacctgagtggttgagtgcataacatccgtagactcacctcgtggatcctagaatagctttttagccttttgattgggaaactcagaaacgcagctggaagtgtcttttcaaagttgctgttttgatttctgccttccgaatgctaagtatttgtccagttcggttctgttatgttctgttctaacgtgtaacaagaactattatatagcataaaactcatcattaaaatcaaaagctggaatagctcagttggttagagcgtgtggctgttaaccacaaggtcggaggttcaagccctccttctagc

SEQ ID NO: 59376 - DNA, 619 bp, Zea Mays
gcgttgtatcattacagtggatttaatatcatgtcttagaccatctaggaaccatgtagtgtaatataatggatccttcatctcctggtaactattaagctggtcgacaagttgggcaaactgatcgacatattcagctacagaccccacttgcctaatgtgaaataattgacgaactagcagggcatgttgatctttaccaaatcgctctttaatcatggtgccaaattctgaccacgagagctatggaactttgtgttctacaaactgtaaccacctagcagttgccctagtaaaatgtattgtcgacaccttaatccacacactaggatggacaacatacatatcaaagtaatctatgcaacgcttctaccataacttgtaattttcaccatcaaaactagggaagttgacacggggtaacttgtctaggtctgagtaattagtgtgcataggaatgtgttgccccgcactatcaggaggtggatcccaacgaccaaatggagaacgaaacaaaaattcatgcgtaccattgggcaggaggtgagtgtgggtaaatacatgcccaaacccattctcccaacgattgttgacaaggcggtgcccattggggccatca

SEQ ID NO: 59377 - DNA, 746 bp, Zea Mays
caggtgttacttagagttttcactccaggctacacaagtaaaacccatcatcacatgtgacttaactggagtaaaggactccaaacatggaaatcaagaccctaagtaagtgcaacccatcttgaatgtcatgccttggcttatcatgcacatataatggggagaattgcccaaaacctaatgcaaacccctttggacaattggagcactattagtgagtatgaccaaaaggttataaaaaccacatgatcatgacttgggccaattataacaattgtagtacacctaataccctactaaaaatagtaaggatgtgaccccaaaaaggttttagaaaaaccctaaaaggttcaccaaagggagagacctaagagaaaaatcagaattcttctaagtccaaaaccaacccttttccaaagatcaaacatgttcaccctctttcaaacttcaaaaccacttggcacaattgacaaagtggcgcctaaagacccctagaacaccctggaaaagtttgaacccaaccctaagtcatttgacacgacttggcatagcttttgtctcggtgtggacagctctgacagagccgacttctcgcctctatatatctctagcccgaccgtacccttgcttggaactcacataaaaaaggtaggatttggtgcagggaagagaccgtacacgggggttttgccaagatctgcacgctaaggcgctcaaatcggccgttgaaccatggcagaagcaaa

SEQ ID NO: 59378 - DNA, 283 bp, Zea Mays
gtattttccctggagctatgaagttgatactggaagactatgtaatatgttttgtctcattaagtttcacagaccctagagcaagaaatactacagttaataaaacccatccttttctggggaggacctttcgacggtgctgatctaatttgtgccacttgtgccttctctctcaccaattaaaccatattttcatggccatagcattccgccagctgattgtaacgcccgcaatcaataccagtaagtgcccacacacactagcgttgtttcttgttagcac

SEQ ID NO: 59379 - DNA, 335 bp, Zea Mays
tgcaaggggcgaacccttccctgcgatggttcgccatgcaccgggcgtgattacattgccctttcgggcgcgcgtgtacgcatttgctagacgtaaattttgagcccctaagtaacccatgtggatcacttgggtgttcacgcagtttaaggtaaggactctttcctgtggtggttcgtcacgcaccgggcgtgagttcatcggggccgaggccaggtgcatcctctggcatccatttctccggtcggcgctttgattccttttgcgcacgtgtctcccctcgagatgattccttcggaatccttgtgaagggagggctcccctccttcggccta

SEQ ID NO: 59380 - DNA, 1058 bp, Zea Mays
tggatggaatcccccacagaccaggaggtggctgaggcaggggctctgctagctgaaattggattgttgaaggacatgggtctgactgcagaggctgtggttgctgactttgtcttcaagaatattcagccattgaaggacaggacatacccgacctatctgtaccgaggcctagctgactcaacccgggtaaccaacagaagaatttctgttgtggactttgtgagccgactcgaaatgatactcagaggcaaggtatcaaatgttggtgcccctgttgcgtactcggcctggaacctgccaccttccaaggcctttactcattttgtgtcaaatcctcctactagtgatggtggtttgggccttagagtgcgaccctctgccgaagaagttagtgctttggttgcttcgcttgaagaaattcctgatgatgaacggcaggttcactttgaggtgcctttggatcccagtgatgcagaaataagtgccatgcttgatatgttagccgaggattcttctgatgccgctcctgccggaacattggtggtgacgcctctcccagaagctagtaaaaccttggatattcagaggtctgacagtgttcgcccgaagcgcccttgccgagccaatcagcctgctcctcctgctgatgggcagaaaaagaagaagagacgtcttcgccgagtgtctagcttggatcgggatgctggtccttctgctcctgctgctgaggaagtgcccgtgcctgaatttactgaagctaatcccaatgggtgtgacccgtcttacgctgaccccaatgggtgtgactcatctgacgctgatgccaatgggtgtgctgtccgttttgttgatgaggatgatgaagaagaggatgaaatctctctgattcagaagaacagccggcgttacgtagctagtggggaaagtagtggtgttccttctcctgccttgtctgccctcattggtctgcaagaattatctctggcgaactttgatcaaactcttgaagacatggttccagaggatctgttatcagaaccgacagatggtggcgc
